United States Patent Application Publication US 2012/0017292 A1 - sequence listing, part 7

SEQ ID NO: 25015 - DNA, 930 bp, Zea mays
  Peptide Sequence Number=SeqID_68390
atggggagaggcaagccaggctgtgatcttggtcccgccctcagcctcaaggatgttcatcatccttgctggggcggagagcgaggcgagccagggctctacctcccgcgcgggccggctggccacctcttcttccagcttctggtggtggcaaccatcctccagctctgcggaggagacgtcctccagccatgcaggggaaggcgaactgttgctgcccagctaggatgcaacattccgccctctacctcgctttcgtggcgaggacgggagcgaggacctgccggtgcgctttggagcggcccgctctttggctttgatggctggttcgcgtcccttgagcgggaacgcgaacgagagccttccggcggccacgtccgtcctgggaccatggctgctgctacagaggtcgctggtgggtcacccggtgctcgtcgccccgcaggctccccggagtccctcggctcggtcagccttgttgcccgaggcttctcttgctcagttaaaggaacccctcggccgctcttcgatgagccgaggccaggggtagcggtgtcaacgcgaacagaggcagagttggctcgaaaagaaaacctggtcggccggagcctgttcgagtcgtccgttagcgggaccgacgccggagttgacctgccgaggcctcgggtcgggctgatgtcctcggagggcagctggccgcggccccggggtgaccggccgagccgcctgcttgggccggattctcggagaagaccctggcggcgatggcccaggcttggtgatgacgttgtccttcagagcagagacccttggaccgcgtcgccgtccgaggctgggtcggacctcgccgaaggtgttgtcgacgccgagggtgatgctgctccctttagccgtcaagatccgagcctgcaggatcggattatcttgtag

SEQ ID NO: 25016 - DNA, 495 bp, Zea mays
  Peptide Sequence Number=SeqID_68391
atgacctcagctacccccgccagtggaggagacacttgtttcagctctaactttctttctcacgatggattaccttccatcttgtgggaagtgcttaactccaccggttaccctacgccccctttgtacacggtgcagttgtacgaggagcatcggccgggttggcattctattgactccgagacggttggattcaggatggatgacaccactgaagcggcagccatgaagactctgacaactttctgtggctaccatcccttggagatggtgatgcaccccttgggactcttccctgctgagaagaaggatgaccccatgtggtgcaaccttgtgagccttgtgaaggatgtgtgggcaatgtatcctgacttggttgggagggtcactattcagtgcatgagtgtgttgtaccgccttcaggccctgcagagcaacgctatggcacatcttgctaacatcgctcaaaccaccaagctcaccctcgaaagatga

SEQ ID NO: 25017 - DNA, 405 bp, Zea mays
  Peptide Sequence Number=SeqID_68392
atgggcgtgagagaggtggaaaccccgcggccttcgtgttcgtcccgcgcccaggtcgggcgtaaggagaggatccaggtgtacaatgggggctggtgtgatgtcgtggccgtcggaggagcgctggagcttagcggagggacagctgtcggagttgttgagtccttgctgaaggtgatgatggcgcctcctgttgacgtggctggtctgcgcgctaggttgggcgatgtggaagctcctctgaggtcggggtcgaatctgtcttccgtggccgtggtcgagtccgagcccctgggtcgggcgaggcggagaccgtcggctgaagccagggctgagtccgagccctggggtcgggcgaagcggagttcgtcgtcttctggggctgagcccaagtccgagccctag

SEQ ID NO: 25018 - DNA, 552 bp, Zea mays
  Peptide Sequence Number=SeqID_68393
atgtttgccgagtgcttgacgctcggcaaaacagtctttgccgagtgcttggctgtgccgagtgccctgcactcggtaaacaagatctttaccgagcgcaggactctgccgagagcggccctcggcaaagtcgactttgccgagtgcccgataaaaagcactcggcaaagccgccggcactcggcaaagagccgaattccggtagtgttggtctatattcagttcaataacaggctgatgaataacagagaaaagattaagtcaaagaaaatcactgatgttctcttgtctagtgatacaactgaagctcaaggttttctccaagagggtggagatgattgtgcacaagttgtctttagagatgaggaggaagatgagatggaaggtacagggataccttggtctgttattggagaggcagtgggaacagaagaacagcttgagcctcgtagaagtgcaagagtgagagagctctatgaaggagaagagtttgagtctgaagaagaagagtatgaagatgaagatttgtgctacagtgaagatgaaatatga

SEQ ID NO: 25019 - DNA, 771 bp, Zea mays
  Peptide Sequence Number=SeqID_68394
atggtcacccaagacggtgaccaccagttcgatggtggggagaagcaagccaggctgcggcctctgccccgccctcagcttcaaggatcttcatcatccttgctagggcgaagggcgaggcgagcaggagcctgccttcgcgtgggctggcgtcccgcttcttcctctggcttctgggggtggaaaccatcctccagctctgcggaggaggcgccctctagccatgccggggaaggcgaactgctgctgcccagtccagggtgcagcattccgtcttctgtccgggcgacagtggccagccgcatcggggggtctcacaacacgtcgtacgccgcgagggcggacgggagtgaggacctgccggtgcgctttggggcagctggcgcccgctggtgcgatgttggtgggcaggtggacgccgccgctggtgctgaggtggtggcagctggagaaagcttctccgccgacgagaccgtcagcgccacccgcggacctacctccggctctttggctttaatgtctggttctcgtccctcgagtggggacgcgaacgagagccttccagtggtagcgtccgccctgggaccatcgctgctgctgcagaggtcgctggcgagtcacccggagtttgtcgtcccgcaggctctccgatgtggaggttgttcatacccgcgggagtggaaccagagttccgtttgtaatggcatcttgagtgtcggtgtctattcattatggttgtcggggcctgaacatctgggtatttgggcgtga

SEQ ID NO: 25020 - DNA, 423 bp, Zea mays
  Peptide Sequence Number=SeqID_68395
atgcaggcggcatgcaaccgcaccacggggatgcaccctttcgactttgacgcgtccagcatggagtcccaggcccacacgtcatgtaactggtgcgccggttactatgtgcgaagaattgcaccgccacttgcgccagtgccacgcctcctcgactgcggagtcggtgccgtgactcaaggcaaccctgcgcgtggaccaacagtgctggccaagcacgccggtcacggggaccgggaaaggggatactccgaaagggatccttctgatcagaggttcaaaggctggcccctcggaagggttcgacagccgcctcaggccactcgggctccacgcccactactgattagaggttcgaaagctagcccctcggaagggttcgacagccgcctcagagcactcgggctccgcgcccactactga

SEQ ID NO: 25021 - DNA, 294 bp, Zea mays
  Peptide Sequence Number=SeqID_68396
atggcgctttccccctcctccttgcggaaaggcgacgaaggggcgtatgataaaagccgagtcaaagctccgtccactcaagggacacgttctcgcctcgcccgagcccagcctcgggcaagaacagtagaccaaggtgaattcaagcttcgcccgagggcctcctcaagcaacgggcgcaccttcgactcgcccgaggcccagctcgggcaggcttcgcagagaagcaaccttggccagatcgcctcgccagccgaccggaacgcaggagcattcaatgaaaggatcgcctaa

SEQ ID NO: 25022 - DNA, 2889 bp, Zea mays
  Peptide Sequence Number=SeqID_68397
atgagcatgatcgacgtgatcacgcgggtggacgccatctgcaagaagtacgagcggtacgacaccgacaagcacggcgaccccttctcgcgcctctacgctgccgtggacgccgggatcgacgccgccatcgagaaatcggcgagggccgcgaagaagaagaagaaccgggcggcctcggtgaccctggacgccgacgtacggcggaccaaggcgcggctcctggaggtggtggtcaagctacagaaggtagccgccaggaaggtgaacgggctctcgccggaggagaaggtgtcgcgggctggtctggtggccgcgctgccccacaggatccatgccatccccgacagccacggcggtgaccacaacggcaggagaggtattgaagacaaatcagaaatcggaaacagggttcgtcccttcgctcgtcttcctccacggagcggcatatcggtgcgtcaccagctcctcacgtcccggctcaccatcggcggctacggggacgtgacagttggtatcagaggtagtcgattctcgacattttcctcggtttcgtccttggtgctcgcgacgatggctgaggcggcacaacgggatgaagcgcgctgggagttggttatgaagaagctgagttgtctggtccagaagatggagtcgttggtggggggtcaggcagatctagcagcagcggtggcgcagcaagcggcggaggatctgcccgttctgcctcagttcgttcgatctgcgggcaataccacgacgccagtctttgacgagggacctgtcttcgacgacgagctgcccatcgacttcggttcccaggggaagaccgcgtccatggcggcagcaagcgccatggaggtccccggatccaccccgacgccctccgtccccttatacgacagcgtcgacatcttccacctcaatagtgaacccgtctacgacgtctacgatgacgacgaggatggcgattcgtcgcagcaggccgtggtgctcgctgcggacaagaactactaccccaccgctgaagagatgtacgggccgggcatggaggcgcttgtcatggacgaggtcgagcaaccgctggagcagcccatcgtcgcagacgcgcttgcgctgctcgaggagatgcgaggcaaggggtaccatgctgacgtgatgaggtacgatgctgtcaagctattcgatgaaatggccagggccagggtcaagcccgacgagcgcgtgtattccctcacaatcagggccttgtgcaagctgcgcgatgcagacaggacggtccaggtgctcggggagatgatggaggtcggcttcaggccatgggtcttgacattgacatacaactttgtggtggctgtgctcgtgaaggcaggaaggatggaggaggcactaaaggtgaaggatcagatgttgttggttgctggaaagaagatggatgtggttctcgcgacaacattgatgcatgggtattgcttgctcggtgaagttgggaaagcgttggatttatttaacgaggctgtcagggatggtgtgacagcaaccaatgtgacatatgcggttctgataaaaggttgtgatgcagaggggatgacagataaggcatatgagctatgtcgtcagatgatagagcagggattgctgtcaagcacacatgggttcaatttggtgataacaggtctgttaagagacaagcggtgggaggatgccatcagcttgcttgaggttatggttgatataccttctgccggtactgcggctaagtgtgaagagcttgatatcatgacagaatgtgttgctcaatgcaatcttgtcactgctgtgtcctctgattttcatcctgaattcatctgtctgtttgtcaaaaaatttggtggctctttggcagtatcaagcaagagagtattgtttctcagttggggctacatggaggagtatgaggttctgattccatttcagttgcttcaggttcgtgagagccaagtaaatgatgtttgccaggacatgggtgtgggagataagtgcttggctgccattcatgactttggcgatgttcagggtgtagatgaagcaaaggaggagcttgttgagatagtgagctgtctgcatggttcactgaactccaagaagcttggagcaaaattgccctggggtgtcctgcttgttggccctccaggaactggaaacactcttctagcatgggcagttgcaggagaggctggaattccatttttctatgtttctgctagtgagtttgttgaagcttttgttggaagaggtcttgcccgtgtcagggaattgttcaaggaagccaaagaagctgctccatccatcatttttattgatgaacttgatgttatgggtggaaatagaggtagaagttctaacgatgtgagggaccaaactctaaaccagctaattgcagaaatggatggttttgactcggacatgaaagttattgccatggctgctactaacaggccaaaagcactggatgttgctctttgtcggcctggtcacttctccaaaaaggaccgcaacggcaggagaggtattgaagacaaatcagaaatcggaaacagggttcgtcccttcgctcgtcttcctccacggagcggcatatcggtgcgtcaccagctcctcacgtcccggctcaccatcggcggctacggggacgtgacaggcggcagcgccacagaccaggacgccggctggaatgctcggccggggatcgagctggacgattattcagctgaaagattagaagaggggtacttccagacaagtgaggagtcagagcagttcagacgagagtacgagatgcggcgaatgaagcagacaggtcttcctttccctgccgcggagactgctatttctccttctgagttctga

SEQ ID NO: 25023 - DNA, 597 bp, Zea mays
  Peptide Sequence Number=SeqID_68398
atgtccggtgaggagttcagcgtgaagtcccctggtgcaccggacagtgtccggtggcacaccggacagtccggcgcccgtgagcaggagagccctggccgccgtggcgctctcgagccggcggattggcggacgtggagggggcgcgaggaggaggagcctcagcgtccgcggcggtacagcttcaggaggcaccggtcgggcgcggcggtggtgttgttcatggtgctggcggtcgtggtgctgctgggcgtcgtggccgtccttgtggtggtgctgctgctgcagccccgtgcgccgtacgtggcggtgcgggcggcgagcctgtacgcgctggtgtacgggcagacggggacgctggacgacatgcagggcacctcgctgggcgacgccggcagcgccgccatggaggccgcgctccgtgacggcgtggtgctgttccgggtggagggggaggcccggacgcgatggaaggtcgcggggatcgtcggcgtcgaccagtggacgcgcctggcgtgccagctccgcttcttctggcccaacgacaccgtgctccccttcagatgcagctccaagtccaagctcttgttcttctga

SEQ ID NO: 25024 - DNA, 111 bp, Zea mays
  Peptide Sequence Number=SeqID_68399
atggccatgatggggtcaacatcggaaaagatgtacctctgccaggaccgtaccgatgtaggcttcatgatcgaggaccttttaactggccacatgactcatcatgggtaa

SEQ ID NO: 25025 - DNA, 297 bp, Zea mays
  Peptide Sequence Number=SeqID_68400
atgagcttgacacaactaaaagggaagtgcattgctcaaccttctcaagataaccgtgatcacatggtgaagaagcttgagacgggaacaaccgtggcatgcactaaaacccttgaagaaaatgtcaaagacttgaggattgtcaagaggaaggaacaaaagaagaaaatcaatacctcttccaaaagcctcaaccacgcctccataaaaggtaacatccaaggcaacccaaaattgcaacttgtgctagaaagatatagagagatattccaagttcttaaaagaggtgtcatgtaa

SEQ ID NO: 25026 - DNA, 379 bp, Zea mays
  Peptide Sequence Number=SeqID_68401
atgactcagtcgaactggtccctcggggggcaaatgttggggcgaaggcgaagacgctacccttcgctcgatgccttcgccaatctcgctgcaccaacggaggcaaaacaactggcggtctccacccttcgtccaacatgctgcaggacgaaggcctacgacgaggtcgcaccatcccgcgccctcgtccaacgcgaaggcccatgtggaattcggcccattgtaacaggccccgcgtggctgctgcgggtggaagtggacctaacaaatccaaaccccacctttgcagtggccaagttggctgtattaactgggttagagacgaaggttgcttctggtcctttgcacatctttggcaattttcacatttttgaaccag

SEQ ID NO: 25027 - DNA, 261 bp, Zea mays
  Peptide Sequence Number=SeqID_68402
atgggcagcgtccctggcgccattaacccaagtatgaaggacctcctccgcctcactttggtctcctatgtgcgccgcagcaaactaatttcgggattggggcgtgtgggaggaaatcgcatgggcgccggcgagcttccgccgtggctctggttgcgtcgccactcggcttggattggggagggagataggtcgatcaccgttgatcttggaaggaacggccaaggggcggttagagctgtgagaggatatgaaccgtag

SEQ ID NO: 25028 - DNA, 2709 bp, Zea mays
  Peptide Sequence Number=SeqID_68403
atgggcgggaccgaggaaggtccttcgcaggatgctgccccgaccgctaagaggaggaaattaggtactacggtggggggagtgggggtgtctgataattttgctgtggagttgatggggacatgcgcggcccccgggggaaggatgtcttcgcccgagctccgggagtcttcggcgcgaatactggaggttaccgggggtcgatggccaaagaatcttctgatcccctgggcggagggcgaagacatgtctacatctcgtatagctcgtggcttgaggattttcccttacggatggaatattgctgttgttgtgtcggcagtgatgaacaaggaccgtcaggacgctgcgcagaagcgccgagcggtcatcaggatcgcagatccgaggcatgaggcgaagaaggcgcgggggagcgcgaaggctgcgggccccggcagcagccagccgatgccggctgcgaaaccggccgcgcccggattcggcaagtcgtcggcgagcgcgaagacagccggcgtcgacgggaccaagcctcccccggccagggctgcgaaagtacgggagctgccctcgccgggaaaacgtgttgctgacttcggcacgaatatcagcgtggaggactattttgttgggccgggcgagggacaaatggttgttgtcccgcctttggtggcgaccactttgccatcggcggtggtaagggcgagggtagccgcacaagacccgtgggccactttctgcgcaagcggcgagattctgacagccgctgccgctaaagacgtggcgggcaccatgttgcagcgactgagggatgcatcgcagcggctgtcgcagcagctgagtcaagcggccgacttcaccgaccgtgttgcgtctggcgtcctcactgcagatgtggctgccaaagttgagagacttcggacgcagcacgcggacgccgtccgggagaagtccgctgcggagagcgaaaaccgcaggctggcggagaaagtggccaccttggaggccgagaagacacacctccggcgccagctggtggaggaaaggaaggaggcgaaccaggccatcgctgaggcgcaggctgtgcaggcggaggccaaagtggcacaggcggagggtagtctcgccagccagcgcgccgaggagtgggagacgaggttcaacgccctgcgcggccacgtggacaaggccgaggcctctacgcgctcagaggttgagcggacgctcgcccagttcgtgaactcgtaccgcgagctgggtgcgcgtactgctgacttcgaggtgcccgatcgggaagcgggccttcgcttcctcgagtggttacaggaggagttgctggtactcccgaccatcatcgagggtttcatgtcctttgcctccctcgtcacctacgagggggccatgaatgcgttgtctcgcgagggctgtagacactacgaggtcttcgaccagttagacgagagctttgagcgcaagatcttcaaggccgaagaccctgttgtgaatcagtcagcgggggcactttttgataggatgtggggggcgcatggtcgggaggctgtcagggagcgctccgaccgggcgagagagcaggtgaagatggagcgtaccgaggacatcgaggaccttggaggtctggtcggcgcgccgcccgaggttgcggagggcaatccggtgctgcccttggatgccggtgaaggcccctcggttgtgcccgtgcctgccatggccagcgaagaccctgcatcggcccctgcgccgacggtcgaaggtgccccagaggcggtggcggagccggcagtcgaagacctcacggccgcggccgtgccctcgcaggttcagggttttgggcctgcgcacgcaaccgctactaacaatgctaattttgtggcggcttcgatcgtggttgctaaaaatgattcggatgattctgtgtctaagttttttgagtctgatgcttctgggagtttggatgtgtggacggaagagtcttcagatgaggacttggattattttgcggcattggatgtggctgcggcggaggcttctccgcgtgtgatggatgatgaagttcttcctagtccgagtgctgggcgtaggcagcgaagggcggtggcgaagcggagagtgagtgaggtggagtgtggtcgtcttcgtgtggacggggctagcaagcgggaattgttgtcctcgccggttggggcgagtgtaggtgagggggagttgcgaaatctttttgagggtgaggagttgaggacaatgttgttcaactacagggagatgggtatcatcccgaaggttgagccaatcccggctgcacccgcaggcgacttttgcacggggagtcttttggagaagacttcgactttccgcacttattgcgctagtccggctgcacccgtaggcgacttttgcagggagagtcttttggagaagacttcgattttgcgcacttattgtgctattccggctgcacccgtaggcaacttttgcacggagagtcttttggagaagacttcgatttggcgcacttattgtgctattccggctgcacccataggtgacttttgcacggagagtcttttggagaagacttcgatttggcgcacttattgtgctattctggctgcacccttaggcgacttttgcacggagagtccggctgcacccttgggcgacttttgcgcggagtgtcgcacgcgagggtag

SEQ ID NO: 25029 - DNA, 942 bp, Zea mays
  Peptide Sequence Number=SeqID_68404
atggagaagcagaaatccctgaagtcttggctgtcaaattgcttgtcattgtcaactatgagctcaggcgggactccgaaccagcaaacaatgttttgccagaagaatttctgggcagtcttcgatgttattgtggatactgccctcacctcgatccatttgggccctaggccctgcgtgagagccgcaagtcccgctgtggacttcgcgcaggatttggatgccttcggcctcggtgacacatttaagcatgggttggctgacccccttcttgtaaagctggccgtcgacgagtgtgaattcccggcttcaatgtttgaggcgcttggcctcgttgatatcgattggatgatagtacccctgcaggaacagggttattggtgcccgccagtcttcggtcatgatgaggttgactatgcggtggccctcgctgtcattggttatttggaggccctctgggctgcggacggctggcgtgccgatgacatggtagaatacgtcggagggcagggcctcgcctctggcggctaccttggccaatgcgtcggcctcctcattcttggctcggtccacgtgctacaaggtgaaacctttgaattgcctctcgagactgcggatagccgcgaggtactgcataagtgcggggtccttcgctgcgtaatctttctcgacttggccggcgactaccttggagtctgttctgatgatgtagactccaaagcaaagctgaggcgtgctgcatatctgtgcttgacccctgtgggtgaagtaatgactgcatctgcgcctgcccccgcatggcaccatgcgccgtcgcaatggatggtccacaccttctctgcagacgtgtccggctacgttattggcccggtccagtcgacgatgaagtctgccaggacttgtgacttgatggctgtcctgggctcgaatgtgatatggtag

SEQ ID NO: 25030 - DNA, 1164 bp, Zea mays
  Peptide Sequence Number=SeqID_68405
atggcgcctcctgtcgacgtggtcggtccgcgccctaggttgggcgatgtggaggctcctccgaggtcgaggttgagtctgtcttccatggccgaggtcgagtccgagcccctgggttgggcgaggcgtagaccgtcagctaaggccagggctgagtccgagccctgggtcgggcggagcggtgtttcgtcgtcttccggggctaagcccaagtccgagccctgggtcgggcagagcggagttcgccgtcttccggggcttagcccaagtccgagccctggatcgggcggagcggagtttgccgtcttccggggcttagcccgagtccgagccctgggtcgggcggagcggagcggagttcgtcgtcttccggggctgagcccgagtccgagccctgggtcgggcgaagcggagcttcctatggtgcatgtggccaggcctgactgcctgtcagcctcgctctgtcaagtggcactgcagtcggagcggcgcaggcggcgttgtctttctgtcaggccgctttatgctgatgggggttaccagctgagaattaggagacttgaggaagtggccgacacactgctcagattctttccgccctttcagagagaccgtcccgtttggatggccaggatgcgtgcattggaagggaagcagctgcttgaggatgaccccacagtcgtgtacctcactgcatacctgctcacccttgatgcacagtatgatttcttggctcggcaccaccatcagatgattgctcgagcagaagatgcagagaagctcaaccgtaagctccatgtggatctcaccacagctcaagcccgtgtagctgccttggaaagtcgtgaagtcattgctgttgaagccctgaagcaagccaaggatgagcatgtccagaagttgatggaggcctacttggtcacccataaccaacgtagagccctgcggatccaagagcccgcttcatccaacccagttcaacccaggagagctgaagatccccagattcttgaaggtcaccctatctctatcagaggagagaagaaggcttgggaactcccggaaggagccatagtcttggaaggaattccagtcttccctcaggctatgaataagaaagagcaccccgagtcctcccaagatcccctgccagagtttgtttga

SEQ ID NO: 25031 - DNA, 165 bp, Zea mays
  Peptide Sequence Number=SeqID_68406
atgctggaccatctcgtcgggctgctgaagctgcgcgtggtgaggggggtgaacctcgccatccgcgacctccaatccagcgatccctacgtcgtcattcgcatcggcaaacaggtggggatgagaaggagaggcatgggtttgttggcgacccaggcatggtga

SEQ ID NO: 25032 - DNA, 222 bp, Zea mays
  Peptide Sequence Number=SeqID_68407
atgtacttgcggtgcaagcacgggcggcgcgcgctgacggtgtcggagcagtcgggcccgggcggctactttctagtccagacgtcgcggcaggcgtcggtgttcacgagccagcagtgccgggtgtacgtgcctgcggggtgcccgactccccgaccggggcgcagggggctgccgctcgagtttcaggtctatattttaggcactcaacttctattttaa

SEQ ID NO: 25033 - DNA, 78 bp, Zea mays
  Peptide Sequence Number=SeqID_68408
atggatcgtggccacggatataggggtgggctgagccgcagctgcaacgacgtcggcgagatccccggaagattttaa

SEQ ID NO: 25034 - DNA, 573 bp, Zea mays
  Peptide Sequence Number=SeqID_68409
atggcaaatttaaacataaccaacatcttggagaagatgatagggaaagataaagactacagatatatggcaacatcagatctgcttagtgaattgaataaagaaagcttcaaagctgatcaagaccttgatccaaagttaacgattattgttcaacaacttgaggatgcttcgggaaatgtttttggtttagctgttaaatgttgggttggggtttcgatcttacaagctctttttgttaaggaacgcaatgcagtgtgtgatgcaataaaggaagaacatcccaacctatcagacgaagaattatatcggtatgctagattggtcacttctgctgtcattgcaaaggttcacactgttgattgggctgtcgagcttctcaagactaagaccatgagagctggaatgcacgcaaattggtatggtttattgggtaagaaaataaaagatacatttggtcacataggaggaccgacattaggtgggctcgtggggttgaagaagccgatcaaccatggcgtaccttattctttgactgaagagtttaccggtgtttacagaatgcactcttaa

SEQ ID NO: 25035 - DNA, 252 bp, Zea mays
  Peptide Sequence Number=SeqID_68410
atgagccgagctcccaaggaacatgcccacgtagtagccgcgggtggcgtgggtgggcagctcgtgcaacgacagactgtgcctcctactgatgaactcgctcaccttgctgtcgctgtcgcaggtgaggttcgagaggacctcgtccacgccgagtcgctcctacaatcgttggatcgagatgatggggaactgctgccgatggcccacatgtccggtagggaggtggacacggacatgttgatgtggtag

SEQ ID NO: 25036 - DNA, 273 bp, Zea mays
  Peptide Sequence Number=SeqID_68411
gaaaacagcgccgcccgccctgctccggctgctgtgccaaccacccgggcgaaaccgacaaaggtcaagttcagcctcgggcgcaacaagaagctccgtctcgcccgaccccagggctcggccctcggcctcggcctcgggaaagaatcaagtcctcgctcgaccctgggtctcggccccaacctcggcctcggaggagtcgccgcctcgcccgacctcaggctcggatcaaccacgccacgagggatgcatcattaccctactcctagctag

SEQ ID NO: 25037 - DNA, 852 bp, Zea mays
  Peptide Sequence Number=SeqID_68412
atggagggttccaattccagctcgcagccgccgccgttcctcatcaagacctacgagatggtggaggacccggcgaccaaccacgtcgtgtcgtggggccccggcggcgcaagcttcgtggtgtggaacccgccggacttctcacgggacctgctgcccaagtacttcaagcacaacaacttctccagcttcatcaggcagctcaacacatacggtttccgaaagatcgatcccgagagatgggagttcgccaacgacgacttcgttagggggcacacgcacctcctgaagaacatccaccggcgcaagccggtgcacagccactcgccgcagacccaggtgaacggcccactggcggagtcggagaggcgcgagctcgaggacgagatcagcaggctcaagtacgagaagagcctgctcctgacggacctccagaggcagagccagcagcggtgcgggatcagctggcagatgcagtcgctggaacgcaggctggcgcagatggaggagcgccagaggaacatcgtggcctccctgcgcgacatcctgctgccggtcggacacggggtcgtttcgtgggggtcggcgacgggggcggaccacttcagcaagaagaggagggttccgaagatggacttcttcgtcgacgaacccaaggtcgaagaacagcaggtgccgttcctgcagacggtgggcgcggagacgccaggcatgtctccgatccgccttctgagcgccgagccgtttgagaagatggagctggccctggtgtcgctggagagttttcttgcagagggcaacagcgcatacgtctgctgctcaaggcatgttgtacgccgctggtgttgctga

SEQ ID NO: 25038 - DNA, 552 bp, Zea mays
  Peptide Sequence Number=SeqID_68413
atggagtgcggcagttcctggcggctcccggcggtggtcgtcggcatccttttctgcgcggctctcttctcgccgcccgccgtcgcgctcaacatcgccatccagtccgctggcgacggggtggttgatggcatgttgggaaggcgggagaacccgggagaacatgaagccatgcggaagatgaaaaatgagtttatggtgaactgggatggtctgagaacaagggagaaagaacgtgtattagtacttgctgcaactaataggccatttgatcttgatgaggctgttgttaggcggcttccaaggaggttgatggttaatttgctagatgcatcaaataggagaaaaattcttagtgtaatactagccaaggaagatatggcagacgacgttgatctagaaactatagctaacctgacagaagggtactcaggcagtgatctcaaggatttgtgtgttactgctgcacaccgtcctctatggcctcgggtcgcgcggtcggcctgggcgcgtcagcgtcgattgttaaagagtgcattcattgcaccatag

SEQ ID NO: 25039 - DNA, 312 bp, Zea mays
  Peptide Sequence Number=SeqID_68414
atggcttacgagatagctcggttcacgcgcggtggcgggagaccgaagtccggcgagggcgattctgctcctccggtgaggcaatgcctcggctcaagcttggagaagcttcacagggtcttggggaagctatccaagggcttggtggaggctgaaggcctcttgaaatggctggccatggtggccggcgctcgggtggctcgggcgggtggcgcagggctcgccggagctaagggaggggtgtctggccagcgagggcttatgggtttcgctgactggatcaagagatatggagggatgaattgggaatga

SEQ ID NO: 25040 - DNA, 342 bp, Zea mays
  Peptide Sequence Number=SeqID_68415
atgtggcatttaccccctgcgctgcccaattcgctacactcccgcgcgcccacgccagacaagtggggcccgtgcgtcatgcaccatcccacgtcctcgctgaaaccctggccttacactgcgctctgggacccaccgggcagtctctgggccgccgcgtctgactccgtcttccccgcgctctattcctctgtaacaaaccgcgcagcgctcgccgccattgtcgggggtgcatgggcgaccctctcccatcccgtgtcgggtccgcggggaataaattatgccctctgcgcacttctccacttccacgactacctcgcgccgaccctagccatcctctaa

SEQ ID NO: 25041 - DNA, 942 bp, Zea mays
  Peptide Sequence Number=SeqID_68416
atgtttgccgagtgccagggagcactcggcaaagaaaagcgaccgttacggcgccgggtgacgaagacggcggctttgccgagtgtcaacggtgacactcggcaacgaagctatctttgccgagtgtcttccaggcggcactcggcaaagcggccttctttgctgagtgccagttgggacactcggcaaagagcccgccagggagggtccccatgtcaggctctttaccgagtgtcccaagtggcactcggcaaagccgacctctttgccgagtgtcccaagtggcactcggcaaagccaacctctttgccaagtgcccgcgacataacactcggcaaagaacctaagccggtgcccagaatttccgagcataagtggaaaaatagctcatacaaaatggaaatggcagtgaagcaatacggccacttacagaacctgataagattgttaagaatcaaactttttgagagaatgagagttgacatcgttcagggtggtcctgacattgcaagattgctggacttctcgccaaccacagataagaggctgtttaggagagctctcaaaccagctacgcctctagctcctgcaggagtccttccaaacggtgtaaaaaacagtttgcaacaaaaagcacttaagagccggaggcagtttttggaggctccaagcttcgtcacgcgtttactttggtcagaacccggcgcgcgcgtgggcctgcagagaggtgctgtacagcgtcttcgttcctttgcctgggtctctgggtctgcgtgtttgacatcatggcagcctgcactcagaatagttccgcttttcgtggtgcacgttgaggttccgccgcggtgtgctgagattggtgtgtgccgcccggccgtttcagccaaaagtttctttggtgtggtgatccgaatggccatagacatggacgtcttgtattaa

SEQ ID NO: 25042 - DNA, 354 bp, Zea mays
  Peptide Sequence Number=SeqID_68417
atggggggtaccgggtcccaagaagtacctcttggggatggtaccgggtcccaagatggtgggggttggtcttctcctactctaaccggtgcgggtttagaaattccatccaaaacggagggcagcaaggctcccgtaggtggcggcgaccatcagcggagtgtgaagcgtcggcaagaaactcaatccctaggacatagacacgggagaggagaagggaagcaagaactcacaggagaaaagagccctgacgaagagggcggccagcggcggaagaagccttgcgtcgccgtcgtctcgaatcgcgccactgctcgcttccgcaccgtgggcggcgcagtgtggccgggatga

SEQ ID NO: 25043 - DNA, 615 bp, Zea mays
  Peptide Sequence Number=SeqID_68418
atgcaggtagcatgcaaccgcaccaagggggcgcaccctttcgacttcgacgcgtccagcatggaggcccaggcccacacgtcatgtaaccggcgcgccggttactacgtgcgagaaactgcaccgccacttgcgccagtaccgcacctcctcgactgcagaaccggagccgcgactcgaggcgaccctgcgcatggcccaacagtgccaaccgagcacatcggtcacgggtcagtcagccgcgggagaaggcgcgacggtcgatatggccagaagtgggccgacattaatggcggcagcaggcgagcggaagcggcgatcaaatcaactgcaggctcacgtcccctcctggagcagcaggagagccctctcccacggcgtgaagacgacgcgcccgacaggcggcacctttggcaggcgaagcaggcgacgcttcacctccgccatgatgaccgcgtcaaaaaagggaccaggaaaggggatactccgaaagggatccttatccacgaaggaagcgggccccgagcccccctactgatcagaggttcgaaggctggcccctcggaagggttcgacagctgcctcaggccactcgggctctgcgcccactactga

SEQ ID NO: 25044 - DNA, 516 bp, Zea mays
  Peptide Sequence Number=SeqID_68419
atgggcgcgattccggtcaaggctccgtccactcaagggacacgatctcgcctcgcccgagcacagcctcgggcaggaacagtagaccaaggcagattcacgcctcacccgagggaaaacagcgccgcctgccctgctctgactgctgtgccactcgccagagtgaggccgacagcagctaaggccagcctcgggcgccatatgaagctccgccttgcccgaccccagggctcggactcaacctcgactccggaagacggtctccgcctcgcccgaccccagggctcagactcaacctcgacgccggaagacggtctccgcctcgcccgaccccagggctcggactcaacctcgacgtcggaagacggtttccgcctcgcccgaccccagggctcggactcaacctcgacctcggacgacggtctccgcctcgcccgacccccagggctcggactcagcctcgacctcggaggagccaccacctcgcccgacctcgggctcggaccgaccacgtaa

SEQ ID NO: 25045 - DNA, 297 bp, Zea mays
  Peptide Sequence Number=SeqID_68420
atgcagtcacaaaagaatgcgttgctccagtatcaaataacacatttgcagaatggtactcgactaaaaacgtacctagtgccactcctggagtctcctggactgtgtcagcctccaagtgattcacctttccatactgggcatgaggaagatggggtgcctggttgctctgatgctgatattgatttcctccctgctggttattctgacagtactactgctgctgctgaggaaactgcctctggtactgctggtgctggttctgacgctgatgctggtgctgatgaccttgcttga

SEQ ID NO: 25046 - DNA, 183 bp, Zea mays
  Peptide Sequence Number=SeqID_68421
atgcccatggatgaacaaagagcaaatcttcaacaaagccaaggggctgtttcggtctggggcaccggactgtccggtggtgcaccggacagtgtccggtggggcaccggacagtgtccggtgcgccaggttgcctcggccgaagaggccgctctcgggtttttctccggcgacttcggctaa

SEQ ID NO: 25047 - DNA, 1005 bp, Zea mays
  Peptide Sequence Number=SeqID_68422
atggagatggctcgtatcaggtgcactgcacataagtctgtgatcccctttttgtcttcttgcctgagggagcgtccactgcatcgcacggtgccaggtcagtccagtcacctggagagactgcatcgtcgcctacacgaggagaaggagcaccgacgccaggagcaggagcaggaccaggagcagcaggactcttcccccttgcctcagcaggaggtggagtttgagaggccgccttcccctgcacctcaaccagagatgccccctgcaccaccacagggcatcccggctgctagagaagaccctgacggagacgaagacgacgacgacgctggtggcagttcgagtcacgacacggagttcttggaggagccggagccggagggatggatcgctaggcccatcactcatgacaccgttcgcgggtgtcacttccacgacgctctcgacaccctgctacgtcgggccttcgaccgacgcacttggtctatcgagtaccgttacgtagtctaccagcatcgtcgcgggttatacccggaccagtgggaggctacttgcttggtgcgccgtccggacgatgatctccggggtgcagaggccttctcagagcactatttcattactgagagggatactgccgaggcagccatgcaagatgtagcacgatgggcactttctccgtattgctcgttgtttagtggggtagctgatggcctcgacctgaagtactaccctcgccgttcgaccggcagtgcaggaggtgtgattgtctcgccagttggtgagggcaatcccaggctgaacagcatggtcaacctggtcgtcgtgctcaacacaaagttggaccacgcccttgacgagttgggcaaggttcgggcggaggttgcggaattgcgtgctgagtgtgcagcacgccactatctagatggtgtcctcccgcccctgtcgggattcagcacccttaccgttcatcgccctgtggtcgcttcgactatgataccctag

SEQ ID NO: 25048 - DNA, 216 bp, Zea mays
  Peptide Sequence Number=SeqID_68423
ttcttcatgcttccaccaatggcggagaacaagatgacttatgaactggccacgctggcacctttgaatgccatcgcgaaggaggaaacaagcatcgtcctagcaggcgttgtcatctcggtaactcggaccgctaaacaaaatattgaatatgtgttggctaactttgacgaagacgagtcaggggaagagagtgatgaagaacttgagttttaa

SEQ ID NO: 25049 - DNA, 306 bp, Zea mays
  Peptide Sequence Number=SeqID_68424
atggcacaaatggtcatcccctccatttttacctacggtaaaatatgtaaagtggagatcaagaaagcggcaccaaataaatcctccaatgcaccaccaccaccaccagtgtatggtagaaatgctaggtcatcatatggtagtgcctctaaggaccacccttcagctgataactatgagttctcgaagaaggttccttcgagtaagccatatcgcattatactcgatgatgtgagagacaagctttacaatacacatgagcgggcatgccaattgttatccagtggatatgctgacattctttaa

SEQ ID NO: 25050 - DNA, 603 bp, Zea mays
  Peptide Sequence Number=SeqID_68425
atgccggtttggcttcttctgccctgggccagcttgcatgacgcgcgggacctagcccccgtgtcgcagggggggaccttggagcgtgttgccatcgctcggcttcaaggattttcatcaagcagcccggctgcatcctcttgccgatggtcacccaagacggtgaccactagtttgatggtggggagaagcaagctgggctgcgacctctgcctcaccctcagcctcaaggatcttcatcatccttgctggggcgaaggccgggctgagtcggggctctacctcccgcttcttcctccagcttctgggggtggaaaccatcctccaactctgcggaggaggcatcctccagccatgccggggaaggcgaactgttgctgcccagccagggtgcaacattccgtcctctatcctcgttttcgtggcgaggacgggattgaggacctgccggtgcgctttggggcggccggcgcccgctggtgcggtgttgggggacaggtggacgctgccgtcagtgctgaggtggtggtagctggagaaagcttcttcgccgacgagaccgtcagcgccaccgcggaccgacctctggctctttggctttaa

SEQ ID NO: 25051 - DNA, 1002 bp, Zea mays
  Peptide Sequence Number=SeqID_68426
atggaggccgagaagatggatctccggcgccagctggcggaggagaggagggaggcgaacaaggccatcactgatgcgcaggctgcgcaggccgaagccaaagtggcacgggtggagggcagtctcgcccaccaacgcgccgaggagctggaggcgagattcaatgccctgcgcagccacgtggacaaggccgagtcctcgacgcgtgcggagttcgagcgaacgcacgcgcagtttgtggacgcgtaccgcgagctgggtttcatgtccttcgcctccctcgtcacctgcgagggggccatgaatgctttgtcccgtgaggggtgcaggcattacgaggtcttcgaccaagcggacgaaaactttaaacgtgaaatcttcaaggtcgaagaccctatggtgaagcagtcgacgggggcactctttgataggatgtggggtccgcacggccgagaggcggtgagggatcggtccgatcgggcgatagagcaggttcttgggtctgggcctgtgcacgcaaccgctactgataatgctatttttgtggcggcttcgaccgtggctgctgatgacgattcgtttggctctgtttccaagtgttttgagtctgatgattctgggagttcgattgcgtggacggaggagtcttcagatgaggacttatattattttgtggcgttggatgtggctgcagcggagccttcgctgcacgcggagggttccgaggaactcccgggcgcgagtactgggtataggcgacgaagggcagtggcgaagcggagagtgagtgaattgtcgcgaagtggtaggcgttatcgtagcgaggtggggagaggtcgtcttcgcgtggacgggactggtaagcgagaattgttgtcctcgccgattggggtgagtgtaggtgagggggagctgcgaaatctgtttgagggtgaggaactgaggataatgctattaaactacagggagatgggtatcatcctgaaggttgagccaatgtaa

SEQ ID NO: 25052 - DNA, 1158 bp, Zea mays
  Peptide Sequence Number=SeqID_68427
atggcccttggcacatggatgggcgttgggcgaagtatgccctccctgggtgggcagcgggtgcgaagtccagccttcgcgttggatctgcatggccgggatcccgccgcattcgtgcgtgaagcgaaagacggtgcggcgaggattgtggggcgctatgtgccgaggacagagggtctgtggagctgggatatccgtgggtccaatgttagattgaatcgggtctttgaattgaactgcttgccatacggtggttaccccggggaggatgctgccgaccgccgcgggaagaaaccggtggacttgaccgaggaagggccttcgcaggaggctgccccggccactaagaagagaaaattagccctcgagggaaggatgtcttcgcccgagctcagggagtcttcggcgcgaatgctggaggttacagggggtcgatggcccaagaatgttccgatcccccacgcggctggcgaagacttttttatgtctcgcatggctcgcgacttgaaggtttttccttacaggcggaatattgctgcttttgtgtcagtaatgatggagagggaccgtcaagacgctgcgcagaaacgttgggcggttgtcaggatcgtggatcctatgcgtgaggcgaaaaaggcgcgggggagcgcgaaggctgctgcctctggcggtagcaaaccggtggcggctgcgaaaccggctgcccccgggcacagcaaggcggcggcgagtgtgaacgctgccgcccctggcgagagcaagccacccccgggcgggctcgggaaaggacgaaggccgctttcgccggcgcgaagtattgccgacttcggcacggacatcagtgttgaggattatcttgtcggttcgggtgaggggcaactgactgttgtctcgcctccggtggcgaccacttcgccaacgacggtggtgggggtgaagggtgccgcgtgggacccatgggccactttctgcgcgagcggcgagattctgtcggccgctgcctctaaggacatggcaggctccatgtctcagcgactgagggaagcgttgcagcagctgtcacaacagctaaagcaagcggccgacttcgccgatctcgtcgcgtcgggtgccttgactgcggacgttgctgccgaggtcgagcgtctccgggcatag

SEQ ID NO: 25053 - DNA, 669 bp, Zea mays
  Peptide Sequence Number=SeqID_68428
atgcccgaccctgagctcggtgtcatggggttcatccagagggatgatttctttgtgaccccttatggactcaggcaagcgtccagcagaagagcgcccccagcactgcatcctctccagcaaaagatgattgacttggggtatgggttctttttcctttgcttcctgattctaaaggttacctccttggatcttcgagagagcttggtcgctacccatatggagctcgaggttgccgatgatgaggtcgctagcctctacacccacctaggcgccgatcgagaagagcgccttttttatgtcaccaactgggtgcgcctagccacccatcgtggtgctcgccatggtgttgccagggctctggccttcatgcagtttcggttgggcttcgagctcggtactagcgacctatcgaaggacgtgaccactggtgccctaaaggacattgaggacgactttgacatgaccactgaggtcgtggttgacatcctcccgctggagaatggtctggccgtgttgctgcccatggcctgccatattgttatcagcagtagggatcctactccgagctctccattggcagcaatggattcatcatgggagatcgagcacccaggtcccatgttcgctacaggggatttttctggtggggccccatctttattatag

SEQ ID NO: 25054 - DNA, 115 bp, Zea mays
  Peptide Sequence Number=SeqID_68429
acattatggtataggtggctatgagatcgatggttttggttatgactatggtgctggcgaagatgaagctttggaaggagacttccaggagttccaagactacgacgagttctag

SEQ ID NO: 25055 - DNA, 1923 bp, Zea mays
  Peptide Sequence Number=SeqID_68430
atggcaccaccatccatgtgtcttgcggcaaagggggtgcttcccttctcggcacttatttcaagtggtgttacacaaaggccagtgtcagtgaccgcttccttggagcacaaaaccagcgatgctagaaggaagttcctaaaacttgcgcttgggaatatcggagttggactgcccaccttgttgggtgttaagaaagctctcgctgatgagcaaggaatctcgtcctcgaggatgtcttattcaaggttccttgagtatcttgacaagggtagagtgaagaaggttgatttatttgagaatgggacaattgctatcgtggaggccatttctcctgagcttggcaaccgcgtgcagagagtccgtgtgcagcttcctggtctaagccaggagcttcttcagaagttgagggaaaagaacatcgattttgctgctcacagcaaccaggaggactctggttctcttctgttcaaccttattggaaatttggcattcccacttattcttatcggtggtctatttttactgtcaagaagggcacaaggtggccttggtggacccaatggccctggttttccccttggttttggtcaatctagggccaagtttcagatggaacccaacactggtgttacatttgatgatgttgctggtgtggatgaagcgaagcaagacttcatggaggtggttgagttcttgaagaaacctgaaaggttcactgctgttggtgctcgcattcctaaaggtgttctgcttgtcggtcctcctgggactggtaaaactttgcttgccaaggcaattgcaggagaggctggcgtaccatttttctcaatttcaggttctgagtttgtggagatgtttgttggtgttggtgcttccagagtacgtgaccttttcaagaaggccaaggagaacgctccttgcatagtgtttgtcgatgaaattgatgctgttggaaggcaaagaggtacagctgacatcttggattccgctttacttagacctgggcgctttgacagacaggtgtctgttgatgttcctgatgtacgtggaaggacagagattctaaaagtgcatggtggcaacaagaaatttgattctgatgtttctctcgatgtcatagcaatgagaacacctgggttcagtggagcagacttggcaaaccttctgaatgaagcagccattctggctggacggcgggggaggacagcaatttcttcaaaagagatagatgattctattgacagaattgtggctggtatggaagggactgtgatgacagacgggaagagcaaaagtcttgttgcttaccatgaagtcgggcatgcaatttgcggaactttgacacctggccatgatcctgtccaaaaggttaccttaatcccaaggggtcaagctcgtggtcttacatggtttatcccgatggatgacccaacactcatctccaggcagcaactttttgccagaattgttggcggccttggtggtagagctgctgaggaggtgatatttggagagcctgaggtgaccactggagctgctggtgacttgcagcaaattactggcttagccaagcagatggtggtaacgttcggtatgtctgaaattggtccatggtctctgatggagggtggggcacagagtggggacgtcatcatgcgaatgatggcaaggaactccatgtcagagaagcttgcggaggacattgattcggcagtgaagcagttgtcagatgaggcctacgagatcgcattgaggcacattagaaacaacagggaggccatcgacaaaatcgttgaggtgctcattgagaaggagacactggccggagacgagttccgggcgattctttctgagtttgtggagatccctgtagagaaccgggttcccccagccacaccggcggccgccctccctgcctaa

SEQ ID NO: 25056 - DNA, 324 bp, Zea mays
  Peptide Sequence Number=SeqID_68431
atggcatcggcatggggtacactgtggagatcgatgttccttgtgtcgaaggtaatggttgatttggatgatgtggtggtggtgggggtggtagagctggagtctcttggtgttgctgatatatgttgtggttttgttggtgaggatgagggtattcaggacgacgagtggtgtccccagtctgctgctgattggcgatggtgtgcacctgggactgctcttcagatcgggcatagttttcgaacagctgatatagctcttgcaagtttttgggtgattgttcttgatacaaagggctcgcaacttgagctggtcctcgactga

SEQ ID NO: 25057 - DNA, 528 bp, Zea mays
  Peptide Sequence Number=SeqID_68432
atgccatcagtttatctttacatccctaacattatcgggtattttaggatcatcataaatttcattgcatttgcggtttgctattccaacaaggctctctttgctatcctgtacttcatcagctttgtccttgatggtgtggatggttggtttgcaaggaagttcaatcaagggttagcactgcttgtttgttggcccttctctcccagttttacaggtaagactagccacaaggatgtaaaacacacaggcaattggcttctgaaattatattatgggtacaggccattcatggccttctgctgtgtttcttgtgaggttttatatattttcctgtttctctttgctgatgaggagtcaacaagcttgcttagtgtatgcaaaggcatcctgaaccaaagtcccgtcgttatcttggtgtttgtttccactctagttggctgggcagtgaagcaagccaccaacgtcatccagatgaaaactgctgcggacgcatgcgtggtgtatgatctgaagcgcagcaaatga

SEQ ID NO: 25058 - DNA, 123 bp, Zea mays
  Peptide Sequence Number=SeqID_68433
atggagattgaaggatttgttggagtcgtgggaggcatcgagccgaagggagacgagtctggcggaggaacagtcccgcagcgattcagtggcgaaggaacagggagcagagcgattcagtga

SEQ ID NO: 25059 - DNA, 213 bp, Zea mays
  Peptide Sequence Number=SeqID_68434
atggataatgactatgttgaagttgatgtttataacttggagttaactagtccaaccaaggatggaggcaaggatatcttcaagtttgtagagaaagtgccacttcgggccctgtttgataagaaacagaaaagctggggaaagaatgagaaagacggaacccggggttcaggcattcaaaagaagggaaatgaggaaggcaagggcagatga

SEQ ID NO: 25060 - DNA, 495 bp, Zea mays
  Peptide Sequence Number=SeqID_68435
atgaacgacgaaggccttgccgacttccaaagacccggctcacgctacacgaaggctactgtcactacccgcgcgttgttgttaaagcgggcctgcggggaactgccctgggtcgcctggccccacttggggtattctaggaataacgtagataaccaggggcacaattgtatttatcaaaaggctgatgacatcactgaagacgatgaagtcctaggcatctcagtcgaggaccagctcaagttgcgagccctttgtatcaagaacaatcacctacagaagcagaaggagatacttgcatccaagcgccagcgcatcaccatgcaggccaaggtcaggcagaagatactagatgaggaacagaaggccaaagagctggagcaacaaatcgcacatatgcaagacaaaggccaccatcaactacaacaaaaccctatccatataccagtcctaaccccagctactttccaaggactaaagtaccttgacgagtga

SEQ ID NO: 25061 - DNA, 201 bp, Zea mays
  Peptide Sequence Number=SeqID_68436
atgagcgagaagagcgaggcctacttcaacaatatggcgatgtttgcgttcggcggatccattttgttggtcatggaattaccactagacgcgcagagcagcggaagacgtctcgatgtagacgaacgcgtcgagcagtgccgtgcagtcgccggcgtccttcacgtcctcgcacggttcgtccaagtgctccagatgtag

SEQ ID NO: 25062 - DNA, 456 bp, Zea mays
  Peptide Sequence Number=SeqID_68437
atggccgccccgcgaaccgcacgccccgtcgcattaactaagcgacgggaaaggcggcgcctctggctccgagcctccctactgatcagaggttcgaaggctggcccctcggaggggttcaacagccgcctcagagcgcgtgggctccacacccactactggtcagaggttcgaaggctggcccctcggaagggttcaacgaccgcctcaggctactcgggctccgcgcccactactgatcaggggttcgaaggctggccctcgaaggaatcccatcagagggaggcatcgagccctcggaccccgtcgacaggggaccgggtctggcagatcacccgcaggtacttttgggcgcgcctctgggcctctagccgacccctagcaaatggggcacggacgtccgctcagattacccgccagcagctcaccggagacaccatgttcggcgcccactga

SEQ ID NO: 25063 - DNA, 1131 bp, Zea mays
  Peptide Sequence Number=SeqID_68438
atgtcttcacgctcccttatgcatcgtgtctttccacctttcgagcccccggatgggggatgcccgcagtccttccgccttgtcgttgggggaacgcaactccgtgggagttggtacctttcagccattgttcggcttcaaggattttcatcatgcagcccggctgcacccctccgccggcggtcacccaaggcggtgaccaccagcccctggatggggagaggcaagccgggctgtgattttggccccgccctcagcttcaaggatgttcatcatcctcgctggggtggaggtcaggctgagccggagctctacctcccgcgcgggttcgtggatcggcctctccttcggcgttcgagggagagggcgctcactggccctgcgggcgggtcggacttcgacaacacggggctggtcgacggcgggcgtcgtcagcctcagcgcgtcgggctcgtcagcttggctcccgcgcctccacgcgggggtcggtgccccactcgtccgggaggatctgagtggggatctgccggagggctgacggcccctgtcgtctgtgccgaggtggaggcggctcgagaaatccccgttgccgacgggatcaccgccaccatccgcgctttgggcctccggctctttgtacttgtcctcgcccctcgagcgtcggcttgggcgagggcaaggccgcagcagcactcgcctgttggttgtctgaaccgcttcaccaagcgtgattcgccccgtgcaaaggcgacgagtgagcatggacagaggcagagttggctcgaaaaagaagacttggtcggccggagcctagccgggtcgtccgttagcgggaccgacgccggagttgatctgccgaggcctcgggtcgggctgaagtcttcggggggcagctggccgaggcctcggggtgaccagccgagccgcctgctcgggccagattctcggagaagacccgggcggcgatggcctaggcgtgatgacgaagtcgtccttaagagtggagaccctcagaccgcgtcgccgtccgaggccaggtcggaccttgccaaaggtgtagttgacgccgagggtgctgctgctcccttcaaccgtcaagatccgagcctgcaggatcggatcatcttgtag

SEQ ID NO: 25064 - DNA, 321 bp, Zea mays
  Peptide Sequence Number=SeqID_68439
atggcgcctcctatcgacgtggtcggtccgcgccctaggttgggcgatgtggaggctcctccgaggtcgaggtcgagtctgtcttccgtggtcgtggtcgagtccgagccctggggtcgggtgaagcggagttcgtcgtcttctggggcagagcccaagtccgagccctgggtcgggcagagcggagttcgccgtcttccggggcttagcccaagtctgagccctgggtcgggcggagtcgagttcgccatcttccggggcttagcccgagtccgagccctgggtcgggcgaagcggagttcgccgtcttccggggcttag

SEQ ID NO: 25065 - DNA, 471 bp, Zea mays
  Peptide Sequence Number=SeqID_68440
atggagcattgtcccgggttggagaggttgctggagactgcccatctggagcttgacgggaagctgttcgtcaacacgcagcaggcccctacctggcacgccaactgtcggcgtttcgagaccgggggtccctgggccgacgaggtaatgatggcgcctcctatcgacgtggtcggtccgcgccctaggttgggcgatgtggaggctcctccgaggtcgaggtcgagtctgtcttccgtggtcgtggtcgagtccaagccctggggtcgggtgaagcggagttcgttgtcttctagggctgagcccaagtccgagccctgggtcgggcagagtggagttcgccgtcttccggggcttagcccaagtccgagccctgggtcgggcgaagcagagttcgtcgtctttcggggcttagcccgagtccgagccctgggtcgggcggagcggagttcgccgtcttccggggcttag

SEQ ID NO: 25066 - DNA, 876 bp, Zea mays
  Peptide Sequence Number=SeqID_68441
atgtgggacccagcccccgagtcgcaggggaggaccttggagcgtgttggagaagactcagcctgtggcgtctgggggcgcacgaacgcaactccatgggagttggtacctctcagccatcgttcggcttcaaggattttcatcacgcagcccggctgcacccctccaccggcgatcgcccgagatggcgacctccggcttgatggtgggggaaagcgagccgggctgcggcctctgcccctccctcagcctcaaggattttcatcaccaaggctggggaggggagagtgccgagttggggtcggcccctacgcgggcggtggcccgctccttcactcagtgatcggagggaagggcggccgtcgtccgtggcgctggcagctgcagcgtgcctggctttcgggcgcgagtggcttcggagccgctcgcggtgccggcatccgccacggcagcttgaagagcatccgccctgaggtcagtgctgccgctgttcgaccccccggagcagaagtcgtcgtcgtcgctgctgctggagtaggtgacagcgcgccgttcgtcggccttccgttgctccgcaggccttccccctcggagtggggttgctcctctagcttagttaaagagacccctcggccgctcttcgatgagccgaggccaggggtagcgatatcagtacgaacagaggcggagttggctcgagaatgggaacctggttggccggagcctagctgggttgtccgtcagcgggggtcgacgtcggagttgatcagccgaggcctcgggtcaggccggcgcccttggaagatgcttggccgaggccccaggggtaaccggccgagccgcctgctcgggccggattcccggagaagtccctag

SEQ ID NO: 25067 - DNA, 696 bp, Zea mays
  Peptide Sequence Number=SeqID_68442
atgtcgcgccccagcgtgaagggggtcaatccggctgcagcaatgcccccttctgcggtgcccgtggtacccacaaaggagtcttcgccaccatgcgatgttgaaacgacggtgtcagagacgggagggaccggccaggagttatctgtcgatgactacctggtgggggcattaccatgtttgatgcctagacggggctaccgcctgctggcggttgtatttgccggccacgttgcgtctggggcgctggtggacgtttccacctcgcagctgtgttacgagaggaaacggctcgagggcaaaaatgagcgccttcggatgcaacatacggaagctatcagggataagtcggcggccgagaacaagagccagaactgtctcgataaggaggagctggactcactcccgtccatcgtgactggcctcatgccctatgtgtcgctcgtgtcctgcgagggggctgcgaatgctttgacccgcgagggcttcaggcacttcgaggcctttgaccagagcaacgacaacttcgatgctggtgtattccaggcgatgagggatgaagaagttgaggacctcgtcggcctggagagctcgatggcccaaaaggacaccgaagtggagacaggagccgaagagcagtcctcgctcaaagaatgcggcgctaaggactctgtggtagcgaggacttctgcgtag

SEQ ID NO: 25068 - DNA, 363 bp, Zea mays
  Peptide Sequence Number=SeqID_68443
atggccgtcaagcccacacccatgccatcgccgacctcccccacgcctccgcgccagcaaccgccaagctcgagcttgcacccgcgccattgccaacctcgctcgctcctgctgctcgtgcatgtgccttacaaatgtatcatagtgtcaacaaacaaaaccaagacgtcacccgttttggcccaacacaccttacatgtgatgcatgtgaggacttggatcgacgactcgtttataagcataggacactacaggcagaaatggtacaagttgccggaagatgggtcatatgatctgaatgctcgttacgtgtttgagtataacgtgaacgatgtcattgtagatgcaatgtactatgcatga

SEQ ID NO: 25069 - DNA, 537 bp, Zea mays
  Peptide Sequence Number=SeqID_68444
atgcgggttggaccacgaggtgtgcctaagcatcagatggctttacgtgtagtggaggcaagaagtagcagtcgcacaccttcgacgcaggtggagcagctgcaacagagtctagatgtgtccttcaatgagtggtgtctcgacgcagcccatattcttgagttgctagcagaaaagaagcagcctcagaagaaattggcggagcagaaagaacgcctagtggcaaccatgcgatcctgggaggcaccttttgcctgtgaggaccatctgaggggccgtttccaggatttggtcctagcttacaatgatctggaggattactctaatgagatgcatgaggaagttcaccagctttactatcagctgcaccccaatgatgcgccaggagccacagaagcagagggtggtgtggtgctagttgatgggggtgagcctgatgcagacttggaggaagaagcagctcctatgcttgtaccaggtgttgagtccccaagaggtagtgatgtttctgagatagctagtgatacagaagtttaa

SEQ ID NO: 25070 - DNA, 243 bp, Zea mays
  Peptide Sequence Number=SeqID_68445
atgatggacaacatcgatcggagttggtgcagtgtcgatggcagcgcgagtacgtcggagccgcggctaggagaaggtggggcgtgggcggggcggcggccgtcacaggagaagtcagtggcccacgccggtgggggaggagtcagcgcggcgggtgacgcaggtgtgggggagagctcgggtggcggcggtgtgtaccggcggcggctatggccggggcggccgggtacgggcgacgactag

SEQ ID NO: 25071 - DNA, 633 bp, Zea mays
  Peptide Sequence Number=SeqID_68446
atgacttggaatctacgtggcacgtacctcggcgccatagatcttggcaccgaggtagttgccgcccctacctcggcgtcaagatctatggcgccgaggatgtctaggcgtggtaaatctgctaaacaaagcttatggaaatttaggaaggatcctttgaccggaactgcattcgacccgctgcctttgccaagtggtgttccagtgcctatgtgtttttgtggtgatccttgtaaggttgataagtctgaggatcatgacacctatcgacagaggtattggatgtgtgctaactttgcatttgagccaactattgctcaacgtcggatgaatttaatgactcctccaccgctatgtgattttgagcagtggattgacacagaaatatcagggaaagacaagaagtggttggagaatcttaaaaagtgggatgcagaggacaaagagaggatggagaaaagacgagaggagcttgctgccgagcaacaacgtgaagacgaacatgaaatgaggcgtgttgctgaatgcagtgaagagaaggagaagaagcttgagcgtgcacgtcgtgcaaaggaagcaatggagaaccctaatgcattgcgcaagggcaaatggccccgttgcactcaatag

SEQ ID NO: 25072 - DNA, 339 bp, Zea mays
  Peptide Sequence Number=SeqID_68447
atggctaagctgagctttttagctgagctgaacttcagctacgttgagctttctcaactgcagctgaacttcaacttcaaccggggtctagggcaagttcaaccggggtccagagaggttcaaccggggtccagggcaagttcaaccggggtccagagaggttcaaccggtgtccagggaaagttcagccggggtattttccccggacctcactggtcaaaaccggttgaaccggtcctaggggaggttcaaccggtgtcagggtcacctgaccggtctgacctcctgactggcagactgactgccagtgtgacccccaggcggttgaaccggccctag

SEQ ID NO: 25073 - DNA, 162 bp, Zea mays
  Peptide Sequence Number=SeqID_68448
atggggctcggtgtatgcggctcgctctgccaagatgatgatgaggaggatggttatgattatgcttatggtaatggttgtcagcattgcaaccactgctcaggcgaagatgaagctgtggaaggagacttccaggagttccaagactacgacgagttctag

SEQ ID NO: 25074 - DNA, 453 bp, Zea mays
  Peptide Sequence Number=SeqID_68449
atggcgcctggccgccgccgcccctgctttccatggcagcacttcctgcttcctggtggaatcttgcatcagttcattggagaaattggtgttggttcttgtggtccacgtggtttttatggaacaattgatgtccatcttgattgtgagtcaaagatagctaaatttttggggaccccagactccattctttattcatatgggatttctacaatattcagtgtgatacctgccttctataagaaaggagatatcatagtcactgatgagggtgttcactgggcagtgcaaaatggtctccatctatcaagaagcattgtggtgtacttcaagcacaatgatatggcttcacttgcaagcactttggaaaaacttactcgtggaaataaacgtgctgaaaagattagacgctacattgttgtagaatccatttaccaggcgcagtgcttttga

SEQ ID NO: 25075 - DNA, 456 bp, Zea mays
  Peptide Sequence Number=SeqID_68450
atggccgttgcaacggctgcccattttgactgggattcgggtcggggatcccctcagccagggataaaacccagggggctatctgcagctcctgccacatcgcgcagggcccaccgggccgccaccgtcggagggggagacatcataccacgcgccgcccaccgtggctctgttggtgcgggtttgccaccatcctacctcgccctagaatctgcagcactgcttaggggccatgaaggggagaccaagagcaccgcctggaagtatggggactattactaccaccaattcgatgaaggaagcggcatggctaggacaattcgtcgccggagattgaattccaccatgaatctgcccttcggcgcggtcagggacctcgacaccactattccggtcagactctctcacctttcatgtctacgtcctcctcgggttattgcgcaccattcgaactga

SEQ ID NO: 25076 - DNA, 858 bp, Zea mays
  Peptide Sequence Number=SeqID_68451
atgccgccgttcgctggccgcgtgtactctggggtcgtcgtgctggccgcctccctcgtcttctcctcaggcccgcccgcgctctccctgccttctgcacgcgcgcagctcgccccagatcctcccagccatgacgcgcgcttccctgtgccccgcgttccttctctgcactgcttcctctgctccatcttcaagcacgccgcgctccaaatcgcctgctgttcctcttccccagccatggccgcgcctggctcgccggcgttcaggccgcggcttcctcctccaactccggtcggccaagagcctagctgcccccttgcttctctccctccatttcccagcagcgccctgtccctgtcgaagcccttctatggcgcgcgtggatttctcctcctccatccccagctagcctgcgagctcctccctcctccctgcatccatggatctcggcgcccatctccatggctcgccctgcgtccagccgtcgcgcccggttccgagtccctttcctggccgagttccctgctccatctctgccctctgccggcgctccagctcctccatccatggccatgcctgctgctcgtcggtgctcgccgcgggagacggcgcttggtcgcccaaccttcctgctcctccctgttgtcgtgtccctggctcctgctccactcgttgcgtgcgcctgcgcgctgcccagatggccgtctgtccttccgtgtcacgcctagctccagctcggtctctgctcgatgcccagcgtcgcgcagcacggctcggcccgacggcatagagtgtctcgtcatcgccggacttgtctcgccgaccatcgtggcgttgttatttcctgctacgccgtga

SEQ ID NO: 25077 - DNA, 261 bp, Zea mays
  Peptide Sequence Number=SeqID_68452
atggcctctaggtctctgatctcttggtctagctccccctcttgcggtgttgggctgatggccttccttttctgttttcgggcttctcttagagggagcccttcttggttgatgtccagcgttgcaagagcagcccctggcgctattgccttctttggcggcatgacgaaggaaaactcggccaatggtagccacgattcccatgatcctttcgacgataggccaccagactgtccggtgtgccagcggagcaacggctag

SEQ ID NO: 25078 - DNA, 1467 bp, Zea mays
  Peptide Sequence Number=SeqID_68453
atgccgtcttcctcctcgtctgctgcgaccacgccgacggccgaggcgtcttctgaagatctctcgggcactgaggcggcggcggaattacgaccagtgatgaacaaggaccgccaggatgctgcgcagaagcgtcgggcggtcgtcaggcttcccgaggctaggccgaagagggcgcgggggactgcgaaggctaccgtccccggcggtagccagccgacgctggcggcgaagccggccgcccctgggtccagcaaggtgccagagagcgcgaaggctgtcagcaccggcggaaccaagtctaccccggacggaactacgaaggtccgggaactgccttcaccggggaaacgcgttgccgacttcggcacgagtattaacgtggatgactatctcgttggtaagcctttttttgaccggcgatacgttgcagggtcgggcgaggggcaacttgttgttgtcccgcctgcggtggcaaccacgacgtcgactgcggtgcttggggtgaagggtggcgctctcagcgctggcggcgagatttcggcgaccacagccgtcaaggtcgaagcggacactgtgtcccgccggttgagggaggcgtcgcatcagctgagtcaagcggccgacttcgccgaccacgtggcgtcaggtgcctttactgcagacgtggttgccgaagtcgagagacttcgggcgcagcacgcagacgccgttcgggagaagtcggctgcggagagcaagagtcgcaagctggcggagaaggtggccgcccaggagggcgagaagacggacctccggcgccagctggtggaggaaaggagggaggccaaccaggccatcaccaaggcgcaagcagcgcaggcggaggccaaattggcgcgggtggagggtagtctcgccagccagcgcgccaaggaatgggaggcgtggttcaacgccctgcaggcccgcatggagagggccaaggcctctacgcgcttagaagttgagcggacgcgcaaacagctcgtgaactcataccgcgagctgggtgcgcggactgctgacttcgaggtgcccgaccgagaggcgggccttcgcttcctcgagtggctgcaagaggaattgctggcgctcccgaccatcgtggagggcttcatgtcctttgcctccctcgactccgcgggggccctcttcgaccggatgtggggcccccacggtcgggaggcggttagggagcggtctgaccgggcgagggatcagatgacgcgtgccgagaacgtggaggatttcggacaactgaacaacgcgccggccgaagcggaggtcaacccggtggtggccgaggctgaggtcgacccggcaccgcccccgaaagccggtgaaggctccctcgctgcccctgcgtctactgtgtctggtggaggcttgtcgccagccactgtgccgatggccgaaggggccccgaaggcggcgacggagccggca

SEQ ID NO: 25079 - DNA, 645 bp, Zea mays
  Peptide Sequence Number=SeqID_68454
atggggtgcacctgtgttgccttcttcttgctgtcgttggaggagcgcgacctcgtgggggttggcgctcttcagtcatcgctcggcttcaaggattttcatcatgcagcccggctacagtcccccgccgatggggagaagggcgtccaccagcccttacggaggaggcaaactgccacctgctgcctggtcggggtgtggctggcggtgttcgcgtccccggatggtgttgtcctccctcccgtagcgaggacgggagtgaggacctccttgtgcgctggggcggccgccattcgccggtgcggcctcggcgcgcaggtggctgctgtcgtcggtgctgaggcagtggtcgccatagtggtcgccggcgagccgcttggagtttgttatctcgcagcccctctggtgtggaggtcgggaaaaccgccgagggcgatgccgacgtctaagtctagataccatagttaccctaaaatcacttatccaagcgtgagctacctttcgcggaaggtgatgagtaaggattccgttatcgacacagtcgaaaggcacgcccaaactatggccttaaagcagtgtgcctgggccggagggctcgagacggctcttgacgagtccgtcaagaactgcaaggcgcttgcctag

SEQ ID NO: 25080 - DNA, 141 bp, Zea mays
  Peptide Sequence Number=SeqID_68455
atggacaatattgatgaagtgaccgacaagagagtgacgaccttaagagaaatagaaaaggacaagatcatggtcgccaaagcttacaacaagaaggtcaaggctaaatcgtttcaggcaaagccttgcctaaggcgttaa

SEQ ID NO: 25081 - DNA, 870 bp, Zea mays
  Peptide Sequence Number=SeqID_68456
atggggttgggcgaggcggagaccgtcttccgggatgctgtcggccacactctggcgagtggcacatcagttggagcagggcaggcagcgctgttttcctgtcaggcgatccttgcattgaatgctcttgcgatacggtcggttggcgtggcgatctggccaaggttgcttctccgcgaagcctgcccgagccgggcctcgggcgagtcaaagctttatgctgatgggggttaccagctgagaattaggcgtcttgaggcccccgagcctctgcacagggcgagaggacgatcagggacagactcggctttttacatacgcccctacgtcgcctttccgcaaggaggagggggggagtgcgccatgttaccctcgatgggcaccgaacatggtgtctccggtgagctgcaagcgggtaatccgagtggacgtccgtgccccgttcgttgggggtcggctaggggcccagaggcacgcccaaaagtacctgcgggtgatttgccggacccggtcccctggcgacggggtccgagggctcgatgcctccctccgatgggattccgttacaagatcgtcccgctggtctcggaatgtcctagggtacctcgggagcgcagcccgagcctcggttatgtatcgaaccaactggcgcgccggttgctcgacgcgtgggcctgggttcccaagctgacgtgtcagaagttggagaagcgcgtccacctggcgcggttgcatgccgcctgcatggctgcccgccccttctgcccgttggtctgggcgaaaatgggggtcgcttcccccgagtcgcaggggagggccttggagcgtgttggagaagactcagcctgtggcgcctgggggcgcacgtag

SEQ ID NO: 25082 - DNA, 888 bp, Zea mays
  Peptide Sequence Number=SeqID_68457
atgggcgatggggtggcttttgaggctgcgaggaagattatcatgcacccgctttatacgccaaggtcttctccgtggcttgacttgaaggtgttctatgttagggtaagcaactgtgtggtggatgagtctacaccggaccatctcacgctgaaccacatccctctgtcacctgatacagttatcgaggtgaatggccagcggagcagcttgcatactgagttcatatcctcctcactgaggagggacagggttgacaaaaagacagaggaagctacatttgtcagcacagataatatacggatgacagggagtgcgaggttccaagtgtttgataagaatgatctcttgctcacaggagacctagatttatgcaatgccaatggagtcgttggggaatcgaagaacagcagcaagaaatggaatatgaagtgtcagtcatccacatcatgcaatggcttcttgaagggaaagctgtccaatggctcggaatatgtacaacctatgatcgaggtttatgtcgctgggacctcctctggcacacctatcatattaacaaagacaattcagcttatatcacgaaggaagtctgaaatgaaactaaagcttgattccatccctgagaatgaaacaactgaacagcagaaagaagagtcagctgaggacactttgaaggtatcagagttccaggattccaaatctgagacggatgttgatgttgactataacagtttgtactcaaggcaggactttctagaaggcgaggacggtgagctttcatggtttaatgctggtgtccgtgttggagttggaatcggtctgggcgtgtgtgtgggtatcggattagggcgtcggcctgctggttcgtacataccaaagcaccagtag

SEQ ID NO: 25083 - DNA, 372 bp, Zea mays
  Peptide Sequence Number=SeqID_68458
atggggctcgccccacctcgccctcggccacatgagccccgagccttgctcgccatctccccctccctcatttgcgcaccaaccgaccccccctcttccacctctccctcgctgtgcgcacgccagagcgccgccgccgtaaaccccgccgttccgagctcggtctccggccgccgttggagctccgccgtgtccattgccacggtgagcttcgccccgacgtccgcaacccggaacgcgcatcaatttcccctttccctccctatttctctctgcccgcgctcacccaccgtccgccgtgcagccgccaccgtcgacccgggccaccgtcgcgtctccgtcgccgccgaggagtccccggagtccgcctga

SEQ ID NO: 25084 - DNA, 165 bp, Zea mays
  Peptide Sequence Number=SeqID_68459
atgggcaggggcctcctggcagcggcatcgaccctgaggtcagtgctgccgctgttcggccccccggagcagaagtcgtcgttgccgccgctgccggagcaggccttccccctcggagtggggtcgttcgtgcctgcggagggggaaccggagttccgttcgtaa

SEQ ID NO: 25085 - DNA, 2370 bp, Zea mays
  Peptide Sequence Number=SeqID_68460
atggcaacaacggccgcggccgccacggccaccgaccactacgcgcggctcctgcagctctgccgtaccgcggtcaacccgtccgcagggcgggccatccacgcgcacgccgtcaaggcgggcctcctcgtcagcacctacctctgcaacaacctcctcgcctactacgccagcgtgggcgtgagtcgtggttgcttccgcgaggcgcggtgcctgttcgacgacataccgtacgcgcggcggaacgcgttcacgtggaactcgctgctgtcgttgtacgccaagtccggccgcctccctgacgcccacgtcgtgttcgccgaaatgcccgaccgggacgccgtgtcctggaccatcatgatcgtcgggctcaaccgctccggccgattctgggacgctgtgaagacattcctggacatggtcagtgaagggtttgcgccgtcgcagttcacactcacgaacgtgctttcatcgtgcgctgcgatggaggcctgcggggttgggagaaaggtccaccccttcgtggtcaagctggggctgagcagctgcgtgcccgtggccaactccgtgctctacatgtatggcaagtgtggggatgctgagacagcaagggctgtgtttgagaggatgcaggtgcggagtgtgtcaagctggaatgtcatggtatcgctgtacacccaccaggggaggatggagcttgctgtgtccatgttcgagaacatggtagaacgaagcattgtctcttggaacaccatcatagcagggtataaccagaatgggcttgatggcatggcattgaagttcttctcacgaatgctgagtgcttcttccatggagccagatgcattcacggtaaccagtgtcctatcagcttgcgctaaccttcgtatgctgaagatgggaaagcagatgcactcttacatcttgagaactggaatgccgtgcagcagtcagattatgaatgctctcatctcaacctatgcaaaatccggaagtgttgagactgcaaggaggatcatggaccaggcagtggtcgctgatttgaatgttatctccttcacggctctcctggaaggctatgtcaagcttggggacacaaagcaggcaagggaaatcttcgacattatgaacaatcgagatgtcattgcctggactgctatgattgttggctatcatcagaatggtcagaatgatgaagccatggagctcttcaggtcaatgatcttgattggcccagaaccaaacagtcatacgcttgctgctgttctcagtgcctgtgcaagcttggcatatcttgattacggaaaacagatccactgcaaggctatcagatccttgcaggagcaatctgtctctgtcagtaatgccattatcacagtgtatgcaaggtcaggcagtgtgccactggccagaagggtgtttgatcagatttgctggcgcaaggaaacgattacatggacatcaatgatcgtggctatggcacagcatggtttgggagaacaagccgttgtcctttttgaagaaatggttcgtgtcggcgtgaaaccagaccatataacatacgtcggcgtgctttcagcctgcgcgcatgctggttttgtagacaaagggaagaggtactacgagcagatgcagaatgagcatggcattgtgccacaaatgagccattacgcgtgcatggttgacctgcatgcccgtgccggcctgctcacagaagctcacgaattcatccaacggatgcctgttgcgccagatacagtagtctggggttcgctccttgcagcttgcagggtgcgtaagaatgcagatttagcagagctcgcagcagggaagttgctgtcaattgaccctcacaacagtggcgcctactccgccctcgccaacgtctactctgcctgtgggaggtggaacgacgcagcgaggatctggaagctgaggaaggacaaaggagtgaagaaggagaccggtttcagctggacccatgtacgaggcaaggttcacgtcttcggagcagacgacgtcctgcatccgcagagggattcgatctaccggaaggccgctgaaatgtgggaggagatcaagaaggcgggatttgtccccgacctgaactccgtcctgcacgacgttgatgacgagctgaaggaagagttgctgagccgccacagcgagaagcttgccatcgcgttcggcctcatcagcactccggaaaagacgaccctgcggatcatgaagaacctgcgggtgtgcaatgactgccacacggcgatcaagttcatctccaaattcgtggatagggagatcatagtgcgagatgcaacgaggtttcaccatttcagagatgggtactgctcgtgtaaagattattggtag

SEQ ID NO: 25086 - DNA, 438 bp, Zea mays
  Peptide Sequence Number=SeqID_68461
atgactgtgggcatgatcaacgcaaacccggtggtgcacgagcggccggagcgcgcctcgcacccccacgccgccgatgtgctcgaccctctcgatgtctttggtagagtacttcagtcctctcctcatacggtgcgggacatcaaggacccggagcacccgtactccctggagcagctcagcgtgctgtcggaggagtccgtctccgttgacgagacgctcggacgcatccagataaccttcactccaactgtgcagcactgcagtatggccacagtcattggcctgtgcctccgacttaagttgatgcagaacttccctccacatttcaagccatcaagcatatatgcaatcatttacctttgcactaattggcaggttgacatcaaagttgctccaggatctcttgctaatgaagaatcagaaatctgcttttga

SEQ ID NO: 25087 - DNA, 2348 bp, Zea mays
  Peptide Sequence Number=SeqID_68462
atggcgtggggagaggacgaggctatcgaccccgacgtggcctcgacgggtgttcacgtctcggagcggatcggccgcgacgccatttcctctctgccaccaagaccatcctccgcatccggctcagccagctctcctcgagcccagaagcacacccgagcagaccggatcggcggcgccatgtcgcacgacgagctcgccgacaaggagccgtcgtcctccgaggagtttcagctcgcgccgacggattccaagttccggagcctcagccctgcaccgattccgatcccagcttctccgggcatcagatcattggtcgactcggtgacagctacctgcaagctatatatagtgcctaaatccagacccagttcagatggagggctgaagaggaagcgtgatgcattcaacgatgatgctaatccacagaagttcattccttctgttccattcgaaaagccactaaaagcaggttcagggggggcaaaagccaaaagccaaaagtcaaaccaaacacaccctaagactccaatccaactgaggcacgccgcatgcctcgcccgcaaccctagccctagccacacaacgccgcactggtccgccgccgctctgccgcctctgcgcgtgagcgcgtcgatcatccaccgccctgctgcctctacggctctacgcgtctaccgtgcgaagcaccagccctacaggcctccactctgtatcggtctccgcggtatcggcaactcgactccgcaccggcgactccacaccggcaactcggcccgcgtcgattcaccgcaccgcgttctgcacttctgctccaactccggcttcggcgtcctgctcctcggtgcccacgacctcgctgcagaccgacccagcacgcaagctgtgatgaaaaagatcatcgacgttccaatgtcggggggagtggaaccagaagttgacaacgacagtcataccgactatcgagtacgattatacaatggacgtcgaccttggcagtacaagctgattattggttggcttgaagacggagggagtctctgggtccgcctcaccaatgtcggcgccactgtcaccttgttcctcgtcccggacaagaacggggttctcgctgatgtggtgctcggattcgactcgctggatccgtacctgaggcataaagataaaatcaaggtgcgctacctagaacttcaggatgctgatgagactggaaacttggaggagtgggttatgctaacacgagttgccaaacctgatcaactgggtctacgtttccttggaaggccaatggttcgtccacagcgcgtggaacaaagcaaggcctcatgctttgatgttggagccattgttgatgcttggtggcatggtggctggtgggagggaatcatgttgtgccaggtgggcagcgggcgtctacaagtttattttccaggagaaaaccgaacagctgaatttggtgaagatgagttgaggtgttcccttgagtgggttggtaacaaatggaatcctttgaagggaagaaaagatgtcacaagcaagctgacctccactgcagattgtggaagtgaatgtttgattgggaaacaagatccactgaatttttatgtgcctaaaaattcggaacctcaactagagagacatcaatatgacaaggggggtattgagaaatcttcagtcagcacaatttcacgagatcagaaacgtgtccttgccgacctgactaatgatttgaagttagataacttgaggtggaggccaagaaagaggagcagaagatctggctcaagaaagcagtcagacacaagcagtggaagcagcagcggggacatggacctgttcagccccagcccagtggaagctttgttttttggaggctcatcagctgtgatcaaagatgtgaaaaggctcatcagcacaacccagaaccagtatacagtttccgtgtctctacatggacttcgacctcgcttcgctgtcaccacgcactggacctggacctgcaccgatgtcacgcacctcgtgcatgtgctcctgcagctccgcttcgcctggtgcggcgagctcatccggtatgcccgcgccgtcgccgcgcactacgagtgggttatgctaacacgagttgccaaacctgatcaactgggtctacgtttccttggaaggccaatggttcgtccacagcgcgtggaacaaagcaaggcctcatgctttgatgttggagccattgttgatgcgtggtggcatggtggctggtgggagggaatcatgttgtgccaggtgggcagcgggcgtctacaagtttattttccaggagcaaaccgaacagctgaatttggtgaagatgagttgag

SEQ ID NO: 25088 - DNA, 336 bp, Zea mays
  Peptide Sequence Number=SeqID_68463
atgtccggtgcaccagggggactcagactcaaactcgccaccttcgggaatttccaggggcgactcggctataattcaccggactgtccgatgtacaccggacagtgtccggtgcgccaagggaggtcggcctcaggaactcgccagcttcgggaaaccccaacggctagtccgctaaaattcaccggactgtccggtgtgcaccggactgtccggtgcgactccagtgcaacggctatatccgcgccaacggctatctgcggtgcaataaatgcgcgcgcagcgcgcatagatggcaggcgtgcccatgggggcacaccggacaaggaacagtag

SEQ ID NO: 25089 - DNA, 1038 bp, Zea mays
  Peptide Sequence Number=SeqID_68464
atggggaatcatggtggaggaccagggtccggattggcgggcgacatggcaccgatgaggtccgacgactggccttcatggcttccagatggcttcaatttagaatttaggatattcgctacaaaatcacgtttcccatggtttttgcacactgagcttgtagattctgacattatgaattacaaagatctgcttgatgaaatcatgaggaagtacccttgttcttacggggagaaaaatgcatccactaagacatgtcatatttccattgctcactatgaccctagtactgaaccaccagccataccactatgggatgtaacatatgctaaggcagtggaaatcccttgcacatcatcaatgccagctccaactcaatctttagatgaaccaagccaacaaccagaggatgatgacaagtacctgcaaaaccctgaaccagaaaatgaatatgttggtgtcgatgaagaaggcatgtacattgacttaggaccacaggttcagggaaatgcagaccaagaggatgagtatattcctgagactaactctaacttggattctaactttgaatctgatggttctgatgatgagatggtggaggataatgttccaccccacacagccgaagcagtgtatgacaaagcccaatttgtcgaggaaacaaggggaccaccaaagaggaagaagaagcaagtaatgccagcatctactgagacaagcattgtacctgtgtcagcaccaagaatggttttccctgatcttggcctcacacctccagttacaaagaagagaaagagctcatccactacatcaaaggctgccaagaagaagaagagctcagccatgcctgttaggttgcagacaaggaagagaatcaagaaacaaaaaaagaggtggcaggacatgggaagaaaaataagagagagccagaagtcatcggatctcctgcaatgggaactagaagcaaagccagttgaagtggcagtcctgccatgggaactagaagcaaaagaaagctcaatgtctaattggaactag

SEQ ID NO: 25090 - DNA, 408 bp, Zea mays
  Peptide Sequence Number=SeqID_68465
atggagaatcctaaaatatgggtggcgatgcgccaaagcttgcagccgcaacctgtgaagatttatgattaccctaaaatgtccaccacatcttcttcctcctcgtactcctccttcccctacttcaagcacgactccgatcgggagtcgaatccgaagtggaaccccatcgcgcttatgagaaggaggctccttcattgggatgcggaggagtgggacttcgcagtggagtccgaggacgacgcctccatcaccaatggtgaggaattcgagctcctcctcagcgaggactgcgaggaaagtgaatacgatctcttccctatggatggagcgaacaagtctttagagagtgatgaggatgacgtgttctccgaggaggagccgccaaaagatcccctcttcatctga

SEQ ID NO: 25091 - DNA, 234 bp, Zea mays
  Peptide Sequence Number=SeqID_68466
atggacttcgacctcgcttcgctgtcaccacgcactggacctggacctgcaccgatgtcacgcacctcgtgcatgtgctcctacagctccgcttcgcctggtgcggcgagctcatccggggtggaaacagagctttcaatgcatgctggaggtgcacggtgtgatcaatattatccatgcttgataaatgatgacaatggtgatgaccatgatgtacggtcaacattgtattga

SEQ ID NO: 25092 - DNA, 120 bp, Zea mays
  Peptide Sequence Number=SeqID_68467
atggcaaaatcttcagttgttaatgcggttgtagttggtttgaaggcatcagatatactcctacatcacccctatgttccaaattcgctttatcttggccccgatcttatgaaaaattag

SEQ ID NO: 25093 - DNA, 297 bp, Zea mays
  Peptide Sequence Number=SeqID_68468
atggccgcgcgggcaggcgcccagcttggcccgccagtggggacaacgtgggaacggcgccgtgggcgtgggcccacgtgccagagggagggggaggctaacaatgtcgggtggtcggagaggtggctaagcatgggtgggggtaggggatcatggtggagggggcgggaagcggccaaaggccagctggcgccggcgagggatgccacgacggcgatgagggcgcacagcgctagggacgagacctctcgggcaggctgtgagcacagtgagctgagggggcggagcggtgcctaa

SEQ ID NO: 25094 - DNA, 489 bp, Zea mays
  Peptide Sequence Number=SeqID_68469
atggggagcgtccaagaggagctggaagtggagcaccacttgcgtgtgggagaaggcccgcgactctctacggagttatggtgcttggccctcatgtgggctaccctttgcgtaggggcaccaacgaggattagtcgggaccttgcatggttccggatacctcggttttgctctagggatttatttgtggccaagtttagagaaagttttagaagtcctaattcaccccctcttaggtgtcactgtttccttgaattggataatgagcttgttagagacttgtattctcgtttgaatctaatcataaatgagctcaattctattggatttaataagctaggtgatgcggatattgtgaggaatgttatcttcctactaacacaacaaagatatgggaacatcatcactattcttcacaacatggaggacttgagtacaatgaccccgaccattgtgattgagaaaattgtggcatttgagatgtcatga

SEQ ID NO: 25095 - DNA, 1851 bp, Zea mays
  Peptide Sequence Number=SeqID_68470
atggggagatttgtttatgattgtagttcacaggatgctaaagtgacttggactaaggcattgaggaaagcaacacctcaaaagaagacattatgcagatcacaagtgaagatcaacaagtatcaagcaaagtccaagaaacgaagaaaagtgttgtcactggcggactgtccggtcgaggacaccggactgtctggtgccacacgccggactgtccggtgcaccaggaatagtagcccaacggccaccgccgccgcggagacggtgagagtgatcaccacccccgtcttcccccacatccctcgacttcaggcaagcaaggacttccaggtgctggtgcgcatagaggcgccaccggcggcgcagccgcataggcgcgtccccgtcgacatcgccgtggtgctcgacgtgggcggcagcaccggcaccggtaccggtaccggtaccggcacgacgaggctggacgcagtgaagaaggcggtcaagtttatcatcaggcagatccacgacgacgaccgtctcgccgtcgtcgggccgtccaactatcggctagtcaccgggttcctgaacacccacgatgcccgacgaaatgtcgagaaatccgtcgaccagctggagccccgtggcgagttcacgtctgggtctggcgccggcttggaggaggccatcaagatcctggagaggctaccgacgtcggcaagccggagcagccgcgcgcgcttcgtcatcttggtgacggacacggcagtggcagagagcggcagcagattcatcagcaagctgccgcgcgacttcatgctcccagtgcacacgttcgggctcggcgcggcccacgaccccagggcgctgttctacatcgccagtgaatcccatggcacctactccttcgtggacgaccagaacacggacggcatcactggcgccatcgccgtctgcctcagcgggctcaaggacgtggtcgccgtcggcacgcgcgtccgcgtcgaggcgcccgtcgggagcggggtcacgatcgaggggatccagtcggggggatacagcaggaccagagacgacaagacgtacggcgaggtcgccctcggcgtcctttacgccggcgaggtgaagagcttcatcgtccacctcagcgtgcctgctctttcttcgacgtcggccgtcgttgccggcggctgcgacgagcaacagctgctcaccgccagcttcgtcggccactacaccgccagcgctgcggctccagatcctccaagtccaatggtgacccaggcaatcttgtacgtgcaaaggccgccgccggaagccttcgacgtcgcctccggcggcgccctgcagagagtccccgtccccgtggtattaaaccacatcgctcggttcgacgtgctggagatggtggccaccttcgtcgacaccgacatcatctggcggcttagctccatcgtcacctccgaagtggcgacgaagctgcggatccagtgggataagttcctgcaggcgcggcagttctggagcggcctggacctgggagtcctcaacgccgaggtcagaaagatggtgagcatcctagaagcagcgggaagcagcggctcgtcgacgtcgcaatccacggcgacggcctacatgctgtcgtggctgtcgagctaccagatgcagcggccgacggccatgggatccccgggcagcgtcgcgtccgctttcgtcaccgtgaacatgcagctcacgctgcagcagacgaccatcgtccccaccgctgctccactatgtatctgccatgaaatttccaatttttacatattagagcttgttgtatctttggcatgtttgtttgtttttgttttggtggtagcctccggctga

SEQ ID NO: 25096 - DNA, 285 bp, Zea mays
  Peptide Sequence Number=SeqID_68471
atggacgccagagaccgagtttatgagggtggacctcaccgggtacaaaagaactgcgcgtgccacctgcccgatgtcggcgagccgcctgggatgctgttggagtggacgaagcggggttcatcggtggcagtggcgaggaattcgagagagccaaacttgatgctgctcctaggggcaaatgttttgcccctagcaaaagctgatgaattggccatcaaagtgaagaatgtcgcttggcacactaacagtccctacttagcacgccaattgtcatggttttag

SEQ ID NO: 25097 - DNA, 174 bp, Zea mays
  Peptide Sequence Number=SeqID_68472
atggcggagtggagtgagcgggaggctcgcctggcagatcatcagaggatggcagagatgttccagtacatgcagagccttggcgccgcacagggccaatctggggcggcatccaacaaccctcatgaagcgtacaacccaacgcagcaccagtccaaccgccgacctcaatga

SEQ ID NO: 25098 - DNA, 531 bp, Zea mays
  Peptide Sequence Number=SeqID_68473
atgaagaaccgagtaatgggtggttttccaagtgatagggttgaagttggtggtgaggttcaccatgcaacgagggactatcacaagaagatgaagtcccccctgaacttgtccaaacaaggagccctctctcaattctctgagcatggattttcggatgatctcaccaataatgtgcatggaattggacactccaaagagaacatcaccaccaacaacgtgtcacgtcccttcacaagtgggttctcaattggatcatgggaggattcaaattctattgagttttccaacctagcaaacaaaacaggaatacacaataatgatgacatcatagacaatattagtaactcttatgaactacagtttggtgtggcaaaggaaatggcaggcctactacagatgcaacaagaccaggttccatttagagtacgagcaaagcgtggatgtgccacacatcctaggagcatcgcagagcgagtaaattccctcttcatctttttgataatgcatagtggcattgttcccttttag

SEQ ID NO: 25099 - DNA, 141 bp, Zea mays
  Peptide Sequence Number=SeqID_68474
atgcggcggcagcaaactagcacagcggacatgctggatttagcagttgatcacatcagaggactccagaacgagctgcaggctctcaagaaagacaaggagaagtgcagctgccgcggcaatcgtccagcggggagataa

SEQ ID NO: 25100 - DNA, 2529 bp, Zea mays
  Peptide Sequence Number=SeqID_68475
atggcgaggcagctcgtattcccgtggagctctagcgcgtcgacgcgtcatccatggaccatggtgattgtcactgggcagacaacgagctcatggagacgctggcgctctgaggtgttgtgttgtgtcagtaaaaatggccaaaacctacatggagcactatgcaatgaactttacacagtaatccgtgaagttttggataccattcctccctttgagactacaagctcaggatgcagtcctgggctcctggcattgagttccttgaggatagctgttgagaaatccaagaatttactccagtattgctcagagactagcaagttttacttgatcacattgattgcacaagaactggaaaaggctgctttcgttttggatcagtctgaaaaggaagttggtgatgaggtgaatcaactaattcagaacgagtcaaaatccaatgggtttcttgatgagaatgagcttgaattgctccaccaaattgctgtccgggttggtattacatcatccgtggcagctctcaccgaaagaagagcacttaggaggcttcttgagagagcccatgcagaggaggacttgaaaaaggaatcgattgcagcctgcctactccaacttattaggaaatactccaacatatttaagagtgaaacaaccgatagcaccaactctttgtgctcaagcactccttgctcctccagatcgaattctggcttgattggtatgcatcgttcactttccagctcaactgatctctacggaaactgtcagagtctcgagaagcaactcccaaaggttggctccttcagttcgaagcagatgaaagggttatcaaggagcatgcccttgccacctgaggagctgaggtgcccaatctccctgcagctcatctatgaccctgttgttattacatccggccagacatatgaacgagcttgcatcgagaagtggttcgacagtggcaacacaacctgcccgaaaactcgcaagcagttgtcccagctcttgaggacgcctaattactgcattaagggtctgatagcatcttggtgtgaacagaacggggttcctgctccatctggaccgccagaatctcccgagctagaccacatgagaatttcatgcctggaaagcagcacatgtgtggggactgatggcgctaacactgttttgttcgaagagacagctgccaaggatgatgccaagtcggacatggagatattctctcgtcagaactccggagaggccacatccaaactacgtgtagatgaggtctcaccggagaactgctttactcttcagagctccaaggaggctgcacctgagacatgtggggttgtagactctctagacaagggcaagggctctcaccaagactccaaagatgatgtgcctgttagtgaaagatgtgaacagtggctccatgtgctgaacaagaacgatgctgagagcatgagtgagagacttaagttggtcgagcagatcaggatcctgttgaagaacgacgacgaacttcgcgactacgcaggtgctaatggtattactgagccactaatccattttctgaagatggctatctacagaggagatgtgcgatctcaggaggttgctacaatggctctgttcaattttgctgtcaacaatgaccggaacaagaggctgctgctgtcagctggagtcatccccttgatcgagcagatgatacaggaacgggaaacctgcgaggctgccatcgcaatgtacctgaacctctcctgcatccccgaggcgcaggcgatcatcggttcgagcgtcgctattcctttcctcgtcaatggcctgggggaaggtggctcccggagcgacacgtgccgcctggacgcgctgctcaccctgtacaatctctccctgcacgcgcccaacatcccgtccctcatggcgtccggcatcatcgagggcctccggggagtgctgacgccgtcgtccccgtggacggacaaggccctcgcggtgctgctgaacctggcgatgacccggaggggcaaggaagagatcgcggccagcgcggccatggtgggcgccatcgtgctcatcctggacaacggtgagccgggggagaaggagaaggccgtgtcgtgtctgtacgtgatctgcagcggcgacgatggcagcagccagacggtgctccaggagggcgtgatcccggcgctggtgtccgtgacggccaacggcacggccagggcccgggacaaggcgcagcggctgctgaggctgttccgggaacagcggcagcgggagttggagctggaggagatgcagccgcgggtggagctgcacgaggtggcgagccaggcggccgcgcggcaggaggaggaggaagaagaagaggaagagatggcgctggccgttacgccggccgccgcggccagtaagccgagaggcggcggcaagaagccgcggttgcgcagatttgggttcggcaagggtgataacgcaaactcactccgaatggtgaactgcggagagcttgaaggtggatatgaggcttga

SEQ ID NO: 25101 - DNA, 147 bp, Zea mays
  Peptide Sequence Number=SeqID_68476
atggcgcaccggacagtctggtgcgccaccggtttctgtggagggaaagtctctgcctcggaccagcctggccccatctggcagagggtgcaccggacagtccggtgcacaccggacagtccggtgccccagggccagaaacactaa

SEQ ID NO: 25102 - DNA, 420 bp, Zea mays
  Peptide Sequence Number=SeqID_68477
atgtccggtggggatggacctcctcccgtttttgatggtgacgattttccttattggaaaattcgtatggaagcatacttagaggctatagacattggtgtctataaagccgccacacaaggattccccgaacctagagatcgcacaaatcttgtaggtgatgagttcaattatgagaaatggaatgctaaggccaaaaacaccctttttagaggcctttgcatagatgtgttcaatagaattttgggaaagatcaatgcccatgaaatgtacatgcacatcaacgacaaagaagaatcatcttccaaaagaaaggatttggctctcaaagcaaatcatgaaagaaaaggaaaagcaaaaatacaagttgaggaagaatcctcaagtgatgatgaccttgatgcaaacattgccttgatg

SEQ ID NO: 25103 - DNA, 477 bp, Zea mays
  Peptide Sequence Number=SeqID_68478
atggtgcggccggcggcgaagcacttggtggcgctcgccgtcgtcgccattctcggcatcggcctcgtcgctgactacctctgggcttcgtccttctccgcatcggcttgtgttgctgcaaatgataaacttcttgttatcggtggtcaagaaggtgatttcatggcgaagcctgggtctcctatatttaaatgtgtcagaagaagtgagcatccattcccacgagtacctgcactgaccatgctcgcaatcaccatatccagagggcagcaaaagtcagaagctgattccagagcaactgtccttctggtttcgctgctcttgggactcgtttttttccttctcgaaatccatatattttttctcgaaagcgcaagagagctgcgcgaaaatatattaagaaggggaaaaaggtccaaaaaggaccccaagatacagataagccgccctacggcggccaataacaagcataaatga

SEQ ID NO: 25104 - DNA, 276 bp, Zea mays
  Peptide Sequence Number=SeqID_68479
atggagtgggaggaagctgggcgcatgccgcccaatatgtattgctgcttcactggcctatgcgaggctgcctcgcagggaggcgccataccgaccgatgctgccgggggcaataataaggtcaaagttctcggaggcgatgggaaggtgtggttcgcagttgatgttgaagctgattctattgcgttccagaagagaggttattttgatgatacgaagctgtgctccaatttcaagtctaatgatgacttagacttggttgatattcaaatttag

SEQ ID NO: 25105 - DNA, 1590 bp, Zea mays
  Peptide Sequence Number=SeqID_68480
atggtcgcggtcgcggacgcggggagccccgcgaggctcaacccgctccccaacaccgacgcagaggaggaggaggttctcaccatcacgcccaccaagtgttcgacaatatacctcaaccgcggcatctactccgtccgcaacccgatcctccaccgtcagcacctactccgggactgcgacggcaaccacgtcgacatccttcctacctccgagttcgacgagggtcccatcttcgacgaggagccctgcttccaccgtaacctcctggattcagatccagactctccctacgactgggtcgtccccgtcatcgccgtccacagcagcggctacactgagatgtcccacagcgaagccgacaaggtccccgcgaccgccgcgctacccaacctgcgcgagaagatctgctgtcggttcgtcgataggacgaagctgtccagccatgtccgcctcatccacttctccctaccgtcgccggaccaggcgctcggcatccccatcggcacgcatgtcttcgactgcaccagcgttgacgggaagccgtgtatgcgatcgtacacgccgacgagcaaggaggacgaggttctcgccactacgcccatcagaagggatgcagtgcagcataggcaatcatggccaccgcctgtacagtatgggatactgggtgatggtgttcaagtctggcttccgccttggccaccacctgtttgggaattctggctgtcactgaagattactggtccacagatgatgcattcggtaggatactttggattgccagttatgccagcgacatgtattacaatttcagagattgtgtctggttcaagcgagcaaatatttcctgaaatatttctacaaagcttacatgagtgcagagtttgtcttagtgaaaatactggcagaagtttactccagctcccatgccaccatttgttttgcttgatgtgtatgaagtctaattgcagaattcatgtgatagaagcggatttaacccaggtctggttaagagaagatgcagttgcttacttcaaaaatatgtttgatggtggcctgaggccaacctcaaatgcatttaacaaagttatagatggctgggtgaaggttgatatgctcaacgaggcccatgggttctttgatatgatgcctgaaaaggacatagatgatgttacagtggtcattttctactttggaggacaacatgtgggctgggaaatgaagacagaatggttgtctaatggttggctatgtttggtatgtggtgcatctgatactcaagagcttcctctacatttcattaaacttgcaaaggatacgtacacatctgactgcatgttcaaaaaaatcggatatggcactgtgagtgaggctttggtttacatgctgtccttactatttgttcgaagagattattgcaacgaggaaccattttttaggaatgtgcttgagcattatcaatgtggcgttgagatgatacggagggatttatttattggccattggaaacattatcttcaaagtgctataccacttcaaccctgctttgatggtctcataaatgttggcaagatttgggtgaattactga

SEQ ID NO: 25106 - DNA, 264 bp, Zea mays
  Peptide Sequence Number=SeqID_68481
atggatgattccgatggatgtggtgttggtggcagtgtagctgatagcatagtttgcttatcttctagtggtggtagtagtgcagttgatggtgccagtggagttgatggttgtcttcaaaattattcattggctttgttcatgggctattttgcagcgaccaacttcacaagatatggtttttgcggcatctcaacacttgatactagtgatcaaggggtttttttacccaggcatataggtggcagtctagccttagaatag

SEQ ID NO: 25107 - DNA, 435 bp, Zea mays
  Peptide Sequence Number=SeqID_68482
atggagacggccgcctcggcagcgcgcctggtgaactacccgctcgtcgcggcgcttctcgcgttcgccgtcgcgcagtcctccaagttcttcaccacctggtacaaagatggccggtgggatgccagacagtttatagcttctggagggatgccatcatcccactcagctacagtgacagcactcgcagtggctgtggcgatacaagaaggctttcatagtgcaacctttgcaactgcactagtctttgcatgcgtggttatgcatgatgcttttggagttcggttacatgccggaaagcaggcagaggtgctgaatcaaattgtctatgagctaccagaagaacacccattatcagagacaaagccattgcgtgaaatccttggacatactgttcctcaggttgaattaaatgctttgaattacctcccttga

SEQ ID NO: 25108 - DNA, 2661 bp, Zea mays
  Peptide Sequence Number=SeqID_68483
atggatgcaaatcgtccacgcaaacgtaggttactgcccccgctccctaccccgcaaccgcctcccgcacctcacgccccgccgtcctccgcactcccgcgcgtcgcagccactgcgaatccagctcccgcgcgccgcatccgccgcgaatccagctcctgcacgcccgcgccagcgcctccctactcccgcccgcccgccagcgcccgcaacgtcgcgagcccgaggcggcaacagaggcacaaggaaagcaggcacctcgattctgccgctacttcgccgtttccgggctacccacgtccgcctcctcgtcgcgtccacgtccgcgactgctcgccaccgccccagccgagaagcggaagcagcggtggagccgggtcctctaccaccaccccgtgggcaagtcccgactggctcccgtctctcccttgcgcggtcggccagagcggcggcgatgactcggggatttccatcgcgtccgccaagctcagcgaggtgcgggacctcctccgcggtgcgctcttcctgccgctcttcgagggattgcgggaggaaaggcccgtgttctgcctcagcgcggatccacaggacttcaacagggagggcggtgccccggttccgctggcgagctgcatcgtctccgacgcctggcagccatcagatcaagcagggatgcgcgagcgagacttggggggcgagcccatccacccacgccggtcgcaccacccccacccggcggccttcaagtctgcatctacattctgcagtccaacgccacccgcaccgcttgctttaccagcagtccagcactggcgtgggccgtccccgtccgttcccctcgccgatgtgagtttctccagccgtcaccgtcaagtaacggccccccaccccaccccgcgtctaggctccttctgggggaggccgcggctcaccgagctggctgcgcccccaccggcgggaacgacaatagtgccacactggacgctttcctggtgcagcacgacatggagaacatctacatggaccggcggggtggggagggagccagcggcgtctcctcccgtcgtctacacgcagcaccacaacgaggcagatccggactttggttcctgttggtacaaggagatgctcgaccatctcgacaacgtgctggacaacgaacccgtggtggtgaagagaggccaggacatcgtggaggtgaacccccagagcatcagcaaaggcatggtggacagcctgctgtcgtccatagtcagaacggggacagacctggtggatgggatggaggacgccgcgaaggtgttcgacgaaatgttgactaagggcgaggaggtaccatctgcggtgatgtacaatgctctaatcaatagctactgcacaggtgcaaatatggaaggcctttgtgcagacaagactcgacaattggttgacatcacggactggatcgtggacacagagattaccttgctcagggacaacaacaggccaaaacctggtggcaatgttacctttggcgagttgctcaagagcagtgtgctgacagaaggtgtccgggtgcttatgctggtctggaatgctaggactttcgtcgagtgtccactgaagcagtacccatgggagcaggaacatatggcttcgatgaaggagtacattgctcgctttggtcctggttctgcaaagcttgtgaggggaatgaagcaaccatggccgccaccaagggcagtcccgccgcggcttgattacagcgatgatgaggcttctattggtagtgctggtagtgctgggactagattgtaccccttgacaaagaagcgtgccaagcctgcagtgccattgggtgccaactatagactgattgatattcctgtcaacagttgtctcaacagcaacatatccaagatctatgtgctagcgcaatttaactctgctttcctcaaccgtcacctctcaagagcctatgggagcaacattggagggtacaagaatgaagggtttgttgaagtcttagctgcacagccgagcccagataatccaaactggtttcagagtactgcagacgctgcacacagagaaacatatgctgatattactgttgctgccctaccgatggctgagaaacgtgcaactgcatttggcctcatgaaaatcgatgaagaagggaggatcattgagtttgctgagaaaacgaaaggagagcagttcacagaaatgatggttgacaccaccatacttagccttgatgacgtgagggcaaaggaaatgccttatattgctagcatgggtatctatgtttttagcaaagatgtaatgcttcagctcctccgtgaacaattttctgaagccaatgactttggaagtgaggttattccaggtgcaaccagcattgtaaagagggttcaggcttatctttatgatggttactgggaagagatgtgggctgttctaatccgtattttcgctcaccaagagaaggttgattggatgtactttgttccttttgctggcacaacagttggccttgtgatatactcatacaggggctcaaggcagaatcctaaagagacagcacgggttacacaggccatggatgcggaggctgcagcggcaaacagtacaacacaagttcctggtgcttttggggcgtgcttgcaatttccctag

SEQ ID NO: 25109 - DNA, 721 bp, Zea mays
  Peptide Sequence Number=SeqID_68484
atgtctggtgcaccagaggactcaggtttcaaactcgtcaccttcgggaatttccagaggccacttcgctataattcaccggactgtccggtgtgcaccggacatgtccggtgctccaaggaagggcggccccaggaactcgcaagcctcgggttttcattccagccgctctgctataattcaccggactgtccggtgtgcaccgaactgtccggtgcatctgcggagcaacggctacttcaggcgccaacggctacctgcagcgcagttattgcgcgccagcgcgcgcagaggtcaggcacgcccatactggcgcaccggacactctacaatacatgtccggtgcgccaccggacatcaaggcgggcccagaagtcagaactccaacggtcgatttccaacggcactggtgacgtggcgggggcaccggactgtccggtgtgcaccggactgtccggaacaaatgatgattcatatcaaaagctcaaagaagaaaatgagaggctaaagaagagcttgacacaactaaaagggaaatgcattgcccaaccttctcaagataaccgtgatcacatggtgaagaagcttgagacgggaacaaccgtggcatgcaatacatcccttgaagaaaatgtcaaggatttgaggattgccaagaggaagaaacaaaagatgaaattcaacacctcctccaaaagcctcaaccacgcctccacaaaag

SEQ ID NO: 25110 - DNA, 156 bp, Zea mays
  Peptide Sequence Number=SeqID_68485
atggagcatgagagggcacaggagcgagcgaagccagacaacaaagctattgagatcagttccactaatcatcatggattaggttgctaccgcaaatcgccactagttttcacccttggtcagtactgttacattgtcaacgttatggcagaatag

SEQ ID NO: 25111 - DNA, 549 bp, Zea mays
  Peptide Sequence Number=SeqID_68486
atggagtggtcagagttggttcctagcggcgaccgcatgactccggggagccgaggggtcgagcggggagtctcctcggacatccaggggcagcctgtcgagcgccgtcggggagggccgagcgggtccgagcgcctccggggagtcgaggcggccgagcgtgggccgcacgccgccggggagggaggccgggcggggagccgccgcgggacgggcaggggcagtcggccgagcgccgccggggagggccgagaaagaagttctgagcagcggtccaatactggtataccaccaactggtgtgtctgcaacatgggcctcgatgaagataggttttctaaatttcaaagctaatttgggctcgaagaagtctcttcctttgcgccaggatccaggatttgttctaaattttagtgtctcttcacctgaatctcttgatgacatattccaaaggttgaaacggcgacctgcaaatgtgcctgtggattaccttgatgacgatgacaacaacaacacacaagatatggatctgcatttccaagatcaatga

SEQ ID NO: 25112 - DNA, 732 bp, Zea mays
  Peptide Sequence Number=SeqID_68487
atggaagatcaactgaataatactttgtttcaattatccacctacatcgctgcaagtcggctcccatcccgcgagtggatcgggctagttgtttcagcgctcgtcgcatcccggtccccttccaagcgcgacgtcgaggtcacgtcctcgcccttggtcgcgtcccccgcgtcggcaaggacgggctccgcccccatcagaggtggtcagtctcgcatgccgtccacgccctccctgcgtgcgaggacccaggtccctagacggaagagaaggggcgcgtggcatggggaaccagcgaccggcaacccagatgtcctcgtagtggcgccagccaggcctcatgccctcacccgtcgacgcaaggcgcagcgcacagaagagccaaccgacaactggccaggctccgggttccagccaggtgagtattgggtactcgtatcctacccgagtttagttttacaggttggcgccggtagggggcactggttcttcggcgcggacaaatgggaacaaccacaaagaggaggaggtggccggctctatcatgagagactctgtgatcaacagtcgccatggccgatggatcatttgcccggttgctttatcgaaacatttgaccctctccccccacatgtagatacaccttaccccggctttccctgcatgtttgaaatgatgcacgcttctatccaccgctgcccaaacaccgaatgggggaaaggacaatcctga

SEQ ID NO: 25113 - DNA, 687 bp, Zea mays
  Peptide Sequence Number=SeqID_68488
atgagctcctcaagtgaaggtcctccgccccaagtttccctcttttctctcctgttttctgagatccatggtagccgccggggtgctgataacgttgaggtcatctttcctgagtctcatgtggttggtggagcctctgcatcctctgttgctgacagcaccgagcctgcgtcgacatcgttggccgctgcagattcttcagcacttactgagaaggccattgcagcgctgtctcctgagcttcgtgcacaagcaactgatccgaagagcaggcaaggtcacaggaccctggatggaagtttgggaggtggccagacactatcacactgcaaaggactttgttcagtcagtgaaaacatttctctcggcgacagagcgagagcagatgtagtctgtgcaacggtggctgtcatcggacctcgtgggcatccgcgtccactacgtgatcatcaagggaaccaccaggacgtaggacgatctcatcgaggcggaggtcgccgagctgctctgcgctgcagtgtctctactgtgcggctgcacgatctcgacatcttcgacgccgtcaagatcacactagacacgtggccgctcgagctgcctggcatcaccaacgtcgttatcgaggtcgccgaggcggccaaccccctcactgccattggagataggatccttactcctgcaatctga

SEQ ID NO: 25114 - DNA, 291 bp, Zea mays
  Peptide Sequence Number=SeqID_68489
atggacttagctgctgtcagcctcactctgtcgagtggcacagcagtcggagcggggcaggcggcgctgttttcctgccagtcgatccttgcattaaatgctcctgtgatacggtcggttggcgtggcgatctggccaaggttgcttctccgcgaagactgggcctcggcgagccgaagctttgtgctgatggggttaccagctgagattaggagtcttggggacgtgagcgcgggtggtacaaccgacagcctgctccagtcggtgcgctggtttgaaccaggttacagg

SEQ ID NO: 25115 - DNA, 285 bp, Zea mays
  Peptide Sequence Number=SeqID_68490
atggaggtagctgaggtgggagcgtccgagttttataggggcggggcgatcccaggcttaagaatcgcgaggatccacggcactccagccagcgcagatcacggtttccgtttggtggtcggcgagtatattgcgggcgcttccattgaacacggctgcggagtccgcgacggagcacatatttgggcagagttctgctgcggcaagaaataccagggcccaaccatgccgcgtatgcctggccgcgcgcatgccgttgtcgcgggcatggctaccatcacgtag

SEQ ID NO: 25116 - DNA, 513 bp, Zea mays
  Peptide Sequence Number=SeqID_68491
atggtgacctccagcttgatggtgggggaaagcgagccgggctgcggcctctacccctccctcagcctcaaggattttcatcaccagggctggggaggggactgcaccgtgcctggccttcggacgcgagtggcttcagagccgctcgcggcgccggcgtctgccacggcagctggaagaggttcttccgccgacgagatagccagggccgcccacggaccgacctccaactctacggccttctgcccgtccttgcctcacaagtttgggcatgggcgggggcctcctagcagcagcatccgccctgaggtcactgctgccgctgttcggccccccggagcagaagtcgtcgtcgtcgctgctgctggagcaggtgacggcgtgccgttcgtcggtcttctgtcgctccgcaggccctcccccatggagtggggttgctcctctagcttagttaaagagaccccttggccgctctccgacgagccgaggccaggggtagcgatatcagcatga

SEQ ID NO: 25117 - DNA, 180 bp, Zea mays
  Peptide Sequence Number=SeqID_68492
atggcgatgaggaggagccgcaccacgaggtgcccgccacgccccaacgaggccgctgaggcactcagcaaaccccgatacgctctactaccgagatccgaccacgacgacaatattagtgcagcggcggcggcacaatggctattatccggttgtagaggtggctgcgattttgtttaa

SEQ ID NO: 25118 - DNA, 399 bp, Zea mays
  Peptide Sequence Number=SeqID_68493
atggaggtagctgaggtgggagcgtccgagttttataggggcggggcgatcccaggcttaagaatcgcgaggatccacggcactccagccagcgcagatcacggtttccgtttggtggtcggcgagtatattgcgggcgcttccattgaacacggctgcggagtccgcgacggagcacagatttgggcggagttccgctgcggcaagaaattccagggcccaaccatgccgcatttttggccttacactgcggctggcctccaccatactgctgagggtggggctggcgctgcaatagctgccgcagaatctcattctgctgagccatcaactcctgcactgtgggagctggaggaggtggcgggggaatctactcattctgcccgtgacgctgcctag

SEQ ID NO: 25119 - DNA, 297 bp, Zea mays
  Peptide Sequence Number=SeqID_68494
atggaggagacactcgtttcagctccgaccacctttcccacgagggtttcccttccatcttgtgggagggcagacaccaccaccgaggctgcagctatgaaggccctgacgactttctacggataccatcccttgaagatggccctacagagcgacgccatggcacacctcactaaccttgctcagaccactaagctcaccctcgatagtcgagaaggcttcgtggtggagatctgggataacaccattgatatcctggagatccagctccatgatgtgcaggaggagcttgagtaa

SEQ ID NO: 25120 - DNA, 384 bp, Zea mays
  Peptide Sequence Number=SeqID_68495
atgtgcctgtgcctcgccccgcctataagtgcccccacggccttagccgtatcacctcgcacactctcgcccaagctggagatcatcggagatcgccgcagagagcaacagaacctcaccggagaccccgaatcaccctcgtcggacttcttccacccgccggcgaacatggaccggccgaagtactcgccgccgacaaactcccccgcctacgcacgtggaccagccgactccgaccacctccgacaccgacccatacctcgacgtgaccgccgtaacctccccgacctccctggacgcctcactagagccatctcaccgtcgattgcaacctcgctgacggagaccccaccttttgaaggcaagccccggttttatgcataa

SEQ ID NO: 25121 - DNA, 426 bp, Zea mays
  Peptide Sequence Number=SeqID_68496
atgtggggcccgtcacatagctactctcagcagggcggcgtgaggtcggggcataactcgccgaggcgaccgatacgatacgggagcggactggcctttaacaggacagagcgtgtctcaccaggagcggccgatcgcggcgaagacatcgtggttagtgtagatgaattcaatgagcgcaccttcctatttgttggagagtgctaccccggtacacacgcacttagatgcattggtggcatcgattgggatctccttcgtgtctttggtggacttgaaatagccggagctggtcttgtgagcatctggggaaccctagagggcaaccttctggagcttggccaactcctaggatgcagccagcgacgaggaaagctcacatttggattgctcgtaggtgtaggcagccttgaagaaggtgaatga

SEQ ID NO: 25122 - DNA, 693 bp, Zea mays
  Peptide Sequence Number=SeqID_68497
atgaagctgtggaaggagacttccaggagttccaagactacgacgagttctaggcgtggatggctcgacttagacacactgcacgaaagtccgtcatccccttcttaccctcccgtcttgctgagcgtccgcttcgccgtcccgtggccggtgccccctgcaccaccaccgggcgccccagcctctggagtagctgctggaggagaaccagacgacggaggtggcgacgacagctcgagccacgacaccgacttttctgctaaccaggagccggaaggatgggttgctcgacccatcactcgcgacgctgctcgccggtgtcacttccatgatgcgctcgacaccctgctacgtcgggcacttaaccggcgtacttggtccatcgagtatcgctgtgtggtctaccagcatagtcgcggggtctacccggaccgctgggaggcaacctgcttggtgcgccgtccggagaacagtctccagggtgctgaggtctgctcagagcactattctatctctgagcgggtctcggctgaggcggccatgcaagatgccgcacggcgtgcgctttcgcactactgctcggttctcggtggggtagctgacggtctcaacctgaagtattacccccgccgtccatctggcaacacaggaggcgtgattgtttcacctgtcggtgaggacaatcctaggtag

SEQ ID NO: 25123 - DNA, 627 bp, Zea mays
  Peptide Sequence Number=SeqID_68498
atggggagccagagccctatgtacatgccgtcgtggctgtcggagaggtgttgctgccctgttcatcccgaggtcgggcgaggcggtgactcctccgaggtcgaggctgagtccgagccctggggtcgggcgaggcggagaccgtcttccggagtcgaggctgagtccgagccctggggtcgggcgaggcggagaccgtcttccggagtcgaggctgagtccgagccctggggtcgggtgaggcggagtccgtcttccgaggtcgaggctgagtccgagccctggggtcgggcgaggcggagtccgtcttccgaggtcgaggcagagtccgagccctggggttgggcgaggcggagtccgtcttccgaggtcgaggctaagtccgagccctggggtcgggcgaggcagagaccgtcttccgaggtcgaggttgagtccgagccctggggtcgggcgaggcggagaccatcttccgaggccgagactggggccgagccctggggtcgggcgaggtggagcttcctatggtgcccgaggttggacttagctgctgtcggcctcactctggcgagtggcacagcagtcggagcagggcaggcggcgctgttttcctgtcaggtcagttag

SEQ ID NO: 25124 - DNA, 174 bp, Zea mays
  Peptide Sequence Number=SeqID_68499
atggagagtcatgatctccgggcagaaagggaatcacagcttatgggtggcaatgagactgatggttttggttatgactatggtactggttgtcagcattgcaaccactactcaggcgaagatgaagctgtggaaggagacttccaggagttccaagactacgacgagttctag

SEQ ID NO: 25125 - DNA, 351 bp, Zea mays
  Peptide Sequence Number=SeqID_68500
atggttaggccggaacactcgccgccgatgagctccccttcctgcgcacgaggtccgaccgactccgaccaccgccagcaacgagccgaccatcgacatgaccgccgtgatctccccgacctctgtggatgcttcaccggagctagatcgccgccgatgtcccgccttaggcacactgctcataagtcggtgatccctttcctgtcctcttgccttgtggaatgcccactttgtcgcatagtgtccggacagtcgagtcacctggagaggctgtaccaccgcctgcgcgaggagcaggaatgccaacatcaggaggtggagtctgcgaggcgccctcagcaggaggtgtag

SEQ ID NO: 25126 - DNA, 285 bp, Zea mays
  Peptide Sequence Number=SeqID_68501
atggaggtagctgaggtgggagcgtccgagttttataggggcggggcgatcccaggcttaagaatcgcgaggatccacggcactccagccagcgcagatcacggtttccgtttggtggtcggcgagtatattgcgggcgcttccattgaacacggctgcggagtccgcgacggagcacagatttgggcggagttccgctgcggcaagaaattccagggcccaaccatgccgcgtatgcctggccgcgcgcatgccgttgtcgcgggcatggctaccatcacgtag

SEQ ID NO: 25127 - DNA, 528 bp, Zea mays
  Peptide Sequence Number=SeqID_68502
atgagggtgatgactcgtcttagacacaccgcacggaagtcagtcattcctttcttgccctctcgtcttgcggagcgttcgctttgtcgcccagtgactggccagtctagccacttggagaggttgcaccaccgcctgcacaaggagctagagcatcggtgccaggagctggagcagcagggctcttcctccatgcctcagtacgagctagagtctgtgaggcattgctccactgtatccccactggaggcaccactaggcgccttggccgttgaagtagctactggaggagaccctaacgacggagacaacgacgatagcagctcgagccacatcaccgacctcttagaggagcaggagccggagggatgggtcgcccgacccatcactcgtgacgccgctcacgggtgtcacttccatgattcactcgataccttgttgcaccgggcacttgactggcacacttggtccattgagtatcaccgcatggtctaccagcacaatcgtgggctatacccagaccgctag

SEQ ID NO: 25128 - DNA, 450 bp, Zea mays
  Peptide Sequence Number=SeqID_68503
atggcgagagtagcgtgtaccctccgtggcaagaggctggacggtggtgtatttgtgctcttggttggcgtgaactcggtctggttgtccgaggttcttaggacaatgacatctataggtgggcctaataccttgggaggttctgtgatatctggagatatggcacgcacaaaaactacccagcgcaaatcgactggacctcagagtgtgcctcgacatcagctggcatcccggcatgaaggaagcagtagtggaagcaacaacactatcggggagttggaggccagagtggatcgcctcagatctgaactatgccacaggtgtagggaacgtgcgcgcgatagtcgccgcattgctgaactatcaactgaagttaatcgcctgcagtacgaaatttcggaacgcggtacaaccgttgactgggctgtaaattcgcgctctttcgcttag

SEQ ID NO: 25129 - DNA, 204 bp, Zea mays
  Peptide Sequence Number=SeqID_68504
atgccaggtgtgagcgcggtctcacctttggagatcgaagtcattggagctaggaacctcctcccaggggtgttcatgatgtggagccatcacgcggacgcagtgaccgatggggagctcggcctcgatgggtgtttctcgtcgatgccgccatcgtggtctgcatggccaccagtcccacgccgccgtctggtggggttgtga

SEQ ID NO: 25130 - DNA, 770 bp, Zea mays
  Peptide Sequence Number=SeqID_68505
atggatgctcaatatgatgtgactcaagaatggcttgatagggtgaagatagcaaggaaagggcttcgaggaactaagcgaaggttcaaccggggtccagggcaagttcaaccggggtccagagaggttcaaccggggtccaagaaaagttcagccgggtctgacttgcagtctgccagtctgactggtagactgtctgtcagcctgccccaggcggttgaaccggtcttaggggcggttcaaccggtcttggtcaactttgaccagtctgcggtcagtctgcgcgtcagtctggcagtcagactggcagacaggctgccagatattgatcctagggcaatagatcttgccatgaaaatcgccgaaaggatgttcctcaaaatgaaagaagatgaggcgaagaacaagattgaagaagaagaaaatgatcgatggagaccaaacgacgaatccacctcttcacaaggttcgtctttcaaatccacttctcatatgtgctttatagctaatgggagtgacagtgaaagcgaaagtgagaatgaggaggagcatgaaagtgatagtgaagatgaggatgatcttcaaaaattcttcgctcaactaagtaagaagaaccggatgagcttgctcaaactcatgaaaagagcggaagaacaaaaggaaatgcttcataagcaagaagatgtcctcatcgaaaaaatcaaagacttggagaagttgaccaaagagcatgagaagctaaagtgctctcatgatgatttggtccaaag

SEQ ID NO: 25131 - DNA, 582 bp, Zea mays
  Peptide Sequence Number=SeqID_68506
atgggcgggctgtcggccgccattgtcgttgtcgcgcggcggtggaaggagtatcatgtcgtagctgccgtcgaaggacatgaactcaagtctcccgaaatggagcaccgtcccgggtcggagaggttgctggagactgcccatctggagcttgacgggaagctgttcgtcaacacgcagcatgcccctacctggcgtgccaactgtcgacgtttcgagaccgaggggtccctcgggccgacgagttgggcgacgtggaggctcctccaaagccaaagtcgagtctgtcttccatggccgaggccgagcccgagcccctgggtcgggcgaggcggaggtcgttcggcagaggccagggcggagttcgagccctggggtcgggcgaagcagagttcgtcgtcttccggggctgagcccgagtccgagccctgggtcgggcggagcggagttcatcgtcttctggggctgagcccgagtccgagccctgggtcgggcggagcggagttcgccgtcttccgggacttagcccgagtccgagccctgggtcgggcggagcggagttcgccgtcttccgggacctag

SEQ ID NO: 25132 - DNA, 288 bp, Zea mays
  Peptide Sequence Number=SeqID_68507
atgaaggctggggaacaccgggaggataaggagggggaaagttttgtccggtttggacatggtggtgggcctgactccttccggataaccgttaaggttaggacgtgcggggaaacaaagagagtcggattcgggtctcattggccatgggatcgcagagccgaactagtggaaaaaggagatcagcctcctgggactagtaattgtatcacatttgagtcccagaggattggggacgcttcaggtggtatcagagctgttaggttggccgcaggacgtaacccttag

SEQ ID NO: 25133 - DNA, 390 bp, Zea mays
  Peptide Sequence Number=SeqID_68508
atggaggcctacttggtaacccataaccaacgtagagccctgcggatccaagagcccgcttcatccaacctagttcaatctatcagagctgaagatccccagattcttgaagtcttccctcaggctatgaataagcaagagcaccccgagtcctcccaagattccccgccagagttgtttgagcccctcaccatgaagaagattccagcaccgtcccgtgagatcaaagaagctgcaagcaccccaccagcaccgccgccctttgaggagctacaagagccagtcccgcttgaagaagagttcgaccctgtcctgccatctcagtcgccgccagaagaagtcatcaacatcagctccctgttgacccatccaggagatatctcagattga

SEQ ID NO: 25134 - DNA, 663 bp, Zea mays
  Peptide Sequence Number=SeqID_68509
atggcacggtggttatcccgtggttcggccaagaccaacgcttgcctactccacgttgtggcgtcccaacggacgagggttgaaatcaacccctctcaagcggttatattcctgctgacgaaaggtggagtaaaacaggatgacatcggaaaggttatcgccttggatccacagctcttgggctgtagtatcgcacataagctagaagttagtgtcaagtacttccggtcgctgggcatctaccactttgtgctgggtcagatgattgccgacttcccaacgcttctcaggtacaatgtggatatcctgagaccaaaataccagtacttgaggcgtgtaatggtgcggccgctgaaagatctcattgagtttccacggttcttcagttactccctggaggacaggatagaacctcggcaccgaactttggtggcgaacaggatcaacatgaagctgcgttacatgctgactggttctgatgaagagtttgcgcagagggtgcgagaggctgttgagaggagagcgagatttgaagctggaaaggctgctggtctggagacattctcatgttcttcagagacatctagtgatgcagaagctacagaagcagcagcatgccaaaacagcacggatgtggtcggggttctgcaaaaacaagcatag

SEQ ID NO: 25135 - DNA, 165 bp, Zea mays
  Peptide Sequence Number=SeqID_68510
atgccgcgtcttctcgactacagaaccagtgtagcgattcgaggcagccccgcacgtgacccaacagtgccaattaagtgcgacgatcacagggatcgggaaaggggatatttcgaaaaaggatccttctcagcgaaggaaacgggccccgagccctcctactga

SEQ ID NO: 25136 - DNA, 456 bp, Zea mays
  Peptide Sequence Number=SeqID_68511
atgggcaagaacaacaagcgtaagcgtgagccgactcctccatcggaggagtttggtgactcggaatattcggaggaggagttctcctccgagtccgaggggtctccggctcccgtctctcccccggcgtcgtccgatgactcggacgactcccaggggatagccgcggaggtctggacgtatatccgggccgtcgagcgcgccgggctcgaaggctcggatgagtcggagtgctcctcggatgaggaggactcggacggcggcgacgagggtgaagacgacgacgacgacgacgacgacgacgacgacggcgacggtggcggcagtggcagtggcaggggcggcggcgacggcagcagggacagcaccaagggcgacagcaggggcagcaccaagggcagcagcaggggcagcaccaagggcggcggcggcggcaggggcagggccagtggctag

SEQ ID NO: 25137 - DNA, 1071 bp, Zea mays
  Peptide Sequence Number=SeqID_68512
atggccacgacgaccgtggcgaagggtgacgtgggggccctggaggacccgtggtccaagttctttgccggcggtgagattgcctcggctgccgctgcgaagggtgtggccgcatcagttgcgcagcagccgaaatatgtggctgcctttgccgaacgtattgcttcaggggcgttgacctcggagttttctgccgagaggcggcgacttgaggggagaatcgagcgcctccggacgcaacatacggaggcagtcatgaacaagtcggcggcggagaacaagagtcgcaacctgcttgtgaagctgacggcagcggacacagagaaagaagacctcagccatcggcttgtggaggagagggagggcacggaaaaggcccgcgcagaggcccaggctgcccgtgctgaggctgacgtcgtgcgcgccgaggccagccttgccctcaagcgtgccgccgacgcggagtcaggggtgaagagcttgggaagctacactgagaagacagaggcctccacatgcgctggtgttgaacgggcgcacacaatgttcgtggatgcgtaccgcgagcttggcgcgcgaattgccccttttgataggtctagcgaggaggtgggccttcgctttctcgggtggctgcaggaggagctggagtcgctctcgtctatcgtgatgggcctcatgtcctatgcctcgctcgttacctgcgagggggcggcgaatgccttgtcccttgaagggtgtaggcatttcgaagtcttcgaccgtgtaaccgaggacttcgaccgtggaatcttccaggtcggagacgaggtgctaaagcggtccgctggggcgctttacgacaggatgtggggccctcacggccgtgacactgtctgggagagggctgaccgagctttggcgcagatgatgaatgaggaagaagttgaggacttcgacggccttgaaagctcgatgacctggacggagagcgcggaggcgggggttgaagggcactccgcgcctcaagcaggccctgatgaagactctacagcggcgtctgctccggcgcaggtggaggggtcgcgttag

SEQ ID NO: 25138 - DNA, 1011 bp, Zea mays
  Peptide Sequence Number=SeqID_68513
atggtgaccaccagtttctgggtggggaagagcaagccgggctgcgatcttggtcccaccctcagcttcaaggatgttcatcatcctcgctggggtgggggccacgctgagccggcgctctaccttccgcgcgggtccgcggcgtgtcggagtcgtcggccgggcttccggcggcccctcctgccggagggcgaccgccgcgccgtgtgcacgggaggaccacccatgatgccgcgcgctgttagggcggcgttcgtgttctgggttggtcctgcttttgcactgggacggcgccctcgcgcagaagccgatgccccactcgtctgggaggatttgagtggggatctgccgggggctggtgtcccctgccgtcggcgccgaggcggaggcggatcgagaagtcctcgtcgccgacgggatcactgccaccacccgcgccccgggccaccgtgccggcgtgcttgtcctcgcccctcgagcgtcggcgggagcgagggcaagatcacagcagcgccggcccactgtcgccgaagtcagaatgggcggcggcgagccgcccgtcggtcttctgttgctccgcaggccttccccatggagtggggtcgttcgtacccgcggagggggaaccggagttccgtttgtaatggcatctcgaatgccgagccgacgccaaagtcgatcagccgaggcctcgggtcgggctggcgcccttgggagccggttggccgaggccccaggggtaaccggccgagccgcctgctcgggccggattcccggaggagtccctggagcgcgtcgtcgtccgaggctgggtcggactttgctgaagacgccgtcgatgccgagggtgctacggctcccttcagcgtgaagacccgagcctgcaggatcagatcgtcttgcagcgtgtgccttctgcggccgccgaggccagaaaaacacaccctcgccgtgcttgcgaagctgcatctttttttcctcttgtttcgagcatctggactctgtcggtaa

SEQ ID NO: 25139 - DNA, 2037 bp, Zea mays
  Peptide Sequence Number=SeqID_68514
atggatccgccaggctccaacccagatggagtagtaaacatgacgagggcaatgcaggctctgtcccctttgctgaagcacccaagggcgacgatcgtcaaagtggaaggtctggtgctagcggccgctgggctgctgcttctccagctcttcttgggcttctacaggcggcgctggcgtagctccgtcctcagcactgtcctgcgggcgtcttccaaactcatggaggcgctcatcatctacacccttggtgcgatgcagtcctccccgatcaagaactcgtcgtatcccgtctgggctgcttttctcgtcatggcttcggcgggcaccaccgccgtacaggactatgatttctgtggcagcttctacaacaagtacatggagggtggagtcgacatgatcaagtacttcttctactggatcatgttcggtctgctccttgatccaaatacttataccttcaagacaaccctggacctgcagcggcatctcaagaattccagagcaagttccaattgcgtaatggccctcttttatttcgctttattcacaaagctctgcgaatccatcggtctagcagctgtgggatacaagatgcagaaatcgaatctttttttccgcccaaacccaaggaagatccgtttcggcatacaggccgtagagacggaagagtatgaccctcagagcatgaagggcaacgggtatgcagtctgctaccgtccgtttggaggtggtggactcgttaccatcgaccagctcattgcaaggcgtttctttgggctagttgtccaacggcccaagaccatccctgaaataaaagaccatgatttcgtattcaagaaactgctgccctctgaagagcatttcaaaagagccttcaggattatcgaggcagagctgggcttctgctacgactacttcttcacaaagtactactacaccttcgcagcgacgaatcagctaccggtgccgttcctccagtctttggctttagcaaagatcactctaatcttaaccgttggtgtgtttgccgtcaggaattcactggtacttgagacgccaaatccgatcatacaagtacgcatctcaagagctgactacatcatcactctgctgcttttggttatagccctcacagtggagctggtgcatgcggcattttatctggcatcggactgggcccaggtatcactagccaccatgtatgtcaagagatactggtacgaaatcagcccatccatctttgcaacagtcatcgctttccttagaagggtcacgttttctggacagctgatgagaaacaggatgaagcagcactcattgatgagaaacgggataaaacagcaagatccagtggaggtttctgatgcagtgaagagagctgttgctagatcgctcatatcaacgtatggcggcaacgacccaaccaaggacgacgacgccgtagaaacatcgcaatggcaggaccagatgccgttccatacgtattcttgtgaacttaagggcctctctcagctggaagtcatgctaatttggcacatcgcaactgaacactgtgatatttcctctggtcctgctcctactaatcggactactcgagatgatgaccgaggcgttgcagttcatttgtctagatactgtgcgtacttgattggatctgtcccagaactacttccgtaccatgaagccgatatagcagagttggcactgaaggtggtgggagaacccacggaacaagaagacgacgctcggaatatcttccataaaggcatcgagctcggtaagcagctggagaggatggcggatggggatcgctggaaggcgctgcaagatttctgggccaagacaaccatccatgccgctaagtcgcactacaccaccaagcaacacatgcaacaccttgaaagtggcggggagttcctcacgcacatctgggctctgcttgctcatgcaggcattctctaccttaatcctgtgaacaatgaagatcaggaggaccaggctaatctaggctctggaccctcagctgctgcatga

SEQ ID NO: 25140 - DNA, 882 bp, Zea mays
  Peptide Sequence Number=SeqID_68515
atggttgaaatgtaccaactctcacggagttgcgttcctccaacgacgaggcggaaagacggcggatctcccccatccgggggcttgggaggtggaaagacacgatgcataagtgagcgcgaagacatggtcgccttccaagggggtcaccctcctttaaaggccagttctccctactcgcgtccccagccatcacaggctgagtcttctccaacacactccaaggtcctcccctacggcgcgggggctgggtcccacaagtcatgcaagccgactcagggcagaagaagccaaaccgccgtgcgtggtgcatacgaccgcccagcggttacaagcgaccctccacttttgcccagaccagcgggcgaaagggtgggcggccatgcaggcggcatgcaaccgcgccaagtgggcgcgcttctccgactcccaacacgcccagcctggaggcccaggcccatgcgtcatgcaaccggcgcgccgactgcttcgtgcatgcaactgcaccgccacttgcgccaccaccgcgcctcctcgactgcggaaccaataccgcgactcgaggcgacccagtgcacgacccagcagcgccagcctggcgcgacggtcagtgcggccaaaaatgggccggcagtaatggcagcggcaggcgagcagggaccgggaaagggggataccccgaaaaggatccttccccgtgaaggaatcaggctccgagcctccctactgatcagaggttcgaaggctggccccccgaagggttcgacagccgcctcagatcgcgtgggccctacacccactactggtcagaggttcgaaggacggccccccgaagggttccacggccgcctcaggctactcgggctccgcgcccattactga

SEQ ID NO: 25141 - DNA, 549 bp, Zea mays
  Peptide Sequence Number=SeqID_68516
atggcggctctcggccccttacggaagcaagaggacgtcagcaaggacccaaccactccgacagctgtccctccaccaggctccatcgctcctccgacagccacgacatcacaccagctgggtgccaaaatctctccggctgccacgacggcatctggatcctctccttacgcctataaaaggaaggaccagggccctcttagagaaggttggccgcgcggggacgaggacgagaacaggcgctcgcttggggccgctcgctccctctcccgcgtggacgcttgtaaccccctactgcaagcgcacccgacctgggcgcgggacgaacacgaaggctacgggattcccacctctctcacgctggtctccggccgcctcgctcttccccccttcgcgctcgccctcgcgctcgacccatctgggctggggcacgcggcgacattcactcgtcggcccagggaccccccggtctcgaaacgccaacagtaccctttgaggcctaagaagccacgcaccgcgtgtgccgagcggagtgctggccagtcgtga

SEQ ID NO: 25142 - DNA, 1905 bp, Zea mays
  Peptide Sequence Number=SeqID_68517
atgacgagggcaatgcaggctctgtccccttggctgaagcacccaaggaggacgatcgcccaggtggaaggtctggtgctagtggccgctgcgctgctgcttctccagctcttcttgggcttcttcaggcggcggtaccggtgtcgtaactccttcgtcaatactgtcctgggggcgtcttccaaactcatggaggctctcatcatctacacccttggtacgatgcagtcctccccgatcaagaactcgtcgtatcccgtctgggctgtttttctcatcatggcctcatcgggcaccaccgccgtacagtactatgatttctgtgatagcgtcaacaacaagtgcatggaggctgtagtcaccaccattaagtacgtcttctactacatcatgttccttctgctccttaatccaaatacttataccttgaaggcagccctgggcctgagccggcatcacaagaaacccagagcaagttcaagctgtgtcgtcgccctcttttatttcgctttagtgacgaaggcctgggaatcttttattgtagtatatctggtatacagaaagcagaagccgattcatctcatcccaaccaagatccgtcgtcgtcgcacacagaaggagggagcaagtgcgagaaaggctacgactgagactgactctgaccctcggagcgtgaagggctacgagtatgcagtctgctaccgtctgggtggaggtggactcgtcaccatcgaccagatatgggatcgtctgaatgccaactcagctgcttgtctcaaagatctgtgcctgtcctatgccttgtttgtgcagctcaagaacaggcgcttctttgggctagtccgtcccaagaccagctctgcaagaaaagaccatgactttgtattcaagaaactgctgcccagctgtgaaggggatttcaaaagagcgttcaggattatcgaggcagagctgggtttctgctatgatttcttcttcacaaagtactacacttttgttttaggaaagatcgttctaatcttaatcgttggggtgtttgccgtcagcaactcactggtactcgagacgccaaatccgctcatagaagtacacatctcaagaggtgactacatcatcactctactgcttctcggcatagccctcatagtggagctagtgcatacggcattttatctggcatcggactgggcccaggtagcactagccaccatgtatgtcaagaaacaatggtacgaaatcagcacatccatctttggagcagtcaccactttccttagaagggttacgttttctggacagccgacgatgatgaggaacaggatgaagcagcactcagtgattctcgggcagagacagcagccaggtccagtggaggtttctgatgcagtgaagagagctgtcgctagatcgctcatatcaacgtatggcggcaaatacgaagcatcgcaatggcaggagcaaatgccgttcgacaggtattcttgggcactcaagggcctctctcagctggaagtcatgttaatttggcacgtcgcaactgagtactgtgatatttctggtcgtcctactcgtcgagatgatgatgagcgaggcattgcagttaatttgtctagatactgtgcgtacttgattgtatctgtcccagatctgcttccgtaccataaaggcgatatagaagagatggcaaagaaggtgatggaagaacgcacagagctttcagagttgggttctgagatttacgatgaaatgaaggatttagaagggaccggagaggaagacgaccctcggaagatcttccagaaaggcgtcaagctcggatcctttaggaaccttccatatgctagatccaatctagcaagagagtcgcaagtgctcgtcgtgatggacggaggggaaaaaagctaa

SEQ ID NO: 25143 - DNA, 366 bp, Zea mays
  Peptide Sequence Number=SeqID_68518
atggagaaagcactagcggctccggtaacagatgtgatgacagcctcgtcatacatatggttaccaaggaagcggcaactacccaactctaacgttggaaccaagggcgcaaccgactactgccgctcccatcctcctcttcttccccaagcgatcgtgctgcaactgctgataattggtattggactaccgatcatagatttggcagatccgatccacttgacacacaaggcgaagatggacaatgcttggcagtgcagtccaagcagattgaggcttaatcgaagaacatcgccacacaatccaaacttccccaacaattatgtgatcggctcaaggcataggacgctcaatggagcacaatag

SEQ ID NO: 25144 - DNA, 1059 bp, Zea mays
  Peptide Sequence Number=SeqID_68519
atgaagtcccgcatggaaccggggttgccaagtccagaaaaatcccaacagatgctggggtcatcatcttcctcggacccagagggcccgtacgagggtgacgtccagcaagctctccgcaagcgcgctggcgtcgtccgctcgctcgggattggcgtgccgcggggagacggcgctcgtcttcgtctcaggcgcgaagtcgatacccggtgcgcccctcgttggggtgcctgcgctgtcgactcgctcgacagccaacgaggcgctgcctcctgcttggccttggttgccctgccttcccctccgtcggcggggaagaaagcgggacaaactcggaggttgttcttccaccacgcggggaagacgtcgtcgattccgccgccggcgggcgggctgtcgaccgccattgtcgttgtcgcgcggcggtggaaagagtatcatgtcgtagctgccgtcgaaggacatgaactcaagactcccgaaacggagcaccgtcccgggtcggagaggttgctggagactgcccatctggagcttgacgggaagccgttcgtcaacacgcagcaggcccctacctggcgcgccaactgtcggcgtttcgagaccggggggtccctgggccgacgagtgaatgtcgccgcgtgccccagcccagatgggtcgagcgcgagggcgagcgcgaaggggggaagagcgaggcggccggagaccggcgtgagagaggtgggaatcccgcggccttcgtgttcgtcccgcgcccaggtcggggggctgagagccgccgtcgtcacagagcatgcggggcgccatcattgcctatctggtggagctagcgagatgggacaccggtcttgttccctgcggcccgagtcagctcggggtagggtgatgatggcgccttctgttggcgtggttggcctgcgccctaggttgggcgatgtggaggctcctccgaagccgaggtcgagtctgtcttccatggccgaggccgagtccgagcccctgggtcgggcgaggcggaggtcgtcggctgaggccagggcggagtccgagccctag

SEQ ID NO: 25145 - DNA, 750 bp, Zea mays
  Peptide Sequence Number=SeqID_68520
atggcgagtgaggacttgccggtgcgctttggggcggccggcgcccgctggtgcggtgttggtgggcaggtggacgtcaccgtcggtgctgaggtggtggcagctggagaaagcttctccgccgatgagaccgtcagcgccacccacggaccgacctccggctctttggctttaatatctggttctcgtccccctcgaggggacgcgaacgagagccttccggcggcagcgttcgtcctgggaccatcgctgctgctgcagaggtcgctggtgacgagtgaggtatccgtatcccggaggcgtaggagtccctcagctcggtcggccttgccgcccgaggcttctcttgctcagttaaagaaaaaccctcggccgctctgcgatgagctggagccggaggcagcggtgtcagcatggacagaggcggagttggctcgaaaagaagcttcgtcggccggagcctggccgggccgtccactggcgggaccaacgctgaagtcgggttgccgaggccatgagccgggctggtcctcgggagacagctggctgaggctacggagcggccggtcgagccgtctgctcgggccgggttcctggaggagaccccgacgacgatggcccaggcgcggtgctgacatctttcttcgaggtggagatccttcgaccgtgtcgccgtccgaggctggatcggactccgccgaaggtggagtcgacaccgagggtgctgctgctcgccctattgatgtctga

SEQ ID NO: 25146 - DNA, 483 bp, Zea mays
  Peptide Sequence Number=SeqID_68521
atggatgcactaactaattcaaaccaaaagaaagtaaaggacagttggagaattgtcaaccaccgggatatcattccaacagtgccacgtcttatgggctattgccatgtggaagcaccagtttatcttaaatttggggacgcaaaagatgcaccggtaaataacagcattctagatgatgaagaccaaggtgacgtgataggggagtacacacctgatgttcttgttactgaatttatgaaaggcgagaagcaacttgtggaaaaactactgcaaacagaaataaatttactccgctcaatcagggatggttcggctcttatgcagcacatggaagacttctactatgtcacccttcttgaggtttttgagaactatttctgcttttctcataccaaattgtgtcaaaagctcctcaagaatgtgagatcaagttatcaagtggcagatactgccaatgatgaataccaattgacagcgtga

SEQ ID NO: 25147 - DNA, 1500 bp, Zea mays
  Peptide Sequence Number=SeqID_68522
atgagtacagtggtcaaatataagagttatgacgatatcgagcgtgaaaaacaatggtggagaatacctttcgtgtctgactttcttgtgaagagcagcctgggatctgctcttaggatggttcttggatctgaaagtataaatgctagtcagtttgtgaagtctgcatttgggcaactgagttctttcacatacacctatcttccaaagccatcatcattggaaagtggagttgatgtttctaaaagtgatgaagaatcctcagatggcccaactaattcaaatgagcttcaacaacagaatattgattctgaaatcatttcagattctcattctcatagtgaagttcaatctcctactgctgttgttaatagtgaaggaaattcatcgtctgatatgaagaaatcagatgaatatttttggagagctctgaacaatgtactaaaccaaaatgtactacagaactttggattttctctcccggaggtcaagcaattgggtggttttgacctattaagttcacttggtctgaaatcacgcaatattgctgaacaggaatatctagaatctggacttgcaatggcagatacttcaacaaatggtggcagtgaaacaacttctgaaaatacagttggtgttgagaatgaaaatagaacattgacaaccaaagaggaggtgcaatcttcctttccagatataaataaagtatctcgggatgtattgtctcaaacagaaaatatactcggagctctgatgatactttccaaaaatctctcaccacatgatcagtcagtaccgacaactggaacaaatgggaaatatgacatgattagagaagagcaaggtgcttcagctgcagattctgttcaaaaggctgatactgtttcatctgcgttactgtccattgatgcacaggaagcagaggatatgcggcgcttgtttgcaagtgcagagactgccatggaggcatgggctatgcttgccacttcactgggacgtaacagtttcatcaagtcggactttgaaaagatatgttttcttgacaatatttcaacagacacacaagttgccatatggtgcgattcttctcgaagaagactaaaccctgagaggctaggtggtgacttcaaacaagaagttcaagttcacagtggattcttaggtgcatatgactctgttaggaacaggatcatgactctcatcaaatatgccattggatacgatgatgaagaagatgcagaaaacatacctaggtggcatgtttatgtgactggacacagtttaggtggagcactagcgactcttcttgctcttgaactttcatcaagtcaaatggccaaacatcatttggttcactgtttgtggaaacagcagaggagaggagaactgcacgtcattatattaagagaggaaaaaaagtctaagaggaccaaaatacaatgcctagagggcaatcaaaaccaactagaccagattggaacccaacctagaccctactaa

SEQ ID NO: 25148 - DNA, 720 bp, Zea mays
  Peptide Sequence Number=SeqID_68523
atggataaatgtgggcaaattgaacgggggcataccattgagcgggaggtgggtggacgcgaacacgcgtccaaaaccagcctcccgacaatgatggtcggagcaatgcccgtcggggccatcgatcctcagaccgttagatgggcgtgtggggcccgatccaaattcgccgaggatgcgggttggcgccacgcctcgaaggccgctgtggcggattccagcgctgacacgcgcgacgccgtggccgcggcgacccgatttgcttgcttgatcacagaagagacgaagaagtccaactgcgccgtggcatcgacccgccagccactccgggcccggagctctccctgggtcctaggatacggctcggaccctgtcgacgccgacgagcggaggccacggtcagcgtcgagcgaggtgtcagacaagatcgagtccctggcgatgtacgactggtccggaccgctgcgcaccaaggcgaggcacaacttctaccggctgggggagcatgagcgagcacggttgcccctccgacgacggcatcgtccaaggaagcgaccctgtgaccgtccgcagatttttttaaccaaaagggcaaccatcacgggtcacgagggtcgccactcaacaaggatgactacatcccaacagagcaacgccaaaaaagggatcaaggatctacgttaccgttacacagaaatccagacttacaaccttatttag

SEQ ID NO: 25149 - DNA, 111 bp, Zea mays
  Peptide Sequence Number=SeqID_68524
atggcgaaggagggaggcagtagagaaaagtgtgcgatgcttggctgcggcaggaaagagcagaagtggctagcgctgagaatgcaaaagcaagcttttgagaacaagtga

SEQ ID NO: 25150 - DNA, 724 bp, Zea mays
  Peptide Sequence Number=SeqID_68525
atggtgaccaccagtttgatggtggggagaagcaagccgggatgcggcctctgccctgccctcagcttcaaggatcttcatcatccttgctggggcggagggcgaggcgagccggggcctgccttcgcgtgggtcggtgtcccgcttcctccagcttctgggggtggaaaccatcctctagctctgcagaggaggcgccctccagccatgtcggggaaggcgaactgttgctgcctagccagggtgcaacattccgtcctttgtccgggcgacggtggccagccgcaccggggggtctcccaacacgtcgtacgccgtgagggcggcactcgtgttctgggacggtcccattctcgttttcgtgacgaggacgggaccggggcccacgggtcagcttccatctgcgcggccaacttacaggcggggcccgctgtcagctccatcctcaacaccggaagcttcggaacgaactcgtgcgcggactccgtctgtcctccccgtcaaccacaccccgagcatggtgggccacgccccgggatcttctccacgcgcgattacccgaccataaagcgcgtgcactcaaaccctaacccgcctcccagcttgtgccgcgacccaactaatcaccgggcgccgccagtgtgggtcagagacatccgctgttgtggccttagtcccgcgctggtgattggggtcgttcgagtggtcgtgggtgttcggcatc

SEQ ID NO: 25151 - DNA, 453 bp, Zea mays
  Peptide Sequence Number=SeqID_68526
atgagccggagccggaggcagcggtgccagcacggacagaggcagagttggctcgaaaagaggcttcgtcggccggagcctggccgggctgtccactggctggaccagcgccggagtcgggttgccgaggccatgagccgggctgatgtcctcgggggacagctggctgaggctacggagcggccggtcgagccgtctgctcgggtcgggttcctggaggagaccccggcggcgatggcccaggcgcggtgccgacaggttccttcaaggtggagatcctccgaccgtgttgccgtccgagaaaatgaagaagagatcgaagtaactgaagagaagacaccaccaccttcggaatctcaggccggaaattgtttctactttgatatctgtgggtccgagcctgactcacctactaacgaaggcaagccccggtgcatttgccaccttccttga

SEQ ID NO: 25152 - DNA, 471 bp, Zea mays
  Peptide Sequence Number=SeqID_68527
atggttaaggaagatgagaaaatttctaagaagacaaaatccactccagagctgaaggcggcagtttcaaagaagaggaaggctgaagatccaaagccgaagataactgaggcagcagaagagactccttcaacacctgcagctgctgacattgcagaaattctaaagtggaggtggttgtggggtatttatagcccccaactaccaattcaaccgttggggcaggctgatgttgatgggcgccccggacagtgcccggtgcgccagccacatcacccaaacattagggttctgacgattttgaccgttggagctttgtcttcatgtggcaccggacactccggtgccgcaccggataggcactattcactgtccggtgctcctctgacgggcggcgctgactctgcgcgcactgttcttcactgttcatctgacttcaccgcttttgcagtcgaccgttgcgcgaagtag

SEQ ID NO: 25153 - DNA, 441 bp, Zea mays
  Peptide Sequence Number=SeqID_68528
atgcaggcggcatgcaactgcaccaagggggcgcaccctttcgacttcgacgcgtccagcatggaggcccagacgtcatgtaactggcgcgccggttactacgtgcgagaaactgcaccgccacttgcgccagtaccacgccttctcgactgcggaaccggtaccacgactcgaggcaaccctgcgcatggcccaacagtgccaaccgagcacatcgatcacggttcagtcagccgcgggagaaggcgcgacggtcgatatggccaaaagtgggccggcagtaatggcggcgggaccaggaaaggggatactccgaaagggatccttcttcgcgaaggaagcgggccccgagccctcctactgatcagaggttcgaaggctggcccgtcggaagggttcgatagccgcctcaggccactcgggctccgcgcccactactga

SEQ ID NO: 25154 - DNA, 582 bp, Zea mays
  Peptide Sequence Number=SeqID_68529
atgaaggtagagttagagttgtcaaatctatcagatattgttttaactcttcgaaggctttctgttgagccggaccccattgaaagacttcggctgacttcagtatttcaaagaatgacagccaagaaacttgcccttcttcactccgaagacacacttttctggattcaacttgagaccagcttgcctgaattggcaaatgtctcttgcaaagtgaagaaccctgacagtcattctgctgaagcttcctcgagcatttttgagcccctcgggcatccgaaggtagcaataagtaccactgggagttatgaagcttgtctttggctcatcctctttcttcatccaaatttggtgatagcccaagagcagtccaataagctcaagagttccgaagaagctattgcatctacaagggagtctattcttggtaaagggaactcgtccttcggacatgccttgttgagctccctttggccttcttggaagcttcctgactcccgtgaacagcaatgggcccttgttccgaaggctggctctggtgaaaaggccgctctcgggaaatcgtcggcggcgtacggctaa

SEQ ID NO: 25155 - DNA, 126 bp, Zea mays
  Peptide Sequence Number=SeqID_68530
atggcgcccgcggccaacggtcgtctgcgcgaacaacaggcgacacgtggccaagccaacggtcggatggtcacactggactgtccggatcacctattctccccctctaggtgctctcaagcatag

SEQ ID NO: 25156 - DNA, 630 bp, Zea mays
  Peptide Sequence Number=SeqID_68531
atggacatgacttcagagctcgagttgtgtgagatacaggacaagaaactatccacctggcttgttccacagctgcggtacactctttccagggctagatacccttctacctgcaagacaaacaagcatattcagaaaataacaaggaagggaatcgtcgacctcgatctccttccacctcttaacaagcgccgccgcggaggtgttgaagctgtccggagacagagtcccgtcccatacaggggagcctcccatcgcgaagcaggggaagacgcagcgcgggcaaaggccgtccaccagtcttccactgtggagtcgctaagctcccaaactcccgaggccgggcgccaaaatccgcagccgctctacctgatttgcccacgacccggcgtcaaaatcagaaggttggggaatggggaactcatggagggtttgcgactctcgctggagatgaagctctccctcagctgccgggtcggttgcgggtcctcggcgtcggcgccgggatgcgtcacgcagaacacggtctgtacgttgattgcggctgtcgtcgtctctagcgtcgagcggctagatcgaaagtccgtgcgctcgtggtggactgatgaggagccgggcggttgggcctaa

SEQ ID NO: 25157 - DNA, 1881 bp, Zea mays
  Peptide Sequence Number=SeqID_68532
atgcactcggtgaaccactggggcgggtcgttcgacatcaccaccgacgtggcatcggaggacgacgactgccggaacacggacgtcgacgccggtgcgttgtcggcgcggcagcaccacgagctggacgaaacacagcagggctggctgctgagcccggagggggccaagaagaggagcaggcacgtcgacctcggctgcgtcgtcgtcaagcgcaaggtcctgcggtgggcgttctgggggctcgtcgccggcttcgtcctcgtcggcctccccgtcaccgtctacaagtccatcccgcacaggccgccccgcccgccgccgccggaccggtacgccgaggcgctgcacaaggcgctcctcttcttcaacgcccagaaatccggccggattccgaggaacaacggcatcccgtggcgtggggactctggcctcaaggacggctccgacgctaaggacgtgaagggcggcctcgtcggcggttactacgacgccggggacaacatcaagttccacttcccgatggccttctccatgacgctgctgagctggtcagtgatcgagtacagcgccaagtacaaggccgtggaggagcacgaccatgtcagggagctcatcaagtggggcaccgactatctactgcgcaccttcaactcctccgcttccacgatcggccacgtctacgctcaggtgggtgcggcaaagatcaagagcaggacgccggacgaccactactgctggaaccggccggaggacatggcgtaccctcggccgtccctggcggtgagctcggctcccgaccttggaggggagatcgccgcggccctggcggccgcctccatcgccttccgcgacgacgacgacgcctactctaagaagctcgtccgcagcgcggtcaccatgttcgagttcgccacccgcgactgggcggacgagcacgccacctactccaggcaccggccggaggtcgagcccttctacaactccaccagctactgggacgagtacgtctgggccgccgcgtggatgtactacgccaccggcaacgccagctacgtcagcttcgccaccgaccctcggctcgccgagcgcgccagggccttctacgacgacgtgctcgacttctccgtgttcagctgggacaacaagctccctggcgccggcctgctcctgtcgcggctgcgcatgttcctcaaccccggctacccctacgagcagtccctcgtccgctaccacatggagaccggcctcgacatgtgcaagtacctccggcgcttcggggccttcaacttcaccgggggcgggctcgcgctcttcaaccacggcagggggcagccgctgcagtacgtggtcgccaactccttcctcgccgcgctcttcgccgactacatggaggcgatcaacgtccccgggtggtactgcggacccaacttcatgcccattgaggacctccgtgcgttcgccaagtctcagctcaactacatccttggggacaacccgaggaagacgagctacgtggtgggcttcggcaacaagtaccctcggcatgtccaccaccggggcgcgtcgacgccgcacagccgcgtcaagtactcgtgcaccggcgggtacaggtggcgcgacaccaagaaggcggacccgaacgtgatcacgggcgcgatggtgggcgggccggaccgcaacgacaggttcaacgactcgcgcatggcctttgggcacaccgagccgactctggtgggcaacgccggcctcgtggcggcgctggtggccatcaccagcagcggccgcggcgtcggagccgtcgacaagaacagcatgttctccgcggtgcagccgctgttcccggccaccccacctccgccgcccgtgtggaagccttga

SEQ ID NO: 25158 - DNA, 1926 bp, Zea mays
  Peptide Sequence Number=SeqID_68533
atgccatcttcttcttcttccaccgacgccacgccgccggccgccgcctcgtctgaggagacgttgagtaacgtgatggtggaggagttgcgcgccggcgactctgttgaatttggtgtgtcacggatgacgtcagcccgtattgaagatatgcagcggttgggctactttggcggcggagtcgctcgtgctccggggacggaggaagtccccgagccggagggcgagttggttgttttcgaggcgttcttcgtcgccggactccgcttgcctgcgcaccgggtcttcgaattaaatcaactgccgtacgacggctaccctggtcaagacgaagcggaccgccgtgggaagaaaccggcggtggagactggaggcgaccctgcgctggtggccgccgcctcctcgaaaaagagaaaattagtgatggacaaggatcgccaaggggcggcgcgaaaacgccaggcgactgtgagggttcacgaagctcggccgaaaaggcagcggggaacggcgaaggctgaggcctccggcggaggcaagccgccgctgctggcgaaggtgggcgcctctgcgcctggcaaggcgccggaggtgacggtgggcgccggaggccccaagctgacgaaggtggtgccgtctgtcagcggagtggcggaggctgcgaaggcggcccgaacgttaccgccgcccggcaaacgcgttgccgacttcggcaccgagattaatgtggaggattatcttggggggtcggacgagggcccgcttgctctagttgtgcctggcgtggcgatcgcgacggctgcgccagcgccgaaggcggggggagagacccttggcgccggaggcgaggtgtctgcccttgcgctggtcagggacgaggcgggcgtggcgacccgccggctgaagggagcgacggaggcgttgagtcgagcgacggaggcgctgagtcaggtggctgacttcaccagccgcaccgcgtcgggggcccttacggcagctttgtctgccgaggtcgagagacttcggacgcaacatgctgacgctgtccgtgagaagtcggcctccgacagcaagtgccgcaaactggcggagaaggtggccgccctggagaaggagaaggctgacctccggcgccagctggcggcggagaggagggaggccaacgaagccatcgccaaagagcaggctgctcaggcggaggccaggctggcgcgggcggaaggcaatatcgccaaggagctcgccggagagctgcagcggcggcttactgccctggagagccgcgcggagggggccgaggccgcgatgcgagcggaggccgaacggacgcgcacgcagctcatgactgcataccgcgagctgggtgtgcggacgggtgacttcgaggtgccggagcgagaggccggacttcgctgtctggaatgggtgcaggaggaactgcaggagctccccactgtcttggcggggttgatgtcgttcacctccctggtcacctgcgaggcagcgatgaacgcgctctctcgcgaaggctgccgacactttgaggccctcgaccaggcagatgatgattttgggcgagatatctttgaggtcgaagaccccgtggtgaaggaatccgccggggccctgtatgaccggatgtggggttcatacggttgtgaggtggtccgggcgcgggccgaggctgcgagggctcaggcggagcgcggcgagcgggtggacgacttcggggcgctgaacagcgcgctgcctgacccggagacgacccctgcggaggccgcgactggagtcgcccccgggaccgaccccggagactgcggaagatgcaccaggcgcccctgcacctgctgcgaccggcgaagaccttcccccaaaggtggccgaaggcgcgcccgatgcccccgcagctgctgtgccgagcgctga

SEQ ID NO: 25159 - DNA, 942 bp, Zea mays
  Peptide Sequence Number=SeqID_68534
atgcaggcggcatgcaacagcgccaagtgggcgcgcttctccgactcccaacacgcccagcatggaggcccaggcccacgcgtcatgcaaccggcgcgccgaatgcttcgtgcatgcaacagcaccgccactcgcgccactaccgtgcctcctcgactgtggagccaataccgcggctcgaggagcagcggccacgtcgtcagccaagctcacgtcccgtctgggggcagcgagagaaccctctctcacggcgtgaagacaacgcgcctgtgctccgttccacgaacggctcgcgcatgcgcaacggccgccccgccaaccactcgccccgtcgcattaactccgtggcgggacagacggcgcctctggcaggagaagcgggcgacgcttcgccttcgccataatgaccgcgtcaaaaaagccgcctcagatcgcgtgggccctacacccactactggtcagaggttcgaagaccggcccctcgggaagggttcaacggccgcctcaggctactcgggctccgcgcccattactgatcagggcgggaacgatcttgtaacagaatcccatcggagggaggcatcgagccctcggaccccgtcgccaggggaccgggtccggcagatcacccgcagctcaccggagacaccatgttcggcgcccatcgagggcaacatggcgctttcccccctcctccttgcggaaaggcgacgcaggggcgtatgtaaaaaagtcgagtatgtccctgatcgtcctctcgccctgtgcagaggctcgggggctgctctcgcaaacccggctccggccgaaccgttgacagcgtcaacataccagcccgagaacttgggacccgaccgtacacccgggctacggccagctcgcatgagggacgaccagaccagccgaagcattacgcgaggcattaagacctcggaggagtga

SEQ ID NO: 25160 - DNA, 306 bp, Zea mays
  Peptide Sequence Number=SeqID_68535
atgacggagttcgggaccccaaagcgatggatgatgtttgtgaagaacgccaccgcctgctcggacctgatgctgggcctgagcgggcagatgcgtctgtcttgcgtagaattgacacccttggtaggagcgtacaatcctagtggcgtcgaccactgcggtcggccagtagaagccttgtcggaaggcgttcccgacaagggctcgaggtgctgcatggtacggggcctgccagttcgagttaggcgtgaccccattccgctctccctcgacgcgcagggcctcaccgtcggtggccgaggataa

SEQ ID NO: 25161 - DNA, 1232 bp, Zea mays
  Peptide Sequence Number=SeqID_68536
atggagccagaaagaggcctgatcgcatatgaagggccgcctccagactcgacggacctgctgtcgagcgcgtggtgcagctcggctatccaagttcttgacacaggaggacacaaggagtgctcgatggccctggtggagcatccggtcatggcgcttggcaacgacaggaacgacgtgttggcaaagagcgaccgtagcttggtggttgacaacagcagcttcagcacggcccagtggaaatatgacgatctgaagtcgtggatatggctgcagaaggcaattcatcccgaactggactatgatctctgcctcaagaagaaatggctcccgcgcaagatgacggcgtggaacgggatctcgctcaagaagtgggtcaaggagcggaagcagaagcgcaaggaggaggcgcgcctgcagcgggccgaggtccacgccgccgtgtccgtggccggcgtggcggccgcgctcgccgccatcgccgccgagaacgccgcgccgcgccgcgcgcccgggatgagggagacggcgctggcgtccgcggccgccctggtcgcggcgcagtgcgccagggtggccgaggccgcgggcgcctcgcgcgaccaggtcgcggcggccgtcgacgccgccagggcctccacggacgacagcagcgtcatcacgctcaccgcggccgccgccacctgtatgtgtctgtcgttcgcaactcgttgtcgtgtcccctggcttgacacggtgtctcccaaaacgcttatttgcgatgtccggttgacagcactgcgtggcgctgcgacgctgagaggacggcgcagcggcagcggcgggcacggccagaacgagagggcggagcacgcggggccggctctgtctcaggacgacctcgacttcgacttcaaccacgcgaggtccagggcggcgctggccaagggcgacgagatgttcgtcgcgatgccggacgggaagtggaagctccacacggtgtcggcggcgtcgaacaagcgcggcgagatcgtgctgcggatcaagaagacgaacctcgtcatggccttctcccacgcaaaagaaagcgtgatccacgacgtgcagccgtgctccccggagaagccgagcccccacgagggcgcgacatacccagtggaggtctccacgaacaagggcaaggtggagctccgcacggacgactacggcgtctacaagcggtgggttgcgacgctgagccacatgctcgtgat

SEQ ID NO: 25162 - DNA, 1362 bp, Zea mays
  Peptide Sequence Number=SeqID_68537
atgatgaccaccagttcgatggtggggagaagcaagccgggctgcggcctttgccccgcccttagcttcaaggatcttcatcatccttgttgtggcggggggcgagctgagccggagttctacctcccgcatgggccggcgggccacctcttccttcagcattcaggggagagggcgctcaccggcctagcagagggggcggacttcgacaacgcggggccggtcggccgcaagcgtcgtcagctccagcatgcctggctcgctggctcagctggctctggcgctgcttccggtgccatctcccaccactggggcggagcgtggctgtctgcccaccgtacgggcggctattgcgtcgtgcgcactgggggatcgtccaagacgtcgcacgccgctagggcggcgttcgtgttcttggattgtcttgtcctcactccggcacgatgccttcgcgtggaggctggggcggccgccattcgttggcgtagcgccggcgcgcaggtggccgctgtcgtcggtgctgaggtggtggtcgccagaggaggtttctccaccgacgagaccgtcggcgccacccgcagacagacctccggctctttggctttgacggcttgtcctcgcccctcgtgtggggacatgggcgagggccttcctacagcagcatttgccctgaggtcatcgctgctgctgtttagctgcctgaggcggaggtcgttgtcgctgctgctgcagtggtcgccggcgagccacccggagttggttatcccgcaggccctccgatgtggaggatgttcatacccgcgggagtggaaccggagttccgtttgtaatggcaccttgagtgccggtaaccctcggctgctctgcgatgagccggagccgaaggtagcggtgtcagcgtggacagaggcagagtcggctcgaaaaggggcttcgtcggcccaggagcaggtggcttcccaggccgaggagaacccttgcggagaccctggctgcgatggcccaagcgcggtgttggcgtcctccttcgaggtggagatccttccgcccgtgtcgccgtccaaggccgggccagatcccgccgaaggcggaaacgacgcgagggtgctgctgctccctctgtcgatgtctgaacctgcaggaacagacttgttcgttggtagcagaattgcttgtccgagcgagagttacttttcacggaaggtgatgagtgaggaccccgctatcgaagtagtcgaaaagcgcgaaagacattctggcaaaagactttttctgaggaaaattttgacgcagagggggttcccccttctagcccccgagggagggtcgggctttgccgaggcaaggctgacccttccttga

SEQ ID NO: 25163 - DNA, 972 bp, Zea mays
  Peptide Sequence Number=SeqID_68538
atgaagggtgacgagaagtcggcgggcggggcccctgcgtactggggcctcggcgcgcggccctgcgacgcatgcggcgccgaggcggcgcgcctctactgccgcgcggacgcggcgttcctgtgcgccgggtgcgacgcgcgggcgcacggcgccgggtcgcgccacgcgcgagtgtggctctgcgaggtctgcgagcacgcgccggcggcggtcacgtgccgcgccgacgcggccgcgctctgcgcctcctgcgatgccgacatccactcggcgaacccgctcgcgagccgccacgagcgccttcccgtggcacccttcttcggcgagctggccgacgcgcccaagcccttcgcctcgtcggcggccgtgcccaaagcggccgacgacgacgggagcaacgaggccgaggctgcgtcgtggctccttcccgagcccgaccacgggcagaaagaaggcgccacgacggaggtgttcttcgcggactccgacccatacctcgacctcgacttcgcgcgttccatggacgacatcaagaccatcggcgtccagggcgggccaccagagctcgacctcgccggcgccaagctcttctactccgatgactccatgaaccacagtgtatcatcgtcggaggcggcggtggtgcccgacgcggtggctggcgcggcgcccgaggtggcagtggtctgcaggggcctggagcgggaggcgcggctgatgcggtaccgggagaagcgcaagagcaggcggttcgacaagacgattcggtacgcgtcccgcaaggcctacgctgagacgcggccgcgcatcaagggccggttcgccaagcgcacgcccggggctggggcggacggcgaggagccgctggaggagcacgaggagatctactcctcggccgcggccgccgtggctgcgctcatggcccccgggggagccgacgcggactacggtgtcgtgcccactcattga

SEQ ID NO: 25164 - DNA, 1818 bp, Zea mays
  Peptide Sequence Number=SeqID_68539
atggtgagcgacgccgagggaaactccgtggccgacgagcaggaggtgacaccgagggaaaactttgtggccgatgagcaggagagggaggaaacatgggaactgaaactgtcccctagggcccctgcccccgcaaatgccgccatggatggcgggtgcagcggatttcgcctctatcccgcttggccccctccgcgcacatccagtcgcatgcccgcgcatggcagatccgcctccccctccaccaacaagcacgcgccagcacccgattctcgctccctcagccatgccctcgctcggccccctccgccgcggcacgcgcaaaccatcgttcccccgcccgctccatcgatccccatccccctcagatcctccctgcaaatcagatccccacgcccgcagtgcctcgcctcggctgctctacctctatcccacgacccgcgagatcggaatcgcggcgccccgccgccctcctccaaaatggcgccgtctctgctcggggtcacctttcctccctctcacttcctcttcttcattcaggggttcaccaagtcgctggccatgacggtgctctccgagattggggacaagaccttcttccccgccgcggtccgcgcgatccactcccccaccctatctctaggtcgatccgcgcgatccactcccctgatctgcctcacatccatggaagtatccgatctgccgcttccaaactctccacagtgcccccgccccgacgtgcccctcccccgtccgtctccagcgtgctcgtcgcccccggctgcccgtgcccctgcggccctgcccctgccccgcgatgcgctctgctcgccaagcacgcccactccccatgcccgccacccccggtgccgcgatgcccgcctaaccccccttcccctgcgacgacggcatgttgcgcggatcggcatggttgtgcgaatcggcgcgacgtgggagctcggccgcatgagagaaatgcagttcattcttataagccccacaatctacatgttcattctgctaagcccctcgactctcgatggcaatggtgagcaggctgccgccacgctgcggagccaacgctccccacaacacccgcggtcctggaaggtgaggagagcactgcccttcttccaacgagcgttgatcgtgattggaagacgattgaagcatgtgtcggctcaaagactgttatacaggggaactgcacggccgccgtgggacgatactcttgctcaatctcttagtgctggtgcaacaaataactgttcaggtagcacagagagtccgtctggtacttggccaacttctgaagcagttgagcaagaaattatggttccatcactccgtgcttatgtccataattcttcaagtctacatatgactgcatcattcttcagccttctagactccttccacttctgcccctcggatacaagcgcgccatcccagctcggaaatctcgcatcggctctcaccgcgtcgaagccattccccagtcgtcaccagcgcgacaccattccctccctgttcaagcccttccccaccggagacctctcccttccccacttccccactgtgcacatgagcaggggaggtttccaccaggccgaggcgccataccagtccgctctcgctgcacgcgtcgtcgcgtgggccattgacttcagcttctccttcctcatcatcgaggacctcgtcaccagtgggtcctccatgctcgagatcgccgccccactccgcgtcgaggggctcgtggtcgccgacgccatcgttgtcgtcaaccctgagcagggcgacaggaagaacctcagctaa

SEQ ID NO: 25165 - DNA, 1581 bp, Zea mays
  Peptide Sequence Number=SeqID_68540
atgggggaaggcctgcggagcaacagaagactgacgagcggctcgccgccgcccgctctgactacgacgacaatgacccccgctccggatggtcgagctgcagcagcgcaggcctcagggtgggcgctgctgcaatcttgccctcgcccacgccgacgctcgaggggcgaggacaagtacgaagagccggaggcccgaagcgcggacggtggcggtggtcccgtcggcgacgaggacttctcgagccgcctccgcctcggcaccgacggcaggggccaccagccctccggcagatccccactcaaatcctcccggacgagtggggcaccggcctcaacccgcactccgacaggaggggccgccgggagccacgacgacgactcctacacgctggaggtgacgacgcccgccgtcgaccaaccccacgttgtcgaagtccaggccgcccgcagggccggtgggcgccctctccctcgaacgccatgggagagggtgacccgcgaacccgtgcgggaggtagagcgccggctcagcccggcccccaccccagcgaggatgatggacatccttgaagctaagggtgggaccaagatcgcagcccggcttgctcctccccacccaggagctggtggtcaccgtctcggaccaacgggcgaaaggggcgggcagccatgcaggcggcatgcaaccgcgccaagtggatgcacttctccgactcccgacacgccagcatggaggcctaggcccacgcgtcgcgcaactggcgcgccggatgctgcatgcaagcaactgcatcgcctgcgccaccaccgcacctcctcgattgcggaaccaataccgcgactcgaggcgacccagcgcgcgacccagcggcgccagcctgacgcggcggccaacacggccaaaggagggccgacagtaatgacgatggcagacgcgcgggagcagcggtcacgtcgacggccaagctcacgtcccatccgggggcagcgagagagccccctctcacggcgtgaagacaacgcgcccgtgatccgttcctcgaacggctcgcgcacgcgcaacggctgccccgccaactactcgccccgtcgcattaactccgcggcgggacaggcggcgcttctggcaggaaaagcgggcgacgcttcgccttcgccgaaacaaccgcgccaaaaaaggggttcgaaggctagcccccgaagggttcgcagtcgcctcagacgccgagcgagggatgaccaggggtacgttcgatacataaccaaggctcgggctgcgctcccgagctcaccggagacaccatgttcggtgcccatcgagggtaacatggcgctctcccccctcctccttgcggaaaggcgacgtaggggcgtatgtaaaaaagccgagtctgtccctgatcgccctctcgccctgtgcagaggctcgggggctgctcatgcaaacccggctccggccgaaccgttgacagcgtcaacataccagcctgagaacttgggccccgaccgtacacccgggctacggccagctcacatgagggaacaaccagaccagccgaagcattacgcaaggcattaa

SEQ ID NO: 25166 - DNA, 585 bp, Zea mays
  Peptide Sequence Number=SeqID_68541
atgcatggttgcacgcgacgctcgactggaacagtggctttgcgatgctgcagcctgcaggccgtgtgccaggtggcagggtggggcgctgcctgtgagatgttgccgccgtgccaggagaggaagggcggcgctgctgcctcctggcgttggcccacgccgacgttgaggtgggatgtggctcctggcggtgtccagctcagcgagaagagggatttgagggaacagggggataaagctagtggtgcctggcggcttgcacatcgacggaaactgagagcaagaggtttctggccgcgttctatggaactcacagagagagaagagactattggacaaccggcgaacagaaagaatggtacctgcttggccgtgggcaaacgggtggggttcagcgtgtccgccgtcgcggaccgtggaagccgtcgccccgggagagagagagagagaggacgggaggaagatgcgtatatcctcttctacccctttccggggccatctggaaacatcatgtcctgtatggccacctctgctctccgctatgaggctgcgtgtgtttattggatgccgatcgaacggctgtga

SEQ ID NO: 25167 - DNA, 585 bp, Zea mays
  Peptide Sequence Number=SeqID_68542
atggggcgtgcaaaggtggagtcgaagaggatcgagaaccgggtgagccgacatgtgaccttcttctccaagcgccgcaagggcctgctcaacctcgccgtgctgtgcgatgtggatgtcggcgtcggcgtcttctccgagcgcggcaaggtgttccagtaccccggccttgccggccaggctgttcttccgccgtcgccgtcgtcgttcgggttcctcgtgaagaacaatgtggcgatggccaaaaccattctggccatcgtggccattatctctctgctcgtgccgcccgcagcggcgacggaccatgactcctacaacgccgcgcccgcccccgtgccctcctccaagtttcccaccgctgcagctgcaccgacggaatatgatgcagccgatgaagacaagaagaagagcattctgcccattgttctcgttgtcgccatcgctagcttaagtatggcttcccttagtggcgattctcctgtacgagcgatggcgtggaagggaccgtcatcaacaccgagggcaggcagcgaggaagatcacggtagtgaggtttcacagcgacgacgagcctggagatga

SEQ ID NO: 25168 - DNA, 165 bp, Zea mays
  Peptide Sequence Number=SeqID_68543
atgcagcaggttccacagcaacctcaaccccagtcgcagatgcagatgcagatgcagatgctgcagatgctaagagataagtgtgctaagttcatgagaggccatccccctgtgttcgctcattctgctaccccatcacctaatcgacagagcaatcatgactga

SEQ ID NO: 25169 - DNA, 1053 bp, Zea mays
  Peptide Sequence Number=SeqID_68544
atgaagccgaaagggtgcacaaccgtgggtccgccctttcgaccactggtttcggcgaggatggaggattgcttcccggctgcattccctcaccaatggtcatccaggatgatgaccaccagtttggtggtggggagaagcaagccgggctgcggcctctgccccgccctcagcttcaaggatcttcgtcatccttgctgcagcggagggcgagttgagccggggttctacctcccgcatgggccggcaggccgcctcttccttcagcatccaggggagagggcgctcaccggccctgcggagggggcgaacttcgacaacgcgggaccggtcgaccgcaagcgtcgcgtggctgtccgtccaccgcacgggcgacagtcgcgccgcgagcaggtcgggcatgtctgcggccctccccgcatcgccgacacggcgcccccgcgtggaggccggtgctggtccgtccgcgaggacttgagtggggatctgccggtgcaggttggggcagccgccattcgtcggtgtggcgctagcgcacaggtggccactgtcgttggtgccgaggtggtggcagccagagaaggtttctccgccgacgagaccatcgacgccacctgcggtcggacatttggctctttggctttgatggcttgtcctcgcccctcgcgtggggacgtgggcgagggcctttccacagcagcgtttgccctgaggtcatcgctgctgctgtttagtcgcccgaggcggaggtcgttgtcactgctggtgcagtggtcgccggcgagccacctggagtttgttgtcccgcaggccctctggtgtggaggtagttcatacccgcgggagtggaaccggagtcccatttgtaatggcaccctgagtatgggtaaccttcggccgctctgcaatgagctggagccggaggcagcggcgtcggcatggacagaggcggagtcgactcgaaaagaggcttcgtcagcccgggagcacgtggcttccctggtcgaggaggcgcagcggcggcggcaggagcttggccaagttgtccgctag

SEQ ID NO: 25170 - DNA, 447 bp, Zea mays
  Peptide Sequence Number=SeqID_68545
atgaacatgtgtgagctcactcttgctgtctcacacccctcacaggtcaagaacagcgccgctcgccccgctccgactgtcgtgccaaccacccaggcgaagactgacaacaagtcacgatcaaccaccgagtttggcctcgggcgcaataggaagctccgcctcgcccgacctcaggctctggcctcgggaggaggtctccgcctcgcccgacccccggactcggcctcgacctcggtctcgggaggaatcgcgtcctcgcccgaccccggcctcggcctcaagagaagtctccgcctcgcccgaccttgggctcggaccgaccgcgccaacaggggatacatcattaccctatccctagcctgctcaggctacaaggaacaagaccggcgtcccatctggcttaccccggcgacgggtaatgatggtgccccgcgtgcaccatga

SEQ ID NO: 25171 - DNA, 126 bp, Zea mays
  Peptide Sequence Number=SeqID_68546
atgcccgcgaaggtgcatcgcggtggcgcttttgcggcggcaaatgaggtcgcggcatcagtacgggtgggtgaacctggctgggacgcaggggcaaatgcgggcgcgacccagggtttcttttag

SEQ ID NO: 25172 - DNA, 333 bp, Zea mays
  Peptide Sequence Number=SeqID_68547
atggggacagtggccaggacaagctccagcgtcgcagccacagtggaccggtgttgggtggacgcaggcacctccaggcacttggacgcctccaccccaaggatcgcagccagtcccgggatgggtgccaccggtctcccagccaccggcgggctctcagccatttcaagcgtggatggcaccgccaccgacgggggttcagcgtcacatgctcatggatcggagggtggtgtcaacgtccaagacttcctcgtccatggtgctggagggagtggccaccttcctggtggcggaggagggagtggccaaaactcccacagcccgccggagtga

SEQ ID NO: 25173 - DNA, 567 bp, Zea mays
  Peptide Sequence Number=SeqID_68548
atgacgctgttggctctcagccccttacggcagcaaggagacgtcagcaggatccttgccgcactgccagctgtgctcctacaggactcaggcgctcctccgacggccacgctatcacgtgtacagggctcaagctctgccccgacagccacgttggcatgtgccaaaggttcaacacaaaccaataaaaagtccaagaaagggttcaaacaaaggagcaaagaaaaccgaaggctgccctggtctggtgcaccaccagacagtgtccggtgcaccaaggagatcaactccgaacttgacaccttcgggtttctgaaaaatgctctccgctataatttactggactgtccgaagtcagagcaggcgccagaaggcgcaccggacagtgaacaggacctgtccgatcacgccaagaaggaggtcatgaccggcaagaagcccgctacaagccacgggaaggctccatcaagggagtccggcactaagcacaaggaggaatcccctccacgcgtcaagtcgcatcggagtggcgacaagaagaagaagatgaagaaagtggtctactag

SEQ ID NO: 25174 - DNA, 444 bp, Zea mays
  Peptide Sequence Number=SeqID_68549
atgtcgtatcctgacacacacgcctcagttggccaggccgaagtgaccgcagtcacttcgcccctcttctttactgaccgatatgacgggaaaacagcgccgctcgccccgctccgactgtcgtgccaaccacccaagcgaagactgacaacaagtcacgatcaaccaccgagttcggcctcgggcgcaacaggaagcttcgcctcgcccgacctcaggctccggcctcgggaggaggtctccgcctcgcccgacctcaggctccagcctcaggaggaggtctccgcctcgcccgacccccggactcggcctcgacctcggtctcgagaggaatcgcgtcctcgcctgaccccagcctcagcctcaagagaagtctccgcctcgcccgaccttgggcttggaccgaccgtgccaacaggggatacatcattaccctatccctag

SEQ ID NO: 25175 - DNA, 675 bp, Zea mays
  Peptide Sequence Number=SeqID_68550
atgcggcctggccgtagcccgggtgcatggtcaggtttcaagttatcaagctggtttgttgacactgtcaacagtttggccgtagccgggtgcgagagcagcccccgagcctctacacgaagcgagaggacgatcaaggactttcccgacttttatcatacgcccctgcgtcgccttgctcttgctgtcgttggaggagcgcggcctcatggagatcggcgctcctcaaccatcgctcggcttcaaggattttcgtcgtgcaggccggctgcattccctcaccaatggtctgtttggtggggagaagcaagccgggctgcggcctccgccccgcccttagcttcaaggatcttcgtcatccttgctgaggtggtggcagccagagaaggtttctccaccgacgagaccgtcagcgccatctacggccggacccccggctctttggctttgaaggcttgtccttgcccctcgagtggagacgtgggcgagggcctcgccacagcagcgtctgccctgaggtcatcgctgctgctgtttagccgcccgaagcgggggtcgttgtcgctgctggcgtattggtcgccggcgagccacctggagtttgttgtccccacaggccctctggtgtggaggttgttcatacccgcgggagcggaatcggagtcccgtttgtaa

SEQ ID NO: 25176 - DNA, 126 bp, Zea mays
  Peptide Sequence Number=SeqID_68551
atgcggcttcatatccttagagatgatgtggttttataccctcagaggtatgaagacagaggacctacagattgcattcctgtgcatacattgagtgatatttgcagaatgatatctatttcatga

SEQ ID NO: 25177 - DNA, 579 bp, Zea mays
  Peptide Sequence Number=SeqID_68552
atgtcgccgccgcaggggcaggcgcgcggctgtctgggagcttgctgggggaagaacaagcgccgccgtccgcccgccgtcgccgcgctcgccccgccgtcaccacgctcgcctcgccgcgccgcgcccgccttccctcgtcgcgctcgcctcgccgcgctcgccgcgccgcctgagcgcccgcgctcgccgtgccgcctgagcgcgcccgcccgcacgccacccgagcgcgccagcccgccctcgtcgagccgcccgtgccccgcctgcgcgcgcccttgcccgagccgcccgcccgccctcgccgagccgcccgtgccccgcctgagcgcgcctgcccgccctcgccgagccgcccgcccgcgaagaagggagcatgccgccgcacgcagcccgcgcgccctcgccgcgctcgccgcgccgcccgcccgcgaagaagggagcccgtggccgccgtcgcgaagaagggagtctgccgtccgtccatgccgcgctcgccatccgtcgacgccgccctcgttccccgcgattgttaaggcggtggtgaattggttttgtatagtgaagagtgcatgctag

SEQ ID NO: 25178 - DNA, 306 bp, Zea mays
  Peptide Sequence Number=SeqID_68553
atgatgcacgcacccccgattttagcggccggtgaggattgcttccggttgactcggctacgctgggagcagggaaaacggtcggtctttgaggaggacgaaggggaggctaacaccgaggcccacgagcttgggcagccgttacgcgagcgagggacccggtccccgtgcgaattccgcgacggccagtgcgcgcccgcccaatctggcgaagaagacgagcagggcacgacgactgcactgtggggccgcggggcagcgataggaaaggaacccaggcacgcgctatgggtttcttttagatag

SEQ ID NO: 25179 - DNA, 843 bp, Zea mays
  Peptide Sequence Number=SeqID_68554
atgctggcccccggcactgccggattaaccagcagaacttcgaccaccggagaatcttgggacgacgggttctactgcgtggacctcatggcaggccaccttgaggcgatgcttgttgccatacacttcagccccaccgatgatcatgaggcatcccattgttttgtggaaatccatggtgggggtctcccgctgcaccggttttgctggctcctccggttttgccttcttggcaggtggcttagaaatgaagcacttcaggagttcgcactcccggagcttgtggcagacggtgaagccgtgattctggcacgacgagttcatcaacttctagaaatggtcgctaccatttttcacaggtggcctgggtggccgatctgcggtggtgacttcttcttcatcgtgccgaggacgatggttccttcggtgcctattggggtgcttctgatgctccctcttctcaacgttgggcttgccggtgtcacgcaagttttttccattgcagaaaattgtccccactgcatcttcctcgtcggtgaacttggttgctatgtggagcaggtcgacagttgttcttggtctccctcgcccaagcttgtggacgagtgcctcgttggtagtgtcgtaggtgaaggcgcttgctacgtcagcgtctgtggcatcgaggagttcgtttctcttttgagaaaacctctagatgtaatctcgaatgacttctccactcttttaggtgcaccttatgaggtctcaagagcttcctgggagcttgtaggtgccttggatgttttcgacgaaggccttccagaggtcgacccaatcgtggatggtaccgccagttggtag

SEQ ID NO: 25180 - DNA, 372 bp, Zea mays
  Peptide Sequence Number=SeqID_68555
atggagaacccaatgagccttgtatctgtcgagagaaccatcaggattgaatttatgatggaaaatccacttgccagtgacgatgttggtgccagggggctagggaacgagatcccaggtcttcggacgggcgagggagtcggcacccaaaagccagccttaccgcgagtggccatcccgtactggttgaccactggtgtgatgggaacatcactagtgggtagttcaatgggcataggacccacgagcatctctgagacagtgcgtggttgtcgatggtacaccttcaagggtgctacgagcggggccactacggagcgggtggtgcaactgcgactgatggcaggggcaacaacacgaggccctgtttag

SEQ ID NO: 25181 - DNA, 1088 bp, Zea mays
  Peptide Sequence Number=SeqID_68556
atgttggggggactaagaaacgaaagtgcttctatgcttgaaaaagttgaggttgcctcgacttcatcttttggtgcagatgttgatcctagggcaatagaccttgccatgagaatcgccgaaaggatgttcctcaaaatgaaggaagatgaggtgaagaacaagattgaagaagaaaatgatcgatggagaccaaacgacgaatccacctcctcacaaggttcgtctttcaaatctacttctcatatgtgctttattgctaatgggagtgacagtgaaagcgaaagtgaggatgaggaggagcaagaaagtgatagtgaagatgaggatgatcttcaacaattcttcgctcagctaagcaagaaacatcggatgagcttgctcaaactcatgaaaagagcggaagaacaaaaagaaatgcttcataagcaagaagacttcctcatcagaaaaatcgaagacttagagaagttgaccaaagagcatgagaagataaagtgctctcatgatgattttgtcaaaagccctgggctctatttaactacaggaagccctgaccaggcgcccgtgagcaggagagcctcggccgccacggcgctctccagccggcggattggcgatcgtggagggggcgcgaggaggagcctcagcgtccgcggcggtacagcttcaggaggcaccggtcgggcgcggcggagtgggcggcggtggtgctgttcatggtgctggcggtcgtggtgctgctgggcgccgtggtcgtccttgtggtggtgctgctgctgcagcccccgcgtgccgtacgtggcggtgctccgcgcctacccgtttcgcgtgcccgccaggggcgtcctcccgctggcgtacgtggcacgcgcgcagggcgccccgctgggcgacgccggcagcgccgccatggaggtcgcgctccacgacggcgtggtgccgttccaggtggatggggaggcccggacgcgatggaaggtcgcggggatcgtcggcgtcgaccagtggatgcgcctggcgtgccagctccgcttcttctggcccaacggcaccgtgctcccctttagatgcatctctaagtccaa

SEQ ID NO: 25182 - DNA, 189 bp, Zea mays
  Peptide Sequence Number=SeqID_68557
atgcccttggcccttctgtacgatgcaaacatacttgatgtgtttgtccccagggtgcggcaaacatttgatacaagggaagaagcctacctcttttaccttgactatgcaaagttggctggttttagtgtcaggacaaagaggtgtaattgcaactgctggtgtggtgtgattgcaaccccgcattag

SEQ ID NO: 25183 - DNA, 393 bp, Zea mays
  Peptide Sequence Number=SeqID_68558
atgcatctatcttacacattgcattcattagattgtaatctcgccgacggagagtatgtgctcatccccgagcaaggaactgtccaagaggaggaccaggaacaagcttcagaggctgttatcgaggatctccctgcagccccagctattgaaggcaagccccgctatggtgggtacaagtgtggtcactgcacggcggcagccggggtcagtggagcattgtatgccaaggcggtgaggcctggacgtgaacggggaatcaatggggacggttgtcatgtgcagggtaccattcaggaaatggttgatggtgtgacttggcctaccaccctgccaccgggttggacggtcgaatgggatgctgctccggcagaagaggagcatgaggagtag

SEQ ID NO: 25184 - DNA, 1344 bp, Zea mays
  Peptide Sequence Number=SeqID_68559
atggccaaggcggcgatgccaagtagtggagacaatgacaaaaagggcgtggaacaccggggaacatgttggagcatcgagggtgtagagggtcccgaagctattgtacctggtaatcacggtcctggaatgaagatccttcatagaaaggtccagagggtcaaattcaacaaaacatttgttatcagaagatccagtccacagagtccatggcgcactaggggaggtaggaaccgcaagggactgcggcagagtcccgagctgatgcagtggtggactcagctgatgctgaaccgacctgacaggctaggtaaagtgacacgacataggggtgtattgggtcagagcagcgaagagcacctgatgtggtgcgccctggggcgactgagtgttgcctcctccgctattgttgggacgtcgtcgtcgacgaccactagcagaggagcccccgccatgggtgttgctagtgggttgggtggtaccaccagcgggcaccgtgacacctccagggggaggggtgatggaggaagcagtggtactggcgatgagagcggtggccggaggtggaggtggctcactggagtcgatctcctcgaggatgagatcattgtggatgtcggcgaaggaggggaacatcttcgagcacttgaagtggaccttcatgtgggcaaatttctcattcatgccacacaacacgttcaggacgagggtacggtcgtggatgacctcactaagatcaccaagagcatcaaccatccccttcatcttgcgacaatagtcaccgacggagagatcgccttgcatgaaaacacgaaactcggcgtcgaggagaagggcacgagcttcgtgattgccgaggaattgctcctcgatggtcagccaggcacgacgcgcagcaccactagaggtgcgagcagactccatcagctcgggggagagtgtgcccagcacccaggacaacacgaccgcattcatgcgccgccaggatggtgtggcggggcaggcgtcggagagaacatgtggtgggaaggtggcgttgtgggcgacggccgcagcacgctcaaggtcgaaggccgcttggcgttccctggcgagggcgtcctaagcggcgtggacccaatcttgggcgacgactgccttggccaaaagcttaagctaatgggagaaggtagtcaattcacttatacacttaaatacccccactcatgtgcaactagagagaagcacaaacgtggaaataaatgggtggaggcacaaataaagcctctgccaggattcgaacttgagacccctggctctgataccattagtggacaaactaaccaattcaacccaaaagcttaa

SEQ ID NO: 25185 - DNA, 474 bp, Zea mays
  Peptide Sequence Number=SeqID_68560
atggcagatgaagaaggaactctacatcgcacagcggatctgcctgagagaaaaccttcctcgataatgttcgggaaagccggagcgaagcaggaaatagcgcaacctccagcgctccaagcgaagactaccacctgcaagccagaagcggaaaattcattcacccgaagaaccccgttaaagaagcttgtcatcacgacaactccgttctaccccgacgtcctctttatcgggggggagtggaatcgtcccccatctccgatgacgaaccaactgtgcctggggaagaacctcctcagcgggaagctcgtcgacgaaggaaccgacactgttacgcccggcgacatcatgaagccggagaacgagatccggcgcagcctgtgtcgcgagatgagatctcagaggtgggagaaactccagatgaacgagtcttcagggagagaaggaattcccgccgacgtgatcgtcggctag

SEQ ID NO: 25186 - DNA, 132 bp, Zea mays
  Peptide Sequence Number=SeqID_68561
atggcgaaggtcgatgctttgccgaaggttttggaagtcagagtctctgataggttaaaacagaggggttatgcaactatcagacgattaagattaaatctgatgggatcaagatcaaattggtacaactag

SEQ ID NO: 25187 - DNA, 147 bp, Zea mays
  Peptide Sequence Number=SeqID_68562
atggcgattggcggaccgaaatccttcaccaagacggcgataggggccttcgcttcggcgccactaccagcatttggacgacaaccattggatcggttccagccggtggaggatttggaggattcatttctatttgctattgcctga

SEQ ID NO: 25188 - DNA, 483 bp, Zea mays
  Peptide Sequence Number=SeqID_68563
atggagaaatcagagtgtcatgtgcatgcttattctgaaggtgaacaagagctaaaatttttgggcatgcaatctctaactactgaaattgaagcaattgcttctactagagaacttgaagaaaccattacagataaggacagtgatatttttcagctagagacaattataggaaacttacaatcatcaatagagacaaacggagtggcagctgatttagaaaatgagcctccagttagaaagaagcaaaggtgcatgaatcctgacgatgatgcattagaaggctcttgttctagggcccagagaaatttgccagatcagtctgactctgatattcatgaaatagcattgcacaatgaggaggaaccccaagctgaaaggctgccttcagccaacgtgaatcaaatggaacaggctgatgttgccgctaataaagaagtatctagtggtgtgacctcttcctttggccaagtcactgaatag

SEQ ID NO: 25189 - DNA, 1824 bp, Zea mays
  Peptide Sequence Number=SeqID_68564
atgaagcacgtggaccgtcctccaaataaccccaagcgtataacaattcagtcaagccaggagtgtttcagtgttgacattccctctgcagaacagtctaatccatgtccagaagttggaaatcctccaaatgttgacagtcaaaatttgaccaatgaaacagttcagattgattctgatgaagatgacttcatgccagctctgaagaagcgtaataggcttaatgtgaggtgcaaccctcaagatgtcattgcaagcattaacattttgaatgaaagacaacgtgaggctataagacgtaaaggtttctctaccattcttgatatgacagtagatgcgctgtgcagtagatcacaccttcaatggttgatggacaagctagaccccaaggacatgacaattcgtcctggtccaggaaaggaactaaagatcacaaaggacattgttcatcttatccttggtgtgccaaatcatggcggtggtaaaccattggggattgacgaagcagttgtagcaagcaacttgagggcagagcttggtgtgtccaaagatgagttcaatgtgacatttctacatgatcgtttaaggaaaggcgaggatgatgacctttcaatcagatgtttcttcctcattttattcaatcgtctgctgtttccaactgctagctggggcataacatatcatgaggtgcttctcacagaagaaatgcaccgtttccatgagatcgactggtgccagttgatttttaatgatctatgtgaagctgtgaagaagtggcacaaccgaatcaccacaaatgtctccacgactatatatgaatgctccattgttgtccttttgtattacttggatcacctgcatacagccgctgccccccaaaataatactggcacacctcgcattaaattctttgataagaatagcataaaagctttgaccaaagctgacaagaggaaggtacgccatggggctgaacctttcggacattgtgaaccggagtgcaggaccaatatttttgatgcaccgcgccctgcccccacgcctcggccaacttttaacatcaaacttccatctatcaaagagatgatgtcaagtaagatcaacaatctcccacatcgtcatcgatctaaattcacagacattcttgctgcatatgacttggaggttgacaagtcatgcatagccataaaagacagcattgacaaaattattgagaagcaatacgacatagcagacaagtttatagaattgatagacgaggtactacgtgccgagtctgataatttagaaaacgagactgatgagccacatcatccggggaattcggctgattcagcaggacacactgttcatgccacccagcccacacccgatatgccatcccaagcttcgcaactcgagacccagctgggtggtactcagtttgaagaaattcatgaaagacaacagcatatccgtagagtgcttgagacgtgtcccgatgaatcggatgtggttacagatcaacagagaggtgaaatggcaacagaggaaatggaacacaatgacagtgggccagtttttgaccagaccccaactcctcatgctctgttaaattttgaagagcaggaacatcacagcaagaatcctcagccatttgatcaaaatgtgttacagaattgcttgcacaacacattgcctcctttggtaaatctggataaatgcaagtcggacaattcccgagacctacgtgctcatgcccttcatcaactcacattccatcgcatgaacaaggcgctgccacttccattagatatccagagatttatgtttgcgcgcaattag

SEQ ID NO: 25190 - DNA, 462 bp, Zea mays
  Peptide Sequence Number=SeqID_68565
atgggcaagagcaagaaaggcggaagttcatcgcaccactccagcgacaagcggaagcgcgagccgagtcccccctccgaggactttggtgactccgagtactcagaggaggagttctcctccgagtccgaggggtcgccagcctatgcctctccctcagtgtcgtccgatgactcggacgattcccaggggatcgccgccgaggtgtggacgtacatccgggccatcgagcgctccgggctcgagggttcggatgagtccgagatctcctcggacgaggaggactcctccgactcgtctgaggagggtagcggtggcgacggcgatgacgagggcaacgacggcgataagggcgacggcggcaaggcaacggcggcagcggcaaggacgacggcgatagcggcaaggacaacggcggcagcgacagggccaacagcaaagcgccgctggcttaaatattag

SEQ ID NO: 25191 - DNA, 541 bp, Zea mays
  Peptide Sequence Number=SeqID_68566
taaggatgtggaccttatctgctatgtggtgaacttcatgaggtcttctggtaaattgatggatgacacaaatatgatggacataccgattgcctctaaacatgttttgtccaaccgcacaaacaacaagttagttatggctgtaaaaacttctcagaacagtaatgaaggtagcacaaaggagctgaaggctattgttcttgagctgcagcaggagcttcaagctaaagatgtccaaattagcacaatcagttctgatctatcatgtcagttaaaggtagctgaatcttctgcaaagcagttctcagttgatattgaagatgcaagaatgaagctccaaaatttggagaaagaagctgatgtgttgcaaaatcagaagaaggatttagagactcaattaaatgagcttaaaaatatggaatcaatggcaagtgagcaacgtggaagaattgagaaattgactgatgaattaagcagaaaagattcacaacgtggaagaattgagaaattgactgatgagtatggaatcaatggcaagtga

SEQ ID NO: 25192 - DNA, 984 bp, Zea mays
  Peptide Sequence Number=SeqID_68567
atgaggaaaacacagcaactacagaagatggtacggtgcatgttttctgcagttccatgttttgacaacttcattaaattactaactgaaagtgctcatattttgtttcctccatttttctttgggcagaaccaagctggttggacttgtgtcttgatcatatggttgataattggcatcccaggaagcatatttgctggattggtatatggttttctagcacccataatggctacatttgatgctatagcagaaggcaaagaaaagccatttgttcattgctttgtggatggaacatggagtactatcactggaagctgtacagtagtcagggacgtgaaagatttgcttttccactcctatttttcacttatggatgaccttcgtcttcagaaacctcctgacggggagccatatgagataagattgcttgatattcctggtgcactaatagcggctgcatttgaatttctacttgatggaataatgttcacattaattgccttctataagtgccccgtgatgcttttcaaaggatggaaacgattgatccaggacatgattgggagagaagggccctttctagagactgcttgtgtgccatttgctggtcttgctattcttctttggccatttgctgtagtaggagccgttctggcatccgtactctccagtgtccctttaggtgcttatgctgcagttgtagcttatcaggaatcctcccttatcttgggaattgcctatgtgttctcgttagtgtctatatttgatgaatacacaaatgatgttcttgacatggcgcctggttcttgttttccaagggagaagcaagaagggaaaagaccttcgtctcgtgttacttcatttaagaacaacattgatgatttcaatccattcaaggtgattctcctcctattaaatagtcaggctgcaatgtcattgcttaggtcagtcttaatgggagtttcatggggcattaaataa

SEQ ID NO: 25193 - DNA, 408 bp, Zea mays
  Peptide Sequence Number=SeqID_68568
atgcaggtcgcgggtgccttcgtgtcgaccgccacacatgcgcgtgtcgtggcacctcctcaagcggtggacaggagctgggcaggcatcgtgccgaggccaaggggagggggcgtctgggagacgctgctatcacgatggggaaggcgagggctgggtcagtgcgcaggtgtcggcgagatccgtggtcagaaagagcagatcgagtcgtccgtccaaggcacactgaatgcgatgcgatcgtgcgcgaaggccgggacggtgcggcgcgtgatcctgacctcgtcgatggccggagtctacatcaggccggacctgctgcaactgcgaggcgacaggcacgtgctggacaaggaatcttggtccgacttcgagtacctcagggccaacaggccatcgataaactga

SEQ ID NO: 25194 - DNA, 315 bp, Zea mays
  Peptide Sequence Number=SeqID_68569
atggagacacaggagatcccagttgtaccatgcactagcagcagcaacattgccaccagcacaaacgagttcgtggataactacatagtggtccacctctggacaaggccagctggagaacagtcaaaagaccagtcctgtgacacaaggagcgtgcatatcttgaagatagcttatcaagctaaggatggagccaagaagatcttcaaggtactgagtgtgcgggagaaggtcaaggaggctgaggaacccaaagcacgggagaaagtgtcattcagagctctgtttaaggcgaaatataaaagttgggagtag

SEQ ID NO: 25195 - DNA, 396 bp, Zea mays
  Peptide Sequence Number=SeqID_68570
atgtctcacgtccctgccgcgcccaggacacaccggcacgacggcaagaaagggcggcggcaggaggagcagcagcggcgaaaggctgtcgttgtcggaaacgccggtggcctcgtcagcccggctggctcgtcccgctacttgctgagcgaccgcttcgccgccaccgaggagatccaggaggtggagtctgccccggccgtcgacgtcaagcccaagcgggaggaagtggttgtgctcaaggtatccctgcactgcaaagcatgcgccgggaaagtgaagaagcacctctccaagatggaaggcgtaacgtcgttcaacatcgacttctgtttaagggaggatgataattttacattttactgcaagttgccaaaactacactcatttttgtag

SEQ ID NO: 25196 - DNA, 330 bp, Zea mays
  Peptide Sequence Number=SeqID_68571
atggctccaagcggggacggcggcgctccagtcgggcgaggccagtgcggtatggggcggctctggctgcagcagctggtgctcggcgaggtgacgagggcgttgtcgagggttttgttaatacatgacatcaaaataaatcgttccactactttgaaagggaaagaaaagagtgaaaaggaagaggataaagaaggttgcttcttcctcatagtggtgatcccatttgactttgcacatcctgatggtgttccttcgggtgactctgtctgcggtctccagaatctgcgtcgacttctctacgtatgtcaggtcttcctaaacttctag

SEQ ID NO: 25197 - DNA, 312 bp, Zea mays
  Peptide Sequence Number=SeqID_68572
atgggcttgcttcacccggttactcttggccggcccaccgcaggacgccctaggggggagtcggatatctacatcaccgccgacgaacgagaccaggacctcattggaggcgcgaagcccgcacttccagcgccaagaaaggacatgaaccatcaacggacaaatgctgggacaggaggcctcgggaagaagtgcacaccgctgggccaccagccacctcggtcccgcagtgtgccccgcggcagagtatggacgctggatgagatcctcgactcctacgccgaagatgtgagcaggaaagcttcggcgtga

SEQ ID NO: 25198 - DNA, 141 bp, Zea mays
  Peptide Sequence Number=SeqID_68573
atgggggtggagtggtacttctactgcctccgcgaccgcaagtacccggtggtcctgtgcaccaaccgcgccacggcggtcggctactggaagatcaccggcaaggactttttttattttttaaaaaagaagctcacgtag

SEQ ID NO: 25199 - DNA, 138 bp, Zea mays
  Peptide Sequence Number=SeqID_68574
atggaacgggaagataatgctagagtgattgtgaatcccaagggtgagatgaaaggttccgctatcactggacctatcggcaaggagtgtgctgatctttggcctaggattgctagcgcagcaaacaccatagtttga

SEQ ID NO: 25200 - DNA, 645 bp, Zea mays
  Peptide Sequence Number=SeqID_68575
atgtggccagcaccagggtccgagggccggccgtcggactcggagctcagccgctcgaccgccttccgatttttctttgtgatatggctttccttttggtattacaaatatgcctatttctttgagatgaaagatcgattttggtatgatgatatcgaacctaaggatgttgtgtgctcgaacttcccatgcccttcctgctatgaagatcgtgatgttacttctctttgtgcccatttggaggacgagcacccttttgagtctaaaattgtggatattatcaatttgggtatgatgatatcgaacgatgaggatgatgtgcgctcggacttccatgcccttactgccatgaagatcatgatgctacttctctctgtgcccatttggaggatgggcgccattttgcatctaaagttgtgtgcccccatcttagatgccttgcctggatgctttggcgagatgtgtcatgtgtgcttggaaaaccacaggtgcattgtctggtgcaacatctgtgtccaaaataagcaacaagcaagtaatcaagcacctggtgaagagcgtgtcgcagtcgcaacggtactcgtgagggccgtaggtcttggcgtgtgccttgaggttggcattttgaggcatttgtgcatataa

SEQ ID NO: 25201 - DNA, 876 bp, Zea mays
  Peptide Sequence Number=SeqID_68576
atgagaatttcacgacagcttgcgaatcctcgcccaggatgccgacgggcacggcgcccacggtggtcaccttctgcgcctcttcgaggtggtgctcatcggctccatagatctggcaccatgcttagccgaccatggcgaggccatcaaggaggacaccggccccatattgcggccatcatggagctagatgaggtcgtcgttaccaccagagaggatgatgatgcattgctcctcgacatttcatactcttatgacagtggtcatatcaaccagaacttatcaaggaagtgtgaagcattagttgtgtcaggtttggcagaatatggtgatgaaatagatgggattgccccagctgatatcatgaagcagattttaaaaattccatactccaaggcacaagtatctattgctgtaaacccgcatgatgttgatgaaggtgaaaagatattcagaagacaaggcaaccagcctaaaggatctgatccatcaatatttctgaacttcgcagtgcactctgtattttgctttgcgatatggctttccttttggtattacaaatatgcctatttctttgagatgaaagatcgatttgggtatgatgatatcgaacctaaggatgttgtgtgctcgaacttcccatgcccttcctgctatgaagatcgtgatgttacttctctttgtgcccatttggaggacgagcacccttttgagtctaaaattgtggatattatcaatttgggtatgatgatatcgaacgctgaggatgatgtgcgctcggacttccatgcccttactgccatgaagatcatgatgctacttctctctgtgcccatttggaggatgggcgccattttgcatctaaagttgtggtga

SEQ ID NO: 25202 - DNA, 1161 bp, Zea mays
  Peptide Sequence Number=SeqID_68577
atggcgtcttacaggccgtacgcactgccgcctccgcagggcggctacccgccgcaaatgaatccgtacgcgccgccgctgccgccaccgcaggcgccctacaacaggatgccgacgccaccctaccacgctgggcccccgcccccgccgccacctcaccaaccgcagttcaatttcggtcccgggcctccgcagcagcacccgcgacggcttcgatgtgcatttctattcttcatcggtaacaatggtgcacttatctcatgtgttcagaacttccccaagagtcatggaacaatagttggtatcctcaaaggtttaagtggtgcaatactgacacagatttatgcaattgtacactctcctgatgatgctgcactgatcttccttgtaaatcaaagcatcggattgacatggcgacggcggatccacatacgcggcctgcccccgcacttcaacaccgacctcctccgccattgcggcgccaacgccctcccgctcgccgacccgtccgccgtggccacctcggtcccaccctgcgagtcgctcgccgaccacgggctcggccctcgcacgcacccacgcaaccggtcctggtaccgcaacgaggcgaggctcctggaggccttcttccaccgccgcatcctggaacgggactgcttcgccgacgacccagccgatgtcgtgttcctgccctactacgcggctctcgacgcgctgtcgtacatgatcgatccggccctgcttgacgaatccacgaggcacggtgtggcgctggcggagttcctatcgtcggaccaggcacatatcctgtctcgccggcacgggcatgaccatttcctggtggtcgcggggtccgcatgggactacgcgcagtcgccgggcgtggagccgaggctatggggctcgacgtcgctgctgcgactgccggagctggccaacttcacatccctgactctcgagtcccgcacgtggccatggcaggagcacgcgatcccgcacccgacgtccttccacccgtcgtctctcggccacctccgcgcctggctcgcccgcgcgtgccgttcgtgttgcgccacgctgatgctcttcgcgggcggcgcctcccgcccgtgccggccattgctgggacaaacagtactgggatatagatggacggtctag

SEQ ID NO: 25203 - DNA, 2289 bp, Zea mays
  Peptide Sequence Number=SeqID_68578
atgccccacgccggcgcccactccgggaccggcggccaccttccaggggagcgccgccgctcctccctcctcccatttagcccccctgcaggcggccgctccctcacatcctcctcccctggagctccgggctgcggctcttcagccatcggtcgtgggggcactgagaaggacgccgacgctgctgatggttggaagactgttgagtcccggcgttccaggcggttgcgcctgaaggctgccaatttccagcgccctgcacctaccaatctttccggcaggtgcttcaactgtttctcaccaaatcacctggtccgtgactgccgttcaaggacaagatgcttcaagtgctgtgggcttgggcatagggcgtcccgctgcccggaggctccagatcgtgctcagttttccacagctgtttccaagcagacatctgtctggagcagactttcctatccgtcttctggtggtttgtgccagatgaggcaatctattcaccctgcagcgcctcagaaggtttggcggaggaagacttcgatggctgcaatttcaggcagccagtatttgtttcaaggaatggcttctgaccttgttgggggcgctgatgccatcactatcaggggccgttctcgccggcgtcactctcacaagagacggaaaccccccacccctcccagagatgatgggagcaggatttatatgcagccccatctgccttcttcaggacttgtacccccatgcttgctgggttggaaccacgccatgactgttgtcgaggaagatcttcgtttggcagtggttgtctcggtgatcagcaaccgtgactcagtttctaaattcaaagtggcatccctgctctcaccaagattggaaatcactgaagactccattgttctccgtcgcttatcaccaaatagttttctgctggttctcccgtctgaagatatggctcaaaggctcgactcgaggtggtccattcagcgggctgcgactttcacagtggtctgcaagcgatggtctagatttttaaactcttctggcagaactcttcctcagctggttaacctggaattagatggcatcccagtgcacgtgtgggagacggctacggtggaacatttaataaatccatttgcttggctatttaaggtgcactcagatacctctggcctgagtgacctggtttccttcagatgttctgcctggtgcattgatacatccatgattccggagtcacgggagctctggatcactgagcctctacaggcgcctactggagattcgcaaggggttatctctctgggttatacagttaagatcagatggtctattcctccttcagctgctgctgctcctttggtctctgcctcaccgctgtcgccccgtgatcatgatgatggccctcggtcataccggcggtcccggtcacactctccacgagggcgaccacgggaagacatcaacgcaagcaatcttggggagctgggacagcaacgtcgttcagccaaagaaagactgggtcccaaatgcttggattccaaacaaacgaatcctaacccttctgagctggacaattctgtggatggcccttgctgcgatctcaacggagaacaccgcgcgggcctagagactccccacggggatgactcggctccggtgcacaatgaagagcaagcccaacatgctgttttttctgatcaaatggactacaatcccattggccagcagaatttcactagagatttgtgcttggttccaaatctcaatcaccgtgtgggccttgaggctcccttcggagaggcttcggcttcggtgcacattgaaaaccaatgtagcgaccacactgctgaacaccgtgcgggccttgagaatccccacgaggatgactcggctccgggcgctgcaacatcagaaagaaggctcatagaggcaccaaacctgctcgtttatcatagaaaaaagaagcataataagccgctagttgaaattgctgaagaaacaacggaaaataataccattccagccctgcagatggatggtgtggaccctgtaacagccaaaaaagaggtatttcttaaacaaattgtgaatgaagtttctggtattctgccagcaccagcaaatccaactccaaagcccataatctccaagcggtccactgctgtgtcccttcgccgtagccgcctcattgctggaatgggagcagaaattggcaagcaagatctttcctcaagagcaacaaagaaagttatgaaggctctcatggtggtggggaactggaagagatag

SEQ ID NO: 25204 - DNA, 942 bp, Zea mays
  Peptide Sequence Number=SeqID_68579
atggggagaggcaagccgggctgtgatcttggtcccgccctcagcctcaaggatgttcatcatccttgctggggcagagagcgaggcgagccggggctctacctcccgcgcgggccggctggccacctcttcttccagcttctggtggtggcaaccatcctccagctctgcggaggaggcgtcctccagccatgccggggaaggcgaactgttgctgcccagctaggatgcaacattccgccctcttcctcgctttcgtggcgaggacgggaacgaggacctgccggtgcgctttggagcggcccgctctttggctttgatggctggttcgcgtcccttgagcgggaacgcgaacgagagcctttcggcggccgcgtccgtcctgggaccatggctgctgctgcagaggtcgctggcgagtcacccggaactcgtcgccgcgcgggctccccgattgtttgtgcgagcgagagttgcttctcacggaaggtgatgagtgaggtatccgtatcccggaggcgtaggagtccctcggctcggtcggccttaccgcttacgcgcgctcttgcccgtccatggggttctgtcaccgacgcagtcgagaaggcccgaagaactgcttcggcagaggagctttcgaacgtgaagacttgttcggtccgcggaatcacttatccgagcgtgagttacttatcgcagaaggtgatgagtgaggtatccgtatcccggaggcgtaggagtccctcggctcggtcagccttggctgcttacgtgtactccgtcgttttcaggatccactttcgaagtagtcgaaaagtacgaaagacattctggcagaaaggatcttttttcgaggaaaaaattcgacgcagagggggttccccccttttagcccccgagggagggtcgggctttgccgaggcgaggccgacccttccttga

SEQ ID NO: 25205 - DNA, 558 bp, Zea mays
  Peptide Sequence Number=SeqID_68580
atgtccgtcagctggtcccagggtgaccgcacacgaaaccccagagggtttggactcgcctctacgagagcgtccgccaaagcgaagccgcttggcgggtcgaggctggatccgaaaggcgtgagatgggaatcggttggtacctcttggtcgacgggcggtgatgaagtcacgtcggggactgactgcaccgtcgtctcagggaagacgttgtcgattccgccgccggcaggcgggctgtcggccgccattgtcgctgtcgcacggcggtggaaggagtatcatgtcatagctgccgtcgagggacatgaactcaagactcccgaaacggagcaccgtcccgggccggagaggttgctggagactgcccatctggagcttgacgggaagctattcgtcaacacgcagcaggcccctacctggcgcgccaactgtcggcgtttcgagaccggggggtccctgggccgacaagtgaatgtcgttgcgtgccccagcccagatgggtcagcgcgaggccgagcgcgaaggggggagaaaggtggccggagacgggcgtga

SEQ ID NO: 25206 - DNA, 888 bp, Zea mays
  Peptide Sequence Number=SeqID_68581
atggcctcaaggatgaaaatcctcaccagcaaacctctacaagaaccaaggaattctgttaggtcgaatgagggggataggaaactataccttcccgttccatgttccatgcttttcgactgcgagcacatgtgcttctacttcagcaacatagaatgggcgcctgattctgcgttgccctgctctggtgaccatttagacttatttgctagaactataggtcctactgtgatctgcagctggaaccagaaaaaggctcacaagtttgtggacactttattaggcgatgcgacaccaaagggatataatttatatgcacaaatgcctcaaaatgccaacctcaaggcacacgccaagacctacggccctcacgagtaccgttgcgactgcgacacgctcttcaccagcggcggcgtggtggtcggcgcccacaacgcccccgcggggctcaactacaccggcgtcggctacgcgcggccgctcaggatggtgtaccggaaggcggtcgagcggctgagctccgagtccgacggccggccctcggaccctgcccgatcgacagcccccacggcgtgcaccaggatggagccgtacagggaaggcgagaaggaggtggcgtggatctgcaaggaggtcagggacatcgtgtacgacgaggcggaggccgccagggcgaggggcgcgagcgcgacaagggtcgaggtgctcgacgtcacaaagctggccaccatgcacccagacgggcaccccggcgtgtacatgaaccacgaccccttcaagcacggcgtgccggataagatctactccgactgcctccatttctgcctgcccggtcctgtcgacaccttcaacgagatattactgcagatcctgaggaagaggcggtga

SEQ ID NO: 25207 - DNA, 2580 bp, Zea mays
  Peptide Sequence Number=SeqID_68582
atggcatctccacaagaatccaattctctgtgcttgaagcgaaagcttgttgatgactgcctgtcaaaagactgcaaatctcgccgtgtcaaatctgagaatgagccctcatctgattcatttgctaaacgctgcaactgttgctgcactcgacctaatcttgccaatgattgtgtgaatttcctgaagagtggagcgccaaaccgtgtcatgtattacaaaaaaggttcgtggcacaattttccagagcaaataatgaattccctcatcgatgaatttaaaggaaataaatcaagtgttgtctctgtgatggatgatgaaccaatccttgttgatttcttatcaatgaccctggtcaacctgaaaaccagaaagcagcggtctgttgcctggtttgatgacactggcaagcgtttctttccttctctgttctttgatgaggaaagtgatgaaatgcccaaacaggattctggcaatgttaataacactgcacaaggaataatgttagataaggtcacgagttctccacctgaagtggtcaagcaagttgttcttgaatctagtccaccagtccctcaaaaaccttcaactgtggatgtcttgcgcaagaagatcacatctgtggaaagaggtagcgaagggtttctatttgtccaggacctttttctctctggtatgaacccgtttgcaacaccaaataacatacttcatgtccaccgctactctccaaacgatatcaccgcacaatgtagatttgaagcttttgaaagacagatgaagtcaactaaagaagcacgtggtgatgcaaatgttaagtatggctggctaggatctaggaagagtgacatagttaggattctcattaatggtttgggtactactgcaaatcctgttgagaaagctggtttgagtgctggtgtatatctttcacctgaaaatcgagcctttaccagtgtcggtctttgtgatgttgacgaaaaaggagtgcagtatatgttgctgtgccgtatgatattgggcaatgtagaagctgttgaacctggatcccaagagtcttttccaagcagtgagatatatgattctggtgttgatgattgttcaaaccccaagtgttatgtgatgtggccatcacatctaagcactcacatccgtttagaatatcttgttagtttcaagcttgccccaaaagttcgaaattatttgcttgacctgaaaggtttatggtttaatccatcactaaaagaacttggcacggacatttgtacacttcaacctgtaatgtgtgaaacaggtgaaggaccaacttccccatggatatcattcagagttctgtttgcagttattcaagacaatatatcatctgtggcaagggagttaatcttccatcattatgaagagctgaaggaaagcataattacccgtgaagaaatggtgaagaaaatgataattgtagttggagagaaagtacttttggaggccttgaagaagcttcattactgtccatcattatggtacaggccttctgttgaagcagtgtctagtgattctgtaatggcagcaccaggaaaattatccttggataaggcaggtggagttttttcattaactcttagtgttaaccatgttgattcacatgcaccaaatggtgtgtctgaacaatccacagttcttagcaccaaaggatgtgaaacccttgcagcggatatggtgcccaatggtcaagattgtccggcaccaagtggtgtgccagaaacatctagttctgctgttgccatgcgtggggcttctacaagtgtggaacccaagcgcagagatcctcctgtacagattgtgccacctggaagctctgcaaccccatgtgccaaaaatcaagattcttttgtaggaagagtgacacctatagctcgtgatgggcttttgaggacaatttgtggaagctcttcatctcctggcggttatgcttctctagcgcaagctaatacctcccaaaccaatggagtttctgccccaggtgtcactcctaggggctatgaatctgctgtaccaagcttgtcacttggaaattccgaaagtacaggcgtgaaacaagtaaattctgcaccaagaatgacacctgaaggccagaagttcctttcgctgggtattgcgccacgaagcccagcactgcgtgatttagtaaaatgccaggccagttcgacactcgttgccatgcctccagcgggcctgggaaaatcacggtccatgaagatcgagggccatgattctctggcaccgagtgtgaaggagccaaaaggcaatggtggtctagcaccaagtaaaacgccaaagctgcatgaacctgtgatagctgatatgagcatcaagagctgtgattctctagcactgggtatcgcaccaaatggccatacccatgatggtccagcatcaggaagtggggaggccaagaaagagcaggcagcactagtaactggctcgcagagtaaatcatctgtaccaagtcttgacgctagcagccatgttaccggggcagcgagcgcccttgtcgcactatcaactctgcgggagaagggcgggcgttag

SEQ ID NO: 25208 - DNA, 861 bp, Zea mays
  Peptide Sequence Number=SeqID_68583
atgaggtccccctgcttgacgatggacaacgcggagcagccgctctgcaccgcgtccaagcggtggctgcgccggagcttgtcgtacatagcggcacatgcggccacgcatcggttgtacgggggaatgggaatgggctttgcggggagggggaatgagaatgatagatatagaatggcgccggcgggggagacggagctgccgagcaacgggtcgccgccggtgggcctccacgaccgccggatgcggctctcggtcggggtcgcgcgagagttcttggcgctgcaggaccgccttgggttcgacaaggccagcaagaccctgaactggctcctcgcccagtccaagccgcccatcgactgccttgtcgacgccgccgaacaggtggttgtagtcactggaggacgaccgacgctggtgaaggggagagagcaggggagcaactcaagcacttgctgtttgacagtctcgagggctggagtgctacttccagtatttcttgcaggtcgaggagttgatgagatgcaacggcggaatgccaagattctaggagttgggaagaccacttctcaacaagaaataaagaaggcgtatcacaaattggctctgcgcctccacccagataagaatcctggggatgaggcattggtgggagaagcagcaaacaatcttcaggagtacttcagaacaatgtacaagaaagtcacggaggctgacattgaagaatttgaagctaaatatagagggtcagattatgagaaaacggacttgaaggacctctacacaaaatataagggcaacatgaacaggaataattatctcttatatcatattgtaaaatctgaaacagttctcctgtag

SEQ ID NO: 25209 - DNA, 921 bp, Zea mays
  Peptide Sequence Number=SeqID_68584
atggccgacgcacagacgaggcgccccaacaaacgcggtggcggccatggacggaaatggccagatcgacatcccggccgttggctgggcaatctacggccacagagtgcctccccaaccttccctgccacccccgccattagagcgacggagcacagggcccccgcggtgcgagttcaccggagatgcgagaaccggcgaagcaaggtaccaatctatcatctaacgattgctacgcgatgcggagtggttattggagcttctgaggatattcttacccgtggtgaggagatggcgaggccgacccacggcgtgtggtggttcagcggcgcccaacgaagtccggcgagcaattggctaggctccggtcatctcactggtctagtgacagcgcggaacctcaccatgtgccccccgccacccagaccggtggtcgggacagggaccgtccatggcggcctgccaatcttctctgcgccctgcatccccgccctgagtccccggcgaagaacagttggcgcaccgagctaccacacgcccagccacgcgatgatgcttgggaaggtgattgcggctttatacttcggaggttggggcgaaggaagatgcccaggcgcaaagctagcgcgaccacgccaaacccggatggttgcaacggcccgtgatctacggcggcggccacggattgagcttgcttcggcgtccaggcaggtgatgacaacatggtcccacggttcagcgaccggtgtgagtctgttgtgcttgagaaaaaccgagctggggagcccacctggcagcgattcatccatgcgcgcagaggtgggggtgcagacgcggcatgggagactgacgaaagaggcccacatggtagaggcactgaggaataaaaagaaagggagaggagcagtgggttgcgcgtga

SEQ ID NO: 25210 - DNA, 249 bp, Zea mays
  Peptide Sequence Number=SeqID_68585
atgaagggatccaaacgccccgttaggaattttattgaccggaggccagttcaccgggtagagggtatctcatgtgccgtgcggtatgtacaagaaaatgagccaacccttcaagagatctctttgactgacaattatccaaaagaaacggatgttgagttgttagatactctaaaggtcgagccaagcatggttgttgagaaggtcatggtgctcgagaaccttctttcattgaaaacatggttctag

SEQ ID NO: 25211 - DNA, 699 bp, Zea mays
  Peptide Sequence Number=SeqID_68586
atggacgacgatggaggggccttcccgtcgacgtctgcttcggcagcatcaaggtctctgaggcgttggtttccatttgacccttccccattgccgcttgttggcccccttttgctggtcgttgtgcaagagctgcaacgagacacagattctccaacatccaaagcgagaattaaatatgatgaagaaaatctccgttctataactaaatgcgagcatcatttccatctttgctgcattctcgaatggatggagcgaaaagatacttgcccagtttgtgaccagaatatggctacaaagttccacaccaagagctggcaacacactcgattcaaaggtcttttctctattgcttattgcagctacatttttacagtaatccatatttctcacggtgctgcagcttacaatcgcgaagctgcacgcaagagcctgctgcgaaagaaggcttacattcagcagcttgagagctgtaggctgaagctttcgcagatggaacaggacatgcagcgagcctgttcgcaggctcgctttctactacttctgtttttatgcctgctgaactgtaaccggacacctgagggcaaggacgagtgcgggcgggctactgtcgaggagtgtgtgtcgatagctggcgacgacagattcttggatcacatccattgggaaggtgctggaagcaaggatcaaagtgcttga

SEQ ID NO: 25212 - DNA, 384 bp, Zea mays
  Peptide Sequence Number=SeqID_68587
atggggaaatggccaacgccctatgggaggaaaccagggaccggcaccaaggagcagccgccccacgcggttgacatggcgccgacgtctgataccgctatagcctacgaggtggacgcctacaggccagtggacatgactgtgggggcgagggcgctgcaccggcgcactgctgggcgagcaccgggagggagcgataggctggcggcggctaggacaaccgatgaagccaaggatggaggcaagaagagctttgaggtaccgattgcacgggagaaggtcaaggagaccaggaacccaaagccaggggtgaagaagaagacttgcaaagtcaaggttgatcaagttaagaagagttatggtgcatcaaggatcactacataa

SEQ ID NO: 25213 - DNA, 183 bp, Zea mays
  Peptide Sequence Number=SeqID_68588
atggattcgaacacgaccaggaatggaaccagcataccgacgctcgttaagtgcacgacgcctacgatgttggagctgctacttgagggacatgcacgtctgcaaaggctacagctactggtgaggatgaggagagtcgcggacttggtaatctcggcgccaaaatttacggcgctgagctag

SEQ ID NO: 25214 - DNA, 345 bp, Zea mays
  Peptide Sequence Number=SeqID_68589
atggccgctagctctgccttcagtgccaaggctggtcagaccatgagttccttggaggcgctattggatcaccagaggaaggacgtcgtcaacaagaagggcgagccagagctctgccaagatgagaaacttgtcgatggtgtccttgacaccaccattatatccatgctgagaaccgtgacaagcacccgccacggagcagagcggcccgtggcggcgctaaaatccccggaagaatctccaatccacgctagggtggatgccgcggtggagtcgctcgccagtggggatttcggtggcacaagctgccgcggccccaaccgtaacccgatcaccaccccgtag

SEQ ID NO: 25215 - DNA, 234 bp, Zea mays
  Peptide Sequence Number=SeqID_68590
atgggcggtactagattgccgacggggcaattgactcgtcgtccactcccactctatctcaggtgcgagcaaggagctcgagcccagccatacgacctcggcaggacagctcacatcatcgcatacatcaactcgagggacaatctggggtggcatccaacaaccctcatggatcacccagcccatcgtcgcactagtccagctgcccacctcgttgatgatctcttagcttag

SEQ ID NO: 25216 - DNA, 450 bp, Zea mays
  Peptide Sequence Number=SeqID_68591
atggcgctagatgcatcgcggcttcgtgcagttggccggacagaggctgccaatgtggacaacgccacaccacacgggaggaagccattcatagccgccctcccgcgccgcccctgcaccagccacgccgcgccaccgcctcgccgccccaccgccggtagcgagttcgagaacaacctcaaggtcatcaagcagtgccaggccgggagcatcttcacggagagcgccaagctgccggacgaggcgctacagaacctcgggcgggcggtcatcttcgctgcaggtttctgctgggacatcctggcgctccttgctacggtcaacctccagtgctttgcgaccttctggccgccgctgctcgagtgcttcatcgccgtatcacagctgccgctcttcgcgccgcgctgcccctgcaccatcaccgccgcgccgcgccaccgcctaccctag

SEQ ID NO: 25217 - DNA, 213 bp, Zea mays
  Peptide Sequence Number=SeqID_68592
atgggcgtctgcgtgtccaaggccgcctgctgccgccgcgagctgcacaacggggttactaacgacaggactgatgctgggtttgcgatggagaacatcgtgtctgagcagggtgagaaggctcccaatgtggtatacaaggggaagcttgatgcccagcgccgcatcgccgtcaagcgcttcaaccgctctacctggcccgacccgcactag

SEQ ID NO: 25218 - DNA, 279 bp, Zea mays
  Peptide Sequence Number=SeqID_68593
atggctgtcgcgaccccaggaagtgcctccttgtggcactccttctgctggcaggttttgctggacgctgcaagaaaggtgggcatagaaggggccgaagaactgtttgaagaccctaccaaaggagtcgatggggttcaggaagaactcaagaagtattcatctggcatctccggggtcccacattttgtgatcaatgataaatatcaactcagtggtggccagcctccaaatctattcatgagggcgtttgagatagctacaaaagatggagcttaa

SEQ ID NO: 25219 - DNA, 492 bp, Zea mays
  Peptide Sequence Number=SeqID_68594
atggatcaacaaaaggaagaggctaatgtggttctatttgttggatgcctaccaaaagaatataaagcatttgcatatttaagtggtggtgcagcttgccactggtatttcaatccatcaattactgaagctcacccatactatgcgagaattcataatgaaaatatagcgatcaaactccctccactatcaaatgaaccagtgacgtttcctgaacttcctaagagacaacacaaaaacttgaaagtgctattcgactccgacccatttacattaccagtgccaaaggaattgttggaaaaatcatgcacatctcatctcatcagttacaggcacgccacctattccccagatttagcatcaattgtatcccttaaaatcacttctattgttgtgtacaaccaaatgtcatgtgtggatttagataaagaacacttgatcaagtcagtcatagcatcacatggaagagatgtacccttgacatcaccttga

SEQ ID NO: 25220 - DNA, 660 bp, Zea mays
  Peptide Sequence Number=SeqID_68595
atgttgggatttggtgaggagcagggctggatgccagagggaaatgctattgtgaaagatgatgcttgctacacatgtggggcatgtgcttatcagttgtcattggctgaaaaggactgtgatcaggagaactgcacatcttacataaaagagaggaagaaaagccatacaaaagagggtatcttgctgggcaagttccccaaggatcctacacacaccgtagaacattacaaaccgggaccaagacttgacccgacctcgctaagagctgcaactaagcctagacactttagctcttcagctcctgccatagcccagctaatacattcatccatgaaccttcgaagaattctagataatgagggggactccccatcaaacactcctctgtttctctggatccatagacaccaagctcccaggatgatcaaagagtcaagctcttttttcctgctcttggaaaccctgaggctctctcttctccaccattctgcaaaagattcctcgtcagttgtaggagtccctgatttggataagtcaatacttattctttttttttctggaatacgcaggagagctgcacatctttgtattaatagaagaataagaaagggggagagaaccccattacagcacacacaccccaacactagagactaa

SEQ ID NO: 25221 - DNA, 2115 bp, Zea mays
  Peptide Sequence Number=SeqID_68596
atgaagacgccaggaatcaaggagattggaaacaaaccgtcctgtgcaagggcgctaatatctggatcttcacaagcctctggtcatcgtattaacttggatactcatgttctgaacacccgaaatgaaaagatagtgcgggttccatctgagaaacagcttgctcaaagtcatcgtgtaacaaatgttgcaggtcctgtttccaattcaaaacagttagcccatataggaccctctgctggtcttttggatccaaatggaccttcaaaaaagaggaaaaagccaaaagcatggtctaaagaggaagatgcagacctggcagctggtgtgcagaagtatggtgaaggaaattgggaggatattttgcataaatgtaacttcgataatacaagaacgcctgatcagttatctcagagatgggcgctgaagcgtccaggaggatcaaccaagcctgctagcactaaacacgcctctgttggcttagaggaaagatcagcagccctcaaggcactttcattggctgtcggacctatgcgtggatcatctgcactgagatcaggagcttatccacaaagcattcagcataagtctacagtgtttgctcctaagatgccagaactaagatctgcagtaaccccttcaccggcaccagcagtgccagtcccagttgctatgcctctgcgtgtggcagctcaagtacaggctccgcctcatcaagggcatcaagctcctgcccatgctgcaccaccaaaattgttaaatgcttcaaataagacacggaagaagcaagcagctcagccaaatcccaccatcagtccttcctcaatacaagcagctgcgattgctgctggtgggcgacttgccacagcctcaaccgccgcaaattttttaaaagtcgcacaatctaagaatgctgtgcacataagatctctaggagcaacatctttgaaaccttccgcaagctttaaggcatcgattgtggttgagcatggaacacaacctgggggctcccagcacctagaacctctaaatgctagtgcagttcatgatgtttcaggagttgctgcagttaatcaatcagggccacttgctggggcatgttcagagactaagaaggcattgagtaccgcactagcacctgtcccatgcgacagcgaggaaaaggaggatgactcggaattttgtgtgattacgatagatgatctgttccctgaagatgcaaagcagccagaaactgtggataccaaggcaaagcaaccacaaaccacgggtctgaaggcaaatcagccagaaaacgcagatcccaaggtaatgcaacaagaaaccatggatcccaaatcaaagcagtcagatacagtagaggttgagatagttgatccgaaagataaagacatgctagagtttgatcaatatgttgcttctcaaggagggcacttaaacacggatgatctgaataaaagcaagtgtaccaacagtgtttcccaagcccaaggtcttgttggcagccagcaaaaactgattcctgcggatgggaaaggtagccctgtaactgtggttgggaaaggcaagcctgtaactgctggagtggcagcaactgggaggaagactaaattccctgtctcacatttggcagcagggaccccacgtggcattgttgacacagtcaacgccaacgccccaaataaaacgctagtaaggagggcagccatccctgcccctgtccctgctggttgccaagttaggaaggatgccatgaactcaaaaggtaaccaaatgacccctggcaatgccggttctggagtaccagccagcagtcagactagcgtggctgcacaagctgccagcaaagcaaatctaccatccagcagcagccaggccaagcccaataacatggtggtgaatggtggtaacaggctagtggttaatccaccgtccagcagccaagctagtgcggccgtgaacgacgctaacagggctgcgacaccacagtccagcaaccctgtcaacggtgccaacaacagagaggttaatccaccacccagcagccaggctagcacagccgtgaatggtgctgctaacaaggggaatgtgccagcagcagccaggcccccttaa

SEQ ID NO: 25222 - DNA, 369 bp, Zea mays
  Peptide Sequence Number=SeqID_68597
atgtccagccccctccctccaccttcttcccaccacccgccgccgccacagtctctggggtcgtaccagccgccaggcacccaaccgcaggtgccggcctcccaggggacgagcgccctcatgctcggcgaccacacaacgaccgcgctggcgcccactgcgccgctgggcgacgccccgacgggcccttcccgcctccaggcgttcacgccgcacgagatgacggcggccatcctggagttgggccaagcggtggccgggatccgcgccttcctggcagggccctacacgccgccgccgccactacctctgtcgtcgcaaccgtccgtgccgccgacctcgtaccagtacgggatgccgccggactga

SEQ ID NO: 25223 - DNA, 1020 bp, Zea mays
  Peptide Sequence Number=SeqID_68598
atggctcgtatcaggtgcactgcacgtaagtctgtgattccctttttgccttctcgcctggcggagcgtcccctgcgtcgcacggtgccaggtcagtccagtcacctagagagactgcaccgtcgcctgcacgaggagcaggagcgccgacgccaggagcaggagcagcatgactcttccccctcgcctcagcaggaggtggagtctgagaggcctccttcccctgcacctcagccagagatgccccctgcaccacctcagggcatcctaggtgctggaggagaccctgacggagacggagacgacgacgatgccggtggcagttcgagccacgacacggagctttcggaggagccggagccggagggatggattgctagacccatcactcgtgacgccgctcgcgggtgtcacttccacgacgctctcgataccctgctgcgtcgggcctttgaccgacacacatggtctatcgagtaccgttgtgtagtctaccagcatcgtcgcgggctatacccggaccagtgggaggctactttcttagtgcgccgtccgaacgattatctccagggtgcagaggccttctcagagcactattctattactgagcgggatactaccgaggcagccatgcaagatgcagcacgacgagcactttctcagtattgctcgttgttcagcggggtagctgacggcctcgacctaaagtactaccctcgccgttcgaccgttagtgctggaggtgtgattgcctcgccagttggtgagggcaatcccaggctgaacagcatggtcaacttggctgtcgtgctcaacacagagttggaccacgccctcgacgagttgggcaaggtttgggcggaggttgcggaattgcgtgctgagtgcgcagcacgccactatctggatggtggttctcccgcccctgtcgggattcagcacccttaccgttcaccgccccgtggtcgcttcgactatggtaccccagactataggacctggatagatttggatccctag

SEQ ID NO: 25224 - DNA, 435 bp, Zea mays
  Peptide Sequence Number=SeqID_68599
atgcacgacttcctccttgcgctgacgctgcttggttgttctggttggttgctggggcaggaagacgggctgcctggttgctctgacgctggtattgatttcctccttgctggttgttctgacggtactgctgctgctaaggaaactgcctctggtactactgcggctggttctaacgctgatgctggtgctggtgctgggcgagaaactcctccttcctcactatcatcagtccctcgggcacatggtagcgacgtaattatccctgaactcctcccaagtgatggctttagggttggcatgggtggcgaggcatctggacttgcactggaggctgaggcggtggtggctgctgctgcacctgctacatggctgctaaggtctgaccaattgcctggactgcttgggtctgcatcaataacatttgctcgatag

SEQ ID NO: 25225 - DNA, 360 bp, Zea mays
  Peptide Sequence Number=SeqID_68600
atggagctcaaggcgtcaagtggtggctcactcggactcgcgctcctctgcaaggcactgttccccatgagggcgggccagggcgccaaggcgcgcctgcgcgaagcggtgggccagggcgtcaagcgcgcgtgcgcgaagcggtacccgcggtctgggccgttcgatctgaatcggacggaggggatcagaccgggggagggtgaacggttgcgggcggcgctgctcctctccgcggcggtgagcgctcgtccactaaaaatcaccagactgtctggtgtgccactggactgtccgatgagcccacggagcaacggtcaacttcgccaacaatcgactgcacaacagtctgaccgctag

SEQ ID NO: 25226 - DNA, 1143 bp, Zea mays
  Peptide Sequence Number=SeqID_68601
atgagctcggctgatataccagtttttaacactctgcagaggttgtacactttacccacaagtcatgatccctttccagtctgggttgtacagacccgatcttcactaccaaggcgtccacagttgcttggttctgccatcgcgcagtcactgcccttccccacgcgcctcggccgccaccgcgccatcaccgcccgccccacgcgcctcgaccgccatctgcgcaatcgttgccatcaccttccttccccacgcgcgcgccgaggccaccatcaccttccttacccacgcgccgaggccgccaccagcgccataaccttcattccccacgcaccgaggccgccatccgtgccattgccttccttccttacgtgcgcgccccctcctccgtgcgtgcccttcccttgtccttcgctcaccctatgccccgccacctccgccatgacagcctcccccacctcggatatccatgggatggcgcagtccagaccgaccccgacctcggcgttccatggaagggcgcggtccactctgctgagctcctcgtccttgcataggcgtacgcgcaggtcgaggagctctccgtcgagcgcgagcatctcatcgccgagctccagttccggcagagcgccagccgcgagcgcgaggagatctcccaggcccgcctctagcaggaaggagaagaggcggtccagggacaaagctgtcgtcggcggcagcggcgggggctgtgaggacgagcaccagtccaggctgcggaggcagcagtcgtcgcggtcgctgtggatgcggcacgtgaaggtcatcgtcgccgtcgacgtcgtcgtcgtcgtctgccactctgcctcgtgctattcgcggcctagctggcgctcttctgaatgtgagaacaaaaaagtgcagaaccttctcgtcggcgatgggggaactagatggcttttcccgttgggcacaactctgggaccatccacatctactactgtgacaagtggtataatctgcatcttagactgggcggatattattaatgctcacatagttcctggacctgggattgtagatggcttgaagttgaagatccctgatggtaatgatcttggtggtttgtgcgaggaagatcatggcttcttctgctttggttag

SEQ ID NO: 25227 - DNA, 270 bp, Zea mays
  Peptide Sequence Number=SeqID_68602
atggcgatcgagatcgtgcgggaagcaaaggaccgatcgtcgagggaccaagggtcatccctggtcaacgcgttccgcaacggcatgccagtgtggggcggtggcgagggtgctgcttctcctagtagtcgggtggtgcggttggcgttatttgaggtcaccaatgtgatcggctatgcgaccacaacggtggctctccgtgggtgggcgaacacgcacgaggggctacaggagggcggtgaggagtcatggagagggtgcatgcagtag

SEQ ID NO: 25228 - DNA, 174 bp, Zea mays
  Peptide Sequence Number=SeqID_68603
atggcgcaccggacactgaacagtgcctgtccggtgcaccaccggactgtccggtgcccagaagacagaagctccaacggtcggaacccaatggccagggacttagtgtcccgtttgattgagaagaaaagctcactcggtctaagtgatcgtttgagagagggaaagggttga

SEQ ID NO: 25229 - DNA, 264 bp, Zea mays
  Peptide Sequence Number=SeqID_68604
atgaagatggttttccccaagttgctgagagcatgcatagttcgcctcgaaatcaggagccagccagagtatgatggtcgtgaattcgtcgagcacggcacagagaagtgtgtcatgattagagaccgtccagtttggatggctaggatgcgtgaattggaagggcagcaactacttgaggacgaccccacagtcgtgtacctcactgcatacctactcaccctagatgcgcagtatgatttcttggctcggcgccaccgttag

SEQ ID NO: 25230 - DNA, 249 bp, Zea mays
  Peptide Sequence Number=SeqID_68605
atggacggacttgcatcaacggtttactgcgacatgttaaagcccctaggtacgtggcgcatggtcgtgactgaaaaagatcacctcaccgctggtgaccttgtgcccagattcacgccggtgtcgcgattcacgcctagtcgaacacggataacgctcctcgatgaaaaatctggcactaaggatgagcttaaggcactgttccgcctcgaccgccgtgtccgcttaactcacggccggttcagataa

SEQ ID NO: 25231 - DNA, 819 bp, Zea mays
  Peptide Sequence Number=SeqID_68606
atgaagaagattctagcaccatcccttgagatcaaggaagaagctgccagcaccccgccagcaccatcgccctctaaggagctacaagagccagtcccgcttgaagaagagttcgaccccgttctgccacctcagtcaccgccagaagaaagccctgcatgtatgagagctcagatccaggagttatttggatttcctgaattgacgacgaggcttcacagcttatgctatgacggatcttggcgctctcctgcagatttcaccccagcagtgaagtacctctatgagtttatgaggcgcaccctgctaccatggatgggatacagagaggctaccactcatattcagctatggctcctcggtgctctggtttcccactctgtgttcgatgtcgtcgatttcttcatctatgagattaaggacacaatgttggatggacttcgagctcggcatcagctgccctatgcgcactacctctgtcacatctttgcgcagctgatcagtcctcctcagttccaggtcacccttgaggcctctagacttctgttcggattctaccgcccaactcctgaggacacaactcctactttagtagatccgttggcaccacatttcagagatgaggatgaggtgatccaccagtttgaggttcagggtgccactgctgacacttctttagatgatgaggatctgtcaccaccacatcatgttccacctcgttcccatgatcacgaggctagtggctccagtgttgctccttcggctgctcctccagcgattgaccttgccttggccgccatacttcagtcactcacataa

SEQ ID NO: 25232 - DNA, 417 bp, Zea mays
  Peptide Sequence Number=SeqID_68607
atgcctctgctcaaggagattgtttgcaacatccagtcacatgttgccatgattgaggttgatatgaagcctgcgtcggctataattcactggatcgtccgcgtggagcgccggatagtccggtgtgctagcagccaacggctagtggccacatcggccctgagcaaacggtcaagtggtgcaccggatggtccggtgccacacaccagacagtctggtgcccctccagaagcagaaattcgccaatcaggggatctcttgccgtcgcactgttcactgtccggtgtgcaccggacagtccggtacacccacggacagaaggcaactagtgccttccaaatggagctccaacggttcaaactgcaaccacgcttttggtttgatagtttgagatctgagcaagtgtttgagctgtaa

SEQ ID NO: 25233 - DNA, 258 bp, Zea mays
  Peptide Sequence Number=SeqID_68608
atggctactaattcagcgggcaaaaatgtcaagaagacttggcgaatttattatactcaagtggccactacaccggaaggagagccagtaatgatggagaaggagatcgctgatcggcctcctgggactagtaattgtatcacatttgagtcccagaggattggggcgcttcaggtggtatcggagctgttaggttggccgcaggacgtaacccttaggcttgatccaaaagtttttgagtcaaaactattttcttaa

SEQ ID NO: 25234 - DNA, 723 bp, Zea mays
  Peptide Sequence Number=SeqID_68609
atgggtcacggcgtcgcgtcggggctgctgctgctcatgcatggaggagatccggtgcccgggtgcctcgtagggccaacggcggctggacctgggcgcggccagagcgtcgattgtccagcgaggctcgctgccggcgaggacgacgaccggaggcggagggctgctgcagctttggcattttgtcaaatagtgcgcaagcgcgacagcgcaggggctgaagggagtgcattgctactgcatggcgtggttgagcgcacggcatccatggatagggagccgagtgccctgcgtggaagaggaacagggagggcgctcgaccagggtgtcagccgccaaggaacaaggggaacgttgatctccttggagaagttcctcttctcaaggaacagagaggaggggctggagataggagcaggggcaatcgaccacagcttgggagaggcagccggctgcaggttagagaaggacatagcggcacccatggctgagattgggggaagaagaagagacggtggggaaaagggagcctacgctagtgtccacagatctgaggggaggaagggacgctcggtccagggctcgccgagcgcaggtcagaggaaggagcagagaaagaaggcgccatggggagagaagagatccctgctgctggcgtacgaggagccacggagatggagccgttgctactccatgcaccggtgccatccatgggagaagtag

SEQ ID NO: 25235 - DNA, 636 bp, Zea mays
  Peptide Sequence Number=SeqID_68610
atggagaggtacgaactgctcaaggacatcggttccggcaacttcggggtggcgcggctgatgcggaacaaggacaccaaggagctcgtcgctatgaagtacatcccgagggggctcaagattgacgagaatgtggcgagggagatcataaaccaccgctcgttgcggcaccccaacatcatccgcttcaaggaggtcgtgctcacgcccacgcacctcgctatcgtcatggagtacgccgccggcggcgagcttttcgacaggatctgcagcgccgggaggttcagcgaggacgaggcgaggtatttcttccagcagcttatctgcggtgtcagctactgccacttcatgcaaatttgtcaccgggacttgaagctggagaacacgctgttggatggcagcccggcgccgcgcctaaagatctgcgactttggctactctaagtcatcgctgctgcactcaaagcctaaatccacggttggaactccggcgtacattgctccggaggtactctctcgccgggaatacgacggcaagcccttatttttgggaaaggttactgcagctttttttgttggcatcgcctctgcttgtgtgttgttgccagtctgctcagtgacgctggccatactgtag

SEQ ID NO: 25236 - DNA, 723 bp, Zea mays
  Peptide Sequence Number=SeqID_68611
atggcggtggtcggggtcagtggagcattgtatgccaaggccgtttaccttgcaaggctaaaactcgattcgaattatgggagccctcccaagttatcgggcccacatgcaccaatccttgcctcgatggcctcagatggctatgcacgtgtaccagctaagaagctacaagtgaatgccgaggagagcagcgatgacttggctaacccaccgaaggtagaggagaagcttggtgttgtccctcatggcctgtccactgactctgaggttgtccagagggaagccgagtctatctctaggaagactctcaggagctcagccgagaagtttgagttccaagctgaggtttccagactcatggacatcatcatcaactcactctacaacaacaaggatatcttcctgagggagctcatatctaatgcctctgatgcgttggataagattaggttcatttcccttactgataaggaagttctgggtgaaggggacactgcaaagcttgagattcaggaacatgagctgctcgagtctcttgtcgaagctgatacgagaaggcaggaaagagctaaaaagatggaagaaaagaaagtgtatctgcaactgtacgaagcaatggaggcgctggttacgcctaatctttatggcaatttggtggctaacacggctgcaggtattgttggagggatgggcatcatgcctggaggtagggattgcagctaa

SEQ ID NO: 25237 - DNA, 909 bp, Zea mays
  Peptide Sequence Number=SeqID_68612
atggcgcacaacgccggggacgggatggttcggggaggtgccatagaccgtgcggcccagaggccttacgtcaggctccgcccgctggcttacgtcacgggcaacaagccacgtggcagcatcgggtctccgcctgagcggggagcgcaagcgcacaggataaagcctgggcacgtgtcagtaccggacccttgcttaggccagggtatcccctatcctaggacctcgttatgggtggcccggaccttactcggagggatccggaccccatccaagggacctggcatgcttacttgggagtcccggaccgtattcgggggtccgggctgtgcgtacaggggtctggtgcttcctcgtggaggtccggaaccgacccccaaggaggatgacaagtgggcccgggcccttgtgctacggactaggctgttggttttggtagaggctaagagacgcactaccgtaggcggaggcgcgctcttcacgcgtcggttcgccttctcctcacacagaaaccggcgcgccaagtgcatgacatgtgggcctaggcccccatgccagaggttggaccgctggttgcggcgaagacgagggggcacactaccgcggggcggtagcacgctccttgtgcagtggttcgccttcttgaccgttggtcacggcgaagatgaaggggcgcactatcgcggggcggtggcatgctccttgtgcgacgattcaccttcttcgcactcgaagaccagcacgccagctcgggttggtgctgtcggtcttgtctttcctctgctggaggtgcgcggccttgtgggagcggcgctcttccaccggtgcttggcttcaaggatgttcatcagcctcgcggtggtggagagcgagctgagccgcggctccgcctcccacatgggctggtga

SEQ ID NO: 25238 - DNA, 1491 bp, Zea mays
  Peptide Sequence Number=SeqID_68613
atgcgggttgctgatggcggcggcggtggcggtgctggtgagactggggcggggctccgcggcggcgtcggcggcggggccgtggtggaggacgggcacggggaggcaagcggcgggttcgtgcgccggggtggtcgactggggacgatggatccggagcgggacgagatgctgacttcctcgtcctcctacggttccacggagccacaagaggaggaggaggagggcgccggggcattagaagcggccaaggacaacaagcgggtacatgcccccgaggctgaatctgctatgcccacatcctgtttgatagaacgccaggaccagcggcatcatcggttgggagctgttcttttccaaggcaggaagggcagggcgcagcggccggcctcgcttgatttcggctgccctggtgttgccagatcctcgacgcattctccggggttcccggccgccggtgtcgcggtggtgaacaaggggatgggcgtatcgtatccgtcacacagtaggccggacgtgctgtctagtccggggacgccgagctgcaatcggcgtgggatggcaggcgttggctaccagcagggtcctcgttcagaaagagtgatcccgccttggaccggccatacaagccattctgggagcggcatggtgttaccttacagcactgggactgggaggacgctgccatcgaaatgggaggatgcagagaggtggatcttcagccccaaccccaaccccaacaatgcactcgggaggtcggtcccgcaactctggcggccaaaatccaaaagtgggcctcttggacctcccggtagattttgtggggcgtactcttgtgtttcgtcgtcggctcagtttcttgacaacggtagagttggaaatctcactgtgaatgcacattacatggctgggatgttgctacctgagcatatttgcgggggtgttatggactgggaaagggatgcaagtggagcatcgggtgaggatagtagcaatggccagggaggctgcaggcctggtcaaatgaatgttcggcatcctgctatgcagcccaccagggtttctcagcaacatggtagtgcaatggagtcatatcagtcattgcatgcttctcttcaatctatacaagatggtggaattgaaagcataaaagactctgccactagcagtgcccccattattctgaggaaggatgtggcaacacaaacaagccctgctattagcaggtcatcctctcccagcacgaggacttcgttctcccgttcactatcgtcacaacaagtcaaagagctggagagttgtttctctaagctcgaggtcagggatgtgcaggtggatgatcgggtgactctgactaggtggtccaagaaacatgtcacccgaggctctgaaaagaatgctacaaatattattgagtgcaagaaaaaaaccgtggattctaaatcttctgcctgggaagtaacacaaactgcaaagtgtatttcaatgtaa

SEQ ID NO: 25239 - DNA, 387 bp, Zea mays
  Peptide Sequence Number=SeqID_68614
atgggtcgcgctcccgtgcagccgggggcacgcgcccgtgcactaggcgccgcgccccgcatcggacggggcggcttcccctcgtcgccagctcaccgcactggacggggacgtcgtgccgccgctcatgcggaggttctccgccgccaagtgctcgacgaggagctcggcaagctgccgtccggcgtcaccagcatcctccccaacatcaacccggtggcggtggaagaagaggcattgatgatgatgagtccaaaggtggctgaagcaagaaggttgaaggaagaggctgaaaaaagggcaatgattcatggtgacaagaaagaagaggatccactaatcacaaaaagtgagatgagaaatgagatgaggagtatgattcagtaa

SEQ ID NO: 25240 - DNA, 288 bp, Zea mays
  Peptide Sequence Number=SeqID_68615
atggccagtttcctcgccggtcgtcaccggctcaccgccacggccgcgcacgatctggtgattggtgatgctcgttcatcgttggtgctcctcgctagtcggctggtgctcctcgcctcctcggatcgagttgtagcttcacagctggacggctggtgctccgtgcggtgctggctgctcctcgggccttggctccgttccgtcgtctctggtgctccggcttggaaagccgtcaagctcatggaccttgacgcggctgcggaggaagatgtgttgttgttcctatga

SEQ ID NO: 25241 - DNA, 675 bp, Zea mays
  Peptide Sequence Number=SeqID_68616
atggcgcggtccggcctcggcgcgctcgcggcagctcggcccttgcccttgcacgacatggcccctacgcagcgcggcttcggctcgcgcggccacgatgcccctgccccattcgcgacgcctcttgtaaggtgtaaaagagtggaaaacttggatgccaatgaatgtggggtggttggggtatttatagccccaaccaccacaaagtggccgttggaaggctgcagtcgcatggcgcaccggacagtccggtgcgccaccggacactgtccggtggtgatgaggatgatggttttggttgtgactctggtaatggttgtcagcattgcaaccactgctcaggagaagataaagccgtggaaggagactttcaggagttccaagattacgacgagttctaggcatgggttagcggcaacccccagtcggctgcctgtgaaggccgcgtttatctatgtttcgttttcgcactttgattattgtaaagactatgtggatgtctcagacatggctcgtcttagacacactgcacggaagtctgtcatccccttcttaccctcccgtctcgctgagcgttcgcttcgccgtccagtgaccggtcagtccagccatttggaaaggctgcaccactgcctgcatgaggagcaggaacgccaacaacaggagcaggagtag

SEQ ID NO: 25242 - DNA, 930 bp, Zea mays
  Peptide Sequence Number=SeqID_68617
atgtcgttcggcttgagcgacggcggcggtaccgtcgagggaggattgagcggcggtggaggaggcggccgatgcggcggcgagtactggcagttggagacgcagcctgctggatctgctcctccgaatgagccggcgaactccctcggcggcagattcccccaaatgcaggtgaatgacagcggagaactcgacctcgacggcggaggtaccttgcgtggaggtggagtagctttctgtccgtgtgtgcctggaagtgcgagagtcgtcaccgatccgttagcgtcatccttgttcggcggcagggaggagttctgtgcatccttcgacctaggggctaaagttccaggggatggatacttttctaatatgatactggatgaaaacgtcgaaggagatttcgatattaatagcaacacatgtcctgataatcagtcacaatcaaggcaagttggtccaacagcccccacatcgaggccaaaccataagagatcaaaaaatttcagtgatcaagaagatgaagttttggtttcagcgtggttgaatattagtatggatcatgtgaataagctaagaattcaacccaaatggcttgctaaagttgatgatttggctactgataaaacctcaaacaagagacagaagaccactcgtgttggtgatgctaatggaacaccaccaaatgaaactgaagaatgtcaagttcaagtcatagagaataaccaattgacaaggccaaatggaaagaaaaaagctaaagcagcactgctacaagagaagaagaaaagtgtgactgctgcaatagaacatttgtgggttggaaagaaagaaagtgatgctgagaaagagctgaaaaagaggagaggttcaataaagcgtttgcacttgaagtcgatcgagttaacacggaaaaagcacttgtcgaggtga

SEQ ID NO: 25243 - DNA, 324 bp, Zea mays
  Peptide Sequence Number=SeqID_68618
atggcggaccgccgtggcgtgccgcccggcctcgaccccgcccggcgcggtgccctccccgcggcgcgaggtggtaccctttacccacaagtcatgttacccatctgccaagggatcgcgacttcccatacacctctaccgaggaggcgaggcagggtaacactacgaggcctttacaaagttccactagcttcagaaaacccgctacagtttataggaagctccaatgcaggaatcccttgcaagaccgccatcgcagcaaaatcctcccgagggcctccctacactgaccactcccctactgcccttgcccctttcgggtaa

SEQ ID NO: 25244 - DNA, 1197 bp, Zea mays
  Peptide Sequence Number=SeqID_68619
atggccagcctcacgccggcggcgcacgcggcggggctgcgccgcctttccacgcgcgccgcggcgagcccgtcctcggcgtcggcctccccgcggcaggggctgcactccttcgccccgctcgcggctgcggtgctgggccacctccgggcctccggggtggcggtgctcccgggcctcacggagctcgagctggcgcacgccgaggccgagatggggttcgcgttcccgcccgacctccgcgccgtcctcgccgcgggcctcccgtcggggcccgggttcgctgactggcgctcgtgcgcggggctccgctccgcgttcgacatgcccatcgtggcggcgtcgctgcagatcgcacggggcgcgctgtggccgcgctgctgggggccacgccccgccgaccccgaccgcgcgctgcggctcgcgcgctccgccatccgccgcgcgccgctgctcgtgccgctcttcgaccgctgcttcctgccctgccgcccctgcctcgccggcaacccggtgttcttcgtcaccgacgaccgcgtcctctgctgcggcctcgacatcctccacttcgtcacccgcgactcctgcttccagccgccggatctgcgggcgccgccgcctccggtggcgcagcagcagcagtacgccggggaggccgtcgccacgccgtgcacgcgccgcagcctcgacgcggcctgccgcggtaaggcgccgcgctggatagaattctggagcgacgcggcgtccgaccatcgccgccgcaactcgtcgttctcggatgcatccacagcgtcgtcgctgtcctcagggtgcgcatcgccaccgcctgctaggtggcccaggaacccgcactgggtcgacagctaccttgaccggctgggccacgtgctgaggcagggcgggtggagggacacggaggtgacggagatggtcgaggtggcggcctccggggtgttcgacggtgaggaggcggcggtccccgtggtggactcagacgcagtgctcgatgcgctcctgctcaaggccgaccagtgctccgactcgctccggcgggccggatggagctcggaggacgtatcggacgcgctcgggctggacctccgctggtgcaaggagcggccgcgccccgccatgctggtaccacaagagattgccgtcaaggtcgagcggcttgcgcagtcagtggcgcgcccctga

SEQ ID NO: 25245 - DNA, 1440 bp, Zea mays
  Peptide Sequence Number=SeqID_68620
atgctgacgctgtccgtgagaagtcggcctccgacaacaagtgccgcaaatctgacagacaaggtggccgccctggagagggagaaagttgacctccggcgccaactggcggcggagaggagggaagccaacgaggccatcgccaaggaacaggctgcgcaggcggatgccaagctggcgcgggcggagggcaatctcgccaaggagctcgtggagcaactgcaagggcggctcaccgccctggagagccgcgcgaaggaggccgaggccgcgatgcgtgcggaggccgaacggacacgcacacagcttatggatacatatcgtgagcttggtgcgcggaccggtgacttcgaggtgccggaccgagagcccgggcttcgctgtctgcagtgggcgcaggaggagctgctggaacttccaaccgttgtgggggggttgatgtcgtacgcctccctggtcacctgcgagggggcgatgaacgcgctctcccgcgaagggtgccgacacttcgaggccttcgaccaggtggatgaagactttgagcgagacatctataaggtcgaagaccccgtagtgaaggagtccgccggggccctttacgaccggatgtggggtctgtacggtcgtgaggtggtcagggagcgcgccgaggctgcgagggctcaggcggagcgcggcgagcgggtggacgacttcggggctctggacagcgtgctgccagatctggggtcgaccctcgcggaggctgtgactggggtcgacctggagccaatcctggagaccgcagcgatcgcgacggctgcccccccatccgctgcgactggcgaaggcgaccctgatgcccccgcagccgctgtgccgagtgctgaaggttccgcggcggtggcggcggaaactgcggcggaggccgcggcggagcctttggcggagccaacggcgggggctcccgcagcgccagggccttcgcaggttcaagaatttgggcctgcgcacgcaaccgctactactgagtttttggcggcttcgaccgcggaaggtgggaatgaatatggtgggcctgtatctgagttttttgattttactgactctgggagctcggttgagtggactgaggagtcgtcggaggaggacttggattattttgcggccttggacgtggctgcggcggaggcgtcgccacacaccgcggacgcgtcaaacgtgccaggtcctagcaccggacgccgacgacgaagggcggttgcaaagcgtagggttagcgcggaggaaggggctcggcttcgcgtgagtagggctagtcggcaggagctgctgtcttcgccggccgccgcgggtgtaggggaaagggagctgcgaagtctttttgcgggtgaggagcttaggataatgttatttaattatagggagatgggaattattcctaagattgagccgatgtag

SEQ ID NO: 25246 - DNA, 1206 bp, Zea mays
  Peptide Sequence Number=SeqID_68621
atggatctcaacgaatgcgagaggagggggccggcggggccggatccgctgtcgaggcaggggtcgatctactcgctcacgttcgacgagttccagaacacgctcggcgggatggggggagggcttggcaaggacttcggctccatgaacatggacgagctgctgcggagcatctggaccgccgaggagagccaggccatggcgtcggcttcggcctcggcctcggcctcggtgtccgcgctgggggcagccgtcgacggcggggcggcgctgcagagacaggggtctctcgcgctgccgcgcactctcagcgtcaagacggtggacgagccggttgctccacggccgattcaggcggtcagtaatggcgcctccatctttttcggcaactttgggggcgccaatgacgccggggctggagcgatggtgtttgcgccggtggggatcggggatcaggccatgggcaacgggttgatgcctggggtggctgggatggcaggtggtgcggtcaccgtgagtccggtggatacgtcggtggcccagctggattctatgggcaagagcgatgaggatctgtcatcgccaatggctccggtgccatacccctttgagggagtgataaggggaaggaggagcggtgcgggtgtggagaaggttgtggagcggcggcagaggaggatgatcaagaacagggagtctgcagctagatcccgtgcccgtaagcaggcttatacaatggagttggaagccgaagttcagaaactgaaggaacaaaatgcagaattgcagaagaagcaggcacaggaagcatccatgtcgttcagcttgagcggcggcggaggtaccgtcgagggaggattgagcggcggtggaggaggcggccgatgcggcggcgagtactggcagttggagacgcaacctgctggatctgctcctccgaatgagccggcgaactccctcggcggcagattcccccaaatgcaggtgaatgacagcggagaactcgacctcgacggcggaggtaccttgcgtggaggtggagtagctttctgtccgtgtgtgcctggaagtgcgagagtcgtcgccgatccgttagcgtcatccttgttcggcggcagggaggagttctgtgcatccttcgacctaggggctaaaggtatgaagctttgtggtgacagtgaattggttgtgcagttacttgcttag

SEQ ID NO: 25247 - DNA, 723 bp, Zea mays
  Peptide Sequence Number=SeqID_68622
atgaagccgtgggaggaggcttccaggagttccaagactacgacgagttctaggcgtgggagagcggggcgagggcctcttcaccatggcgcgcacgctggggtggtcgccaccgctggggaggctgcccggcgcagaggtggttgccgcctctggcaagtcatcggtgccgaggtggtcgcctacactggcgagccgctcggagcagaggtggtcgcctccgctggcgagccgctcggagcagaggtggccgccgccgctagcgagccgtccggagctagctacccacacgaccctactggtgtggagaccagcatacctaagaaagagtttggcaatggcccgcaggagatactaggacacccgtcacagagtggtggagcgtgcaggcccacggtacgggaccaggctgagcggctacacagctctggaccaccccaggagacaagcttttgggtacgggaccaggctaagcagccacacaggctccggaccaccccatggaacgggctcccgttctttagaaccggcccccaggctgttggtccctcctgctttcgcagagaggtcctaaactgcaagcctggctgttcaattcggatgtcatcataccaacaggccgggcttatgagggcggacctcaccgggctggcgtatacgtatgcgttatctagttacaaaagggagaaaaatttgacccctcagacttgctcctatggatag

SEQ ID NO: 25248 - DNA, 546 bp, Zea mays
  Peptide Sequence Number=SeqID_68623
atgggctcgtgcgcgggctcaatcgatgtgtgcgacgaccgaattggaaggcacgggcccggactgtgctgtgcctgtgtgcgcctccggctcgcctcagtggtagtggtggactggtgtctggtggtggtggtgttggggttgggtgggaggaggctcgcgctggcagcacctgtcccgctcgccgagttgcctcgtcttggtgcgggcgctgtcgtctcgcgcggcgggggcggaggtttgtattttgaaagtcacctagagggggtgaataggagaaacctgaaaattataaactttggacacgcacttcacccggagttaggattagaaataaatattagtgaattcggagtgcggaagatggttctccttgctcaatcaatgcggataactttgggagcaaactcaaaacaatatgagcaaaagagctttagagagaggggagaaacaaatcgaatggtgaagatcaacacaagtggacacgacgatttgtttcccgaggttcggttccaaagaacctactccccgttgaggaggccataa

SEQ ID NO: 25249 - DNA, 225 bp, Zea mays
  Peptide Sequence Number=SeqID_68624
atggcgaagtggtggagttcccgcgacggtgaggtcacgggtgaggccttggggtgtgatagggggtgggatgtggtgttctatgttcgtggtgatgtggtgaagttaaggggagggggagagctcaccagagtgaagggagatggcgacgctagctcgattgagctcaggggagagggagggagagtggccgaggccggtgcgaggagaaagggagctcgatga

SEQ ID NO: 25250 - DNA, 393 bp, Zea mays
  Peptide Sequence Number=SeqID_68625
atgtgtatgatgaagggttatcacccttatcatcactttagtgggatgattagggactccctggtttgggagggccctaagggttatgacggctggaggcaccgggaggacaaggaggggaaagtattgtcctggtttgggcatggaggtggccttgttccttccggtataattgctaaggcagaatgcatgagtatttttggaaataaagatgaggccacgggaatgggaagctcagtggtgatggagggcacctttgtccttaaaacatcctattgctcagaggtggaaggattccctttccttctttggagttgtgcgcttcgccttggagtttgcaagaagctagagtatgtctggaaggaatactgtgaaaatggagttgagaagtga

SEQ ID NO: 25251 - DNA, 225 bp, Zea mays
  Peptide Sequence Number=SeqID_68626
atgcgcgcctacctctacgaccgggtgcctaggttcaccccaagcatgcgacgctggtcaagggctcctacgacttcaccggcgtcaactactacaccacctactttgccgcccatgtggcttggcatctaccacaatggtgtaggactggagcgcgggagccgacgagatgtatttatgcaattggggtgcgagcaagttgtgagggaattggatgacaattga

SEQ ID NO: 25252 - DNA, 123 bp, Zea mays
  Peptide Sequence Number=SeqID_68627
atggagggcaaggaagaaggtcggatcttcgtgggcggcctgtcgtggcaaacggacgagcgcaagcttgaggacgcctttggccgcttcggcaaggtcgtcgacgcccagcaagaggcgtaa

SEQ ID NO: 25253 - DNA, 2283 bp, Zea mays
  Peptide Sequence Number=SeqID_68628
atgatgcggtggccgcggccgccggcggcgcgcaagttccgcgtgcggctgttggtgcggcgtgcggaggggctcccgcctccttcaccttcgccttcgccgtcgccctcgcccgcgacagcggcctcgccggagcgcgagccgccgggcgccgcgcagcccagggccgccgtcgccgcggaggtgaggtggaaggggcccagggcctccgcgctcggctcgctgcggcgtgccgcggtcaggcgcaaccgcacacgggaggacgccggcgcggcgtgggaggaggagttcgagagcgtcgtcaccctcgcggccgcgtcgcagcgggagggcgccgcgttccacccatgggagctcgccttctgcgtcttcagcgatattaacaaaggcccaaagaacaaaccatcaattctgggaactgcttctctcaatctagcagattatgcattgacggctggagagacaattgagataattcttccgttgtctatacctggtggtgcacctgaacgagcctcatcccttcatctcactctgagtatggttgaattaagagcttttcaagaaacatctgatgcatcacagcgatctgctgcaaccttgccattgtccccatcatctggcgattcttttcctggaggaaaagatgaggtttcggttattaaagcagggttgaggaaggtaaaaattctcacagatctggtgtcgacacgaaggcctaagaagacttgccaggcaggtggcgaagataagttttgtgttaacagtgatggtgctgaatatccatgtgatactgagtctcttgatgacgatctagatgacagagtagaggaagatgaatttggagattcaactatcaggaagtctttcagttatgggtctctgcaatctgtcaactatgttggtggcctagtttatgcccatgcaaagattgatggggagcatgaggactggatatattatagtaaccgaaaaactgatgtcggtttccaagtagagaaagtattgccatcaaccacagagaatgggttgctaactgctaagcgcagtatacttccttggagaaagaggaaactgagtttacggtcgctgaaggctaaaggtgaacctctgttgaaaaaggcatatggggaagagggaggtgatgatattgacaatgatcgacgcttgctaacatcatctgatgaatctgtttcagagggatcaagaggagatggatcagcaaatactatggtgtcagaatttggtgatgacaattttgtcattggaaattgggagttgaaggagataattagccgcgatggccgtatgaagctttcatcccagatgttctttgcatcaatagaccagagaagtgagcgagcagctggggagagtgcatgtacagcacttgtggctgttattgcagactggttccaagcaaatcagaatatcatgcctatccagtcacagtttgacagccttatccgtgaaggatcactagagtggagaaacctttgtgagaatgagacgtatagagagcgttttcctgacaagcactttgatcttgaaactgtccttcatgccaagattcgcccgctgacagtttcccccagcaaatcttttatcggattcttccagcccgaaggcgatgatgacatgagtggttttgacttccttaatggtgccatgtcatttgacaacatctgggatgagattgcccaggcggcagagttctcatccagtgatagccctaacttatacatagtaagttggaatgaccacttttttctactcaaggttgagcatgatgcatattacattatcgatacccttggagaaaggctccatgaagggtgcagccaggcatacattttgaagttcgacaagaatacgacaattcacaaggtacctggggaaaagaaatcttgtagccccgactcaagtggaccaatgaaggattcttcaggttctgagagctctacgactgaccaggacagtgggaatgatactgaagaggaggtgcttgtgtcgaagggcaaagaatcatgtaaagagtacatcaagagtttcttggcagccataccaatccgggaactacaggcggacatcaagaaaggactgatggcatcaaccccattgcaccaccgcctccagattgagttccagtacacccagtcgtccccaaaagagactgcatcagccactcagcttcttaccatggaggccccctttgagttctcatggcctgaggcaccgccaacaatggaagtcacactaacatctgccgtctctgttgtgtag

SEQ ID NO: 25254 - DNA, 105 bp, Zea mays
  Peptide Sequence Number=SeqID_68629
atggccaggctagctgagctgcaaaggctacaccttggcctccgtcttacaagccgcctcagcttcctgtattcgatggccactcagacccgaagcagtttctga

SEQ ID NO: 25255 - DNA, 612 bp, Zea mays
  Peptide Sequence Number=SeqID_68630
atgagaaatcgaatccccaaggtcactgaggcagcagtgattgaggacttctaccggggatctaatgactcagccttcatccgagccatattgcagaaagtgctgaccacctccgaacattgtttcgagaggcggacgtttacatcaccgctgacgagcgggcctaggacctcatcggaggaacgaaacctgcaccaccggcaccgcggcgccacgcaaaccagcaacccgacaggcattgggagaaaaggcctcgtgaggaggtccacgctgccgaaccacccgtcgctcgtgcccgaggggcaccccgtggaggcgagtggacactggacgacatcctctacgcctagtgcccgtaccataaggacatgcgccacaccttacggaactgcagggacttcaagcactccatcggaaatggccaaccgttccagcctctaccacctcccccaccgtgaggagggcctggcgagcccaggcagcctcagcaaccagaagggagagggggtggagcattcccacgcgttgacagggaggtcaacatcatcttcggaggccatgggtcgcaagaaaacagaagacaacagaagctcaatgaccggcaggtcctag

SEQ ID NO: 25256 - DNA, 240 bp, Zea mays
  Peptide Sequence Number=SeqID_68631
atgaacagagtttttgatgccatcggcttcgtctaccccgattaccgctacccgctgcggggacaggggaagaagagaaaggatgctgcctcggccgctctagttgagcctgtgccgaagggcaaaaagatgaagggcttaattcttagcaacgcccttagagcacagaaaaacattgaagatgaaggatatacaatggctctgaacaaccttcattcagaggatgatgtgatgatatga

SEQ ID NO: 25257 - DNA, 243 bp, Zea mays
  Peptide Sequence Number=SeqID_68632
atgcggtcccggttgcgatcccgcgtcatggaccggtcctactcggccggcgtccgcgccacgccggtcgtgctcaatgtcccagtgtgctcgcgcccggtgttcgggttcttcaaggagaagaaagaggccgcaaacgccgcctcggcgcgggcgcggttggcgttggcccggaggactgctgcgggtaccgccccgccagccggtggagcgagcgccagagatcttggcagtggtaactga

SEQ ID NO: 25258 - DNA, 1314 bp, Zea mays
  Peptide Sequence Number=SeqID_68633
atggccgagaacgatccggtcgaagagcccgaggaattcgcaggagaagcccctgagcagcagtcggtggttatgagattgatggttctggttatgattatggtgctggttgtcagtgttgcaaccactgctcaggcgaagatgaagctgtggaaggagacttccaggagttccaagattacgacgagttctaggtgtgggttagcggcaacccccagtcggctgcctgtgaaggccgcgttatctacgtttcttttccgcactttgatttattgtaagaactatatggacgtctcagacatggctcgacttagacacactgcacgaaagtcagtcatccccttcttaccctcccgccttgctgagcgtccgcttcgccgtcccgtggccggacagtccagccacttggagagactacaccaccgcctgcgtgaggagcaggagcgtcgacgacaggagcagcggagctcttccctctcgctccaccaggagatagagtctgtgaggagctgctcccctgtgcttcctctggagccgccccctgcaccaccactgggcgccccagcttctggagtagctgctggaggagacccagacgacggaggaggcgacgacagctcgagccacgacaccgacttctctgctaatcctgagccggaaggatgggttgctcgacccatcactcgcgacgctgctcgcgggtgtcacttccacgatgcgctcgacaccctgctacgtcgggcatttgaccggcatacttggtccgtcgagtatcgctgtgtggtctaccagcatagtcgcggggtctacccggaccgctgggaggcgacttgcttggtgcgctgcccggaggacagtctccagggtgcagaggcctgttcagagcactattctatctctgagcgggactcagctgaggcagccatgcaagatgctgcacggcgtgcgctttcgcactactgctcggttttcggtggggcagctgacggtcttgacctgaagtattacccccgccgttcatctggcagcacaggaggcgtgattgtctcacctgtcggtgagggcaatcctaggttgagcagcacagtcaacctagccgccgtgctaaacacggagctggaccatgcactagacgagctgagtagggctcgtgctgagatcgccctgctgcgggctgagcgcgcggaacgtcgttttctggacggtggttcccccgctcccgttgggactcagcacccgtaccgctcacctcagcgtggacaccagtcttatggcaatcccgcctgcaagaccaagataaacctagaaccatag

SEQ ID NO: 25259 - DNA, 558 bp, Zea mays
  Peptide Sequence Number=SeqID_68634
atgatgaccgcgtcaaaaaaggttgcgccctccggggttcagcaaccgccccagagcactcgggctccgagccctttactgattaggggttcgaaggctggcccctcggaagggttcgacagccgccccagatcacgcagagtcagggatgaccctgggtacgtccgttacatggccgaggctcgggcaacgctcccgaggtaccctaggacattttcgagaccagcgggaacgatttgtaatggaatcccaccggagggaggcaccgagccctcggaccctatcgaatgggttcgggtccagcaaatcacctgcagggatcgcctgacaccttatcctgatacgcgcgcctcagtcggcctcggcctcaacctcagcctcgggagaaggtctccgcctcgcccgaccctcggcctcggcctcagcctcggcctcgggagggagtcacaacctcgtccgacctcagcctcggcctcaggagaagactcgaggcacttctccgacggccacgttagtgcatgtacagggctcaaggcaattctctgccagccacgttag

SEQ ID NO: 25260 - DNA, 711 bp, Zea mays
  Peptide Sequence Number=SeqID_68635
atgacgcggcgttctcgtccgcgcgccccgacagacagcgtcgcgcgcggcctcgtctgcccgcctcatgccgcgttggccgagggccacacgccagtagccgcaccctggtggcctgggaagaccgcgcaggaggcatccgcgctaaggctgtggccgctgcgggccgcaccgccgggggacctcgcccgcgcgctggggctacccgtacagccgccagggtcaagggtcgtcgagctcgcgggccggtgcgagccatcggagcacgcgccgggagactcgcccgcgcgcgcgtcggggcagcgcgcccgcgctgccaacctcgccgagcgccatggtcaggtgccgcgcctgcccacgccgtcgcctttgactccgcgcgccagtgagacctgcgcgcccgcacggctgcccacaccgcgccacggggaggcgctcctggaccagggccatggccggcacgccacatctaggcctgaggccgcgaccgccatgccgtggctagggctggccacgcccaggccacccacgcaccaccggaggccgcacgaggccgtgcgccgtcgaagccgatggccgcctggctcagagccgccggaggccacgcccgcgtggggttgcgccgccaggggccgcgccctggccgccggttggtttggttggccggttagggtttctaaccctagccgccaccccttatggctttgctaa

SEQ ID NO: 25261 - DNA, 381 bp, Zea mays
  Peptide Sequence Number=SeqID_68636
atggccatagcagagcacgagtatgctcatattggatcttgttgggtgatacaatattgcagagatagccttgctcaccgaaaagaagtgttaacttattttcacttcaagaagatccccaggtacaagatcaatgacatacttttgagattagtggtcacttacactaatcattttgtagcacacttcgtgggattgtacagaatgatatactacatactgaagcctgagttatatgtctcatcatttattttccccactggggtttttgagatgatgactatagacatattattgttctttgggctagaggtctatgggagaacaacggcataccatggttcaattgaaccaccgacaattatctataaggataattga

SEQ ID NO: 25262 - DNA, 432 bp, Zea mays
  Peptide Sequence Number=SeqID_68637
atgaggcgggcagacgaggccgcgcgcgacgctgtctgtcggggcgcgcggacgagaacgccgcgtcatcgtgagcgagaccggtcacgcgattgtgaactccctgccggcacggtgtgctggaagtggaagctgcgggttttgctttggcaaagctgtgggctggtcgcctggttcagctgcgcctccgtgctcgcccaccataattgggtctcccagcaaatttggcggtggttgggcttctggacggagatcgaagaggttatatctgcacttctgcagggaaatccaatgtggacggagtactgcaatgtacccttgatgactctagggtttgagaacaactatgacgtctttgtgaaagtacatgggggtggtctctcaggagtcaggccaggggcccaggcaatttgccttggcgttgcccgttag

SEQ ID NO: 25263 - DNA, 1398 bp, Zea mays
  Peptide Sequence Number=SeqID_68638
atgccgtcctcgtcgtcgctgatccatggcatctccatctccgtctccgacgacgacgaggccaccggcaaggtgcgcgtccgcgtccgccgcaagcgctcccgcggccccgcatccgcttcggcgcgccgccgccgcatcctcttccgcgccgcgcggctgggcgtgccgctcctcctcgccgccctcgccgtgtgcctcctcctctacgagtcctaccgcctcacgccttcccgctcctccacactgcctccgccgtccttcgcggacatcagccgcctctcccgcaacgcccgcgccgccgatggcgccaggaagtcatgcctgaagtttcttgatcctgagaagcttcaaaatttggaacttccagaaattcctgaaacaaatttgtcgatgaaggaagttctgtacagatcaagtctgccccatatcgtcaatgatacaccaccacatacagagaattcccggttcaacttgttcacaggataccagacactcactgaacgagaagaaagcttcaaggttaactttttgagcatttacatttcaatgaagaaaagtgtgacagtgcactgtggcttttataatgaaaatggagggttcagagtttctgatgttgacagagaatatatgagatcctgtgaagtagttgttgcaacttgtgcatttggtggaggtgacgaccttcatcagcctatagggatgaccgaaaattccatcagaaaggtttgctatgtagctttctgggatgaagtcacccgtgcagctcaagaggaggaaggacacacgatcagtgaagacctcgtgattggcctatggcggatcattcttgttagcgatcttcctttctcagatcaacggttgaatgggaaaattcctaagctgataagccatcgcctcttcccaatggcgcggtactcaatttgggtggattcaaaatctcagttccggagagacccattgggagtccttgaagcccttttgtggcgctcaaactcttctctagcgttatcggaacacggagctcggagtagcctgtacgatgaggcgaaagcaattgttaagaaacacaaagcaactccagaggaagttgaagtgcagttggatcagtaccgacgagatggcatccctgatgagaaaagattcaatggaaagaaagctctcgcagaagcttcagtgatcgtgaggaaccacgcgccgctgaccaacctcttcatgtgcgcctggttcaacgaggtggtcaggttcacgtcccgggatcagctgagctttccctacgtcctgaggcgcctgaggccgcccggcgttcacctgttcccggtttgcgcgcgcaaggacctggtgaacagcttcgggcacaagcgcaaggtgaagccgctcgtcaaggacacgacgtga

SEQ ID NO: 25264 - DNA, 636 bp, Zea mays
  Peptide Sequence Number=SeqID_68639
atgggtgcaaaaagggagggggcgtatgggcctagacggcggcctcagaaggagcggcagttagggttaggaaaccctaaccggccactaccttcacaagcggcggcggccagcacctggcggcggtgggcgcggcctctgtcctcggcctcctctggcggttgtacgggcagcacaggcgcgaggccactcggcccctcggtgcaggtcggcacgcacccgcagcggcatggcgtcccggctacgcaggcggcctgggcacaactctctgacgacgcgggcgcagccatcctagcgtgcgcgggcacggctgtgggtgcagccccggcgtcccacggcgtggacacggggcgtggtcggtggagccccggtacagcgcggtcgcgcacccggctcaggccatcccggcccaaatggcgcggtggcggatggggggcttgggctccctggtggcgcaggcgcgggatcggctcggctcgggcggatcggctcctgcctcgacgcgggggatccgaccacggcggcgcgcgggctcgcggcacacgctcggccacgggggagcccggtgcggccctgtcggtgcatgggcaactcatatcacatgtaagagttcttgaattttactttgatagttag

SEQ ID NO: 25265 - DNA, 573 bp, Zea mays
  Peptide Sequence Number=SeqID_68640
atggcctcgacaagcgtgggagggacaggaggagtacagtacccattatacaataacactactatttctacaactatactattccaacttcctatcactcttagtagcctcactgttgggcgtaggagaccactcatcgaccaacttcatggagggagggggcctgaaaaggtccaattcgccaccaaaggcttctcccgcttcatgagaaggtccggcttctgtcccgacaggattcgcaggttatcaatagctgagctaagttcttcgactcgggctcgagcttttgcctccttagcccatggtacagtaaccgcttggatcagtttcagtgatcctcaccgccgacgaccgatccccgccgcgattcgcgccgccgccgttgagatttacaccaccagtgaccagataagcttgccagaaaatgaagaggaagttgaagtaacagaagagaagacaccaccaccttcggaacctcaggcaggaaattgtttctactttgatatctgtgggtctgagcctgactcacctatcaacgaaggcaagccccggtgcatttgccaccacccttga

SEQ ID NO: 25266 - DNA, 1161 bp, Zea mays
  Peptide Sequence Number=SeqID_68641
atggacggcgcggccgacggctccagcggcgtcccggtgcagcagcagcaccacggaggcctcttctaccctcccgtcatcagctcctcgctcgcgcccttctgctacgctctcggcggcgggcaaggcggtctcgccacgtcggccgccgacggtggcgaggagttctacgccgggctctcgtctatgccgctcaagtccgacggctccctatgcatcatggaggccctccgtaggagcgagcaagaacgtcacggggtggcggtgtcctcggtatcgccgaagctggaggatttcttgggcgcgagcgcgagcaccgcaatggcgctgagcttggacagccccagcttctactacggcggcgcccacggccacggcgggtacctgcagccgctgcagtgctcgatggtacccgtctcgttgggggacgacgtttacggcggctgccacgcgcagatggtggacgagcagtccgccgcggcaatggcagcgagctggttctcagcccgcggcggtggcggttgctacgacgtcaacggcgccggcgccatcgagccgtcgcagggccacccgcacgcgcttgacctttccatgagctccgggacggcgcacgtcgcagtaccgcggcgtcaccaggtatccctcgtattctccccgttcccggaccggccgtacgccgcggccgtcgctgtcccgcacgagtcgctcactggccgcgtgcgtggtttccaccgtgctaaaagcaggcataggtggacggggaggtatgaggcgcacctctgggacaacagctgcaggaaggaaggccagacccggaaaggccggcaagggcacatggttcaggtcgaggactacagggagcagctggaggagatgaagaacatgaccaggcaggagtacgtcgctcacctgagaaggaaaagcagcggcttctcgcgcggcgcttccatctaccggggagtgaccaggcatcaccagcacgggcggtggcaggcgcgcatcggccgcgtctcgggcaacaaggacctctacctgggaacattcagggcccctttggtagggcttatttttcagcttcggttctggctaatgcaaaagttgtgtcaaacacctctttttcaaatgacttcaccagtgaagtgcttttccaaaatgaactag

SEQ ID NO: 25267 - DNA, 444 bp, Zea mays
  Peptide Sequence Number=SeqID_68642
atggacgttaccacgtgcgggttcacgccgtgggggcccgagtcgtgccctggcctggagcaggtgatggcgtcgacgccggccgcggcagcgaggcacccggaccccgaggaggaggagaggcgccggcggcagcgccgcaagctgtcgaaccggctgtcggcgcgccggtcgcgagcgcggaagcagcagcggctggaggagctccgcgcggaggcggcgcggctccgcggccagaagcgggagctggaggccaggctgcaggccctggcgcggcacggcctcgccgtgcgctgccagaacgcgcggctccgcgccgaggccgccgcgctcgcgcgcaggctcctcgcgatcgcgtcgtacgcccagcagccgcagcataaggccggagtcgcgcccgcgccggcggcggcgctgctggggctggcgtcgctgacgacgtag

SEQ ID NO: 25268 - DNA, 738 bp, Zea mays
  Peptide Sequence Number=SeqID_68643
atggacacgccgggcctggcagccgacgacggcgagacccaggaccccagcggcagtgggcaggccagcctgggcgccaccgcgggcttggcgaagagcatggcgaggctggcgctgacgccgccccggtccgggctctgctcgcgggagctgctgctcacgctcggggccagcgacgacgcgttcgacacgtgcgcgctggcgctgcccccggtcccggcagtgtccacggacacggtgtcgtgcagcagagatcgacaacaggtcctggtgctgctgccgctgccgtccgccccgctcgacagcggcaggcagcgccgcctggatcttgcagcaggtgtccgccatgcagccgccggcctgcaccagcgccacggcggcgccaccgccttccttcctgcgccgtacctggtcgccagggagcagcgtgccgctgtccatgatcttgtccacgtcgtagcgcgtggtgtcgaagttggtgaccgcgttcaggccccggaacttgatggccgccacgtcgtacgcctccgccgcctcctcctgcgtgcctgcacaggaacggctccgcctcagggcccgcgccaggacaggacagccacatcggaaatgcgcttttttgtggggcggcagcggtcaaacgggcaagcaaagcgcgaaagcgacgccagccatcgagcgtgcgctgcgaacgcaaagcgccaaagccgagagcggccagcagcccggagccagccttag

SEQ ID NO: 25269 - DNA, 624 bp, Zea mays
  Peptide Sequence Number=SeqID_68644
atgcacgcgcaggacaagcccgtcaagttcggcgacgtgctcgacgtctcaggcgagctggacgaccagcccgtggctcccagggacgccgcgcggctgcaggccgcggagcagtccgtgcccggcgggacgcagaagggcgggcccgccgccgtcctgcagtccgtcgcgacggtcaacgcgcgagcgggccacgtaggcagggcccagaccgcgtgccccgtcgccgacgccggcgccaccatcaccgagaccgagctcgcgggccgccgcgtcgtcaccgagtccgtcggcgggcaggtggtggggaagatggtgaccccggcgccggtggcgatgacggacccgccgggcgcgctggagaaggacgccgtcacgatcggccgcgcgctggaggctgtgggcgcgatggtcggggacaggccggtggagcagagcgacgcggcggccgtccagaacgcgagggagaagctgccggcggacaagggggcgacgtgggaggacgccgagagggtggtgtccgcggagatacggaacaagctggacatggcgaccacgccgggcggcatggcggacgcggtgactacagcggcccggctcaaccaggagcgcccgaggccatag

SEQ ID NO: 25270 - DNA, 900 bp, Zea mays
  Peptide Sequence Number=SeqID_68645
atgagggggttgctggcggtggaggccgcgggcgcggcgtcggtcccggcctcggtactccacggcgccgtggactggtggcgcgacgtcaacgagtcgccgctgtggcaggaccgcatatttcacgcgctcgccgtgctctacggcatcgtctcggccgtcgcgctggtccaattaatcagaatcgagtgtagggtgccagagtatggatggacaacgcagaaggtgttccattttctaaacttccttgtgaacggcgtgcggtctgtcgtgtttgtgctgcggcgaaatgtgcaacttgtagagcctgagataatacaacatgtgcttctggatatgcccgggcttgcattcttcacgacatatgcacttttagtgctcttctgggctgagatttattatcaggcacgtgcaatgtcgactgatgggcttagaccaactttctattggatcaacggtgtggtctatgcaattcaggtgataaatgtgctgtgtgctgtgctgtggacattgatcacatctaaagttttaatagtctatgaaagtgcgtggcagataattctatggttggttttatggtggaaaccagttcgagttatggtcattttgccaaagatgttctttgcaggtgtatcactatttgctgcccttggatttgttctgtatggaggaaggttatttctgatgttgcagcgttttcctgtagattcgaaaggaaggagaaagaaattgcaggaggttggctatgtgactaccatctgtttttcttgtttcttgatcagatgtgtcatgctgtgcctcaattcatttgataaagaagcagatcttgatgtcctgaaccatccaatcctgaacttcctctattacctgaattcacctattgcgactgcagctggttga

SEQ ID NO: 25271 - DNA, 186 bp, Zea mays
  Peptide Sequence Number=SeqID_68646
atgcgcctaggggctccttttatagccccaagacagctaggagccgttgagagcaaatctggaaggccatccttgccttctgtcgtcgggggcaccggacagcacagtgcacaccggacactgtccagtgaccgctttgttcctaacggcagagaaaacgaccgttggggagaggttgtgtatctg

SEQ ID NO: 25272 - DNA, 465 bp, Zea mays
  Peptide Sequence Number=SeqID_68647
gggtacgcgatctggaccgcacgatacagatccgaccaccagacttaaatgaaacgaaggggtacgcgacttttaatcttaaccgcacacccgcgatctggcggtcccgggtgtttcttctccggccatcgccggggaacggcggtgcccgagctgaagggtactacacacagcttggagagtatacaaaagcgaatacgataagggtgatttaccagtacgtcgaacgaccagagcaccatccccggcccgatgcaggatggcgacaacccatggactccggcgaggtgagctggcttttgtgctccctgctgcgcaaccccaccgagtgccgcagagacacatcaccgatgcacgccgaggaccaagcaatggcagaatcgccgtggtgtctacacgattctctcttcctggcgagcagcgacaccgtcggcaagctctgcttcaatggatcaaagatgcaag

SEQ ID NO: 25273 - DNA, 1185 bp, Zea mays
  Peptide Sequence Number=SeqID_68648
atgagcagtgggcgtgatttggttgaagagttcattggttatggagtgtggcccctggcgcatggctgggtgctgggcgaagtatgccctcgccagatgcctactttgggccagcagctggtgcgaagtttggccttctctttggatctgggcggccgagacccggccacattcgttcgtgaagtggaggacagggcggtgaggattgtggggcggtatgcaccgaggacagagggtctgcggagttgggatatcatagggtccaatgttcgcttgaatcgggtcttcgaattaaaccgtttgccatacgttggctatcctggagatgacgctgctacgcctgctgaccgccgtcgccggtgcgcactgacatggcggatgcacgtgttgccgactttgacacggacatctctatgggggattatcatgttggacccgtggtgcaacttctgcgtgagcggcgagatttcgtcggtcgccgccagtaaagatgtggtaggctctatgtcccagcagctgaggcatgcgtcgcagcagctgaagcatacggtcgacttcgccgaccatgtcgcgtcgggtgctctgacttcggagtttgctgtcaaaatcgagcgtctccgggcacagcatacggatgctgtttgggagaagtcgactgtggaaaacaaaagctacaggctgacggagaggttggctgctgcggaggccgagaagggggatcttcggtgtcagtttgcggaggagaggagggacatgaacaaagccattgctgatgcgcaggctgcacaagccgaggccaaacttgcgtgggcggaggctagtcttgcccgtcaacgcgccgaggagctagaggcgaggctcaacagcctgcgcaactgcatggacaaaaccgaggtctcgacgggcgcggaggtcgagcggactcatgtgcagttcgtggacgcgtaccgggagctgggtgcgcggaccgccgccttcaaagcgcccggccgagaggtcggcctccgcttccttgagtggttacatgaggagctgggggtgctcccgacaatcgtgacgggtctcatgtcctttgcctcccttgtcacctgcgagggagccgtgaatgctttgtcccgcgaggggtgcgggcactttgaggtcttcgaccagtcggacgaaggcttcgaacgcgaaatcttctag

SEQ ID NO: 25274 - DNA, 2799 bp, Zea mays
  Peptide Sequence Number=SeqID_68649
atggcctgcaataaaaacatgtttgtcaaacaaggtgcactgagtggatcatctgattggttatgcgactttaaccaaacagtggctttacactttcctgatgatctcgctgaacatattgtaggcgaggccactccctatgacatatactcaaggaaccacttcagtaacttatttggtctacattctctgagatcagagagctcgaatttgacaagtgagaagcatccaggaaactggcaagaaagttcagagaccctcactaaagattttggaccatcagtgtttcatcagcagcagagtgcctttgtgagtaaattgcttgatcattcaggtgccgaagacacaggaccttatcccccacgacaagatttaaatcagtatccttttggttctacatatgacaaatacatgacacagctttcgtcatgttcaacagatacacgacctcacatcttttctacacaatatgtcaattcacctgaaatggccaatacaactgttccattgatgaatgacactattggggaaagttccttctccttttcgcattatatgaatccttgcagaatcaatcttgattattttgattccgtgtggaatgaacaaaaaggtcttggataccaaactacagataagcagcatggaaaatggagtaaccctgatgacaaggcaacagtggggaactattccctcaattctcttggagagagtcaccttaatcctgagcatttagggaatgggagaccaatgcagggatcttctgaaatgaaacatgaattgggaagtttcagttccaaggtttcttcgtctgagtctggatttgttcagcctcgtgaatgttcatctgagtttcctgaggtcaataacaccagtgttgattcaccttgttggaagggcacaccagcccagtaccagccttcgtttgggattattgaaaataatggcgctcctcctgtggtgataggaacagtaggctacattaattcacatcaaaaccagaaactacctgagttgagttttgagtatccatggcgattctgtgaacaccaagtatcaggttctgaaaatgacccttttaaggcggtcaagttgcctgaaagatgtaaaatctccaaagatcataaagttctgccaattgatgtcagggttcttaatgacatgactacacatgctagttatttgcctgacaaacagcatcccacaacacagaaatgcaatgattctggagaagattctaagaatgtgataacttcaagtcaacaggaaagttcgtgttctggcagaaaaccaatacttttgggtgaacatggtggcagtcttacaggaagcataagtgaactaatgagtaaaagtgtgatgaatcctattgctattactcctagagttcatactgatcatttaacaacaggaatcccacatggaaatattttttctgcagcggtggagaaagaagaaagcactcacaagagaggtgaagacccttctcaatgttatccaggtgttgaggggaatatgctgaatatgtcttccgaatccagctctagcaatcaggcaatatttctgaaactaatgcacaatctatcagtagtgcttctatcgacctgcaagggtggttcttcattacaggaagatgaagaggaacttctccaatcagtgattcaaaatcttacagctgccagttccaaaagaagcaaggttgaacaaaaaaatgatgatggattgagtaactccagccaaatgaaattcaaagatattaattatgtgaggaaacacttttggaggtcaatgcatgaagactcagaacaggagaatgctgattcagaatttaaggccactgtttcacaggttcttactaatcaccaggaggataaggtgctcgacaacactgaagttcctcaggcatcaatctatagaaacttgtggattgaagcagaagcttcagcttgtaaactcaaatatgagcttcaacatgctctcctgaagctcgagacagcaaaaggcctcaacgacacaataaaagcccctgactcattggaagacagtaaaggctctaactcatacattttcagtaacaaaccacagaaccatgggaaaggaaccgtttcatgcgctgcggcctttcagggccacggaggagattctcgtgacaagcaatctcctgttgtaagtaggagcattttcaatggtgttgatgctgatgtgtttgcccgatttgaagttttgcagtcccgtattgataatataaactccttgagtgagattgactgtggggagcagaaagaagcaagcaagagaccatatgcagtcgaagatactgttatggcgagactgaaagttttgaagtctcgtcctgacaatataacctctttgagtcaaggaagcactaaacaccagctagatggaagcacaaacagtgcagataatgttgatgacactgttattgctaggctgggaattttggagtcccatcctaataatgaagccctattgggacaggaaagcagcaagcgacaactggatgcgagaacaaatagagaagatgggattgatgctgctgttatggctaggctgagaattttgaagtctcgacctgataatgaaacctcaatgggcgatgccaacaaggagcagcaagacgcatgtggtgaacaattaaatggggatgaccttggtattgtgtccaatggagccattagcaacaccctgagtgagaagtgctctaagtttacgcactctgatgatcatttaggagaaaaaaactcagtaggtgtcccggacacatttggtgatggatag

SEQ ID NO: 25275 - DNA, 321 bp, Zea mays
  Peptide Sequence Number=SeqID_68650
atgtgtgctgcccgtgctgccggtctgcagacgggtggggctgtggtcgttcatggggccgtgctgaacctgggcgtggaatcgcaggagctgggaacaggcggaatcatccttaattcctcgccgttgatttgggcgccgtcgtgggccgctgtgccgcgcgcaatggttcttttggcgaatcctgctcctcggtctcggatggcgcgtaccggcggcctgctccaccctcgtgggcgcggcggcgccacccagttcagtcggaggatgaaggaggcaacctggccgttcaatcggctatcgacgaccaggattagatag

SEQ ID NO: 25276 - DNA, 204 bp, Zea mays
  Peptide Sequence Number=SeqID_68651
atggactccggcgaggtgagctggcttttatgctccctgctgcgcaaccccaccgagtgccgcagagacacatcaccgatgcacgccgaggaccaagcaatggcagaatcgccgtggtgtctacacgattctctcttcctggcgagcagcgacaccgtcggcaagctctgcttcaatggatcaaagatgcaagtgtcgtactaa

SEQ ID NO: 25277 - DNA, 993 bp, Zea mays
  Peptide Sequence Number=SeqID_68652
atggagagtcatgatctccgggcagaaagggaatcacggcttgtgggtaaagtggcaatgagattgatggtttttggtattgactctggtaatggtaagtggtattctttccgtttggaaagaatggctcgtcttagacacaccatacggaagtctgtcatccccttcttaccctctcgtctcacggagcgtccgctttgccgtccagtgaccggtcagtccagccacttggtgagactgcaccaccacctgcatgaggagcaggagcgtcaacgacaggagcaggagcagcagggctcttccttcttgctccagcaggagatagagtctgagccggaaggatgggttgctcgacccatcactcgcgacgctgctcgcgggtgtcacttccacgacgcgctcgacaacctgctacgtcgggcacttgaccggcatacttggtctatcgagtatcgctgtgtggtcttccagcacagtcgcggggtctacccggaccgctttgattcgacctgcttggtgcaccgtccggagaacagtctttggggtgctgaggtcttctcagagcactattccatctctgagcaggacttagctgaggcggccatgcaagatgtcgcacggcgtgcgctttcgcactactgctcagttctcggcggggtagctgatggtctcaacttgaagtattacccccaccatccatctggcagcacaggaggcgtgattgtctcatctgttggtgaggacaaccctaggttgagcagcacagtcaacctagccgccgtgctaaacacagagctggaccatgtgctagacgagttgagtagggctcgtgctgagatcgcacagctgcgggctgagcgcgcggagcgtcgtcacctggatgatggctctcccgctcccatcgggactcagcacccgtaccgctcacctcggcgtggacaccagtcctatggcaaccccgactgcaagaccaagataaatttagaaccatag

SEQ ID NO: 25278 - DNA, 441 bp, Zea mays
  Peptide Sequence Number=SeqID_68653
atggccggtccagcccggaacacgagcagggcggacccggtgtccaaacgccaagccagggcggattggacaagccggcatggggcgcagttcgatgtcgaggaaacgagcaccaccggcgtccggacactagcggcgaactgcggatgtgacgcgatagagagacacggcgcagtggagttggacgagcgcaagggcgagcagggaggagcgaccaagcagggctgcggcggggaaactccacggcaatgcgtcggagaagaactgaacagggagctccaccatggacggagctcgagtaccagggaggagctcggcaaagcactggatcagggggagcagggaagacgccgagcagaggcacgcgcggtcgtgcgaactaaaggacgcggcgacagagaggagcgttcggctaggggaaagcagggaacgccaagctag

SEQ ID NO: 25279 - DNA, 507 bp, Zea mays
  Peptide Sequence Number=SeqID_68654
atgccctctgcgccacctcagggcatcccggctgctggaggagaccctgacggagacggagacgacgatgacgccggtggcagttcgagccacggcacggagctttcggaggagccagagccggatgaatggatcgctagacccatcactcgtgacgccgctcgcggtggggtagctgatggccttgacctgaagtactaccctcgccgttcgaccgacagtgctggaggtgtgattgtctcgccagtaggtgagggcaatcccagactgaatagcatggtcaacttggtcgacgtgctcaacacagagttggaccatgccctcaacaagttgggcaaggtttgggcagaggttgcagaattgcgtgctgaatgcgcggtacgccactatcttgatggtggttctcccgcccctgttgggattcatcacccttaccgttcaccgccccaaggtctcttcgactatggtaccccagactgtaggacccgcatagatttagatccatag

SEQ ID NO: 25280 - DNA, 375 bp, Zea mays
  Peptide Sequence Number=SeqID_68655
atgtgcctcgtcaccagctggctgcgtgtgtttctcatcgccgcaactcttttcttttggagtacggtgtgcctaccctaccgtggtgcatccttttcgctttgggttacccagaaggagaggaaccatgttacttctgggataggaggccgcacacccagagatggggcaagcagagccgcttacaagatacttcaagattatcttaatcgttttcctggggagattgctaccgccatgcctggagtctttcctaggggtgatatattcaaccctaagtgggaccagcaaaagggtagagctctaacaggaggtgacagtgaggagcagcacagcgacaccgaagcatccagtgcaatgttcgcagtgatgtag

SEQ ID NO: 25281 - DNA, 294 bp, Zea mays
  Peptide Sequence Number=SeqID_68656
atgcagaagcttgaaatgctaatatgcatgaggaggttcaccagcttcatgcccagctcaatccaatcaacccgccaggaccagaagaagcagacaccgtcgcagccaatgatggaggagggtgaccatgaagcaccacttcctccacctccgccattcacacctgaacagttcttcacacaatttcttggagctcagaggaacatggagaacttgcaacaaaacatggaggtagagcttcgcaatattgctaaaaacaaccatcatgcgcagcctcatggtcaaccagtatag

SEQ ID NO: 25282 - DNA, 1470 bp, Zea mays
  Peptide Sequence Number=SeqID_68657
atggagaggccttggctgatcctaggccgaatactctacgtcaacccgccccgcgacgacgacgacatgctcgaggtcgaggacgcggaggagcacgccgtggtcggcgaagctcaagccgaggaggacgcgcaggcgcaggaggagcagcacgccgcggccgtggacgcggtggtggaggcgcatgatgatcagcaagccgaggtcggggaaggcggagccgaagccgaagccgaagaggaggaacagcaggctcagctggaggagagcatcttgaacgtgaacacggacgcagcagcgtcggaggcggcgcacgcggcgcacggcgcggcggaacccgacttcaccatatgggtcgcgccaccgccgtggctaacggacctcgtcgcgggccccggttcccatcccgaccccgcgagacccgacatgtacccctacatcatcgcctccggacgcttctgcctcctcgtccacttctccatcgctcccttctacggcaccaacttcgagaaggaacccaaccacagcaacctcgtggtggtgcgccacttccgcaggtcagacaatggccagatcgaggcgcgcgctgtgcacgtacccgaccgccccgaggacaacgtcaatatacccgccctagccaatatcgagagcgtcggcttaatatgcaaccacgaaacaggtcactacctgattgccgagctcgttgttcccacagataatcaagacgaatccagcgtcatctacataagaacggaggatggcgtctggtactcgaactactttgcttaccccttctggtgggagagccgccggcattgggtaccccacggctctgtcaccataggcaacgtggtcttctggttcgacctctcgtgggggatcatcttctgcgacgacctcacccagccgcacgaggagcaaatattgtccttcttccgcctcccgcgtggttgcgttctccgcgacggacacgcgccggacctccactacagccgctgcgtcgctgtaagcgagaacgtgttgcggtacgtgcagatcatccgcaaacacgaccaagcagcgacggtgcacatgtggtatcgaaacccggagcgatggatcaccaactataatgaaagcttcgacgacatctgggacgacgaaagctacatccaaaccgggctgccacggaaatctcccgggctcgtgggcgtctccccggtagactccaatgtggtctacttcaccctggaccagcgattgttcggagtcgatgtgcccgagcaccgggtggtggactgtgcggaaagtgttgagccgctgaacaggacagagatgctggacgattcggtctcaagtcgctccttgatcacttggaacctggacgcggatggagccgcaattcagatatcgtgcgtgcaaatgtgctgccgcaatttgcttgtgatgtgcagttacatgctccaaatttcaacagatcgaattgcctga

SEQ ID NO: 25283 - DNA, 264 bp, Zea mays
  Peptide Sequence Number=SeqID_68658
atggacggagctcgagtaccagggaggagctcggcaaagcaccggatcagggggagcaatgaaggtgccgagcagaggcgcgcgcggccgggcgaaccaaaggacgcggagacagagaggagcgttcggccagaggaaagcagggaacgccgagctggagagctgcgcggctggggaaggggcgagccagcagagggagcgagggcgagcagggcgcgcaggggcgagctcggcagggcgcgagatgtaaatggaccgaattaa

SEQ ID NO: 25284 - DNA, 792 bp, Zea mays
  Peptide Sequence Number=SeqID_68659
atgaccgcgtcaaaaaaggtgcgccacatcattcgatttcgtatccttttcctcttcctctttctctctcttacaacagggaccgggaaaggggataccccgaaagggatccttctccgtgaaggaaacgggccccgagcccccctactgatcagaggttcgaaggctggcccctcggaggggttcaacagccgcctcagagcactcaggctccgcgcccactactggtcagaggttcgaaggccggcccctcggaagggttcaacggccgcctcaggccactcgggctccgcgcccactactgatcaggggttcgtaggctggccctcgaaagggttcgacagtcgcctcagacgcagagcgagggatgaccctggagtgaggctgacagcggccaagtccggcctcgggcgccataggaagctccgcctcgcccgacccagggctcggactcgggctcggccccggaagacgacgaactccgcctcgcccgacctagggctcggactcgggctcggccccggaagacgacgaaccccgcctcgcccgacccagggctcggactcgggctcggccccggaagacgacgaactccgcctcgcccgaccccagggctcggactcggcctcggcctcagccgacggtctccgtctcgcccgacccaaggtctcggactcgacctcgacctcggaagacagactcgaccttgacctcggaggagcctccacctcgccctacctagggctcggaccaaccacgtcacaggaggggccatcattaccctacccttag

SEQ ID NO: 25285 - DNA, 405 bp, Zea mays
  Peptide Sequence Number=SeqID_68660
atgatggtcctcgcctcagttgccgccaccttgttcgccatcctgtttcttttctctctcctctcatgtcttcgcctccgcgccaccccattctcggcagagggcgtgagagcaggcacctcttccttgtattcgtctaacaccagccccgacatcggcccacgcaatgactattgcacgtccacgaggacgtttcacagcatgcgcgcaccatcgttttcgtcgtcgtcggacgtcccgttcgtctttccggccttcgccctgttcttcctcccaaacctgctgcccccgcccacggtcgcagccgcgagccgaccgacgctcgtcgacgcgggatttagagatccatgcaggcactaccacagggtgctcgtcccttgtgtccttgactcttgcatgcattag

SEQ ID NO: 25286 - DNA, 1953 bp, Zea mays
  Peptide Sequence Number=SeqID_68661
atgggcgtgcctgacgcctgcgcgctctggcgcgcattaattgctgttgcaggcgaccgttggcgcgaagctgccaagttccagagccacgtcttcttggagcaccggacactgtccggtgtacaccggacactgtccgttgagttggagcggagtgcgggcaggcaaaggccgcaggacacgccgaccagcagcttcttttccgccgcctcgcctcccacacttttccctctgctgtgctgggtgctccgctttgctctgcttgccgctctccgcctctccccgatctccactcgactcgtgttggcttggcttccacttccaactgactcgactggattcaagcgcccgacatccgcggagacttggccgcgagcctgcgttcgaatcctgaggacgagatcgccagagccgccgggaccgatcgagttccggctgccaatgccggctctgctcttgctgctcctgttggccgcggcgccggcgccggcgcgggcgggagacccgtactcctactacgactgggaggtctcctacatttcggcgcagcccctcggcgtcaagcagaaggtgattggcatcaacggccagttcccgggccctcccctgaacgtgaccaccaactggaacgtggtggtgaacgtccgcaacgcgctggacgagccgctgctgctcacctggaacggcgtgcagcagcgcaagacggcgtggcaggacggcgtgctcggcaccaactgcgccatccccgccgggtggaactggacctacacgttccaggtcaaggaccaggtcggcagcttcttctacttcccctccacgccgctgcaccgcgccgccgggggctacggcgccatcaccatcaacaaccgcgacgtcatacccatcccctttgcctttcccgacggggacatcacgctctttatcggtgactggtataaccgtgggcacagggagctcaggagcgcgctcgacgggggcaccctgctgggcgcccctgatggtgtgctcatcaatggattgggaccctatcagtacaacgaatccgtggttccaccagggattgtctatgagaggatcaatgtcgagccagggaaaacttacaggtttcgggtacacaatgttggggtctcaacaagcctcaatttcaggatccagaaccataacctgctccttgttgagacagaaggctcctacacctcgcagcagaactacaccaacctggacatccatgttggccagtcctactccttcttggtcaccatggaccagaatgccagcactgattactatgttgttgcaagcgcacgctttgttgatgcagctgttgtggataaattgaccggtgttgctattctccattactctaactcccagggtccagcctctggccctcttccagatcctccgaacgatcagtatgacacggcgttctctataaaccaagcaagatccatcagatggaatgttacagctagcggtgcccgcccaaatccacagggctcattccattatggtgacattactgtaacagatgtgttcctgttgcagagtagagcacctgagctcatagatggaaaactgcgttctactctcaatgagatttcttacattgcaccctcaacccctttggtgcttgcacaaatatttaatgtccccggagtcttcaaattggattttcctaatcatcctatgaaccgactaccaaaagttgacacatctattataaatggcacttataagggatttatggagattatattccaaaataatgccacaaatgttcagagctaccacttggatggctatgcattctttgttgttgggatggactatggtctatggacagaaaatagtcgcggtacttataacaaatgggatggtgttgcacgctctacaatccagggtcttagaccagagccagacaaaattgggcatgacccccctagcttctaa

SEQ ID NO: 25287 - DNA, 345 bp, Zea mays
  Peptide Sequence Number=SeqID_68662
atggagctgtcgccggagatagccatctctcgccccgagaccttcccacactgcctgactagcgctacacgaaccagagggcatggcaaatcccgagaagcaaatctcaccgagtttggaggtgtggaattccctgcccatggagaggcgcggctgtggcagacgtccctgctccggcgagcaattgatcgcacagcgtccgacccccggctcaaatctaacgcggaattacgaagaggagaaccatacgactacggcagcctcggatccgagtgccacaccacacgaattctccccaatgcggcttgctgcgtcgaggggatgagatgtggctatgcgtcatag

SEQ ID NO: 25288 - DNA, 420 bp, Zea mays
  Peptide Sequence Number=SeqID_68663
atggcgctccctgttgatgtggtgggcccgcgcccgaggccgggcgacgtgggggctcctccgaagctggggtcgagtctgtcttccgttgccgaggccgaggccgagcccgagcccctgggtcgggcgaggcggaggttgctcggcagaggccagagcggagtccgagccctggggtcgggcgaagcggagttcgtcgtcttccggcccgagtccgagccctgggtcgggcggagcggagttcgccgtcttccgggtcttagcccgagtccgagccctgggtcgggcggagcggagttcgccgtcttccgggtcttagcccgagtccgagccctaggtcgtgcggagcggagtttcctatggcgccttcggcaaggcactgcagtcggagtggcgcaggcggcgctgtccttctgttag

SEQ ID NO: 25289 - DNA, 882 bp, Zea mays
  Peptide Sequence Number=SeqID_68664
atgtcttcttcctcccttatgcgtcgcgtctttccaccttccaagcccccggatggggggtacccgccgtctttccgcctcatcgttggaggaacgcaactccgcgggagttggtacctttcaggcatcgttcggcttcaaggattttcatcacacagcctggttgctcccctccgctggtggtcacccaagacggtgacctccagctcctggatggggagaggcaagccaggctgtgatcccgccctcagcatcgggggtgttcgtcatcctcgctggggcggggggcgaggcgagccggagctctacctcctgcgcggatcggtggaccacctcctcttccagcttctggtggtggcaatcgtcctcccgcgctgcgacggagacgtcctccagtcatgccggggaaggcgaactgttgctgtccagctaggatgcaactttccgtcctttccctcgcattcgcggcgaggacggcagcgaggatctgctggtgcgcttgggagcggcccgctctttggctttgatggctggttcgcgtcccttgagcgagaccgcgaacaagagctctccggtggccgcgtccacccgggaccacagttgctgctgcagaggtcgctggcgagcctcccgatgttcgttaccccgcaggctcgaggtcgctcatacccgcggggacggaaccggagttccgtttgtaagggcaccttgaatgccagtgtttttgttcatcgtggctgtcgaggcctgaacatggatgcctgtgcgagcgagagttgcttctcgcggaaggtgatgagtgaggtatccgtatcccggaggcgtgggagtccctcggctcggtcggccttgccgcttacgcgtactttcacccgtccatga

SEQ ID NO: 25290 - DNA, 465 bp, Zea mays
  Peptide Sequence Number=SeqID_68665
atgacggtggcaggcgggcgggagcagcggtcacgtcgtcagccaggctcacgtcccatccaggagcagcaagagagcctcctctcatggcgtgaagacggcgcgcccgtgatccgtccctcgaacggctcgcgcacgcgcaacgaccgcctcgccaaccactcgccccgtcgcattaactccgcggcgggacaggcggcgctcctggcaggagaagcgggcgacgcttcgccttcgccggaccgggaaagggggataccccaaaaaggatccttccctgtgaaggaaccgggctccgagccccccctgctgatcagaggttcgaagactggccctccgaggggttcaacagtcgcctcagatcgcgtgggccctacacccactactggtcagaggttcgaaggccgcccccccgaagggctccacggccgccttaggctactcgggctccgcgcccattactga

SEQ ID NO: 25291 - DNA, 624 bp, Zea mays
  Peptide Sequence Number=SeqID_68666
atggacgacgaccgcccttccctccgatcactgagtgaaggagcgggccaccgcccacgcaggggccgaccccaactcggcacactcccctccctagccctggtgatgaaaatccttgaggctgagggaggggcagaggccgcagcccggctcgctttcccccaccatcaagctggagggaccgggaaagggggataccccgaaaaggatccttccctaggaaggaaccaggctccgagcctccctactgatcagaggttcgaaggctggccccccgaagggttcgacagccgcctcagatcgcgtgggccctacacccactactggtcagagctcaccggagacaccatgttcggcgcccatcgagggcaacatggcgctttccccctcctccttgcgaaaaggcgacgcaggggcgtatgtaaaaaagccgagcctgtccctgatcgccctctcgccctgtgcagaggctcgggggctgctctcgcaaacccggttccgaccgaaccgttgacagcgtcaacataccagcccgagaacttgggacccgaccgtacacccgggctacggccagctcgcatgagggaacaaccagaccagccgaagcattacgcgaggcattaa

SEQ ID NO: 25292 - DNA, 1008 bp, Zea mays
  Peptide Sequence Number=SeqID_68667
atggtctcacactcactctcagcatggctcatgtcctcggcgccgccgccggcgtggttcgccgccctggtcgccgtgggcatgtacacggcgctgcggtccgccgccaccttcctggcgtggctccaccgcgcgttcctgcggccaggccgggacctggcggggcggtacgggacgtgggcggtggtgaccggggccacggacggcatcgggcgcgcggtggcgctggagctggcgcgcgcggggctccacctcgtgctggtggggcggagccccgacaagctggcgcgggtggcgaaggagctcgcggccgccgcgccggcgtgcaaggtgcggagcgtggcgttcgacctcgccgtgaccggggacgccgcgcggcgcggggtggcgcgggtggcggccgccgtggagggccgcgacgtgggcgtgctcgtcaacaacgccggcgcgacgtacccgtgcgccgcctacttccacgaggtggagggccccgtgtgggaggccgtgctgcgggtcaacgtcgaggccgccacgcggatcacgcgcgccctgctgccggcgatggcggccaggggcaggggcgccgtcgtcaacgtgggctccggctccagcgtcgtcgtcccggccttcccgctctacgccgtctacgcggccagcaaagcgtacgtcgaccagttttctcgaagcctgagtgtggaatacaaacaatacggcgtagacgtgcagtgccagatacccctgtacgtcgctaccaagatgtcgcccgtgaagggcgcgtctccgttcataccgtcgcccgaggagtacgccagggccgcccttcgctgcgttggctacgaggcgagattggattattatagccttccagacagtactcgcgatcgtgcacttatttatctgtcagctctattccgtacatacgcgaacccatgggaccaacacgactatgcagaggggaaaatttcaaaaggtccatctatgaaggatatcaggaagggatctgaatga

SEQ ID NO: 25293 - DNA, 837 bp, Zea mays
  Peptide Sequence Number=SeqID_68668
atggggacaccagggttcatggacttcagggtggttcccctgtcaacactgttcacctacagttgcacaaacacgagccacgggccatccattacgctcaggtgcaatggatgccgggtccctccaagagatcactacgtgtcctggcaatttgttgacctgctggggcagccagcaactgctgttggtttccagttcaacctgaccgcaaggcaacatggcaacaatcagcacatgagctttgtgagtggtacaatgaactctgacggttatactgatgatgtcaagttgaagacgttcagggggagggattccaatgttctaaagatccagctgtttcctcagatatacaacaatcttggtaacctgcggctcttgcagccactggttcaagacttcactcaaggatctatgttttctgatgtcagcagcttgaattcctccctgcagaaccctagggatggagtggtgaatactactctctacataagttatctctcagactacattgtggagatcagcaatgagagtgtagtaggcccagttagtgtactcgcaagtattggtggcctttatgccttcagtgtggcaatttgtctctgcctcatgtctcaatgtgaagcaaggataaagaagcttcgtgacgaggataccagaatgctgaaaattctgagcaaacgacgtgctcagcggaattgggataagctgcggaagtttgtcatgtatacctggggtctaagcaacctagacccatctgatagaacctgtcagcagcctgaaggatcagtgatggattctcggcatatgagaagagaagcaattagacaaggaatctaa

SEQ ID NO: 25294 - DNA, 189 bp, Zea mays
  Peptide Sequence Number=SeqID_68669
atggcgcacagtggtggtgacgggatggcttgggcaggcggtggtgatgggatggctcggtcacaggcgctaggacgtgtccaaaatgaaatactctatgtagagtgctacaagaaatcatggtgcatgcatatgatgagtaagatgcttcatgagatggggtctttaggagataataaggggggttag

SEQ ID NO: 25295 - DNA, 432 bp, Zea mays
  Peptide Sequence Number=SeqID_68670
atggtcttggtcgaggacctccatggcacctacgttgatgaagttgctaaatccaagcaatcaactgtctccacaaaaacaaagaagtttaaggaaattcaatttcagaaacttcagagattgccagatgggtgccatcctgtttttgataatgatcatctgtgttctataaataatcatgacctgcttcctaaaatgagtactccaagtgctgaccttcatctacttcctgagacaggagtggaaaacatgaggacacctaaaagtcttcacgctgaacttaagcgtgagctgtcaaagctaaatacggtgttaaagctaccatgttggtgtgctgcttcttttctgaaatacactgagttggatcatcgagaatcacttgcccttgcttcagatggattgaattatgaatgcaatgaggctccatcatag

SEQ ID NO: 25296 - DNA, 567 bp, Zea mays
  Peptide Sequence Number=SeqID_68671
atgggggtgggcctgcggagcaacagaagactgacgagcggctcgccgccgcccgctctgactacgacgacaacgacccccgctccggatggtcgagccacagcagcgcagacctcagggtgggcgctgctgcaaacttgccctcgcccccaccgacgctcgaggggcgaggacaagtatgaagaaccggaggcccagagcgcggatggtggcggtgaccccgtcggtgacggggacttctcgagccgcctccgcctcgacaccgacgataggggccatcagcccccccgccgccctccggcaggaggggccgccgggagccaagccgacaagcccgacgcgctggaggtgacgacgcccgccgtcgaccagccccgcgttgtcgaagtccgggccgcccgcagggccagtgggcgccctctcccccgaacgccgcgggagagggtgacccatgaacccgcgcgggaggtagagcgccggctcagcccggcccccaccccagcaaggatgatgaacatccttgaagctaagggtgggaccaagatcgcagcccggcttgcttcttga

SEQ ID NO: 25297 - DNA, 381 bp, Zea mays
  Peptide Sequence Number=SeqID_68672
atggctgaaaggtaccaactcccacggagttgcgttcctccaacgatgaggcgaaaagacggcgggtaccccccatccgggggcttggaaggcggcgcttctggcaggagaagtgggcgacgcttcgccttcgccataataaccgcgccaaaaaagggaccgggaaagggggataccccgaaaaggatccttccctgtgaaggaaccgggctccgagcccccctactgatcagaggttcgaaggctggccctccgaggggttcaacagtcgcctcagatcgcgtgggccctacacccactactggtcagaggttcgaaggccggccccccgaagggctccacggccgcctcaggctactcgggctccacgcccattactga

SEQ ID NO: 25298 - DNA, 474 bp, Zea mays
  Peptide Sequence Number=SeqID_68673
atgtcactgtgccgaagctttatagtcgatagcttcggcgctgctttggagaggatctgccgaagcataccggtgttcagcttccaccagtgcagtctgctcccccaccggctctttcaggctgctattgttcccgctcttcagtcaggaccctcgctccactcttttggttcttctatctctccgctcaggccggtcaccctggacttctcaacaccggtcgtcggacccatcagcgctcagccgccagtgccaccagcgtcttctgttaccactgctgccgtggcggtgtccgtgactgctccagctccagcagatcctacaccgcagcctacgttagagtcagtaccagctccagcttctactgctgatcctggatccgagactgactccgatcctcagctcgcgtttgcacttctgcctcgaccgcgacctgatgcaccttcgcctcctcctacctcttctggtctgtag

SEQ ID NO: 25299 - DNA, 981 bp, Zea mays
  Peptide Sequence Number=SeqID_68674
atgaacgcctccgcaatcccgtcccccgcagggggaggccggttcttcacgggcttcaccaaactgtgcaagggcctcgccgtcatcatcttcctcgtccacattttggtccacctcttcccttcagccgccacctatctcacgctgataccagccaggtgttctctgtacaggacaatcccttttgcttggaacctgattaccgcttgttatattgagcaaacaattccaggggtgataatgagcatagttggtcttcttctactcgggaaggtgttggagcctttatggggagctaaagagttgctcaagtttatttttattgttaatctctcaacttcagcttgtgtcttcgtaactactattgtgctgtactacataacacaggaggagacctacctttacacacctgtttctggattttatggagttctttcaggactactggtgggcatcaagcaaattttacccgatcaggagcttaacctttttgtgctcaagattagtgcaaagtggattccatctattgttgcatttacctctgttgttgtgagcttcttcgtaaaggaatcgatatcatacctccccatcatattatttggcatctacatgagctggatttacctgcgttacttccaaaggagtttggaagtaggccttaaaggggacccaagtgatgaattctcattttcaagcttcttccctgtatttttaaggccagttttggaccctattgcttctatattccacaaacttttctgtggacgatctgcaaaacctgaaggcacaggccagacactggatgggtcacagttccctggtttaggctccattgaggcaaacaggaggagagaaaggggtcagagggcactagagcagaggctggcagagaagccggccgcggtcaggaatactgagggcacgcctccgccgaagcagcagctggaggacgcggaggatgatgcttctgacgaagtctga

SEQ ID NO: 25300 - DNA, 1479 bp, Zea mays
  Peptide Sequence Number=SeqID_68675
atgacgtactgtgctactgtcaaaatagaacaacaaaagggtcccagacgtgaaaactgtcatccgttttctttgcgcgtctcccttcccgagtcgcaggctcgcagccctgcgctgtcgccgtctgccgagcccgagcccggaaaaggggaaggcggctacgcaaacgcaaggcaccccaccccgttcaccgcagccgaatcaattaaaaagccggcggcgagaagagctgactacagtccaaatgatgatctattagagcaggagtttatgctgaagggaagatggttcctgaggaaggatttggaggtaaaaaatggtcagggcaagaagttacaatgtagtcactacatgcctgttgtgattcctgaaggaaaagctcttccttgtgtcatatattgtcatggaaacagtgggtgcagggctgatgctagtgaagccgctattattcttctaccgtcaaacattacagtctttacactggacttttcagggtctggactctctgaaggagagcatgtcactttaggctggaatgaaagagaagatctcaaagctgtggttaactatttgcgaacagatgggaatgtatcttgcattggtttgtggggtcgctcaatgggtgcagtcacaagtctaatgtatggagcggaggatccatcgattgcgggaatggttcttgatagcccattctccaacttggttgacttaatgatggagctagtggacacatacaaatatccactgccaaaattcactgtcaaacttgcaatacagcatatgcgaaaaattgtcaagaggaaagctagtttcgacatcatggatcttgataccattcaggtagcaaaacaatgttttgttcctgctttgtttggacatgcaactgaggatgattttatacttccccatcattcagacaagatatatgaatcatatattggcgacaaaaacattataaaatttgatggggatcacaattcaccacgtcctcaattctactttgactcaatcactatatttttccataatgtgctaaaccctcctgaagtggcagaggatcattatttcatgacaccacatggtagccttggtcagggtcattgggatacagaacaagacatagagtatcggttctctcaatcacctacagggacagccaatgctactacaacagaagatgccattgcacagttgcgctctagaaggctcatgagtagaatggaggtcccatctggtgccaccaccgaagacaggactgatcgaactgagggtttcgatagtgatcttggtccctcttcatctagtgtatcaacagcaactcctcccaatggtcgcaacggaaggctgctgactccaacctctgatgatggcgagtatgtggagtactcatttgatagcttgtcagatatgcctcacaccgtggaagatgaagatagatgggcaaatatagaatctggatctgggtgcctggatcactga

SEQ ID NO: 25301 - DNA, 765 bp, Zea mays
  Peptide Sequence Number=SeqID_68676
atggttttgcatggtgttgatgcgaaacgaatgaggtttcacactgacttgaagaacagacggtttgatcatattgtctttaattttcctcgtggtggattcagaggaaaagagaatgacttgcgtatgatcgacttgcacaaggagttggtgtggggttttttccgcaatgcacgccacattgttcggcaacttggtgaagtccatgttacccacaagtctggggaaccatacggcagctgggatcttgagcacctggcctctgagtcttcttttgctatggttgacaaagttccttttcaaagggaagactatccaggttataatcaaaagagaggagatggaagtgaaggatctttgggaggtgtcagtatgaaggagctgggcctaccagttccaggcttctataggactacagatggcaaggacacagaagaacaaagccactgctcaccatcttggtcttctgaaggtaacttgaaatatactctaatctttatcttagaactcttacctatggctaaacttgcaaaattgtggcgggagttgctcactccaacatccaaaggtggtggtggtgcaggtgaaggatttgatgtgacgaagagtggagatgcacgtgttggtttagttggctttccttcgattgggaaatcaacattgttgaacaagctgacagggacattttcagaggacattgagagtgatgacgaggaccttgattttgaggttgatgatggagctgaggatgaacctaaagcatga

SEQ ID NO: 25302 - DNA, 360 bp, Zea mays
  Peptide Sequence Number=SeqID_68677
atggctaccgaaccggcggtgcagtgggcggtcgtcggctatggcttgcggcctctggaggatagtcgtgtggatctcttccctagaggcatctctaatggaactgccgtgcggaggtcgttggatctcgcagccggctcgtacgagcaacaaaagaagtgcagtgggactacttccaccctggccaaaaagatgaaattgcacgaagctaaaaataagaagctcatcaactatgttgatgtcctgtggtgccgaggagcaccggcgagtgggcagcacggtgtgttccgattgcatgtgaaggattaccgactcttgcgagctcgagagctaggagaaggttccaagaaatcgtcataa

SEQ ID NO: 25303 - DNA, 168 bp, Zea mays
  Peptide Sequence Number=SeqID_68678
atgtacctaggagtgccattcgtatacgagtgggttaggaacaagggtcattcatggaagtcacagatcacaacagtgaaagcagttttgatagaagaaggaaaggcgggtcccgtcaagaagtatgatgccgacgcggaggccaagggggcgcccatggagccttaa

SEQ ID NO: 25304 - DNA, 147 bp, Zea mays
  Peptide Sequence Number=SeqID_68679
atggcttcctctaagttgacaagtgataaggacaaccctaaaaagcttcaggataggctcaagtatgtttgtggagacaaagaaggatttgctaatcgtgctgaagccgaggcaaagaggctcccaatgcacctgttagccttctga

SEQ ID NO: 25305 - DNA, 201 bp, Zea mays
  Peptide Sequence Number=SeqID_68680
atggaagccgtggagctgccattaccagccaaggtggagttcgggaagccaagtggttcagcgagaaacactgaagaacttactgttctggctatggttgctgaaaagtttggtcatcaacagttggatttgttaccagttggtgtatctcttgtgcttcgccatggaagacctagctacgacaaagatggggatggctag

SEQ ID NO: 25306 - DNA, 1347 bp, Zea mays
  Peptide Sequence Number=SeqID_68681
atgcctggaagcatagccagcaggtggcgcgagctccatggcaaggactcgtggaaaggcctgctggacccgctcgacatggacctccgagcgtccgtcatcgcctacggcgagctcgcgcaggccacctacgacgggttcaacacggaggcgcggtcgccgcacgcgggcgcgtgcttgtacggccacgctgacctgctggccgccagcgacagcgccggcggcggcgcgggcggcatcagcgaccggtacagggtgaccaagttcgtgtacgccacgtcggggctgcacgtgcccgacgcgttcctgctcctgccgcagccggcgctggggcagcaggagccgtggtgcagggagtccaactggatgggctacgtggcggtggccacggacgagggcgccgccgcgctggggcggcgcgacgtcgtggtggcgtggcgcgggacggtgcggagcctggagtgggtgaacgacctggacttcacgcccgtgcccgccgcgcccgtgctgggctccgcggccgccgcgcacccgcgcgccatggtgcacgggggcttcctgtcgctctacacgtccagcaacgccagctccaagtacaacaagctcagcgctagagaccaggcaagtggatccatgtcgatgacacagttcttaccgagcttacttctacgaagaaaccatcgattctttgaagttcttgaggaggtcaggaggctgatggagctgtacaaggacgaggagacgagcatcagcgtcaccgggcacagcctcggcgcgtcgctcgccacgctcaacgccgtggacatggtcgccaacggcgtgaacgcgcccggcgccgccaccgccaccggcaccagcggcggctcctcttcctctcccgcgcagccgcagccgcagcgggcgggctgcccggtgacggccatcgtgttcgcgagcccacgcgtggggggtcccttcttcaaggccgccttcgcctcgttcgcggacctgagggcgctgcacgtgcggaacaagggcgacgtggtgccgctctacccgccgctggggtacgtggacgtggccgtgccgctgcccatccacacggcgcgctcgccgtggctgcgccggccgggcacgccgcagacgctccacaacctcgagtgctacctgcacggcgtggccggcgagcagggcgccgccggagggttcaggctggaggtggggcgcgacgtggcgctcgtcaacaagggcgccgacgcgctcagggacgagtaccccgtgccggccaggtggcgggtggccctcaacaagggcatggtcaggggcgcagacggccggtgggccctcaaggacttcgagcacatctga

SEQ ID NO: 25307 - DNA, 534 bp, Zea mays
  Peptide Sequence Number=SeqID_68682
atgggcgcaaggcgcactcagagtgacactggacgacaacagtttccttgtgatgagcacgcgcatcgcataggccccctaccgtaccgactaccgcctagcaccagccgtccagccctcgtcggaacgccgcgaatgctcgcgttgcagctgagcgagcgagcgtgcactggaacgggtccccatccgtttgtgatatcccctctcccgccgcatgatgagctgaggcgcgaacagagcagaggaggaggaggaggaggacgaggagaggaggaggaggagcagacctgggcgaaggagtacatgaggctggtgctgagggagcgcggcgccgaccacgcgtggatcaccacgggcgactccgcctccgacgccattcgcccgcggccgcagcgcctcgccgatcaagtggagactggaggaggggggaatttccgggtggttggttcctcccgagtcgaatttgacccgcccgagtgtgcgactgaactgtgggaacagattggaatggaaggctattatttaggactgtag

SEQ ID NO: 25308 - DNA, 663 bp, Zea mays
  Peptide Sequence Number=SeqID_68683
atggaccgcgacctcggcccaaatccggcccgatatatcgggccgtgccgccccggcactaaaatatttcgtgtcgtgttgcgtccacattcccactggtgcacggttctgccgtcttcccaccgcgcgtccgcgtccgcagctcccgtcgccgcaatccgcgcctccaccgccgcaatccgcgcccgcaatctcctgcctccgcccccgcccccccgctctctagcccctgccccctgcgcgcacgacggaaggaggccttctaggggccgagggtgcaccgacggtggggacctggactgtggtcaggcgcatgcgtgttcaagcaggcgctcttgctcttcgtccacaacaagctctccatgtgccctgggcacgcggcacatgttcggggtggtgggcattaccgtcacctcccttgcgccccatgccgccgcggccggggtctgcttcgtcgccttccgcaatgagcagtccgcggggtacgccgccgcctacgacttcctgacgggctccccgggcgccttcctcaccgtctccggcccaggatgcgtccacgggctcgcgggcctctccaaagccaccgcctggtcgctcctcatgatctccggatcctgtgaccaggctgacgccggcaggggcgacttccaggagctcgactag

SEQ ID NO: 25309 - DNA, 531 bp, Zea mays
  Peptide Sequence Number=SeqID_68684
atggcgccccagctccctggctcaccggccgtgcagctcggccccgcccatccgcgctcctcccggctccagccccctctgcccggtcgccgtcgagttccctgcgcgcgctcgtggctcggcagcaacaccagcgaacttagtccctgcatcctccctgctgttgcgtccatggcgcccagctcggatttttgcttggttgcctgccgtttcccggtgccgtggtctcgcccggccatgtcctgtcaaggttgttcctgcacgcgcgtcctgatacccctgcttgctatcaggccgaccgtcagcagctccccggccatgtcttcatccataacaccgtcaaccggtgtatctccttcgatgtcagcacaacccctccgcatcgtcgggctcatcggcacgctgctcgttcacacttcacgcgtctgcgacgtcgtcacatgtctcctcgccagcagtgaacgcctaggagaggaaattcgagaaggtttgtatggtaaggacaacccctatgctgtgatgcctatctag

SEQ ID NO: 25310 - DNA, 255 bp, Zea mays
  Peptide Sequence Number=SeqID_68685
atgctccaccccctcccccttcctgttgctggggccaccggggctcgccaggccctcctcgtggtgggggaggtggtagaggctggaacgcagcatggatcaagcagtctcattagctgcgagaagcaggcgattcgaatcgagtttttaaaccttgcaagtgaccgcacttgtacccaccataaccggaatggaagaccacgtctcaggtcgcatgaggagggcaatctgctgccaggttcactcaagtactag

SEQ ID NO: 25311 - DNA, 366 bp, Zea mays
  Peptide Sequence Number=SeqID_68686
atgggcccggccgtggctggcccggacggtccgagctcacgtgcggacggtccgcgcatgtgcagatcggctgatttactgccgatttgtggttgctcaggttggccaggaacttcgctctcgcctcttgaatcagctgctccttatgctcctcgaactggagctgttcgtcaaccgaactatcccttgaatcggccattgagggccgattttgatgaggacatcacctgcaacatgagtacgactacaccagcagcacctccacatcaagcgccacttccttcattagctgggccaatcactcgggcccatgctagagatcttaactttgtcatgctactgaagaatgagggcccagaagaatag

SEQ ID NO: 25312 - DNA, 480 bp, Zea mays
  Peptide Sequence Number=SeqID_68687
atgggcaagaacaacaagcgcaagcgtgagccaactcctccatcggaggattttggtgactcagagtactcagaggaggagttctcctctgagtctgaggggtctccggctcccatccccctgcgtgagtcgtttgacgactcagacgactcccaagggctcgcggcggaggtctggacgtacatccgggccgtcgagcgctccgggctcgagggctcggatgagtcggagtactcctcggatgaggaggactcgtccgaggaggacggcggcggcgacggcgaggatgacgacgacgacgatgacgacgacgaaggcggtggcggtggtgacggtgacggtgacggcggcggcaggggcggcagcagcggcagcaagggcgacggcgacggcagcaggggcggcagcgatggcggcagcagcagcaggggcagcaacaagggcgacagcggcggcggcagcaacagggccagtggctag

SEQ ID NO: 25313 - DNA, 390 bp, Zea mays
  Peptide Sequence Number=SeqID_68688
atggagaagcttctgcgcggtgtccaaagcagggcaggtggagctcgcgcccatggaagaagaagggcaggggacgccatggctggccgaggggaggtgcttgctgctcaccatggacagcagagagagggaggaagggatgggtgccatgggagcagcttcagtgcgccgaggaagaagggcagagagcacgtagggaggtggaggtgccatgggaaggggcgagcagaattgctggcttcctatgcgccggccatggaggaaaagctcctgcttgcagccgtgtgggagaaggaggcagaaggctgtggcggctgcaaaagaataggggtgggagtgaaaaatggccaagggcaagggaaggggtccatatttatagacgcgtgctag

SEQ ID NO: 25314 - DNA, 678 bp, Zea mays
  Peptide Sequence Number=SeqID_68689
atgtccattacatttgttaacggcttatggaaatctgtcgaggcccccgaagtcttttcatctttaagtcggttcccccttctgccatcgcgccgaagcttccctgcgcacagcttcggctacactcgaccttcgtctggttcaggcttcgtcctggccgtgctccatattcataattctggatccgaaaatacctgttcacataatccactcggaaaacattgtcaaatcatgtttttgaggaccttcggaggacgaaggcccccaacagcagtctcccgtgaggaggggaaacttagactcaacgacgcggagccacacgtcggcgtccaacggatcctctgccttggtgaacaagggtggttgcgtgctcaggaactcctgataggttgccgctgccgaaggtcgcttatgctggcctccaccatgctgctgatggtggggctagcgctgcaagaggtgtcgcataatttcattctactgggccatcagctcctgcactgtgggagctggaggaggtggcggggtaacctactcgttctgcccgcgatgctgcctagctgccatatgaaaacaaagattgtcgccattgttatcccatctcacaatttcgaacgacaagctattatctcatatggaaggaaaaatgccataatcataatattaggttcgaaatga

SEQ ID NO: 25315 - DNA, 558 bp, Zea mays
  Peptide Sequence Number=SeqID_68690
atgaagactctgatgaccttctgtggctaccatcccctggagattgtgatgcaccccttgggactcttccctgctgagaacaaggatgaccccatgtggtgtaaccgtgtgagccgtgtgaaagatgtgtgtgcgatgtatcctgacttggttgggagggtcactgttcaatgcatgagtgcgctgtaccatcttcaggccctgcagagcgacgctatggcacaccttgctaacatcgctcaaaccaccaagctcacccttgacagtcgagaagattttgtggttgacttatcctccgagttgcaggtggagatccgagacaacactattgatgtcttggagaaccagctccatgatgtgcagcgggaactcgaagaggcaaatgaccacctggacatgcaccacttggagatggaggccaatgaggccggaagcgagggagaagaggctccagaggagttaggaccagcccctgtgccaatgggactacctccgcgatgcccccttcacccgcatccagtgtcgcttcccccgctcagggttgatcagtcactttga

SEQ ID NO: 25316 - DNA, 768 bp, Zea mays
  Peptide Sequence Number=SeqID_68691
atggtgccctgcaggggatcctcgacgagcagcgcactggcaaggttggtgaggccactcgctactgctggctgtggagcatggggaggcgctggagggaagggacgccatggacaggagctcgacggccatgggaggtccctgcgcacaagcctgaatggggcgcgcacatgggagcttggagctgctgctgggcgcccggccatggataatcttcgtcatggtgtccaaagcaggggaggtggagctcgcgcccatggaagaagaagggcaggggacaccatggatggccgaggggaggtgcttgctgctcgccatggacagcagagagagggaggaagggatgggtgccatgggagcagcttcaacgcgccgaggaagaagggcagagagcacgcagggaggtggaggcgccatgggaaggggcgagcagagctgctggcttcctgtgcgccggccatggaggaaaagctcctgcttgcagccgtgtgggaggaggcagaaggctgtggcggctgcaaaagaataggggtgggagtgaaaaatggccaagggcaaaggaaggggtccatatttatagacgcgggggagctcatcggcggtgaggagtccggcctatccagggcacaattgaccaatcaaataggggggcggccgaagaccagtgaggacgatcttggccttccggtgaagttctgccgggtccgagggctggaaaagcttcacaagctaatggcgaagctaactgagcggctggcgcggttttga

SEQ ID NO: 25317 - DNA, 201 bp, Zea mays
  Peptide Sequence Number=SeqID_68692
atgacaagggagaaaagtatgttctcctacgagaaaaacgatgatccccaaagagctatcacattcggggatggaaatcaagcatacctctgtacaggcggtttggttcgccactacacaggcggttccaggaaccgcttgtggtgcaccgcctgtgatgtaaaacaacatcacaggcggtcaatcaaaaaccgcctgtga

SEQ ID NO: 25318 - DNA, 204 bp, Zea mays
  Peptide Sequence Number=SeqID_68693
atggatgctaggaggcctctaagagatgaaatggaggcaaggatgggtgtggaatctttgcggaatggacttttagaagatctgaacatggaaaaatttgaggagaaacgccttagtgacctgggctatctatgtggaatgatggaagcgcttaatgttccattagcagatacacttgtagtggcattctgggaggggggatag

SEQ ID NO: 25319 - DNA, 741 bp, Zea mays
  Peptide Sequence Number=SeqID_68694
atgtcgacaacaagaccagggtggcacagatccagaactgttgcacgcacgacacgacgacgaggacctaggatggacttcacggcgcatggcgctgggcgcgtaaggagcaggacgcacaccggcgagctgagcgacggcaagaagctcaacgcatggcaccagagagctggaacagacaagctgcagaccacgacgctggaggaacctcatgccgagcgcacgcagcagccatgggaggaagaacggctaggcaccggccaacaggggagctcggctggagagcagcgagcaggaacaatcggccatggattgggcgcctggcgagcagacagagggaggaagcgagggcgcttgggggaggagagtgactgcgcgcgcaggaagctctgctggaggagacggaccacatctgggcaccagagacgagcggctgggcgaacagggagggtggtcgagcgccatgggaacaggggctgggcgccgagcggaagggagccggagcgcggctggagggagaagactaggggtgagccagggagccgagcatcggccaggggcacgcagcgagaaatgagaggccacgacaaagggaagagatctaggcgatggatatctctgcaggaattgagcggcggaagaaaaatctccacgcccgcccgcggcagtgagcggtgggaggatgaggatcggctggaagtgactcagaaaaaaatcaggacgccgtgtggagttacgtga

SEQ ID NO: 25320 - DNA, 474 bp, Zea mays
  Peptide Sequence Number=SeqID_68695
atgtcgtgtgctcctgccatagttagcgcaaacaccaaaacaccaaaaggagaaaaaccaacgacaaaaacaggggtgtactgctcacaaggcgctcacactagtgctgttatcaagttcttatccgttcttaccaagccacagtggtgcaaaggatggatggaactagcagaatggcagtaccgtaaatattgtactagtgatgcaaaaaaggcactagtagaaatcacaggagaaaaacaaggaaacaatgttgactcggaaaaaacgctcgagaaactcaccgatcaacctggaaatctgataccaattgatgtagctgaggtgcccgatctttcggcgagtagagataattccgatttggcggaagatgacccttgcgatccgactacgacgagcaagcccgaggcgccaatgcaatcgctgaaccaactccctgtggttaccgaccttgctgatgcgagatcggcctga

SEQ ID NO: 25321 - DNA, 132 bp, Zea mays
  Peptide Sequence Number=SeqID_68696
atgggtatgaaaattgacccaaacccgtaccctaatgggcacaacacgtacctcggcgccatagcctatggcgccgagctgtgttacctcggcgccataggctacggcgccgagcaaagggtccaaaaatga

SEQ ID NO: 25322 - DNA, 297 bp, Zea mays
  Peptide Sequence Number=SeqID_68697
atggtctcagagtccaaggagaccaccctgcgatttgtcaacgtctccaggatggcgaagctgcaacctgacgcctccctgaccctgtcctttttgttacctctgcagatgagggaggcggcgatgttcttctgtggtgacccatcgacgtcgcagtgggtcgaccaacaccatcagcacgtggagattcacagagcccgatacttcattaagagtctaaccattcgaagtgatgtcgggaggatccgccaagagggagatggaaatggccacaagccatgggaaggctccatctag

SEQ ID NO: 25323 - DNA, 216 bp, Zea mays
  Peptide Sequence Number=SeqID_68698
atgaggttcctccagcgtcgtggtctgcagcttgtctgttccagctctctggtgccatgcgttgagcttcttgccgtcgctcagctcgccggtgcgataattaatcacgtgatgcgaaagatgagccaagtcgaccccaagcgcggactgattcgcgaggtgatgcggatgatgaacctgaagacggttaaatcaagcaagtgctcggtcgagtga

SEQ ID NO: 25324 - DNA, 228 bp, Zea mays
  Peptide Sequence Number=SeqID_68699
atggccttgattaaggattgggtattctttgctttggaatcctgggaccctactgaattaatggaattaggaggcagagcggcataccatgtaaaagcggtaataataagggataaagaaaataagcaaacacgaaaggcttctctaacggtcaaattgcctagatgtgctaagaattggcctaaggtgctgtttggttcacatatttataacgtaatgggtaattga

SEQ ID NO: 25325 - DNA, 924 bp, Zea mays
  Peptide Sequence Number=SeqID_68700
atggaggaggcgatccccgccaagcgcgcgtcggtggacgccatcaccaccaccaccacctgccctcgtctcccgctggtgacgcacacgctcagtggtgccgtgacgccgacgaggggacgggacacatggaatcactcgacggcgagctgcttgttcttccgccacgacgataccgccgagcgacgaagcagaggagagcagatccagatctccgcctgcccgcaaacatggggacgcagacctcgatggtcgtcgacgatggctctcaggggcgggcgcgacagtgtgataggtggggagtggacgatggtgcatgggtttgggactgggcgcggagaggggcgcaacagatggtcgcgcgggggcgggggtccaccgaggaagatgccgctgcacgaacaactctgcgtcctctcgtggatgcaagggattgttggggaaggtcagcgtggtggctacggtgtcagggagagaaaggagaatgatgggagcgggaggcgagattcaggggattgttggggaggcgaccgcagcgggcacggtgtcgagaagagaaaaatttgggagtgggtgcccgggcggatggaatggtcgggtgatcgcggaggaggacagggcagtgctcgacgcgggacggggtgcgggaatgacgggagcgggggcacggtgagggtcgacgacgtcgaagcagcgaaatcagcagggtcgacgaggtcagaagatcatgagaagtcgcgtgaggacgcttcccaaaaaccttattcgccctctcccggtgcaggatctcgagggcgaagggttccagagacccgctctcctgatcgcagatgcacgtctgcggtcgggatgaagagaactgaaggcggctcaactatgaagagaggcgaaagcaaaaactgggatgatttggatgctggctga

SEQ ID NO: 25326 - DNA, 741 bp, Zea mays
  Peptide Sequence Number=SeqID_68701
atgtcgacaacaagaccagggtggcacagatccagaactgttgcacgcacgacacgacgacgaggacctaggatggacttcacggcgcatggcgctgggcgcgtaaggagcaggacgcacaccggtgagctgagcgacggcaagaagctcaacgcatggcaccagagagctagaacagacaagctgcagaccacgacgctggaggaacctcatgccgagcgcacgcagcagccatgggaggaagaacggctaggcaccggccaacaggggagctcggctggagagcagcgagcaggaacaatcggccatggattgggcgcctggcgagcagacagagggaggaagcgaggacgcttgggggaggagagtgactgcgtgcgcaggaagctctgctggaggagacggaccacatctgggcaccagagacgagcggctgggcgaacagggagggtggtcgagcgccatgggaacaggggctgggcgccgagcggaagggagccggagcgcggctggagggagaagactaggggtgagccagggagccgagcatcggccaggggcacgcagcgagaaatgagaggccacggcaaagggaagagatctaggcgatggatatctctgcaggaattgagcggcggaagaaaaatctccacgcccgcccgcggcagtgagcggtgggaggatgaggatcggctggaagtgactcagaaaaaaatcaggacgccgtgtggagttacgtga

SEQ ID NO: 25327 - DNA, 1620 bp, Zea mays
  Peptide Sequence Number=SeqID_68702
atggaggtagtcgagttagtcccttgcgcccgcaacaagtggggcaattggaatgagttttggttttacatcgcggagggtaccatcgaagaccatgaggggctccccgtgtctgagatgtgttcgcatttttactcagcatacccgccctttgaggtggcggaggaagatgcggacgaaggggcccttcggtgcgccgccggcctgagcagtgggcgcgatttggttgaagaatttgtggcgtacggggtatggaccttggcgcatggctgggcattgggcgaagtgtgccctcgccagatgccctcccatggtgggaagctggtgcgaagtcctgccttcgcgctggatctgcaaagccgcgatccggccgcctttgtgcgtgaggcggaggatggggcagtgcggatcgttggtcgatacgtgccgaggacagagggccaacgtagctgggatatccgcgggtcgaatgaccatttgaacagggtttttgaattgaatggactgccgtataacggctatcccggccaagacgatgtggaccgccgcgggaagaagccggtggtagagtctggagacgaccctgcgccggcggccgccccatcctcgaagaagaggaaactaggtactgctatgggaggacttggggtttccgatggttttgctagagaattgatgaggacatgcgcggccccggggggaaggatgtcttcgcctgagctccgggagtcttcggcgcggatgctgagggttaccgggggttggtggcctaggaatgttcctatcccccacgcggccggcgaagacttttttacatctcgcatggttcgtgagtggaaagtggttccttacgggcggaatattgctgctgttgtgtcggcagtgatggacaaggatcgccaaggagttgcgcagaagcgccaggcggtcgtcaggcttcatgaagccaggccgaagaggaagcggggggctgcgaaggctacggcccccggcggaggtcagccgccgctggcggcgaagtcggccgtccctgcatccggcagggtgtcggaggctgtggctgccgccggtggttccaagactgcgaaggccgcatcggcgtccggcagggtgccggaggcggtgaagtcagcccgagggttgccgccgccgggcaagcgcgtcgccgacttcgccaccgacattagtgtggacgactatcttgttgggccagacgaaggccaacttgtcgttgttccgcccgccgcggcgaccacggcagctgctgtaatgccaaaggcgaagggtggtgctcttagtgctggcggcgagatgccggcacttgctgctgtgagggacgaggcgggcgctgtgtcccgccggctggaggagatgaaggaggcactaagtcaggcggctgacttcgacggccgtgcggcgtcgggggcccttacggccgttgtgtctgccgaagtcgagagacttcggacgcaacatgccgacgccgtccgggagaaatcggccgccgacagcaagtgccgcaagctggcggacaaggtggccgtgctggagggggaaaaaaccgacctccggcgccaattggtggaggagaggagggaggccaatgaggccctcgcctag

SEQ ID NO: 25328 - DNA, 435 bp, Zea mays
  Peptide Sequence Number=SeqID_68703
atgctggagcaaggcatcatccggctaaacatgtctcggttcttggcattcgtgctgctaatcaagaagatgttcaaggacaaattccccatctccatcgtcaaggaccatgactctgtcttcactagtcacatgtggcatgacctcttcatgatggtttgcaagcgtcttctcctggtccaacagtatgccaagtgctattatgataactgccatcgtgagactaggcgtgactccatctccaccgaccgacacactcgttggagtcttggcccaagggatcatgattggttcttgattaggataatgattgattcttgtctagaaggtttccataaaaataaggatagcttgctttggaatcaaatgtcaatcttggccgatctctccaactcccttggagtgagggaagccatatggcattgttttagctag

SEQ ID NO: 25329 - DNA, 451 bp, Zea mays
  Peptide Sequence Number=SeqID_68704
atggtgattatggcacacggcgccgaggacaagacggctcagggctggttgtcgtgcggaggtgtgagcatattgggtgaggacggagcagtgcctaactccactggcgcagatgtgatggtggagcaggggaggacggtggccgtcggggaacacatcgatgctgtgcacggtgagggagagagagctgacatccgggccccactggcagagggagagcgggcgcgagagaggaagcggctgatgagtggggccaagcggtcagcgagggagggggagcgcagcgcgggcaagcgcgctggtgggccggagtggtccaagagtggagggggaaacgtgggcgcgcacgagagaggaaaagtattgtccaaaatcggcctagccgagaggggggagggcgagggtggctccttcgaagatagtctttactggtatgaagtgagctaccttg

SEQ ID NO: 25330 - DNA, 477 bp, Zea mays
  Peptide Sequence Number=SeqID_68705
atgaggaaaaaacacggcttcatgccaaaaatacatacatgttcaggccccgacatccacaatgaacagtcaccggcattcaaggtgccattacaaacggaacttcggttccatccccgcgggtatgaacaacctccacaccggagagcctgcggggcgacaacctccgggcgactcgccagcgacctctgcagcagcagcgatggtcccaggatggacgctgcagctggaaggctctcgttcgcgtccccactcaagggacgcgaaccagacattagagccaaagagccggaggcctggagcctagatggtggcggcgatcccgtcggcggcgaggacttcttcagccgccaccatctccgcgccgacgacggaagccatctgcccaccggcagatccccactcggatcctcccggacgggcagcaccggcctccgcgcagaggcgccgtaccggagcaaaggcaggacagcctaa

SEQ ID NO: 25331 - DNA, 519 bp, Zea mays
  Peptide Sequence Number=SeqID_68706
atgggtcagcgcgagacggagcacgaagggggaaggagacaggcaaaaggggaaacccgcggccttcgtgttgtcctgtgcccaggtcgggtcgggcgaggcggaggctcctccgaggtcgaggtcgagtctgtcttccgaggtcgaggtcgagtccaagccccgggtcgagcgaggcggagaccatcgtccgaggccaaggctgagtccgagtcctggggtcgggcgaggcggagttcgtcgtcttccagagccgaggctgagcccgagccctgggatcgggcgaggcggagtccatcgtccgaggccgagacaggggccgagccctggggtcgggcgaggcggagcttcctatggcgcccgaagctggacttggctgctgtcagcctcactctgtcaagtggcacagcagttagagcgatgcaggcggcgctgtcttcttgtcaggtcggtcagtggagcggtgaagtgactgtggtcacttcggctctgtcgactgaagagcgctcgtcaggataa

SEQ ID NO: 25332 - DNA, 456 bp, Zea mays
  Peptide Sequence Number=SeqID_68707
atgacggcgcaggagcgcccgggcgtcacatcacaccagaccagaggctcgcctgtgaccgattgtttcacatgcaaaaacaggccgaaggttattataaaaagtcaggccgaagcacgagtcggcccattagtgataacggagccaccacgatggaccaggtggagtggattgttactgaaagaaaacgccatgtttgccttccttctggcttcaaaatcccgtcgagcagcagcaacaagagctagcagcgcagcaggcggaggaggcctcgcacatacagctcgcccttcatcctctcgccttggtgtcatttcgataggcagtgcatgtgggattaggatatgcgatgatgagacagttggagtcatgacgaagaatcaacagatctggagtagtattcatgcgaaactggtttcagaagttgggctgtgggttagcctcttcaatagctga

SEQ ID NO: 25333 - DNA, 2376 bp, Zea mays
  Peptide Sequence Number=SeqID_68708
atggttgcctctatagggagccgttctcggctaagagctggtaaggaaagcatgaaatcaatcggtgaagaaactgagagcaccagcagagaaacagaaggaagcaagtttcacagattgaaatgcacagatgagggagaaccgtgccttgacaggatccctaatttccactgcaaaagtttgccttcaagatatcgagacacaaacccagaagatggcatcatgcacaagcgcggttctatgtaccagagttccagagaggttagcagactcaggaatctccaagggaggagcaaactaaattattcgagcaataaagacacatttatgtcctttgaggttgccaatttgtcctctcggcctagcacaagtggtgcttgctcctttccactgcggagcaattcatgcaacacaaggtcttctatggggacaaaccatagaattcatcaagcttccagggaggttatgaggttttcactccatgagattcctgaggatgatttgacactcgagagaccacgcagggactgcaatttgttgaaaattgatgcagtagacagtttcctggagaaagcgcttgaagaagataccaccaatggttcatgcacaaatgcaacccctcattggccagaagacagttgtagcaaagttggaggatcatattgccaacagccagttggtttttgtcctgatgaaagagatgtagttaatttgcccaagtccttgtcaacgaaggtgggtgtttttgatgctacctgcccatcagagtgtgttggcaacaaaaagattcgttctagtccattcaagaaaattcttgatcctatcatgaagtcgaagtctcaacggaacccttctctgctggaaacagaagattcaaaatctagtagtattccatttggaggaaaaggcagggtattacgcaaatctttattaagtgatatctcaagggctgagcaaagacttgcacctgattgccagacagatggggaagcccagaaattgaccgttacttcatcgccaactcatcttcatgctgttattaaattggacccaaataatggtgctttcggtttcgcgtttagtacaaaaggtccagaagagttaatatatgttaatacatggaaagctggggatgaactgaattggatttacacttttcatagcagtggcaagcaaacaagcactgtgggaagaacctcaaaggacaggcatgggtgtctacctccaattgtaggccagatgcatgtgtcttcctttttgtactctagcgttggagaagatggtattttaaagacctcagccaccactgaatttgttttgtatgacattgctcatgcaagacggagttctgctgttgagagaattcaatgtacagatgccattcgaccatcattctgcaatgctgtcaataattcaatgtctggacataccagaaatgatctggtgcaaagacaaaatactacaaggattgactcagatctatcaacatcttgtctctggtctcgagaagatcttcatcctcatttggaggttgctgccattgtaatccaggcaccacttcataaaacgaagtccaaagaattgaaagctggatcgtcacctggtactatcaaagcggttacagcaggtggtgcacatgggttaccaagggatgatgaggcaagcccatcaccattacttgaccgtctaaagtctggtggagcctgtgattgtggtggatgggacatgtcatgcccaattgttgttcttgacaatgcatatgatggttactgggctgattccgtaatgaatgaaagcaaagctcctatggagttatttgctcagggtaacaaagaagttctccctgccctttcgatgaaggcggatgggaatggacatttctcagtggatttccatgcaggattatcagcattgcaggccttttctatctgcgtctctttgcttcactgttctgaagcttcttcagacattggtatcgagaagtttaagaacaagctatactccagctcgctgaagattctcctgaaggaggaactggcgcttgctccagaagtttggactgaatgtgaattgaaacggttaaaaatgcaccgcgatgaaatcaagccttttggcatcatatccatttcaattcctgcattggttgccagactggtgggtcttctagttgcaattgcccttgtaggtctgacattcagaggcatcgaggtaggcttgtttggtttcagagttgcaattgcaactttgcatctgcctacacctttcttgtcagccgtgccaaagggcagttcaaggtcatggaatgtggaggcggaatttgtgtttctggtgaggtcggatctgcaaaatgaggtgctctcagtgaatcccaggtga

SEQ ID NO: 25334 - DNA, 213 bp, Zea mays
  Peptide Sequence Number=SeqID_68709
atgtcgcccagctctaggcccctgctcctcctctcttccccacaaaacagcagccgcagcgagctcaccgtcgtccatggcgccccctgcaatcttctcccttggctgttcaatggaatgcccgtggaaatattgtgttgtgcgcagcagccccgacatctccgcgctcggttggctcgctgttttgtgaagccagtggacaacacgccgtga

SEQ ID NO: 25335 - DNA, 279 bp, Zea mays
  Peptide Sequence Number=SeqID_68710
atggagcaggggcttgcccagaggacgttcgccatgggaggagcaaagagctcgcagggagaaacggcgaccggaaggggagctcggctgacgtccagcttggaggaaggagctcgccgcaagggaaggccggtggccatgggactcctgtgcgttggtggctgttgctgtggagcagggaggaagaagggcgccagcttgctgctcgccatggagggaagtgcgcagagctgctgcgtgagggagaagaaggcaggggaaaaaggaagtggcggctag

SEQ ID NO: 25336 - DNA, 162 bp, Zea mays
  Peptide Sequence Number=SeqID_68711
atggggctcggtgtatgcggctcgctctgccaaggtggctatgagatcgatggttttggttatgactatggtgctggttgtcagcattgcaaccactgctcaggcgaagatgaagctgtggaaggagacttccaggagttccaagactacgacgagttctag

SEQ ID NO: 25337 - DNA, 330 bp, Zea mays
  Peptide Sequence Number=SeqID_68712
atggccgttggggaactctgctgtcgaagggcgcaccagacagtccggtatatccttcttgaccttcgttttgtgaagcattatacacataaggagataatgcttcaaaggatgaaggtccttaatgatcgacaattgtgttgccttgttcttgactcacaacattcgagaacaagtgaccaacattggcgcccacctctggtgaattcacttccacaaccttcgacaagcattcaccttcgacatgccgccaaagagggcaatggtgcaaggggctgccctgcaaaaactggacacaaatcaggacgcactctccctatgagaagctag

SEQ ID NO: 25338 - DNA, 384 bp, Zea mays
  Peptide Sequence Number=SeqID_68713
atggcgctgcttctagcgcgggcgcgttgggcgctgggcgtcgcggtcgcggggcagtcctgggcgcggctcggcggctggagggcgaggaagccgggcgtcggggcggctcgcttgggcgcgcgggagcgctcgcgtggatggcagggccgaggcggctccacggcatggcgcggttggggaagaaggccagggcgggcccgcctgcaagtgagaggaggggaggggaaaggaagaagcctggcggctggcacagggagaggcgcaatctggaagaaggacgaaccagcaccgaagctgtggctgaagaagcttcggcttagcacaaggacggtggaggaggatgaaactgacctaaaggggaaaatactgcttagtccttga

SEQ ID NO: 25339 - DNA, 414 bp, Zea mays
  Peptide Sequence Number=SeqID_68714
atggagcgtgtcgaggacgtcgaggaccttggaggtctgaccggcgcgccgcccgagtctgcggaggtcaatccggtgctgcccttggatgccggtgaaggcccctcggctttgcccgtgcttactgtggccggcgaagaccctgtgtcggcccctgtgccgacggtcgaagacactctgaaggtggtggctgagccggcagtcgaagaccccacgcccaccgtcgggccttcgcaggttcagggttttgggcctgtgcacgcaaccgctattgacaatgctaattttgtggcggcttcgaccgtggttgccgaagataattctgatgagtctgtgtctatgttttttgagtctgatgattctaggagttcggttgtgtggacggaagagtcctcggatgaggacttggattag

SEQ ID NO: 25340 - DNA, 537 bp, Zea mays
  Peptide Sequence Number=SeqID_68715
atggacctccggcgccagctggtggaggagaggagggaggcaaaccaggccatctctgaggtgcaggctgcgcaggcggaggccaaagtggcgcgggcggagggaagtctcgccagccaacgcgccgaggaatgggaggcaagggttatcaccctgcgcgaccgcgtggacaaggccgaggcctctacacgctcggaggttgagcggacgctcgcacagctcgtggactcgtaccgcgagctaggtgcacggactgctgacttcgaagtgcccgacccggaagcgggccttcgcttcctcgaatggttgcaggaggagttgctggtgctcccgaccattatggagggtttcatgtccttcgcctccctcgtcacctgcgagggggccatgaatgcgttgtcccgcgagggctgcagacactatgaggtcttcgaccaatcagacgagaactttgaacgagagatcttcaaggccgaagaccctgttgtgaagcagtcagcgggggcactttttgataggatgtgggggtcgttgtaa

SEQ ID NO: 25341 - DNA, 426 bp, Zea mays
  Peptide Sequence Number=SeqID_68716
atgactgccgtcgctagcggaaccaagcctcccccgggcgaagctgcgaaagcacgggagctgccttcgccagggaaacgtgttgccgacttcggcacgaacattagcgtggaggactattttgttgggtcgggcgaggggcaattggttgttgtcccgcatgcggtggcaaccacggcatcaacaacggtggttggggtgaagggtgccgctttctgcgcgagcggcgagattctatcagccgctgccgtcaaggacgtggcgggctccatgtcccggcggctgagggaggcgtcgcttcagctgtcgcagcagctaagtcatgtggccgactttgccgaccgcgtggcgtcgggtgccctgactgcagatgtggctgccgaagtcgagagacttcgggcgcggcacgcggatgccgtccggtag

SEQ ID NO: 25342 - DNA, 600 bp, Zea mays
  Peptide Sequence Number=SeqID_68717
atggatacccaaacggaagaatcaagccagattcagctatgtgagatacagacacccaatcatctatcaccccctgttggtcaagcaaagttgactcgcaaagaactcaaagcaagaggtgcttgctactactgcaaaaatgaaggacatattattcgtgaatgccccaagaagcgtctagaccgactagagaagaaagctgccaagcatgacctaagcaatagttcagaagacccaccagttataagcgggcccgccctggccttcttccccaaccgcgccatgccgtggagccgcctcggccctgccttccgcgcgagcgctcccgcgcgcccaagcgagccgccccgacgcccagacgccgagccgcgcccaggactgccccgcgaccgcgacgcccagcgcccaacgcgcccgcgccagaagcagcgccatgcagcccgacgccgcgcgctaggagcctgcgcgccgagcccaagacccgaagccgtgcccaatctaggaactttaccgcgtctgtttctcctctgcgtgaatggagcttcaatacgtctgttccttttcctccccattaatccctccgatgatgaatgcctttga

SEQ ID NO: 25343 - DNA, 381 bp, Zea mays
  Peptide Sequence Number=SeqID_68718
atggccgttgctgatgttcccagccaagagtcatcagtactcggtatgtcacgcgcgttcgacgactactatatcgaggactgtggcgtcatcttggcgccagaggtgacgcaggggaggaccgacaacaatgaccagttcgacatcctcgccaccattggggctctaaatcacccggtctacggagacaacgctgacagtcaagggaacaaacgtattcccgacgatctagggcaaccgaacccaattgaattggtcgaggagtatcaggaggacttaaggatgctagaacaagggagcatggggtatgagcatacctggaacaagctggccgcggcgagggtgtctctgcggtggcggaaacaggattgggggaagtaa

SEQ ID NO: 25344 - DNA, 360 bp, Zea mays
  Peptide Sequence Number=SeqID_68719
atggcgtggtcggtccgagcccaaggtcgggcgaggcgaagacttctcctgaggccgaggccggggtcgggcgaggacgcgattcctcccgaggtcgaggttgaggccgagccctggggtcgggcgaggcggagaccaccctccgaggccgaggctgaggccgagccttggggtcgggcgaggcggagtcctcctcccgaggccgaggttgaggccgagccctggggtcgggcgaggcggagtcctccttcagaggccgaggttgaggccgagccctggggtcgggcgaggcggagcttcctgttgcgcctgaggctgaacttggctgttgcccagcctcactggcgggtggcacaatag

SEQ ID NO: 25345 - DNA, 351 bp, Zea mays
  Peptide Sequence Number=SeqID_68720
atgggcaagaacaacaagcgcaagcacgactcccaggggctcgcggcgaaggtctggacgtacatccgggctgtcgagcgctccgggctcgagggctcggatgagtcggagtactcctcggatgaggaggactcggacggcggcggcgaggacgaggacgacgacgacgacgacggcgacgacgacgacgatggcgacggtgacggtgacggcagcggcagcggcaggggcagcggcggcggcagcaaggacggtgacggcggcggcagcaggggcagcaaccagggcggcagcagcaggggcagcaccaggggcggcagcggcggcggcagcaacagggccagtggctag

SEQ ID NO: 25346 - DNA, 651 bp, Zea mays
  Peptide Sequence Number=SeqID_68721
atgctgcaggccgaggtggccttcgcgcgtgtcttccggttgtgcgcgctgctggaggggtggttcttgctgcaggccgaggtggccttcgcgctgcatcagcgcgatttcgcgctcgaggacctcaccgaggacctcaccgtcctcggtgaggtccgcgccttccagtggggcgaagcctgggggtggctgcgattgtccttcgggcccgcaggtgcgaaaggtgtcgtcttcgcaggtgtggggaactttgtcttcagtgggctcttagtgggtggattgggtgagggcgagggccttgcccttccttgcggcaagcagtgctgccttcgcagcctcgtcagccttcgggcccgtaacacgcggcggccacgcagggcccgttacaatgggccggatcgcacgtgggcctctgagctggacgaggccgcactgtgggatgccttcgtcgccggtcttcgtctggtgccgatcaagcgaagggtgtccctgactgctttgtctgtcagagcagcggctaagcagcggagacttcgggcgaagggttctttggaggacatggttgctggagtgacttggccgtccatcttgccaccgggttggactgtcgagtgggaccctacctcggctgaggaggagcatgaggagtga

SEQ ID NO: 25347 - DNA, 429 bp, Zea mays
  Peptide Sequence Number=SeqID_68722
atggctctcggggaacaggcagctcggcctgactccccggggtcacctcaacttccccggctgaggggtcaagaccccgacgtcccggccccggataccgacggcaccagcctgctcgagggctggcttgacgacccctggcccggcctcagatccggactgaggccaaggcgggcagacatatcgtcgtcttcgtcatcgtcttcaccgtcgtcgtcgtcgtcgtcaggcgtctccggcgacggctccctcgggagcccatccctctcctgccgacgacagagcctttccaaggcgtcccgagcccgcgtccgctcgcgggctcgagccttcttcgcgtcctttttctccttcctcttctccacggcaaccctccgcgcagctcggtccaccgcgtcctccgggaccggtggccgggaaggcttgtga

SEQ ID NO: 25348 - DNA, 651 bp, Zea mays
  Peptide Sequence Number=SeqID_68723
atggagactctgtcggctaaagatcagcaggagttcgaggaacacaaggagcagctgatcaaagaagcgcaagcaaaattcttgcacaacttcaaggtggacaggaatcacaaggtcgtctggaacctggggatgacagtcacagtaggtattggggaatatgtcgatggacgcataaggtgggtgtcacaaaggagaataagggcaagggtgactatggcggtggctgacaagggcgaggctgatgtgatctctaatgaggatgactcattgggaggaacgaacacgttcaatgacgacaccctaaaggactaccaagatcctgatgagaatggaggcgagctcgacgaggacgaagacctcgataagctggtggacatcgacagaccttggacacttgagcgacttataaccagagttcctgatccaaaggctcttgtactcgaggttcccacatcagcagctcctaccttagcagctctcgctctagagttccgcccgctagaggatctggtacccgagtacacgaccccgatcatctacgatgtcatcataccctccgaggtctcatgtagcgatatggaggacatactccatgacctgccacactcctgtacttcaacaatgtgtgaacacctcgcacgtgcctag

SEQ ID NO: 25349 - DNA, 318 bp, Zea mays
  Peptide Sequence Number=SeqID_68724
atggccgccccccgcctcccaccgcgccgagccgccgcccttgcagcccaggcgcggagacgaggccgcgcccgtgctgccgtgcagctttccgcgcgcgccgccggcgtttacgttagggagccgtcgcggctcaccgcgaaggcgtccgtgactgtgaggtgggccgtgggcgacgagaggaagggtgtcgggtggcctcccagaaacccaaaatttgtcgcctgggattgttatctgggccacgcagctccagtgaaggcacaatcaaacaggcctaaggacctttttttcctactggtgggctataacgaatga

SEQ ID NO: 25350 - DNA, 1248 bp, Zea mays
  Peptide Sequence Number=SeqID_68725
atggaggacttgagtatgatgaccccgaccactgtgattgggaaaattgcggcctttgaggtgtcaagaaaaatgtgtcggggagaggagccaacttcctcaaggccatatgcttttgcatgtgatgaaaggaagagtaaaaagaaggctctcactccaagttcctcaagtgaaaaagaggaagaggaagataatgatgatgaaaaagataatcaaccatcaacatcatcctccgagtacgaagaaacaatccgacgcgtcggaaaggtagaagatcttctctttaacattgacaggaaagagcaaagaaagagaggatgcttcgcatgcggggagaagggccatttcagggacagctgtccaactatggtcgaacccaaaaaggagtggagcaaaggcaaggcgctaacaagtgtcaaaacttgggatgattctttaagcaaagatgaaccttcaaggacgcgcagccatcaatccctcatcatgctcatcacggtcatcacgcaagtgccttatggcaagagctctcaaaatgactataaaggtttgctagaaaaatttgaagcttttgcaaatttgaattgtgagctatcaactaaaattgagcaattagagtctagtgttacatccacagctaccgatgatggccttattaaaaagaatgaaaaacttaaggctaagttagctagttctcaagaagctattgaaaatttgcaagagaaaatggaaattcttagcatacacaacaatgagctaactactaagctagaaaacattgaaacatgttcggatgaggttgcaaaggaaaatgagcaattaaggcaacaagtggctcgccttggcaaggctttgtatgacaagaaaggcaaagccaaacaaatccgacctccacaggataacaccactgcgggagtgaataagcctatggagggagaaaccgtgatttgtaggctatgccacatggaaggccataagtctttccaatgcaaggcaatggtcgaggataagcaaaagcaaaagctcaagcaaaagccaacaagcaagatctccaacacctacatcaaaaaggtggacaaaaaggctgctacaccatatttgatcaagaagaaaaagaatgggaaggtgatagcaatcaagtccaacaagcaagccaacaaaggaaagggggccaaatgcatctgggtgccaaaagaaataatttcaaccatgaaaagcaccaagaaggtttggatcccgaaagggaaatga

SEQ ID NO: 25351 - DNA, 498 bp, Zea mays
  Peptide Sequence Number=SeqID_68726
atggacaaatattcctgcaagcacaacgtgtgcacctacaacatcaggatgtctgggtacttgaatggagagcatgtggagaaagcacgaacactatgggatgagatgattcaggaaggggtccagcctgatataactgcgtacaacacaatgattaacatgaaaaggaaggggtttgtgttggcgccagaggttgttgaggaattgctggatggattatgtaaaaatgggagggttgaggatggcttgagtgttttgcgagaggagatgaagagggaagaatttgtgccaacctggaggagttacgaggtgttgattatggggttttgtgatggatggaaggtggaggtggcaatcagactccaagcagagatggctggaaaaggattcactgctggcagcgaggtgtactatgcatttattagtgcttatgagaagtctgaaaactatgagatggtcgagaagttgaggaaggaaatgccagcgatgggcacttag

SEQ ID NO: 25352 - DNA, 228 bp, Zea mays
  Peptide Sequence Number=SeqID_68727
atgggcgaattagttcatccgaacccacaacaatctctcgccggggttggggctccatcgccggaccaccatgcgtcgtggtcgaggcttatggctgcgtggttcaagaatcctgctcgggggtgcccatcggtggtccaccaccgctcggagggtgccgccaaagccggggtaatctctgggagggagatgacctcggggccatctgatttaaatagatggctctga

SEQ ID NO: 25353 - DNA, 912 bp, Zea mays
  Peptide Sequence Number=SeqID_68728
atggttgtctttgtcatgcaacaagctgtttggaatgttgacactaataatgaggcagttcaaggtttcaggagatctttacatgatgaggctgctcaacatgaggaatctgaagttatggatggtgaggatgacgatgatgaagacgatgatgacgaggatgatgatgattatgatacaaagaagaacaagggaactgctggaggggaagggcaacagggaaaacgacctacaaagtgcaagcagcaatactgtgttcttatgcttggggtgaagatggttgccactctgaggttcctgagcttcaagaagaagcatagggggagggaggtcactgtcatcgactgcacgtcgccgccagcggcatgtggtagtccgctagctgcagcggcggtgtgctctttgcaaagccttggagctgcctctcctacaaagtctgaacttgcagagatagtcccacaagagaaatcaccaaaaggtaatgcttcatttttcagcttccattcaaccaatgccgccgagtccaaggtcttctacctcaagatgaagggcgactaccacaggtttcctctgactgtttcaccattattggaagcaggacaggcagagagccttggaaccgaactcttggagatggtgcctagcagggaagaggagattaagttgaaagaatacagggaggatgctgtgtcgacttttgtagttgatgattatgtgagacttgagtttaagggctcaactttttccggttcttggaagtcatttagtagccctaagatttcatcaacattcttggtagtaattgctatagtatcaaatgagattgtgatgtttgagaggaggattggtcgtcttagtacattgttcctggccatggaggaaggcttcctcgcgctcgtgtcaagcctgtga

SEQ ID NO: 25354 - DNA, 465 bp, Zea mays
  Peptide Sequence Number=SeqID_68729
atggggtactcaacattttgttccatgacaggtcttgtgaatgctctgaagttgatccagcctatcaagaacaagtttttaggtgttacctatgcaggggttgccgctttggggctcggcacctacgacgcgcacatgttctgccccaagaaccctgcgtacaaagaggtttggcacacatcgtccctgtaccatctcatccacaccgcggcgctgcttggggcgcccatcaccaagcgccccaacgttgtttggcacacaacgtccctgtaccatctcgtccacaccacggcgctgctcggggcgcccatcaccaagcgccccaacgtttggagggctcctcactactggaattgtgctcttctctggaacgtcagaaagattacgttcactgtgtcaacaactgttggcaaaaaactgatggctggatctacaagtactgtgaaaaaggcgaataattcatga

SEQ ID NO: 25355 - DNA, 426 bp, Zea mays
  Peptide Sequence Number=SeqID_68730
atggcgcttcccccctcctccttgcggaaaggcgacgaaggggcggtgaggctgacaaaggctaagtccagcctcaggcgcagcaggaagctccgcctcgcccaacctgggcctcagcctcagaaggaggtccccgcctcgttcgacccagggctcggcctcaacctcagcctcggaagacggtcttcgcctcgccccgatcccagggctcggcctcaacctcgaccccagggctcggcctcaacctcggcctcggaggatggtctccacctcgcccgaccccagggctcggccttaacctctacctcagaaggaatcgcgtcctcaccccacctcgacctcggcctcaggaggggtctccgcctcgcccgaccttgggctcggaccgaccatgccacagggggtacatcattaccctacccctag

SEQ ID NO: 25356 - DNA, 1158 bp, Zea mays
  Peptide Sequence Number=SeqID_68731
atggaggcccaggcccacacgtcatgtaaccggcgcaccggttactacgtgcgggaaactgcaccgccacttgcgccagtaccgcgccttctcgactgcggaaccggcgggcggaagcagcagtcaagtcgtctgcaggctcacgtcccctcctgggatagcgagagagccctctcccacgggaccgggaaaggggatactccgaaagggatccttctccgcgaaggaagtgggccccgagccctcctactgatcagaggtttgaaggctggcccctcgaaagggttcgacagctgcctcagagcactcgggctccgcgcccactactggtcagaggttcgaaggctggccccctggaagggttcaacagccgcctcaggccactcgggctccgcacccactactgatcagaggctggcccccgaagggttcgacagtcgcctcagagcatgcagagcgagggatgactctaggtacgtccgatacatggccgaggctcgggctacgctcccgaggtcaaggctctgcccactcaagggacacgatctcgcctcgcccgagcccagcctcgggcaaaggcagccgacccaggaggattcacgtctcgcccgaggcgccgcctgccctgctccgactgttgtgccactcgacagagtgaggctaacagcagctaagtctagcctcggcctcgaccttagaagacggactccacctcgcccgaccctagggctcgaactcagcctcgactctggaagacggtcaccgcctcgcccgaccctcggagctcggactcaacctcgacctcggaagacggactccgcctcgcccgaccccagggctcagactcagcctcgactccggaagacggtctccgcctcgcccgacccccggggctcggactcaacctcgacctcggacgacggactccgcctcgcccgaccccagggctcggactcagcctcgactctggaagaccgtctctgcctcgcccgacccccggggctcggactcaacctcgacctcggacgacggtctccgcctcgcccgacccccgggcccagactcagcctcgacctcggaggagcctctgcctcgcccgacctcgggctcagaccaaccacgtcacaggggggccatcattaccctacccctagctag

SEQ ID NO: 25357 - DNA, 795 bp, Zea mays
  Peptide Sequence Number=SeqID_68732
atggcggtccgccctttcacccgtcggtctcggcgaaagtggaggagtgcttccatcatttggcttcaaggattttcatcaggcagcccgactgcatccccttgccgatggtcacccaagacggtgaccaccagttcgatggtggggagaagcaagccgggctgcggcctctgccccgccctcagcttcaaggatcttcatcatccttgttggggcggagggcgagctgagccggagctctacctcccgcacgggttcgtgggtcaccctctccttcagcattcaggggagagggcgctcaccggcctagcggaaggggcggacttcgacaacgcggggctagtcggccgcgagcgtcatcagcttcagcgcgttgggctcgctggctcagctggctctggctcggctcccggtcggtgctcgcccgtccgggaggatccgagtggggatctgtcggtgggcatatggctgccgtcgttggcgctgaggtggtggtggctaaagaagtcctcgtcgccgacaagatcgccgctgccgtctgtgctccgggcctccggctctttggctttgatagcttgtcctcgcccctcgagtggggacgtgggcgagggccttatcgcagcagcgtctgccctgaggtcatcgctgctgctgtttggccacccggagcggaggtcgttgtcgctgctgccggagtgggcggcagcgagaacttggggttttgtcgccccgcaggccctccaatgtggagggttcttcgtacctgtgggggtggaatcggagttccgtttgtaa

SEQ ID NO: 25358 - DNA, 567 bp, Zea mays
  Peptide Sequence Number=SeqID_68733
atgcctggctcgctggctcagctggctctggcgctgcttccggtgccacctcccatcgctagggcggagcgcggctacccgcccaccgtacgggcggctgttgcgccgtgtgcaccgggggaccgcccaagacgtcgcacgccgctaaggcggcgttcgtgttattggattgtcttgtcctcgctcaggcacgacgcccccgcgcggagccgcctgagacggaggtcgttgtcgctgctgctgcagaggttgccggcgagccgcccggagtttgtcgtctcacaggccctccgatgtggaggttgttcaaacccgcgggagtggaaccagagttccttttgtaatggcaccttgattgccggtgtgatgagtgaggtatccatatcccagaggcgtaggagtccctcggctcggtcggccttgccacttaaggcttctcttgctcagttacagaaccctcggctgctctgcgatgagccggagccggaggcagcggtgtcagcatggacagaggcggagtcggctcgaaaaggggcttcgccggcccaggagcaggtggcttcctag

SEQ ID NO: 25359 - DNA, 771 bp, Zea mays
  Peptide Sequence Number=SeqID_68734
atggagcctggcggagggacagctgtcggagttgttgagtccttgctgacatcctcttgcttccgtaagggggctgagagccgccgtcttcacagagtatgcagggcgccatcatcgcctatctggcggagcgagccagatgggacgccggtcttgttccccgtggcccgagtcagctcagggttgggcgacgtggaagctcctccgaagccgaggtcgagtctgtcttccgtggccgaggttgagtccgagcccccgggtcgggcgaggcggaggtcgccggctgatgccggggcggagtccgagccctggggtcgggcgaagcggagttcgtcgtcttctggggctgagcccaagtccgagccatgggtcgggcgaggcggagatcgtcgtcttctgggacttagcctgagtccgagccctgggtcgggcggagttcgccgtcttccgggacttagcccgagtccgagccttgggtcgggcggagttcgccgtcttccgggacttagcccgagtccgagccctgggtcgggcggagttcgccgtcttccgggacttagcccgagtccgagccctgggtcgggtggagttcgccgtcttccgggacttagcccgagtccgagccctgggtcgggcgaagcggagcttcctatggtgccttcgaccgggcctgactgcctgtcagcctcactctgtcgagtggcaccgcagtcggagcggcgcaggcggcgctgtctttctgtcaggccggtcagtggagcggcgaagtga

SEQ ID NO: 25360 - DNA, 483 bp, Zea mays
  Peptide Sequence Number=SeqID_68735
atggtgacctccagtttgatggtgggggaaagcgagccgggctgcggcctctacccctccctcagcctcaaggattttcatcaccagggctggggaggggacgtgcctggctctcggacccgagcggcttcggagccgttctcggtgccggctttcgccgcggcatctggaagaggttcttccgccgacgagatagctagggccgcccacgggccgacctccaactctacggccttctgcccgtccttgcctcacgagtttgggcatgggtgggggcctcttggcagcagcatccgccctgaggtcagcgctgccgctgttcggccccccggagcagaagtcgtcgtcgtcgccgctgctagagcgggcgacggcgcgctgttcgtcggtcttctgtcgctccgcaggctcccccccccatcgagtggggttgttcgtacctgcggaggtggaaccggagttccgtttgtaatggcactttaa

SEQ ID NO: 25361 - DNA, 321 bp, Zea mays
  Peptide Sequence Number=SeqID_68736
atgttgcaccctgcccacggaggtgtgcggatctgcggcggcgctattactccggcgggttctctctccaatggcggcgtcggcctttggtggtcaaagtggcacggaactcagcacgtggcgagcaggaagggttgcggagggcgcagggggtcttatccccatgacgcggcgggctcggaccagctgttccacaaatcccgtcaggtggcggacgactcggtccaggccgttgcggaggtgagggatgacagggcgagcccacccgtcatagaggcaaaaagacagcctgagcgcgagatcgtgggcgccgccaagtag

SEQ ID NO: 25362 - DNA, 492 bp, Zea mays
  Peptide Sequence Number=SeqID_68737
atggctccggccttcccacgccgccgtccaacctcccccgactctcctcctcacaccgccgccgctcccatggcccaccctccctgctcgcctccatggccacctggaggcggattcggcctccccgagtcaccgcccaacgtctcgccgcccaaccaaagcgagaaatccactgggcgaagcttctgcacctcccgaacgggggaggggaggggagcacgccagcactatgtgcctgcgggtagggtttctcccggtccgatggcgtccgccatgtcgtcgaggtcacgacccgccggccacttcggagtgttcccggtgaacgctatggccggcacgggaggcagcgacggtggggtgcagctcgcggacaagctcaagataatcaagactgacaactttgaccccgacgcctacgtgcagtccaagtgccgcgccatggacgagaaggtgaggaatccgtccgccctgcgatttcgcctccagtgttag

SEQ ID NO: 25363 - DNA, 558 bp, Zea mays
  Peptide Sequence Number=SeqID_68738
atgatttcctacgccgcgtgtctggagggaaccgacgtcgttcggctcttcgaccgcaggatcagcgcaagacgagagcccgggtttgttttcgacaaggcatgcctactgagttacaaccatatgagctttggcgggggaccgctcgaggttggaacggaggaggaggctgagaagctgaccagtcagaacgagaaggattcagccaacgaagcagatgtactttcagctcctccaaaactggtttacaacaactttgtcttacggttgtccagggaacttttagtggctgttgccagtggatgggataagcatgtagagatcatcgacaaaataatcccccaagcttggaaggttggatgccttttcctaatcttttgtgttgattcatcaaatcccttcgacatgcatcaagcattcaagctggttattatgtttatcagtttggtccaaacatatccttattctgtatatgaaatattgagatcttccatagttttcattgttacacaaccattgtgtcggtgttttgacccgaggatcctaaccaacaagtga

SEQ ID NO: 25364 - DNA, 639 bp, Zea mays
  Peptide Sequence Number=SeqID_68739
atgtctctggagtataatgtgtggacagggatcttcgaactagaacccatggcaaagagggcgtcgttccacctccgccatgatgaccgcgtcaaaaaagggaccggaaaaggggatatttcgaaagggatccttctcagcgaaggaaacgggcccccgagccctcctactgatcaggggttcgaaggctggcccctcggaagggttcgacagccgccccagagcactcgggctccacgccctttactgatcaggggtttgaaggctggcccctcggaagggttcgacagctgccccagagcacgcagagtgagggatgaccctgggtacgtctgttacatggccgaggctcgggctacgctcccgaggtaccctaggacatttccgagaccagcgggaactatttgtaatggaatcccaccggagggaggcatcgagccctcggaccctgtcgaaagggtccaggttcagcaaatcacctgcaggctcgggggctgctctcgcaacccggctacggccaaactgttgacagcgtcaacaaaccagcctaaaaactcggaacctgaccatgcacccgggctacgaccaggccgcatgagggaacaaccaggccgaccgaggcatcacgaaaagcattaa

SEQ ID NO: 25365 - DNA, 1350 bp, Zea mays
  Peptide Sequence Number=SeqID_68740
atgtctttgtgctcccttgtgcatcgtgtctttccaccttccaagcccccggatgggggatactccccggctgcacccctccgccggcggtcacccgagacagtgaccaccagcccttgggtggggagaagcaagccgggctgcgatcttggtcccaccctcagcttcaaggatgttcatcatcctcgctggggtggaggccgggctgagccggagctctacctcccgcgcgagttcgtgggtcggcctctccttcggcgtttgagggagaggatgttcactggccctgcgggcgggtcggacttcgacaacgcggggctggtcgacggcgggcgtcgtcagcctcagcgcgtcgggctcgtcagcttggctcccggtgccccctcctgccggaaggcggttgccgcgtcgtgcgcacgggaggaccgcccaagatatcgcgcgctgccagggcgacgttcgtgttctggggcggtcctgcctttgcaccggtacggcgcctccacgcggaggtcggtgccccactcgtccgggaggatcttagtggggatctgccggagggctgacgacccctgtcgtcggtgccgaggtggaggcggctcgagaagtccccgttgccgacgggatcaccgccaccatccgcgcttcgggcctccggctctttgtacttgtcctcgcccctcgagcgttggcgtgggcgagggcaaggttgcagcagcgtccgccctgaggccctcgctgctgcagttcggccacccggagcgagggtcgttgtcgttgctgccggagcgggcgacggcgagccgcccgtcggtcttctgttgctccgcaggcccccccccccatcgagtggggttgttcgtacctgcggaggagtccctcggctcggtcagccttgttgtccgaggcttctcttgcttagttaaaggaagccctcggtcgctcttcgatgagccgaagccagggctagcggtgtcagcacggacagaggcagggttggctcgaaaagaagacttggtcggccagagcctggccgggtcgtccgttagcgggatcgacgccggagttgatctgccgaggcctcgggtcaggctgatgtcctcgggggacagctggtcgaggcctcggggtgaccagccgagccgcctgctcgagccggattctcggagaagaccctggcggcgatggcctgggcgtgatgatgaagtcgtccttcagagtggagaccctcggaccgcgtcgccgcccgaggctaggtcggacctcgccgaaggtgttgttgacgctgagggtgctgctgctcccttcgaccgtcaagatccgagcctgcaggatcggattatcttgtag

SEQ ID NO: 25366 - DNA, 834 bp, Zea mays
  Peptide Sequence Number=SeqID_68741
atgaggaagaaacacagcttcatgttcaaatgcccaaatgttcaggcctcagcagccgcaaagaacaaacactcatactcagggtaccattacaaacgggactctggttccactcctgcggacagcagcagcgatggcctcaaggccaacgctaccgctgaaaggccctcgttcacgtcccctcacagaggacgagaactagccattaaagccaaagagccggaggctccgagcgcaggtggcactgatggtctcgtcggcggaggcaaccgcttcgacagaggaagcctcacctatggcgaccaccacctcagcaccgacgacagcggccacctgcccaccaacaccgcactggcgagcggcggccgccccaaagcgcaccggcaggtcctcaccctcgtcctcgccacaagaacgagaacgggaccgtcccagaacacgagtaccgccctcgcggcgtacgacatgttgtgcgaccccctggtgcagccgacaacgcaaggaggacgtggatgtggccggcctgcgcacggcgcgaccgacacccgactcggcgcaccctcctcctcagcacggacgatgaacgtccttgaagccgaggatagggggaggccacgacccggctcgcttttccccaccatgaggcccgcggtcatcatcctgggtgaccgtcggcaggggactgcagccggctgcgtgatgaaaatccttgaagccgagcgatgtctgaagagcgccaacccccacgaggtcgcgctcctccagcaacggcaaggagaaggcaacgcaggtgcaccccatctgggggctcgcaaggcggaagggcgcgattaa

SEQ ID NO: 25367 - DNA, 435 bp, Zea mays
  Peptide Sequence Number=SeqID_68742
atgagctggagccggaggcagcggtgtcggcgtggacagaggcggagtcggctcgaaaagaggcttcgtcggcccgggagcatgtggcttcccaggccgaggaggtgcagcagcggcggcggctggagcagccgcgagcaggaccaatcccggagtcacgccgtcgaggccgtgagccgggctgaggtcctcgggggacatatggctgaggctatggagcggctagccggggtgtctgctcgggccggggcccttgcggagagcctagccatgagggcccaagcgaggtgctggcgtcctccttcgaggtggagatccttccgcccgtgtcgccgtctgaggctgggccaggttccaccgagggtggaaacgtcgccgagggtgctgctgctccccctgcctatgtctgaacctacaggaacagtttgtctgtag

SEQ ID NO: 25368 - DNA, 564 bp, Zea mays
  Peptide Sequence Number=SeqID_68743
atgcaggcggcatgcaaccgcgccaagtgggcgctcttctccgacttccaacacgcccagcatggaggcccaggcccacgcgtcatgcaaccggcgcgccggatgctgcgtacgagcaactgcaccgccacccgcgccactgccacgcctcctcgactgcggaaccagtactgcgactcgaggcaaccctacgcacgacccagcagcgccagcctggcgcaatggggaagcgagcggcgcttcgccttcaccgtaatgaccgcgtcaaaaaagggaccgggaaagggggataccccgaaaaggatccttccccgtgaaggaaccaggctccgagcctccctactgatcagaggttcgaaggctggcccctcggaggggttcaacagccgcctcagagcgcgtgggctccacacccactactggtcagaggttcgaaggccggcccctcgaaagggttcaacgaccgcctcaggctactcgggctccgtgcccactactgatcaggggttcgaaggctggccctcgaagggttcacagccgcctcagacgcagagcgagggatga

SEQ ID NO: 25369 - DNA, 1758 bp, Zea mays
  Peptide Sequence Number=SeqID_68744
atgacgtcggtggttctcagccccctacagaagcaaggagacgtcagcaggatcccagccgcaccgccagctatgcttctacagggctcagacacttctccgacggccacccgcgcggcggagcccgacgagggcgggacaacagttctcggcgccgctccgtcgtcgtcgtcgtcgtctttctcctcctcctccttgttcgggaaggggcgggggagcagctgcgaggagctgcagtccatcagcggcggggagggccggtgcgcgtacctccgcgcccactcgccctgctccccggccgggtacgtcgactacctccgcctcttctactgcggcttcgccggcgcgccggcggcggcggcgtgcgccgcgctcgcgctgtggctggtggtgctcttctacctcctcggcgacaccgcgtccgagtacttctgcgcgtcgctggagggcctctcggcggcgctgcgcctgccccccgccgtcgcgggcgtcacgctgctgtcgctggggaacggcgcgcccgacgtgttcgccagcgtcgtgtccttcgcgtcgggcgacggcggcggggccggggtcggggtcgggctcagcagcgcgctcggcggagcgctgttcgtgtccaccgtcgtcgcgggcgccgtcgcgctcgccgccgtgggcgcgcgcggcggggtcgtcgtcgagtggcgcggcttcgtgcgcgacatctgcttcctcctcctcgcgctctgctacctgctggcggttctcgtcagcggggagaccaccgtctgggtggccgcgtcgttcgtctcgctctacgccggatacgtcgtcctcgtctggacctcccactgctgcgccgagaagggcaagccggccgccgccgccggcctctccgcgccgctcctccacgacgacgacgacgacggcggcggcccgtcgctgccgtcccactcctccaagacggagggcacgtccagggctagagcgatgctgcattgcgtcgcgggcgcgctctgcatgccgctgtacctgccgcgccgcctcaccatcccggacatcgccgggcaccgctggtcccggccctacgccgtggcctccgcggcgctggcgccggtcctgctcgccttcacgtggacctcgcagcgccacaatcccttgtcgtcgcacagcctcgcggtgctcgcgggcggcgcgctcctgggcctccttctcgcggcgctggccgcggccaccacggacgccaggtcccctccgcgcgggcggaggcggcgcgtgccgtggctcgccgcggggttcgtgatgagcgtgctgtgggcgtacaccctggcgcgcgagctggtggcgctcctggtggccatcgggtacgtggtcgggatcaagccgagcgtgctgggcgtgacggtgctggcgtggggcgactccctgggcgacctggtgtcgaacgtggcgatggcggtgcacggcgggcccggcggcgcgcagaccgccgtgtccgggtgctacgcgggcccgctgttcaacacggtggtgggtctgggcctgtcgctggcgctggcggcgggcgcgcagcacccggccccgttcgcggtgcccgcggacgcggcggcgtacgaggcggtcgggttcctgggcgccgcgctggcgtgggcgctgttcgtggtgcccgtccgcgggatgcggatcgaccgcgtctacggggtggggctcatcgccatctacctctgcttcttcgccgtgcgcgtcctcgagacgctcgggctctggagctag

SEQ ID NO: 25370 - DNA, 159 bp, Zea mays
  Peptide Sequence Number=SeqID_68745
atgcaggcggcatgcaactgtaccaagggggtgcaccctttcgactccgacgcgtccagcatgggggcccaggcccacacgtcatgtaaccgggaccgggaaaggggatactccgaaagggatccttctccgcgaaggaagcgggcccgagccccctaa

SEQ ID NO: 25371 - DNA, 1821 bp, Zea mays
  Peptide Sequence Number=SeqID_68746
atgccgcgcacgaagaatgtgtcggcgccagggggaggcgatgatgaggatccttgtcgccccttcaggcaggtcaagggcaagacagtatacttggagcagcaggaaggccacaagaagcggcgtatggacagagcagcccgagcagcggcagcagcagcagcagccactgagcaggccgagctaggagatcaacctcagactccttcagatcagattgcgtaccatgttcgttgtctcgcctcccggcctcgctcctcttctaccaccactgcttcagcttccactccaactaccactttgcctgctcctgtcacccctgttgcgccatccaccacctccactacaccagcttccactgctcctcctcccgctcctgttttcgctcctcctatcccacctgctcgcttccgggagcacgatgagactgaggtgcgacctctagctgcagatcctaggttgtttgaccttcagcgtgctacagcggcacgggtacgtaggttcagatacgtacccgtggagtcttggttaccggctcagagggaccctgctgcagttgacctcttcagcaccaggattcaggaatctttcttcagggcacagatgtctgcacagattgctctgcgagtgcaccgggcttttggacctttccagctttttctgctagccgccggtgctgactctgaggtgcacctcacatatctgcctggccttctgactcttttgactaccagcggcagcttatgctacggcacctctgaccctcctcgtcgccctcacgacggtgtggctccgggcacagctcacgtcgcggctctgttccgctcgcccttctcagttgggtcgcgacgctcaccggcagattacactacagcagcaaagttcctatttcagcttatgagacggacacttctgccgcggatgggatacagggaggctaccacacatatccagctctggctccttggtgccctggtctctcactctgagtttgacgttgttgatttccttatttgtgagatcgaggacaccgtattggatggtatgcgtgctcgtcgtcagctgccatatgctcactacttgtgccacatttttgctcagctgatttggcctccacagttccagggcacacttgaggcctcacgccttgtttttggaccctaccgtccagcgcctgaggatcctgtgccagcttctgctccagtgtttgacactcaggccgaggatgctgctcttcatcagttcgaagctcaggatgcagcagttgatgatgatgatgattttgggattccaccttcgcctccgcctcctatgcctccatgctcacatgatcatgaggctgggagttctcgtgctaccctgttgcccctgctgctattgaccctgcgcttgcttcgattctacagactctcactcaatagcaggctcacttggcagccgagcagacccgccaggcagcagcccatcagcagttatccgagaggatgctctcgatgtttcagaccatacaggacagacatgattctcttcagcagcagcttctccaggatcgggctgagagcagggcattcatggctcttatgctacagcattctgccgccagtgccaccagcttctgctgttaccactactgttgtggcagtatctgtgaccacttcagttccgacagcttctgcagcgtggcctcagttcgattcagtaccagctccagcttctacagcagatcctggatccgagactgactctgacccccagccggcgttcgctctgctgcctcgactggatgcgcccccgccgcctcctcccgctttagatgtgtag

SEQ ID NO: 25372 - DNA, 870 bp, Zea mays
  Peptide Sequence Number=SeqID_68747
atgaagtcccgcatggcactggggttgccaagtccggagaagtcccaacagaagtcgggcacgtcgtcttcctcggacccagagggcccgtacgagggtgacgtccagcaagcctttcgcgagcgtgctggcgtcgtccgtttgcttggaattggcgtgtcgcggggagacgacgctcgtcttcgtctcaaacgcgaggtcgatgcccgatgcgccccccgttggggcgctggcgccgtcgactcgctcgacagccgacgaggcgctgcctcctgcttggccttggttgccccgcctcctccctcatcggcgggggagaggacggggcgagctcgaatgttgttcttccaccacgcagggaagacgtcgtcgattccgccgccggcgggcgggctgtcggccgccattgtcgctgtcgcacggcgggggaaggagtatcatgtcgtagctgctgtcgagggacatgaactcaagactcccgaaacggagcaccgtcccgggctggagaggttgctggagactgcccatctggagcttgacgggaagctgttcgtcaacacgcaacaggcccctacctggcgcgccaactgtcggcgtttcgagaccggggggtccctgaaccgacgagtgaaatgtcactgcgtgccccagcccagatgggtcggcgcgaggccgagcgcgaaggggggagaaaggtggccggagtcgggcgtgagagaggtggaaatcccgcggccttcgtgttcgtcccgcgcccaggtcgggtgcgcttgcagtagggggttacaagcgtccacgcgggagagggagcgagcggcctcacgcgagcgcctgtctcgtcctcgtctccgcgcggccaaccctctgtaa

SEQ ID NO: 25373 - DNA, 633 bp, Zea mays
  Peptide Sequence Number=SeqID_68748
atgggagcagcagtgcagcactaccgtctctccctggaggtgttcgatgaaatgcctaagctaagattatatgccaaattcagttctgaatatctgattttctgctgcactgcaaggtttaaaccgatcttagttctggcatgtacatcttcatcatattcatctttttcctcgtccttctccccgatacaaccatggttatttgtgggtcttggcaaccctggtgagaagtatcaatccaccaggcacaacgtgggttttgatatgatagatgcatttgcgcaatcccagggtatacccctgactacacattacttcaaagcactctttggtgaagggatggttgatggagtccctgttcttcttgccaagccccagacttatatgaatctcagtggagaatctgtcggcccacttgctgcctattataaactgccacttaatcgtgtcctagtgatgaaatatgaaattcgacccaatcctcctaagatcatcctcaaccccttgcaggtgatgaacccctgccaaaacccagcagctgaactcttgaagaaagctttgctgcaccttcccaagggccagttgatccctatcaaacacacatctgttgcgctgaatgcaccaagcacctag

SEQ ID NO: 25374 - DNA, 318 bp, Zea mays
  Peptide Sequence Number=SeqID_68749
atggtgctcgcccaggctcgccggcatccatggccgcagttccctagatgctgccagctctggctccctagacgccgccagctctggctcgccggtctccgggctcgttggagatggcatattacctccaagacctacaacctagtgctcctcgacgtcgacagtcacgaccgcttcctcaagtccgtttgctgcaagcacgacgaggtgctgctcatcatcaaggtctacttcaagcgcaccggtgagcccatcaacctcaagataattgcgagtagcggctcgcaggctccctacccccttatgagttccttttga

SEQ ID NO: 25375 - DNA, 255 bp, Zea mays
  Peptide Sequence Number=SeqID_68750
atggtgtccgccgcgggctcgagcgcgctgccgcgctctcccgtcggggttagggcgaagtcctctgcaccgtcggatccgtgggcgacagttcggattagatatcgggcggtccagattaaagaatacccgtttgcgcaggcagttttgttaaagagccccctgcgagtagaagagcccgttgctgaggatcctggtgagcagcagattgaagtagctgagcaggagctcattgaaggcaagttgtgcccttga

SEQ ID NO: 25376 - DNA, 1551 bp, Zea mays
  Peptide Sequence Number=SeqID_68751
atggccgttgggagactgctgtcgcatggcgcagtgcgccaccggacactgtccagtgcgccagccatgtcagccagccgttggggttcgaccgttggagctctgacttgtggggcctctgggctgtccggtggtgcaccggacaggcgcgcattaaatgcgttgcagtcgatcgttgcgctcgaagtagtcgttgctccgctgacacaccggacactgtccggtgcttcaccggacagtccggtgaattatagcggagcggcctcccattttcccgaaggtggcaagttcagcctcgagttccctggtgcaccggacacagtccggtgcatggatttttttattgtttatacctcccgtacattatctttggtcttcacctccacctacaccttcatccccacctaccgaacatcagccgcggcactgcgcgccgcgctgcccgtcgcggcggcgtggctgcacccgcgcgacaacacgcgcgggatcctgctcgccgtctgcgacgtcgcgctcctgctgcgcggccgacgcggcagggcggggctgcgggcgagggtgcagtccgcctaccgctgcaagttctggcggaacatgatgcgcgccgcgctcacctacgaggagtgggcgcacgcggcgcgtatgctggagctcgaggccgcgccgcgccgggccagcgacgccgacctctacgacgaggagcttgtccgcaataagctccgcgagctcaggcaccggcgccaggagggatcgctcagggacatcgtcttctgcatgcgtgctgacctgctcaggaacctcgacaatatgtgcaaccccgaactgcacaaggggaggctgcaggtgcctagactcataaaggaatacattgaggaagtatctactcaactgaaaatggtttgtgattctgattcagacgagttgcctctcgaagagaaactcgcatttatgcatgagacaagacatgcctttggtagaacagccttgctgctaagtggaggtgcttcattaggatcctttcatgtgggtgttgttaaaaccttggtagaacataaacttctgccaaggatagtttcaggatcaagtgtaggctcaataatgtgttctatagtagcaacaagatcatggcctgagctggagagcttttttgaagagtggcattccctgaaattttttgaccagatgggtggaatctttcctgtggttaaaagaattttgacgcatggcgctcttcatgatataagacacttgcaggtgcttttgagaaaccttacccgcaatctgacatttcaagaagcttatgacattactggtcggattcttgttgtcactgtgtgttctccaaggaagcatgagccgcctcgatgcctaaactatttaacgtcacctcatgttcttatctggagtgcagtaacagcttcctgcgcttttcctggactttttgaggcccaagaattgatggcaaaagatagatttggtcaaaccattcctttccatgctccattcttattaggcatggaggaacgaactgttgctccaacccgccgctag

SEQ ID NO: 25377 - DNA, 381 bp, Zea mays
  Peptide Sequence Number=SeqID_68752
atggcctcagggcggacgctactgcaaccttgccctcgcctatgccgacgctcgaggggcgaggacaagtacaaagagccggaggcccaaagcgcggatggtggcggtgatcccgtcggcaacggggacttctcgagccgcctctacctcggcaccgacgacaggggccgtcagccctcccggcagatccccactcagatcctcccggacgagtggggcaccgaccctccgcgtggaggcatcgtaccggtgcaaaggcagggaccgccccagacacgaacgccgcccctgacagcgcgcgatatcttgggcgtcctcccgtggtgcacgacgcgcaacgcctccgtgcatggaatggggtcctatctggaaaggccatag

SEQ ID NO: 25378 - DNA, 456 bp, Zea mays
  Peptide Sequence Number=SeqID_68753
atgggcaagagtaagaaaggtagcggttcttcgcctcgctctggtgacaagtgcaaacgtgagccgactcctccctcggaggacttcggcaactcggagtactcggaggaggagttctcctccgagtccgagggatctccggcccccgtctctcccccggcgtcgtctgatgattcagacgactcccaggggattgccgcggaggtctggacctacatccgggccgtcgagcgcgccgggctcgagggctcggatgagtcggagtactcctcaaacgaggaggactcctcggactcgtccgaggagggcagcggcggcgatggcggagacgggaacgacgacggaggcgacagtgacggcggcgacggcagcggcaagggcggtgacggcagcggcaagggcagcagcggcgacggtggcagcggcggcaagggcagcagcaggggcatcaactag

SEQ ID NO: 25379 - DNA, 259 bp, Zea mays
  Peptide Sequence Number=SeqID_68754
atgacgtcgattgctctcgagctctctacgaaggcaaagaaacgtcagcaagacccagggccgcaccgccagctacgcttctacggggctcaagcatttctccgccggccacagacaatcgatcaagccaaggatggaggcaagaagaggttcgaggtaccgagtgcacgggagaaggtcaaggagaccaggaacccaaagccaggggtgaagaagaagacttgcaaagtcaaggttgatcgagttaagaagagttatg

SEQ ID NO: 25380 - DNA, 873 bp, Zea mays
  Peptide Sequence Number=SeqID_68755
atgggggactccagcgactccgtgtcggtcgacgtcgagcggatcttctttggcggcaaggggcatcgagtgaggacgaggcacggccctctatcggtttctgtatacggagacgaggacaagcccgcgctcgtaacttatccggatttagccttgaatcaggctgcgtcgctgttgcttcacaatttctgtgtgtaccacatcacacctcaagggcacgagttaggagcggctccaatttcagctgatgtgcatgtgccgtctgtcgatgaccttgcagatcaggtcgctgatgtcctcgattttttcagtttgggttcggtcatgtgcttgggtgtcaccgctggtgcctatgtgctcaccctctttgcgacgaagtatcgggagagggttcttggcctaatgttggtttcacctgtatgcaaagccccctcttggagcgagtggttgtacaataagttacttgacgataggcaggggactaatgtctggcggttccttcaggcaattaataggcgacatgatctaacagaatcgttggagaagcttcagtgccagacgctgatttttgttggggaaaactcacagttccatgctgacgctgtccacatgaccacaaagctagaccggagatactgcgccctagtcgaggttcaggcatgtggttcacttgtcacagaagagcaaccccatgcgatggtgatcccgatggagtacttccttatgggatacgggctttacaggccatcgcagcaggaaagcagcccccggagcacactgagcccgttctgcatctcgcccgagcttctgtcgccggagagcatgggagtgaagctgaagcccatcaagacgcgcatctcacgtaacgtttag

SEQ ID NO: 25381 - DNA, 1725 bp, Zea mays
  Peptide Sequence Number=SeqID_68756
atgggggaaggcctgcggagcaacagaagactgacgagtggctcgccgccgcccgctctgaccacgacgacaacgacccccgctccggatggtcgagctgcagcagcgcaggcctcagggcgggcgctgctgcaatcttgccctcgcccacaccgacgctcgaggggcgaggacaagtgcgaagagccggaggctagaggcgcggatggtggaggtgaccccgtcggtgacggggacttctcgagccgcctccgcctcggcaccgacggcagagcccaccggctccccggcagatccccactcaaatcctcccggcacggcagccgccctccgacaggaggggccaccgggagccaagccaacgggcccgacacgctggaagtgacgacgcccgccgtcgaccagccccgcgttgtcgaagtccgggccgcccgcagggccagtgagcgccctctcccccgaacgccgcgggaaagggtgactcgcgaacctgcgtgggaggtagagcgccggctcagcccggcccccaccccagcgaggatgatgaacatccttgaagctgagggtgggaccaagatcgtagcccggtttgcttctccccacccaggaactggcggtcaccgtcttggcacgctccaaggccctcccctgcggcgcgggggctgggtcccgcatgtcatgcgaaccggctcagagcagaagaagccaaagcgccgcgcgtggcgcacacaaccgtccagcggttacaagcgaccccccacttttgcccagaccaacgggcggaaggagtgggaagccatgcaggcgtcatgcaaccgcgccaagtggacacgcttctccgactcccagcgcgccagcacggaggcccaggcccacgcgtcgcgcaaccggcgcgccggatgctgcatgcaggcaactgcaccgccacttgcgccactgtcgcgcctcttcggttgcagagccaatgctgcgactcgaggcaacccagcggcgccagcctggcgcgacggtcaatgcggccgaaagacaggcggcgcccctggcaggagaagcgggcgacgcttcgccttcgccgtaataaccgcgcccaaagagggaccgggaaagggggataccccgaaaaggatccttccctgtgaaggaaccgggctccgagccccccttactgatcagaggttcaaaggctggccctccgcagggttcaacagtcgcctcagatcgcgtgggccctacacccactactggtcagaggttcgaaggccggccccccgaagggctccacggccgcctcaggctactcgggctccgcgcccattactgatcaggggttcgaaggctggcccccgaagggttcacagtcgcctcagacaccgagcgagggatgaccaggggtacattcgatacataaccaaggcttgggctgcgctcccgagctcaccagagacaccatgttcggtgcccatcgagggtaacatggcgcactcccccctcctccttgcggaaaggcgacgtaggggtgtatgtaaaaaagccgagtctgtccctgatcgccctctcgccctgtgcggaggctcgggggctgctctcgcaaacccggctccggccgaaccattgacagcgtcaacataccagcccgagagcttgggccccgaccgtgcacccgggctacggccagttcgcatgagggaacaaccaggccagccgaagcattacgcaaggcattaa

SEQ ID NO: 25382 - DNA, 327 bp, Zea mays
  Peptide Sequence Number=SeqID_68757
atggtgaccggcgggaggaacaccgggcgtgtaggagtgatcaagaactgggagaagcacaagggcagcttcgagtgtccaacacaagtgcctaagtgtcaaatggtggacaaagtacaaatcaagtataaaggatcacctattcacccccctctaggtgctctcactgtggcgcggtcggtccgagcccaaggtcgggcgaggcggagacttctcctaaggccgaggccggggtcgggcgaggacgcgattcctcctgaggccgaggctgaggccgagccctggggtcgggcgaggcgaagacctcttcccgaggccgaggcctaa

SEQ ID NO: 25383 - DNA, 216 bp, Zea mays
  Peptide Sequence Number=SeqID_68758
atggcggggagggccgacggccatgggagagggcgccgtgagggagaggggatcggctgggaggataggaaatggggcgatggagataggataaggaagataagttactctaaacaggtgtcggggaccataattaggggtaccctcaagacgcctaattctcagctggtaacccccatcagcataaagctgcagaggcctgatgggtgcgattaa

SEQ ID NO: 25384 - DNA, 540 bp, Zea mays
  Peptide Sequence Number=SeqID_68759
atggcgctccctgttgacatggcgggcccgtgcccgaggccaggcgacgtgggggctcctccgaagctggggtcgaatctgtcttccgttgctgaggccgagcccgagcccctgggtcgggcgaggcggaggtcgttcggcagaggccagggcggagtccgagccctggggtcgggcggagcggagttcgtcgtcttccgggtcttagcccgagtccgagccctggggtcgggcggagcggagttcgccgtcttccgggtcttagcccgagtccgagccctggggtcgggcgaagcggagttcgccgtcttccgggtcttagcccgagtccgagccctggggtcgggcggagcggagttcgccgtcttccgggtcctagcccgagtccgagccctggggtcgggcggagcggagtttcctatggcgcctttggcagggcctgactgcctgtcagcctcactctgtcaagtggcactgcagtcggagtggcgcaggcggcgctgtccttctgtcagaccggtcagtggcgcggcgaagtga

SEQ ID NO: 25385 - DNA, 540 bp, Zea mays
  Peptide Sequence Number=SeqID_68760
atggcgctccctgttgacgtggcgggcccgtgcccgaggccgggcgacgtgggggctcctccgaagctggggtcgaatctgtcttccgttgccgaggccgagcccgagcccctgggtcgggcgaggcggaggttgttcggcagaggccagggcggagtccgagccctggggtcgggcgaagcggagttcgtcgtcttccaggtcttagcccgagtccgagccctggggtcgggcggagcggagttcgccgtcttccgggtcttagcccgagtccgagccctggggtcgagcggagcggagttcgccgtcttccgggtcttagcccgagtccgagccctggggtcaggcggagcggagttcgccgtcttccgggtcctagcccgagtccgagccctggggtcgagcggagcggagtttcctatgacgcctttggcagggcctgactgcctgtcagcctcactctgtcaagtggcactgcagtcggagtggcgcaggcggcgctgtccttctgtcagaccggtcagtggcgcggcgaagtga

SEQ ID NO: 25386 - DNA, 192 bp, Zea mays
  Peptide Sequence Number=SeqID_68761
atgcagggttcttggctgaccgccatcgcagcaaaatcaaccaaggacctccctacactgaccactcccctactgcccttgcccctttcggaacatgagtgggtaaaagaagtgatcaagggcacaacttgcctggcacttgagattccagttaccagggtgattcttcagatcctcgtgacctcacgctag

SEQ ID NO: 25387 - DNA, 273 bp, Zea mays
  Peptide Sequence Number=SeqID_68762
atgaccgttggccgcaggcacctatggttcaccagacagtccgatgacgcaccggacagtccggtgaattttagccactttgccccgccaattctcgagagcaaccagttcgccgtcgggccagcctgggcaccggacactgtccggtgcgccaccggacagtctggttctctggaggacatggttgctggagtgacttggccgtccaccttaccaccgggttggactgtcgagtgggaccccgcctcggctgaggaggagcatgaggagtga

SEQ ID NO: 25388 - DNA, 120 bp, Zea mays
  Peptide Sequence Number=SeqID_68763
atggcgctcgcgtcgtgcgcactaccgagagtgttagaaactggtatatcagccgagctcacggttaagagcagccttgggatcctctttgatcagaagaactttggatactttttatga

SEQ ID NO: 25389 - DNA, 453 bp, Zea mays
  Peptide Sequence Number=SeqID_68764
atgctggtagactacacagcggtactcgatggaccaagtgtgtcggtcgaaggcccgacgcagcagggtgtcgagagcgtcgtggaagtgacacccgcgagcggcgtcacgagtgatgggtctagcgatccatccctccggctccagctcctccgagcgctccgtgccgtgggtctcctccagcagccaggatgccctatggtggtgcagggggcatctctggctgaggtgcaggggaaggtggcctctcagactccacctcctgctgaggcgagggggaagagtcatgttgctcctgctcctgctcctggtgtcggcgctccagctcctcgtgcaggcgacgatgcagtctctctaggtgactggactgacctgacaccgtgcgacgcaggggatgctctgccagtcgagaaggcaaaaaggggatcacagacttacgtgcagtgcacctaa

SEQ ID NO: 25390 - DNA, 465 bp, Zea mays
  Peptide Sequence Number=SeqID_68765
atgcgagcgcgggtgctccctggcgggtgggccccacgggtcggcgactcggaccaacaggcaggaaacggcgggagcctaacaaacggggccgcggggaggttgggcccgctagtcagcggtggagggcgcgtgctgacagacggggccctccaggcagtgaccaagagtggggaaagaaaaggggaggctgacgggcgggtcctccttgtcaggaccaccgtctacctcggtagtgcacacgacaggaaatgggggagagagaagagaaagtccggtggggaatttcacctcgggtggagcagggatgaggatgaggctgggtgtaacagtggcagagcacaatcgcggacggcggctgagctctaccagcgacgaattcgggcgcagggggcctggcgacggggaagctccggcgggcttgaagaaccggcgtgcgcagcttgggtgagtgggcagaggtga

SEQ ID NO: 25391 - DNA, 1482 bp, Zea mays
  Peptide Sequence Number=SeqID_68766
atggagaaggatcgtcaagaggctgctcagaagcgtcgggcggtcgtcaggatcggggatcctttccgcgaggcaaaggtgcgggcagccgcaaagtctgccgccccgggcagtagtaagccaatgccggctgtgaagccggccgcccccgggcccagcaaggcttcggctggtgcgaaggctgctgcttctggcgcggggaagctaccctcaggcgggcctgcgaagggacaaaggctgccttcgcctgcgcgaatggacggggcggcagcgcgtgttgccgacttcgacacggacatttgtgtcagggattattttcttgggtcggatggggggcaactggctgttgtcccgcctccggtggcggccacttcgccaacggcggtggttggggcgaagggtgccacgcgagactcgtgggccaccttctgcgtgagtggcgagattctgtcggccgctgccgctaaggacgtggcgggctccatgtcacagcaacttaggcaatggtcgcagcagctgaagcatgcggccgacttcgccgaccacgtcgtgtcgggttccttgactgcggactttgctgccgaggtcgagagtctccatgcacagcatgcggatgttgtgcgggagaagtcggctgcggaaagcaaaagccacagactgtcggagaaggtggccgccatggaggccgagaaggcggatctccggcgccagctggcggaggagaggagggaggcgaacaaggccattgctgattcgcaggctgcgcaagccgaggccaagcttgcgcggacggagggcagtctcgcccgccaacttgccgaggagctgcaggcgaggctcgatgccctacgcagccgctttgacaaagtggagacctcaatgcgtgtggaggtcgagcggacgcatgcacagttcgtggacgcgtaccgggagctgggtgcgcggaccgctaccttcgaggcgcccgaccaagaagcgggcctccgcttccttgaatcgatgcaggaagagctgggggtgctcccaacaatcgtgacgagtctcatgtcatttgcctccatcgtcacctgcgagggggccgtgaatgctttgtcccgcgaggggtgcaggcatttggaggtcttcgaccagtcggacgaaaactttgaacgtgaaatcttcaaggtcgaggaccccgtgctgaagcagtcggcgggggtgctcttcgacaggatgtggggcccgcacggccgagaaacgatggggcatgccaaaggcgttgaggaccttggtggtctagacggcgcgctacccaaggctgcggatgtggatccggtgccgccatctgatgtcggcgagggcccctcgtcgacccccgcgccgactgcagccggcgaagaccccacaccagcccctgcgccgccgtgtgaggacgccttgaaggcggtggtcgagcccgctaccgaagaccccgcggcggcggccgagccttcgcaggtgtag

SEQ ID NO: 25392 - DNA, 267 bp, Zea mays
  Peptide Sequence Number=SeqID_68767
atgcagggaggcgcggactggacagccgggcacggaacaacatgggcggctgggtgctcggcgtcgggcgctgctcggctcgggacagcaggggcgctgctcggctcggaacagcaggggcgcgggtcctccgggcgggtgctcctggacggcgcggggtcgacggacgtgagcaggaagacagccgggcgcggaacaggaggggcggctgggtgctcggcgtcgggcgtcctcggctcgggacagcaagggcgctgctcggcgtga

SEQ ID NO: 25393 - DNA, 117 bp, Zea mays
  Peptide Sequence Number=SeqID_68768
atggggagtcatgatccccgggcaaaacgggaatcacggctcatgggtaaagtaaagaagaagtcgtcgaggcggatctcccaggagttccaggacttcgacgagtccgaggattag

SEQ ID NO: 25394 - DNA, 813 bp, Zea mays
  Peptide Sequence Number=SeqID_68769
atggccgcctcaggctactcgggctccgcgcccattactgatcagggggttcgaaggctggcccccgaagggttcacagtcgcctcagacaccgagcgagggatgaccagggaaggacagcgccgcctgcgccactccaactgcagtgccactcaacagagtgagtctgacaggcagtcaggccttgccaaaggcgccataggaagctccgctccgcccgacccagggctcggactcaggctcagccccggaagacggcgaactccgctccgcccgaccctagggctcggactcgggctaagacctggaagacggcgaactccgctccgcccgaccccagggctcggactcgggctaagacccggaagacgacgaactccgcttcgcccgaccccagggctcggactcgggctaagacccggaagacgacgaactccgctccgcctgaccccagggctcggactcgggctaagacccgaaagacggcgaactccgctccgcccgaccctagggctcggactcgggctcagacccggaagacgacgaactccgttccgcccgaccccagggctcggactcaggctaagacccggaagacggcgaactccgctccgcccgaccccagggctcggactcgggctaagacccggaagacgacgaactccgcttcgcccgaccccagggctcggactccgcccgggcctctgccgaacgatctccgcctcgcccgacccgggggctcgggctcggcctcggccacggaagacagactcaacctcggcttcggaggagcccccacgtcgcccgacctag

SEQ ID NO: 25395 - DNA, 174 bp, Zea mays
  Peptide Sequence Number=SeqID_68770
atggttaagaattttggcagcaaaacagtgcaaatagcagtaaatgctgtgtgccgcagaaagggagaagctcaaaagatacaaaggttgacacagcgccgaagctgtgaagcaggaaagcttcggcatgttcgcagaaaagggaaccgacttaaagatgaaaaggccatttag

SEQ ID NO: 25396 - DNA, 870 bp, Zea mays
  Peptide Sequence Number=SeqID_68771
atgccgcgcgctgctagggcggcgttcgtgttctggggtggccctgcttttgcaccagaatggcgccctcgcgcagaggccggtgccccactcgtctgggaggattcgagtggggatctgccggggggctggtggcccccaccatcagcgccgaggcggaggcggctcgagaagtccccgtcgccgacgggatcaccgccaccatccgcgccccgggcctccggctcttcgtacttgtcctcgcccctcgagcgtcggcgtgggcgagggcaagattgcagcagcgcccaccctgaggcctacactgctgcggctcgaccatccggagcgggagtcgtcgtcgtcgtagtcagagcgggcggcggcgagccgctcgtcagtcttctgttgctccgcaggccttccccatggagtggggttgttcgtacctgtggagggggaaccggagttccatttgtaatggcacttcgaatgccacgccaagtctcgcctgttgattatctgaaacgcttcaccaagcgtgagtcgccccgtgtcaaggtgacgagtgagtacgaacagaggcggagttggctcgaaaatgggaacctggttggccggagcctagctgggttgcccgtcagcggggctgacgccggagttgatcagccgaggcctcgggtcgggctggcgcccttggaagatggttggccgaggcccaggggtaaccggctgagccgcctgctcgggccggattcccggagaagtccccggaccgcgtcgccgtccgaggctgggtcggatctcgctgaaggcgtcgtcgatgccgagggtgctacagcccccttccagcgtgaagatccgagcttgcaggatcagatggtcttgtag

SEQ ID NO: 25397 - DNA, 1047 bp, Zea mays
  Peptide Sequence Number=SeqID_68772
atgacggtggcaggcgggcgggagcagcggtcacgtcgtcagccaggctcacatcccatccagggacagcaagagagcctcctcccacggcgtgaagacggtgcgcccgtgatccgttcctcgaacggctcgcgcacgcgcaacggccaccccgccaaccactcgccccgtcgcattaactccgcggcgggacaggcggcgcctctggcaggagcggcgggcgacgcttcgccttcgccggaccgggaaagggggataccccgaaaaggatccttctctgcgaaggaaccggtctccgagcccccccccctactgatcagaggttcgaagggctggccctccaaagggttcaacagtcgcctcagatcgcgtgggcccgacacccactactggctggcccccgaagggttcacagtcgcctcagacaccgagcgagggatgaccaggggggaccaggtccggcaaatcacccgcaggtacttttgggcgtgcctctgggcccctagccgacccccaacgaacggggcacggacgtccactcggatcatccgcttgcagctcaccggagacaccatgttcggtgcccatcgagggctcgggggctgctctcgcaaacccggctctggccagaccgttgacagcgtcaacataccagcccgagagcttgggccccgaccgtgcacccgggctacggccagttcgcatgagggaacaaccagaccagccgaagcattacgcaaggcattaagacctcgaaggagtgaaaccactcctccgaggcctcgggggctacacccggcgggtgcgctcgcgcgcacccaccggaacaaaatgcaaccgagaaaggctggtccccttgcaaaaaagtgcgacgaaagcctccaagcgagtgctaacactcccttcgaggctcgggggctactgtcggggaccataattaggggtaccctcaagacgcctaattctcagctgggctcggactcgggctcagccccggaagacggcgaactccgctccgcccgaccccagggctcggactcgggctaa

SEQ ID NO: 25398 - DNA, 609 bp, Zea mays
  Peptide Sequence Number=SeqID_68773
atggctcgtcttagacacactgcacgtaagtcggtgattcctttcctgccgtctcgacttgcggagcgtcctctgcaccgcaccgtgtctggtcagtcgagtcacctagagaggctgcaccaccgcctacgtgaggagcaggaacgccggcgccagcacagagagcagcagggctcttcctccccaccccagcaagaggtggaatctgtgaggccccgttcctctgtggcccagctggaggcaccccctgcaccaccgcgggacgtcccggctgttggaggagctattggaggagaccccgacgactacgactcacaccacggcacggattcttctgagccgcaggaggcggaaggatgggtcgcccgacccctccccatgacgccgctcgcggtgtcacttccacgacgcactcgacaccttgctgcgccaggctttcgaccggcacacctggttgatcgagtatcgtgtgtagtctaccatcacagtcgcgtggaagtacccggaccgatgggaggctacttgccttattttcgtcgtctggaggatgaccttcctggggtgcggatggtcgtttcggagccactatttccttctcttgaagtgtga

SEQ ID NO: 25399 - DNA, 936 bp, Zea mays
  Peptide Sequence Number=SeqID_68774
atgtcgccatggatgggggcggctgcgctctcaccacgcgacccctcaaagttttcccaagaggaggcccccttcccagaccaagaacccggaggagaaagaggagctccaaacatggaagaagcatactgcccgcaagaagaccgcgagaggaatgtaaatccaggggctgatcaatcagcaattacacctctccgcagatccccacgattccatctggaagataaaagtttgagcaagtcactgttgccaccaaatcgctgtgagacctctcctaacagaaagactaaaaatgctcatagaaaagacaaaaatcaagagagcctgaaagggaataggggaagtgctggatttcctcctaggaaagatatttcagatgtatctaacaaaaagagtgacaagcaagagttaaagcccatccattgtaaagtgcaaacaggaaagaggaagagaggaacagaaaggaggttgttatcgaagaagcaaagttgccaggaccctggaccattgcctgcgtatcgccaagaaattgcatcttgcaatgaatccagaaaatccacccacagaaggattgaaaatgacccttctaccgaggtgaagcttaaagttggtgatgtgagattggcaaacattgatgaaaacatcaacaagcccagtgggactcagagagaaggaatagaaattttttgtggtcctgatgattggacaaaagagcaggacatggcattgcgcaaagcttacttcagtgcccgaccatccccacatttctggaagagggtttcaaaaatggtcccaaacaagaaggaactccttgatgactacatcagtcagactcccagagatatcctgaacccagctgttttcagcaagagcctcctgcaccatgcggcctttccttaccctcagggggtaaaagctgcaatagactgcccttga

SEQ ID NO: 25400 - DNA, 360 bp, Zea mays
  Peptide Sequence Number=SeqID_68775
atggcccgcgcccgcgcctataaagcccgctcagactgtaaccttgcggacagagagtacgtcctcgtgccggagcaaggagctgctcaggaggtagccccagatccagcaccagagcctgcaccagaggacctgcctgccactgctttggaaggcaagccccgtagactttgcccctcacgcgacctgagacgtggtctcccattccggttatggtgggtacaagtgcggtcactgcacgacggcagtcggggttctttggaggacatggttgctggagtgacttggccgtccatcttgccaccgggttggactgtcgagtgggaccccgcctcggctgaggaggagcatgaggagtga

SEQ ID NO: 25401 - DNA, 840 bp, Zea mays
  Peptide Sequence Number=SeqID_68776
atggtggttatgagatcgatggttctggttatggctatggtgctggttgtcagcattgcaaccactgctcaggagaagatgaagctgtggaaggagacttccaggagttccaagactacgacgagttctaggcatgggttagcggcaacccccagtcggctgcctgtgaaggccgcggagccggaaggatgggttgctcgacccatcactcgcgacgctgctcgcgggtgtcacttccatgatgtgctcgacaccctgctacgtcgggcacttaaccggcgtacttggtccatcgagtatcgctgtgtggtctaccagcatagtcgcggggtctacccggaccgctgggaggcaacatgcttggtgcgccgcccggagaacagtctccagggtgaggaggcctgctcagagcactattctatctctgagcgggactcagctgaggtggccatgcaagatgttgcacggcgtgcgctttcgcactactgctcggttctcggtggggtagctgacggtcttgacctgaagtattacccccgccgtccatctggcagcacaggaggcgtgattgtttcaccggtcggtgagttcaatcctaggttgagcagcacagtcaacctagctgtcgtgctaaacacggagctggaccatgcattagacgagctgagtagggctcgtgttgagatcgccctgctgcgggctgagcacgcggaacgtcgtcacctggatgatggttcccccgctcccgtcgggactcagcacccgtaccgctcacctcggcgtggacaccagccttatggcaaccccgactgcaagaccaagataaatctagaaccatag

SEQ ID NO: 25402 - DNA, 2238 bp, Zea mays
  Peptide Sequence Number=SeqID_68777
atgcgggcgtgggagatgcacccgctctgctgcctcgccggtgagtggccggcctcgggcggcgggctcgcgcccggcgaccgctccccgccggcggaggacgcgggggcggcgccggcggtggcgggggtcctgtacaagtggaccaacatcggcaaggggtggcgcccgcgctggttcgcgatccgcggcggcgtgctcgcctactccaagatccggcgccgcgtcgcggcggagccgcgtcccgaggccgcgggcggcgtccggctgatcggggtggcgcgcggcgccgcgggcgccgctgagcgccccatcggattcgtgcctctcaagatatcatcatttagtgaaagtaaatcagatgataaacggttttatataattactccgaccaaaacacttcaactgaggactggttgtgctaatgaccgggcgacttggattgaagcgcttgtcactgcaagaagcgaatattcttttaatggggatttatcaggtgatcagaatgatgcatcattttccacagaaaagctcagaaatcgcttgaatgctgaaggcgttggcgaggccgttattaaagactgtgagcagattattcattcagaattttcgcagtaccaaacacagatgaagcaacgttgtgaagagtatttaagctttattggcactcttccacaggatgttgagcaggttacaatcatgctatatgtttttttggtagttaattcagtagattcaactgtccctgagaagccacggctagagctgttcaagcatgactgctccagctctggaaaatgtagtgaatatagcaacacagaatcttctgatgatgttggcaagcaagagattagtgaactatcagacggagatgaatttcatttctatgacacaaggcaaagtttcagtgaatttgcttctagtcctgctgacccgagaaagggatgtttaaacaacggaaatgaagatcataaatctgttgaatcattgacggttgacaaggctgagaaatatatgctatcacattcaaaaaggcgcttacagttgcctgaaccaatagaaaaggagaaaggagttagcctttggtcaatgatcaaagacaatgttggaaaggatctaacaagagtttgtcttcctgtttactttaatgagcctttatcttctctccagaagtgctttgaagagttggagtattcttatttgttggatcgtgcatatgaatgtggtttaagggggaatggtctgatgagaattctttatgttgctgcatttgcggtctctggatatgcatccacagattcccggccttgcaaacctttcaatccattgcttggggaaacctatgaagctgattaccctgaaaaggggatccgttttttctctgaaaaggtcagtcatcatcctatggtcatggcatgtcactgtgaggggaaaggttggaaattttggggagacagcaatctgaagagcaaattctggggacaatccattcaattggatcctaatggtgtgctaactttagagtttgatgatggagaaattttccaatggagcaaggttacaacaacaattaacaaccttatccttggtcgagtatattgccatcaccatggcacaatgaacataagtgggaatagacgatattcatgcaagctgacttttaaggagcagtctttccttgatcggaatcctcgccaggttcaaggagtcgtcaaggatgctggtggaagcaaggttgcaacattgacggggaagtgggatgaaagtgtgcattgtgtcatcaacaatgatgcctctaaggtgaactctcatggtccacatcagagttctggttccactttgctatgggagaaaaatgagcctccagtcaatcctacccgctacaacttgtccgcatttgcaataacactaaatgagttaacaccagagctcgaggagaagctgccaccgacggattcaaggctgagaccagatcaacggcacctggagaatggggagtacgagaaggccaatgctgaaaaactgcgcctcgagacacagcaacggatggcaaggaagatgcaggagagtggctggaaaccaagatggttccaaagggacagcgaggatggaacgtaccgctacgtcggaggttactgggaggcaagggagcagagaacatgggtcggctgcaatgacatatttggtaacttgtctagcagccagaagctcccaccatccgctctctacacgagctga

SEQ ID NO: 25403 - DNA, 906 bp, Zea mays
  Peptide Sequence Number=SeqID_68778
atgagactgatggttttggttatgcctatggtgctggttgtcagcattgcaaccactgctcaggagaagatgaagctgtggaaggagacttccaggagttccaagactacgacgagttctaggcgtggatggctcgtcttagacacacttcacgaaagtctgtcatccccttcttaccctcccgtcttgctgagcatccgcttcgccgtcccgtggccggagatagagtctgtgaggaggtgctcccctgtgcttcccctggaggcgccccctgcaccaccactgggcgccccagcccctggagtagctgctggaggagacccagacgacggaggtggcgacgacagctcgagccacgacaccgacttttctgctgaccaggagccggaaggatgggttgctcgacccatcactcgcgacgctgctcgcgggtgtcacttccacgatgcgctcgacaccctgctacgtcgggcacttaaccggtgtactactgtacttggtccatcgagtatcgctgtgtggtctaccagcatagtcgcggggtctacccggaccgctgggaggcgacctgcttggtgcgccgtccggagaacagtctctagggtgcagaggcctgctcagagcactattctatctctgagcgggactcagctgaggcggccatgcaagatgctgcatggcgtgcgctttcgcactactgctcgattttcgatgtcagagaacaggcacagaggaggaaggcgtgctcagcaggagcaagccgctcagcaggaagaggtaccccagcaacagcagctgccacccccgcccccgatgtcgatcgagcagatgttcctgatgcagactcaggcagttcaagccattggtcagactctggccgccattcagcagcagcagcagcagtag

SEQ ID NO: 25404 - DNA, 471 bp, Zea mays
  Peptide Sequence Number=SeqID_68779
atgggcaagaacaacaagcgcaagcgtgagccaactcctccatcgaaggagtttggtgactcggagtactcagaggaggagttctcctctgagtcggaggggtctccggctcccgtccccctgcgtgagtcgtctgatgactcagacgactcccaggggctcgcggcggaggtctggacgtacatccgggccgtcgagcgctccaggctcgagggctcggatgagtcggagtactcctcagatgaggaggactcggacggcagaggcgaggacgaggacgacaacaacgacgacggcgacgacgacgacgatggcgacggtgacggtggcggcagtggcagcggcaggggcagcggcggcgacagcaaggacggtgatggcagcggcagcaggggcggcaaccggggcggcagcagcaggggcagcaccaggggtggcagtggcggcggcagcaacagggccagtggctag

SEQ ID NO: 25405 - DNA, 345 bp, Zea mays
  Peptide Sequence Number=SeqID_68780
atggcgcttcctgtcgacgtggctggcctgtgccctaggttggacgacgtggaggctcctccgaagccggggtcgagtctgtcttccatggccgaggccgagtccgagcccctgggtcgggcgaggcggaggtcgtcagcagaggccgagtccgagcccctgggtcgagcgaggcggaggtcgtcagcagaggccgagtccgagcccctgggtcgggcgaggcggaggtcgtcagcagaggccgagtccgagcccctgggtcgggcgaggcggagttcgtcagcagaagccgagtccgagcccctgggtcgggcgaggcggagttcgccgtcttccggggcttag

SEQ ID NO: 25406 - DNA, 399 bp, Zea mays
  Peptide Sequence Number=SeqID_68781
atggggctagcggggcgccatcattgcctatctggcggagccagccagatgggacacaggtcttgttctctgcgacccgagtcggctcggggtagggtgatgatggcgcttcctgtcgacgtggctggcctgtgccctaggttgggcgacgtggaggctcctccgaagccggggtcgagtctgtcttccatggccgaggccgagtccgagcccttgggtcgagcgaggcggaggtcgtcagcagaggccgagtccgagcccctgggtcgggcgaggcggaggtcgtcagaagaggccgagtccgagcccctaggtcgggcgaggcgaagttcgtcagcagaagccgagtccgagcccctgggtcggacgaggcggagttcgccgtcttccggggcttag

SEQ ID NO: 25407 - DNA, 240 bp, Zea mays
  Peptide Sequence Number=SeqID_68782
atgggattcgggttcgggggtgtcgagcgatgggcgccggcgaccagctgcgccgtggggttgtctcggcggcgctaccctgctgggccgcggttgggggagatggacgctggtggtctgatttggaatcacgaattgggtagctcagatcggatctcgtgctccaacccgcggattgattgtgggccgtggatcttggatccaaaggccgttggcgcgtaccgattcatattctggtga

SEQ ID NO: 25408 - DNA, 414 bp, Zea mays
  Peptide Sequence Number=SeqID_68783
atgaccccccgaattgaggctgagctgagatctcattgtcaccacggtgcaggatcctcgcagtcgcaccgcatccgccatccgtcgccccatctcctgcgcgcaataaaaggggcggacatggcaagttttatgcccgtgccgctgctgattgctgtgctgtgcagtgcagttctgaatgttggagtcacctggaactggaagcatggtaaacaacagctaccagacagagagagagctcttgctgttcccaaagagaagaagtcaaggcgcctgctctccggaaatgccgctacgaaaattcagtgcaagttcagttgcggcgagaacgtgaggttccatccggtgcccgtgcctccgctccgcaagagacaaggtaacatgccaatagctcagccctccctgagaggctga

SEQ ID NO: 25409 - DNA, 924 bp, Zea mays
  Peptide Sequence Number=SeqID_68784
atggcgacggcgtgggtgcgctcgctcagctgcaggtcctcctacgccgtcacggacgccgccatcgcgccgtcaccggccaagaagccgccgccgcagccgctccccttctcctgcgccagcgccactgcggcggcggcggacgtgatggacgccgtggcgtacgcccatcatcaggccaggcggaagaagctggggagggagagggagaggcggaaggaaacgcgagagccgcggccacggcccaagaagaagcccaagcccatggcgacgaaggacgcggccgccgccgccggggcgccgctgtcgttcatgccgtcgccggcgccgggcccgcccgtgagctcggcgttcctcacgatggcggagctgcccgagggccactcctcgcggcgtgtcgtggagctcatcttcgcgtccgggtgggccgacgcggcggggcgcccgtcgccgtcgccgtcgccggcggtggaggcgctgttccgcgtgcacagcgcgccgcgcgcggtggcgcggttcgaagaggcgcgccaggcggcccgcgcgcgcggcgccgcggcgcggtgcggcgccgacggcaacgagatgatgcggttccagtgccgcgcgcccggcggcggggtgttcggcgcgggcgtcgctacctgccgcctcggcgcgtcggtctctgcagtgcgcacgttcgcctgcagcggcgccgcgcacgccagcgccgccgccgccaccgccaccgccggccggcgggcgatgctggtgtgccgcgtcatcgccggccgcgtctgccccgccaaccacccgtcctcgcgccacgcccacggatccgctgcgaccgcctatgactccgtggacatgggcaacggcgagctggtggtcctggacagccgcgccgtgctcccctgcttcctcatcatctacaaggtctag

SEQ ID NO: 25410 - DNA, 219 bp, Zea mays
  Peptide Sequence Number=SeqID_68785
atgacgtctagtggactaaggagctccggcgatgagcgctggcatccaaatgagtaccaacgtggggggtccggtgaccaggcgatcatcggtgtggggatgtctggcgagggcttcaggtcgatgatgggcaccagtaaaaatcctttgcgagctaggctcgatcatggtttggagtcttggacatggagatggtcgatagagccatacagatggtag

SEQ ID NO: 25411 - DNA, 669 bp, Zea mays
  Peptide Sequence Number=SeqID_68786
atgacaaagtgtttcgttgaacacgaggaagcttcgtttcaagcaaacacaggcattttatgcaaggaaatgcttcgatgtgaacgaaaagaagggaaggtgtttttcgcctttggctcaaaagacacgaatttcgtccacatcaaagcaattcgtacatggatagaaagcccaaatctgagtgatgaatctatttctgatacttcgggcctcaccaggaatattaatcaggtccgatggcaacaggctaaagccgaaggggcaatatcttcagaactagtcccaactgagctgaagactccttttaaccattgcacgcagtggctgccaaattccaagcatgtgttccaaaggtccctcagagattcatgtagctttgagtttttgtcacacccggctttaaggaacaaagccagaggttgtatcctttacccacaagtcatgttacccatctgccaagggatcgcgacttcccatacacctctacctaggaagcgcggcagggcaacactacgaggcctttacaaagttccactagcttccgaaaacccgctacagtttataggaagttccaatgcagggttcttggctgaccgccatcgcagcaaaatcaaccaaggacctccctacactgaccactcccttactgcccttgcccctttcgggtaa

SEQ ID NO: 25412 - DNA, 333 bp, Zea mays
  Peptide Sequence Number=SeqID_68787
atggagaagatggcggcgcggggggcagggaaggcggacacgcggcgcttctggcgggaggagcgcgcgacgcttcaccttcgccgtaataaccgcttcagaaaagggaccgggaaagggggataccccgaaagggatccttctccgcgaaggaaccgggctccgagccccccattactgatcaggggttcgaaggctggcccccccgagggttcaacagtcgcctcagatcgcgtgggcccgacacccactactggtcaggggttcgaaggccagccccccgaagggctccatggccgcctcaggctactcgggctccgcgcccattactga

SEQ ID NO: 25413 - DNA, 1434 bp, Zea mays
  Peptide Sequence Number=SeqID_68788
atgaaggtggccgacttcgccgaccgcgtggcgtcgggtgtcctgactgcggacgtggctgccgaagtcgagagacttcgggcgcagcacgaggatgccgtccgggagaagtcggcggcggaaagcaagaaccgcgggctggcggagaaagtggccgccttggaggccgagaaaacggacctccggcgccagctggtggaggagaggagggaggtgaaccaggccatcgctgaggtgcaggctgcgcaagcggaggccaaagtggcgcgggcggagagcagtctcgccagtcaacgcgccgaagagctggaggcaaggttcaacgccttgcgcagccacgtggacaaggccgaggcctctacacgctcggaggttgagcggacgtacgcacagttcgtgggatcgtaccacaagctgggtgagcggatcgctgacttcgatgtacccgaccaggaagcaggccttcgcttcctcgaatgtatgcaggaggagctgctggtgctcccgaccattgtggagggtttcatgtcatttgcctcccttatcacctgtgagggggccatgaatgcgttgtcccgcgagggctgcaggcactacgaggtcttcgaccaatcagacaagaactttgaacgtgagatcttcaaggccgacgaccctatggtgaagcagtcagcaggggcacttttcgataggatgtggggtccgtatggtcgggaggcggtcagggagcgatccgaccaggcgaaagagcagatggagcgtgctgaggacgtcgaggacttcggagctctggccgcgccgcccgaggctacggaggtcaacccggtgctgccctcagatgctggtgaaggcctcttggctatgcccgtgcctattgtggctggggaagaccctgtgtcggcccatgcaccgacagtcgaagatgccttgaaggttcaggattttgggcctgcgcacgcaaccgctactgacaatgctaactttgtggcttcgaccgtggttgctgaagacaattctgacgattctgtgtctaagttttttgaatctgatgattctgggagttcgattgtgtggacagaggggtcttcggatgaggatttagactattttgcagcattggatgcggctgtagcggaaacttctctgcgtgtgaccggtgaggatattccttgtgcgagtgctgggtgtaggcgtcgaagggcggtggcgaagcggagagtgagtgagttgtcacgaagtgataggcgtcatggtgaggtggagggtggtcgtcttcgagtggacgggactgccagacgggaattgttgtcttcgtcggctgaggcaagtgtaggtgagggtgagctgcgaaatctttttgagggtgaggaattgaggataatgttgtacaactacagggagatgggtatcatcccgaaggttgagccattgtaa

SEQ ID NO: 25414 - DNA, 561 bp, Zea mays
  Peptide Sequence Number=SeqID_68789
atgacatttttagccggaagctcgttagtggagacggttgtgagcgtccgagaggagccagaagcagggcaccacttgcgcgtggagaaggcccacggctctctacgaagttactcgaccgaggtagaagcagatgatgaaggtgatgaagatgatagtcatcaccgcctcggaggttcccataaccactatcgggattttggctctagatgccacgatggcagtagcagagccatgaagctgaagcggtacctcacaagtgagagggggtacaaggtcgatggtaggaggatgtggttctggtgccttgtgggtggcagaggtggagcccaagcacagtcgcattggtcaccccatgaaggcgttggccacagtggcaaagcggagatggtgaggaagctagacgtggaagaaaccaaaaaggagaatgggaggcacccgaatggcggcgacagcgaggtgcctcgccgggtaactcgacatcctatacttggtagccgaggcttcacaatatattcgaagagtaaagtcacaagggataaggcaccacatccggcgtaa

SEQ ID NO: 25415 - DNA, 495 bp, Zea mays
  Peptide Sequence Number=SeqID_68790
atgacgaaggacttcaccatgactactgagttaccaccatatgattatatgcggggaagcttcgtcgcagaggaaatcttgaacgttgaattcttcatgacaaaggttgtcatgattgtgaccatcatgatcttggtctctgcagcacaaaagtggcacgaagtttctttggaggctaagcaacacgaagctgtggccctcaaaaaggcccccaacagggatggaatgggtaggtttagaaaggagatggagaggtatttaagggaggcagaggtggcaagggttcccacaaaaacacaatttaatttagaaggaagggtgcaacccttatctctagttgtggccctcgatcgcattcactatatgaataaggacatgacactgccatggaagccaacgcttcttgcctccacaaccttagctgacacatcttacaagagaagggatgaaaagaagaacaatataattcaaagaggtaggattggttgggggtga

SEQ ID NO: 25416 - DNA, 384 bp, Zea mays
  Peptide Sequence Number=SeqID_68791
atggcgcataggaacgacacaggccatcagcaaactccgacgggcagcatcagagtagggtgcaccatgggaaaaacaaaggacgctgagctcggcgcgcagcgagctggaactggagctggggtgctcgacggagggaagacgcagcggcgaggaggaagaaggatgcagaggcttgagcgcgagttggccagagactcggcaaccaggcgccatgaccacacaggggcgagcagggaggttgggcgaactgcagcgctagaagcagggggcgctcggccgagcggatggacaggggcgtggcacaggaggacgccgaagcggacgcctggggtccctgcgccatgggaaatacggccgggtgctggagctgaagcgagctga

SEQ ID NO: 25417 - DNA, 375 bp, Zea mays
  Peptide Sequence Number=SeqID_68792
atgattgggaaagtgggtgggatgttttcaaaaataaaacttgatggtggatctgtcaaaggccttgatggattcaacatcggaaaagatgtacctctgccagagtctttgattattgaaaagccttaccttgactcccttaaccagcatacccttgagagtcttttctttagtcgggtgaggaagcaacaaatttttgttgcttttgctctaaggtggtaccaaaagaagaacacaaggaatgaagtgcgggaggaaaggatcctccatttagaacctttgtttaaaaactttatgggaggagtttttacctcccttggtattgtaataatattactctgcactccttggataactctggtctgtaataagtaa

SEQ ID NO: 25418 - DNA, 438 bp, Zea mays
  Peptide Sequence Number=SeqID_68793
atggacctgtccccgaaccccgagagcccgggaagcggtggtgatggcggcggtggcggaggcggagccgggggatcgagcagcggcggggcgtctccgtcggcgggcttcggcacgccgcagacgccgagccggtacgaggcgcagaagcggcgggactggaacacgttcgggcagtacctgcggaaccaccggccgccgctgagcctggcgcagtgcagcggtgcgcacgtgctggatttcctgcgctacctggaccagttcggcaagaccaatgtgcacacgccggcgtgccccttcttcggccacccgaaccccgcccgcgctgtgccccctgccccgctgcgccaggtctggggcgcgctcgtgccactggtcggcctgccggttggccgggttcgccatccccagctgcagactgcagtaacgcccttatag

SEQ ID NO: 25419 - DNA, 291 bp, Zea mays
  Peptide Sequence Number=SeqID_68794
atggtgcacgcatccgatggtgaagtatggaaacactttgatatcattcaccgtgagaaagccgaagatgctcgtaatcttttgatcgatgaattggtacctgatatggggaccctctctggcgggttctttgccgagtgtcccaggtggcactcggcaaaggtggattctttgctgagtgcggtcgggcagacactcggcaaaggtgcaatctgcggtttagcagatgcatatgcatgcatatatgtcgctagccggtactggttgctgctactccccaacaagcaataa

SEQ ID NO: 25420 - DNA, 60 bp, Zea mays
  Peptide Sequence Number=SeqID_68795
atggctctaagggagattgagaaagacaagatcattgttgctaaagtctatagcaagaag

SEQ ID NO: 25421 - DNA, 297 bp, Zea mays
  Peptide Sequence Number=SeqID_68796
atgaaccatcgagctacagtcggtaacaccgtcctacccaaaagcaccttgaggggtaaccccagacgaagaagggattctgcatcgtatagcggatccactggagaagaagccttccttgaaaatctccgaaaaagccggaacgaagcaggaaataacgcaacctccagctctccgggcaaagactacctcctgcaaatcaggaacagagaattcgtttgcccgaagaaccccgttgtccacctcatccatggaaagatggacacgaattacaaggaaaaaaagcaaatgagataa

SEQ ID NO: 25422 - DNA, 312 bp, Zea mays
  Peptide Sequence Number=SeqID_68797
atgaacacggtcactagtcactaccgcggcgattttcatactagaattgtttacgaatttgtttttgctttagtgtgtgaagtgacaatcggatcatttatccctacaatagaattaaagtcactcctatttatgatactaatgttccaaatgtttgaccatttccagcatttgcgtaatgaggactctagggagaagcctcgtagtgagaccctggccattcacctcggaagtgaatacgggtctagctaccccgggctaaaagggaatcgcgactcatgggtaaagatgtgccacctctgcagagtgtaa

SEQ ID NO: 25423 - DNA, 453 bp, Zea mays
  Peptide Sequence Number=SeqID_68798
atgggcaagaacaagaagggcggaagttcgtcgcaccattccggcgacaagcggaaacgcgagccaagtcccccctcggaggactttggtgactccgagtactcggaagaggagttttcctctgagttcgaggggtcaccggtctacgcctctcccccggtgtcgtccgatgactcggacgattcccaggggatcgctgccgaggtgtggacgtacatccgcgctgtcgagcgctctgggctcgaaggctcggatgagtcggagatctcggacgaggagaactcctccgactcgtccgaggaggagagcggcggtgacggcaacaacgagggcgacgacggcgatggaggcgacggcggcgatgatagcgacggcgacaacaagggcgatggcgacggcggcaagggcgattggcgacggcggcaagggcgacggcggcagcagcaaggctag

SEQ ID NO: 25424 - DNA, 363 bp, Zea mays
  Peptide Sequence Number=SeqID_68799
atgactcgacaggtgcactttcagagcatccgcgatctaaaatcaaaactgcaagctagacctaaaatctttgggctgattgtttcaaaatcaactcaaagattgggggcttgtgggggacagatatcccccgggtccactagaaggctagaaggcctccgaaagacactgggcccattacttcgcaaggccatcccttcatgggccagggaggaatcactagcagaatggatcgacacaagatcggaccgactcgagcccagacggctcattgggtttaaacattatccgcagcattggtctgattctcccgcgcagcaccctcagatgtcggaactaaacgaggataagtcggcaggataa

SEQ ID NO: 25425 - DNA, 621 bp, Zea mays
  Peptide Sequence Number=SeqID_68800
atgccaaatacaaaggccgagtggtcatcaatttacttgacggaggagcaatacctagaggtaaacaggttgggtatttttgattctacgattgattccagagagctgagacgccgtggacgacaatccacatcgtcgtcttcacagtcgtcccgttcacgatcagcagcccatgagatagagcttgcagtgttgcgtcaacaggcagagtaccatcaatcagtcttgagggaacaattggagtaccagaggcaacaatctgaataccagagacaacaagccgagtaccagaagaagagggacgagtattatgcaagcctccaggcccaaaatcaagctcttctcttgcaactagcccaacaagcgggcgtcccgatgccgacttatgggatgccgcctccggactttgcactgccaatgccaatgttgccgcctccacctccgcctccgcctccgtcacaattccctatgggatttcagacaccacccgcttcagttgccgcacctggaaatgggtctgggtcaggacgacacaacaaattcgtgggtgaacaccattttcaacacgcagagtccagccggaggaggtggctactcgaaccatccagacgatggatatga

SEQ ID NO: 25426 - DNA, 627 bp, Zea mays
  Peptide Sequence Number=SeqID_68801
atggcttcggcagcccgactccagggttggtcccgccagtggacgacctggccaggttccagccgccgctgctacacctcctcggcttgggaagtcaccggctcctcggccgacgaagtttcttctcgagccaactccgcctctgtccatgctgacaccgctgtcttcggctccggctcatcgcagagtagccgaggatgttcaggccccgatagccacaatgaacagacaccgacactcaaggatgccattacaaaacgcaaccccgggttccactcccgcgggtatgaacaacctccacatcgcagagcctgcgcgacgacaaactccgggtggctcgccgccgaccactacagcagcgacaacgacctccgctccgggcggccaaacagcagcagcgatgaccttagggcagacgctgctgcgacaaggccctcgcccgtgtccccacttgaggggcgaggacaagaaatcaaagccaaagagacgaaggcccggagcgcagatggcgccgacgatctcgtcggcggagaagccttctccggcgtccaccacctcagcaccggcgacggcagccacctgcccaccggcagatccccactcgcgtcctcaggcgtcgcggactaa

SEQ ID NO: 25427 - DNA, 300 bp, Zea mays
  Peptide Sequence Number=SeqID_68802
atggaattaccactagacgcgcagagcagcggaagacgtctcgatgtagacgaacgcgtcgagcagtgtcgtgcagtcgtcagcgtccttcacgtcctcgcacggtttgtcccagtgctccaaatgcagcacctccgagaggaagaaggtggtgctccggccccgtgtgatgacgagattgtggtgctggactccttctatgagcgtggcttcgggcttccccttcatcccttcatgcggggactgcttttctactatgggctggagctacagaacctctatccgaatatgatcctctga

SEQ ID NO: 25428 - DNA, 78 bp, Zea mays
  Peptide Sequence Number=SeqID_68803
atgacggaagatgaagccatactaaacacgaccctcaacctcaccgtgagcatgctctgtcagacccatcagatgtaa

SEQ ID NO: 25429 - DNA, 510 bp, Zea mays
  Peptide Sequence Number=SeqID_68804
atgcaggggttactgtgcactccccctcgcctgcttctcgcggaagaagccgcccacgccccacaccggaaacttctcgctcaacgtctctccctctcgacgcgtctctggaagggcgatttccggcgacgcggcggcgaatctaccggcggaaggtcgcgtccgcgccggtcccggtcgactgtgaaagaagacgaagtggaggtcgtcagcaggcagttccgttcgcgagcgaagacgaagaggcctcaaatccgcttccgccgaggttactccttttacctgagaaaacttgaatttctacagcaagatgccttagaggcaaaagtgcaagcatttccagaaattgctaagtacgacggggatgacataagtgttgaacctgcatctccgtcgacccctccaacagttactgaaccatctgttgatgaagaggagttctactgccccgatgtcagtgatgagtggtacttcagcgattctgataggtcaactcgtaatagctactag

SEQ ID NO: 25430 - DNA, 732 bp, Zea mays
  Peptide Sequence Number=SeqID_68805
atgggcgcaatacaggtcaaagctccattcactccaggggcacgatctcgcctcgcccgagcccagcctcgggcaggaacaatagacccaggtggattcacgcctcgcccgagggcctcctcaagcaacgggcgcaccttcgactcacccgaggcccagctcgggcaggcttcgcggagaagcaaccttggccagatcgcctcgccaaccgaccccgagtccaacctcaggcgccataggaagctccgcctcgcccgaccccggggctcggcccccagcctcgacctcgaaagacggtctccgcctcgcccgaccccagggctcggactcagcctcgacctcggaagacggtctccgcctcgcccgaccccagggctcggacctcagcctcgacctcggaagacggtctccgcctcgcccgaccccaggcctcggactcagcctcgacttcggaagacggtctccgcctcgcacgaccccagggctcggactcaacctcgacctcggaggagtcaccacctagcccggccttgggctcggaccgaccacgctataggggggccctcgtacgcgaaggtggccgcgcgggaggatgggctgacggacagtctctccctctccctcgcgaacgcttataaccccctacttcaagcgcatccgccctgggcgcaggacaacacgagtcgcgggaccccccggggtcgaaacaccgacagttggcacgccaggtag

SEQ ID NO: 25431 - DNA, 195 bp, Zea mays
  Peptide Sequence Number=SeqID_68806
atggatgttttgatgattaggaaccttggtgaggaccagcaagaacttgggaaaggcctaggtgttgaggtggagcaacagggcgcccacaacaggaaggagatcaagcaggaattagccctcgtggtgaggtcaatcgcgcagtgcactgttgataaccaaaggagaagtggtgctgcgattgcggggttctag

SEQ ID NO: 25432 - DNA, 453 bp, Zea mays
  Peptide Sequence Number=SeqID_68807
atgccgcggcctgctaaccgcttgggctccgggttcataagggggcaggtgggttcccagaccacgacctcatccactccgagcctcaaccacaatcaccgccagggccggccaccgttgcttcctcgccgccactttctaatcgcgtccgccattaacgaagcacagagagatttgagagttgccgctgctcgggcgctttaccggcgtcgcggtcccgagtctggcatgtgggcgggcatgtcacttggacctcctgcggcggatctgggcaatcccgtgtggagtcatcggccagggcaagacgaaatcgcccgccggaatcgtacccccgccgcgcggccgccattcaacgtgggcaggagctttggcgctagcaatgaagggctgtggctggccatggctccgccgtggcttgacgctggcgtccacactgctgacccggggaagtag

SEQ ID NO: 25433 - DNA, 1038 bp, Zea mays
  Peptide Sequence Number=SeqID_68808
atgtggcttattggtagaggatcatttcttgctaacaattgcagccaagggttactaagcacctctgcaattttagcagcaatattcacaaagactcggaactataaagaagctttgcttctgtttgctaagatgaaaaattctggagttgttccagaccaattgatccttgctactgttctaccagcttgtggtcatataaggcatttgagaatcgggaaagccatccactcgtacatgttggtgtcggacatgattatcggcgctcacattagtagtgctctcatcagtttgtatgctagttgtgcgaacatggagatggcagaaaagttatataatgaaatgccaaggaaggacttggtctcatcaactgccatggtttctaggtacgccaggaatagaaaagtcgagattgctcgctctatatttgatgggatgccagagaaggatgtggtatcttggagtgccatgatatcaggatatgttgatagtaaccaacctaacgaagcactgagtctgttcaatggtatgcaagagtgtggtatcaggtctgatgaagttaccatgttaagtgtcatatctgcatgtgctaatttaggttccctcaataaagccaagtggatccatgccttcattaagaacaatgggttgaataaggtactgcacatttgcaatgctcttattgatatgttcgccaaatgtgggggtattaaccttgcattgaatgtcttcaatgaaatgcctctaaagaatgttatcacctggacaagtatgattagtgcctttgctatgcacggtgatgggaaatcttccttacgtttgtttgagcaaatgaaagatgaaggcgctgaacccaatgaagtgacatttcttagtttactttatgcttgctgtcatgttggtctagtttatgaaggtcgtttattgtttagctcgatggttcagcaatacgggattgaacccaagcatgagcactatggttgtatggtggatcttctagaagggctaaacttatgcaagaagcagttaatctcatag

SEQ ID NO: 25434 - DNA, 837 bp, Zea mays
  Peptide Sequence Number=SeqID_68809
atgtggcaatacatcgggggtgatgacttcaaccaccattcgatcgtgaacctgatgaaggaggagctcaaggcccgcgtccttgctatcatagcagggatcacatcggacttcttggacgagagcggctcactaccgttcaaccaatcgaggttgagcgacctagcggaccccagctatcagcgcgagcctgcactcgcacgccccaatccttctctcactctgccccatggggccgacctgtcggcgccgttccccctcgcccacgcgccacgtcctctctctgcgcagtgggtcccacctgttagcgctaacccatggaccccgcatgttagacctgtcccgcacaaccgtccgcgcgcacgaccgtgcacacgtcgtggactccacgcccacgatgcacgccaaggccgcgcccaccccaaaccggccatttctagttgcccgcaccccactccttcccccctccctcacccgtgcactcacagggctccagcggtcacctcgcaccgcgtgcacacaagagaagtcccgccgtcgtccgtcgtggtctcgtgcttggccgccgtcgagtcctcgtcccgtctgttgccccgccggagtcccgacaccgttgacccgaagcctcacctcatccctaccgccgttcaaaggtcccgaagccctctctcgatcctcgttcgccatgtcgccccgaacccacctaagcccttcccggcgccccagggcccccggcgtgcccgtgccctcgtctccgttggagctccaccgtgggcgcgagcggcgccgcagctggcggccagggaaaccctgcctaggcttgtcgtgggatcttag

SEQ ID NO: 25435 - DNA, 471 bp, Zea mays
  Peptide Sequence Number=SeqID_68810
atggagccttcggaggagcaggagctggaaggatgggtcacccgacccatcactcgtgacgtcgctcgcggttgtcatttccacaacgctctcaacaccttgctgcgacgggccttcgaccaatacacttgtggggtggctgacggtctcgacctaaagtactacccccaccgctcgactagcagtaccagaggtgtgattgtatcacctgttggtgaggtcaatcctagattgagtagcatggttaacctggtcgccgtgctcaacaccaagctgcaccatgcccttgacgagttaggcaaggctcgggcgaagattgcggaactgcgtgctgagcgcgcggagcgccgccatcaggaggatggttctcctgcccctgttaggactcaacacccttatcgctcgccgccccatggtaattatgcttatggcacccctgactacaggatctggataaacttggagccttag

SEQ ID NO: 25436 - DNA, 237 bp, Zea mays
  Peptide Sequence Number=SeqID_68811
atgtacagcgcctgcgcgcgtaagaggagcggtccctatggccccgcgacatcatcttcggctccagcatgctctatggcaccgaaggcgaggagctcgcggtccttacagtcctacgacgtcagctccggctccggcgcactttatggcaccggaggcgaggagctcgcggacttccaggcctacgcaatgccgctggacgcttccaggatcctcatcgccaacaacagggagtga

SEQ ID NO: 25437 - DNA, 1773 bp, Zea mays
  Peptide Sequence Number=SeqID_68812
atgtgggcgacaaagaagctcgccacgacggccctgctcgtgctcacctctctgctggctgcacggtatctgatagagcacaccgcgagctcagggatgtcgtctcggtaccagatcctgcatctggttcaccacctcgagtggctcaagagcccagcggacgcgaaagaaaccagtccgggagtcgtcatcacaacggcagcttcttcaaacacctcctcggagccggaggactctgctagtaaaaactcctccgccgccgctcaagtgtttccgtggctagacacgtggagccagatgacgcggctagccgacatcgccagcggccttccgcacgcgaccgaggcggtggacgacgggaggactgcgtgggaaaacctgacagcatccgtccacgttcaccagaggcagcggcggcgactctgcccgtactcggtccgcgacactccgtccaacaaacccgagagcggcggcggcggcggcgccttcaccgtcggcgtaccctgtgggctgaccgtaggctcctcggcgacccttataggcacccctggactcctctccggcaacttctggatcgaactcgtcgggacgacgacagcgcttccggcgggggagaccgaaacgcctgccgtcccgctgcactacggcgtgcgtctaaccggcgacgacggagccaccagagatcgtccgccggtcctagtgcagaacgccttcagcgcgagcagcgggtggggcgccgaggctcgctgtagttgtactcccggcaatgcggcagctgaaggtgctcctcctgctgcagtagtagacggtctagagagatgcgatgccatggcggaccgggaggaggaggaggacaagaagcacaagcacctgcacggagggtgtttcccgtttaagcagggataccttgctattgcgacactgcgcgtcggatgggagggcttccatatgacagtcgacgggaaacacgtcacttcatttgcgtatcgagcgggcttggagccatggtatgtgacccaagtaagaatctctggtgacttcaagcttgcaagtgcgattctaagcggcttgcccacgtcagaagacctggagaaccctaacctcgaatcgctcaaggcgccacctgtcccaaacgacagagacgtcgaccttctgatcggcgtcttctcaacggcgaacaacttcaagcgtaggatggccattcgaagaacatggatgcaatatgacgctgtgcgccaaggggcggttgcagtacggtttttcgttggcctgaccagtgtactgccagccaagtatctaatgaaaacagacgatgatgcttttgtccgcgtagatgagatccactccacggtgaagcagcttaatgtcagccgtggcctactttacggtcgcataaattccgattctggtccccacagaaatcccgaaagcaaatggtacataagccaagaggaatggcctgaagataaatacccaccatgggctcatggaccaggatatgtagtttcacaagacattgcaaggacaatcaacaattggtataaggcaagtcgtttaaagatgttcaaactagaggatgtagcaatgggcatatgggtaaatgaaatgaagaaaggtggattaccagtgaaatatgaaacagacaagagaattaacatcgacggctgccatgatgggtacattattgctcactaccaagaaccaagacatctgctatgcctgtgggagaagctcctaacgacacatcaagcagaatgctgtagcactaagtaa

SEQ ID NO: 25438 - DNA, 1071 bp, Zea mays
  Peptide Sequence Number=SeqID_68813
atgtcgtttagacttatcactttgttgattaaatcagagctccaaacatcgcaatcaagattggttggtcgaatcgacagtgtgagggtaaggttggcaatggtgaacaagggcaagggcatctcactgcctcgtcatgtagtcctccatgttgtccatccccaaaggccactactccgaagcatccttagtgtccatttgacaagctcaaagtcattggtcggtatcacaagggttatatcagagattcatcaggaaaggaaggcaggtgaaagaaccagtggagctgctggaccctcaattgataagatggagaaggctccaggagaagcgttcagtagaaggaaccctagcggtcctgtgaaccagactgacagttacgcgcaacagccacacgagattgtatccatgtcgctaaaggaaattgtaggtatgcagctcctgtgctgtgaagttgttgagaagactgacgcagtggtctatcgtggaaaggtatcagcacatttgtctggaagcaattgtcttggatgtgctgctaggtctgatcttcggaagtgggctgctgccgagaaatttcaaccatcttcaaagtcaagtggccatctaaatgctactggccaaaaagcgcatagcttagttgattctgagaaaccaagcaatcagaggcctgccgtaattgtgaagtctcacacaacaaggctccctgttggtaatccggatgggacaatcattataagaaccgaccagtacaacatagatgatctccgaatcgactatatgtatgcaaagttctttgttatcaagtcaattggtgaggcagatgtgcacaaatcgataaaatatggtgtatggtcaagttcctccagtggaaacagcaagctagatagcgcattcagggatgctgacaggatatcgaggaggcattctactaagtgtccggttttcttgttcttctctgtgagtatatatttactaggtaggtacccgtgcgatgtctcaaatgaagtccgttggaggttcacaatttatgttccgtggcatcgcacgggcacctacctagtcatggaataa

SEQ ID NO: 25439 - DNA, 756 bp, Zea mays
  Peptide Sequence Number=SeqID_68814
atgcccgcctccgcgattcgcgtccttgccgctgctctccgtccagggatgcctccgcggtcgccccgccatcttcgccctcgccccgctctccatggaaggaagggcgtcattccagggattacctctgcgacagcccccaccattctcgccctcaccccgctctccatcgaaggaagggtgccattccagggattacctctgcggcagcccccaccattctcgccctcatccgctctccgccatcctcacccccacccgcccccgccatcctcctcctacgcgcaagtcttcggtgcccttctcctgcccctgccatccccgcatatttggatccggggttcgctcaggttgcctcgcaagggccccaccacgcgcgcgccgagctccatccgcaacaaactcaagcggccccgcctcatgtcctggtcagcggtgcagatcgtcgggaacttcgcccccgtcggtgagcagtcaccgacttcgtcttcaacgactttggcgaaggcaggcggctccaaagcgcgcgtcacagagatcttcgtcgtcactgtgtccggcagcaaggtcccatgcctcgcgtttgggaccaggaaggcgtcgttcctcttggaggtgccgctcagcgttgttgcctcgctctttgacgagggccatagtgggggtcacgccgttgatatcggcatcgtgatcgaggagcacctgaatcctgtcgtacatgcctgcaagggtgaacctgaatcttgtcgtgattga

SEQ ID NO: 25440 - DNA, 1164 bp, Zea mays
  Peptide Sequence Number=SeqID_68815
atgctggatgcgacgaagccaaaggggtgcgcctccgcggtgcagttgcacgccacctgcatggcggtctgccctttcgaccgctggtttcggcgaggatggaggagtgcttggggaggaccctggagcatgtcggtgaagactttgtccgtgacgcctgaggacgcgagtgggggagagccgcctttaaaaaggggtcgatcccccgggcggagcatgacctcgcgggggttggcacccttcagccatcgctcggcttcaaggattttcatcaggcagcccgactgcattccctcaccaatggtcacccaggatggtgaccaccaattcgatggtggggagaagcaagccgggctgcggcctctgccccgccctcagcttcaaggatcttcatcatccttgctggggaggagagcggggcgagccggggcctgcctccgtgtgggctggcgacccgcttcttcctcgggcatccgggggaggaagacatcctccagctctgcggaggaggcgtcctccagccatgcgggggaaggcgaactgctgctgtctggccagggtccagcattccgtcctccgtccgggcgactgtggccggctgcactgggggggtcgcacaacacatcgtacgccgggagggcggtggccgctgtcgtcggtactgaggtggtggcagccggagaaggtttctccgctgacggcaccgtcagtgccacctatgctccgggcctctggctctttggctttaatggctggttctcgtcccccgcgaggggacgtgaacgagggccttccagcggtagcgtttgccctggggccattgctgctgctgtcttgccctccgagatggaggtcgttgccgtgttgttggtgcagtggtcgccggcgagccacccggagtttgtcgtcccgcaggcccttcgatgtggaggttgttcatacccgcgggagtggaactggagttccgtttgtaatggcaccttgagtaccggttttaagaaccctcggctgctctgcgatgagccagagccggaggcagcggcgtcggcgcggacagaggcggagtcagctcaaaaagaggcttcgtcagcccaggagcaggtggcttcccaggccgaggaggtgcagcagcggcggctggagcttggccaggtcgtccgctag

SEQ ID NO: 25441 - DNA, 504 bp, Zea mays
  Peptide Sequence Number=SeqID_68816
atggcggcagcagacgagcggaagcggcggtcaaatcgtctgcaggctcatgtcccctcctggagcagcaggggagccctctcccacgacgaaaacagcgccgctcgccccgctccgactgctgtgccacccgccagagtgaggctggcaacagccaagttcatgctcaggcgcaacaggaaactccgcctcgcccgacaccaggcctcggcctcaacctcggcctcggactccgcctcgccctaccccagggctcgccctcaacctcggcctcggaaggaggactccacctcgcccgaccccaaggctcggcctcagcctcggcctcggggggtggtctccgcctcgcccgaccctagggctcggcctcaacctcgacctcggaaggaatcgcgtcctcgcctgaccccggcctcggcctcaggaggagtctccgcctcgctcgaccttgggcttggaccgaccgcaccacagaggatgcatcattaccctacccctagctag

SEQ ID NO: 25442 - DNA, 699 bp, Zea mays
  Peptide Sequence Number=SeqID_68817
atggaccaggctttctcccaaggaataaaatgttggggaatacgacgcccccaacaggggaagcggcgcccaagggcgtcgccgtcgccgaggctctcgcccaagaagcccccagcaccaacgtcaggccaagagctaccgtcgtcgccgtcctccataccatatgcgtcacacaggcacgtcgcgacccctctttggttcgacgccccgaccttgcctcccaccgcgcccttgcctcccaccgccatcgccgcctccacggccatcaccactgcctcgtccaccggcgccacggccccgcccttggccgccaccgacacgtacacggcctactttcgtggccgccgtcctccgctgttggcgcacgctgagctggaggtcggatatctgccaagtcgagctggagacggagggctatccaatgctcctttatcgccaccaacagatgttcgtcctgctatgaaacgacaaggctatctagatgctcctttatcgccaccaacagatgttcgtcctgctatgaaacgacaagaggatgaaaacgaagatgatgagtacgaggaactgcactcacactacaaatgttctaaaattcaggataagagcaagccaccacagtcacgacgtgaagcactccatgctagtagagtttctgcatcaataaaggtaaaaacaacagtactaatgcagccaaggtga

SEQ ID NO: 25443 - DNA, 369 bp, Zea mays
  Peptide Sequence Number=SeqID_68818
atggggaatgagagggataccttgcctgagcgcttgtggcggggagtaggccttaatgaagtcgtggggatcacgtccttcactgtgggagaccggcgcgatcctattcctcgtctcctctcgttgtcctatagaaggcgcacgctgacttttgaggacgcggtggtgcgcagcggccagcagggcgttggtgtggctggcggcctgcggcaccgggcgcggccagaaaatggaggcgcggatttctgggatccagggaggccgagtccagtgcggatttctggatttctgggatccagcgcggatttgttggtcttgcagggatctagggaggccgagcggattgcaagaattgttataagaaactga

SEQ ID NO: 25444 - DNA, 420 bp, Zea mays
  Peptide Sequence Number=SeqID_68819
atggagcgggtatttgcctgggtgatcgaagttgagccactgatctgctcgagtgaagatgatgttgacttctccatcgacgcgcgggaatgctccgcctcctcccccttcctgctgctggggttgcctaggttctccgggtcctcctcgtggtgggggaggtggaagaggttggaagggtcggccgttaccgacagagtgcttgaaatctctgcagttccagagggtgtggcgcatgtccttatggtacggacattgtgcgtcgaggatgtcgtccaatgtacgttcgcctccgcggggtgcccctcgggcacgagaggcgggtggtctggcggcgtggacttcttcgcgaggtctcttctcccaacgcttgtcgggttgttggttcacatgccggtggtgcaggctttgctcctctga

SEQ ID NO: 25445 - DNA, 573 bp, Zea mays
  Peptide Sequence Number=SeqID_68820
atgaaggactctggctatcattccgttgaagcttcctctagcatttttaagtccctcaggcatccgaagatagcaatatgtgccactgggggttatgaagctagtcttcggctcatcttccttcttcatccagatttggtgattacgaggaaaaaagaaacaaagacccgtcaagctgcccttctaatgcctccgccctcaaaggagaacagaaagaagcttgtcatcacgacaactccattctaccccaacatcctctttatcggagggagagtggaatcgtccccatctccaacgacgaaccaaccgtgcctggggaagaaccacctcagcgggaagctcgtcgacaaaggaaccgatgccgtaacgcccgatgacatcatgaagccggagaacgagacccgatgcagcctgtgtcacgagatgaggtcttggaggtgggagaaactccagatgaacgagtcttcagggagaggaggaattaccgccaacgtgatcgtcggcgagctcaagagcaagctgagcaagaggcgagagaatgtcgagagaaccctctcctcggacgaaatctga

SEQ ID NO: 25446 - DNA, 1416 bp, Zea mays
  Peptide Sequence Number=SeqID_68821
atgggcgtgaccgaggaagagccttcgcaggtggttgccctggccgctaagaagataaagctaggtactacagtgggggtactgggggtctccgagagttttgctatggagttgatggggacgtgcgcagccctcgggggaaggatgtcttcgcccgagctccgggagtcttcgacgcgaatgctggaggttaccgggggtcgatggcccaagaatgttctgatcccccgcgcggctggcgaagacttctttacatcttgcatggctcgtgacttaaagatgtttccttacgggcggaatattgctgctgttgtgtcggcagtgatgaacaaggaccgtcaggacgctgcgcagaagcgccgggcgatcgtcaggatcgtagatcctaggcgtgaggcgaagagggcgcgggggagcacgaaggctgctgctttcggcagtagccagccgatgccggctgcaaaaccagccgcgcccggacccagcaaggcgtcggtgggcgtgaagactgccgcctcaggtggaaccaagcctccctcgggcggatccgcgaaaggacgggagctgccttcgccggggagacgtgttgccgactttgacacaaacatcagtgtggaggattattttgttgggtcggatgaggggcaattggttgttgtcccgcctttggcggcaaccacgtccgggcgaagggcggccgacttcgccgaccgcgtggcgtcgggtgtcctgactgcggacgtggctgccaaagtcgagaggcttcgggtgcagcatgcggatgctgtccaggagaagtcggccgcggaaagtaaaaactgcaggctggcggagaaagttgccgccatggaggatgagaagacggacctccggtgccagctggcggaggagaggagggaggcgaatcaggccatcgctgaagtgcaggctacgcgagcggaggcccaaagtggcgcgggcggagagcagtctcgccagtcaacgcaccgaggagctggaggcatggaggagctgctggtgctcccgaccattgtggagggtttcatgtccttcgcctccctcgtcacctgtgagggggccatgaatgcattgtcccgcgagggctgcaggcactacgaggtcttcgaccaatcagatgagaactttggacgtgaaatttacaaggtcgaagaccctgtgatggcacatgccgaggacgttgaggaccttggagctctggtcggcacgccgtccgaggctgtggaggtcaacccggtgccgcccctggatgccggtgaaggctcctcggctgcacccgtgcccacggtggccggtgaagaccctgtgtcggcccctgcaccgacgaccgaagatgctttgaaggtggtggctgagccggcagccgaagaccccacggccgcggccgggccttcgcag

SEQ ID NO: 25447 - DNA, 447 bp, Zea mays
  Peptide Sequence Number=SeqID_68822
atggagcagcttaccatgttcgaattggctcggagccaagattttgacgaggctatccggtttgaaccattcattgaacatcatggaccaaaggtgatcgcgacacatggagcccaaagaagcgctcgcgagctccacactgggaccagggacgcgcttcggctgggaaatagagaggaagttggggccaggggaggagcaaaggccgagcagaagaagccgaccatggagacagagctggggaaaatagaagtccatgcgccagggaaacaagggaggagggagcgctccctggcactcgcgcgtccagcggccagcagaggagccaggggcgcggagcgagatggagaagatctcgtagggcggcggctggaagatgaaggttgggcatgggatgaagaaaatttgagctcgcctgtgggagaagaggataaggagcacgcgtga

SEQ ID NO: 25448 - DNA, 246 bp, Zea mays
  Peptide Sequence Number=SeqID_68823
atggccggatatctccacaccattgacaaccactttgatgaccttttctcccactgcacccacctaaactcctatgtggaaagtctagagcagcaaatcaaggaattgaaggaagaaaaggcggcccttcaagacagtcttgagatggcagaaggcgaagaagccaacactcgtgaggcataccgaaccctaaagatggattatgctaggaggctgaagaagctcgcccttgcaaagaagatctga

SEQ ID NO: 25449 - DNA, 210 bp, Zea mays
  Peptide Sequence Number=SeqID_68824
atggcggcacctcggccgtggatcttggggggctcattgcgtgcgcctgggctggcctacggggacttaagtatcgagtaccaggggccccaaaccctctctccccatcacgcctccatcatcctcgtcgtggacagaattgagaagaaaagggggagaagcgggagagagccagccgccgccgccatcccattcgcgccccgccactag

SEQ ID NO: 25450 - DNA, 693 bp, Zea mays
  Peptide Sequence Number=SeqID_68825
atgctcagctttaacccttatttgttgatcagccttacacttcacattaactctcacctttggagaagaacaggtggtccaggaggtagggctgggcatagggatggcaatggggccccattccccgatccccggcggggaattcatctattaggggacggggatggtgagataatactccccgcggggaaagaaatgggcaaaaaccaatccccatcggggatggcggggccgggtacagtttatcgccgcccatacccgttacccgtcggggacccgatattacacgtgggaccattaactcagtgtctcaaatgtcccagcgtggaataccagatcctaatcgccaggacgccgctcgcccgcagcccgctccttcgtccttccctcccttcacggaccgcggtcccctgccgccggcagccctgctccgccatccgccccctgctccgctgcctgctccttgctcgggcggtcgagccagacgtcctgctcgggctagccccctgcatccacgagcagatccccaggcggccgccccctgcgcttgagcagatccttaggcggtcaggcggccaacgtccatcgtccgcccctgtgctcgagcacatccccaggcagccaggcatcctgcgtccacgtggatctgatcgacatcggcttcttcctccagcgtccagccgtcggcactag

SEQ ID NO: 25451 - DNA, 183 bp, Zea mays
  Peptide Sequence Number=SeqID_68826
atgggcaagaacaacaagcgtaagcgtgagccaactcctccatcggaggattttggtgactcggagtactcagaggaggagttctcctctgagtctgaggggtctctggctcccatccccctgcaagtagccgccgagcgacttgtagatgatgtcagagttttagagataactgccgagtaa

SEQ ID NO: 25452 - DNA, 299 bp, Zea mays
  Peptide Sequence Number=SeqID_68827
atggccggcgagcgcctaggcggctgggccgggcgcgcgcgtacggggctgacggggccgggcgcggccggggctggcgagcgtcggtgcgggcacggtgcgggcacggggcatgaccgatgctttgccgttcgttcgcggccgggggccgtcaagtcgggcgcggccacaccacgggagagtgcctacgggtggggaaaggggagggagatgagggaggggggctgggcggctgtggcaggggatcaggggtttggggggaggctaggggatgacatggcggtcacccgcatggtagg

SEQ ID NO: 25453 - DNA, 330 bp, Zea mays
  Peptide Sequence Number=SeqID_68828
atggcgcggccatggcggcccgccgtggcccgcggtgtcctcgctcgcccgtgctcgtccgccccggtggcaatgagactgatggttttggttatgactatggtgctgacagcagtgaagcgggacccaaatagctggatgatgtggtattctggtccgagtgggctgtggtatcttgggccaggttttataggattgaagacatatccatacaaacatggtttgcctttctttttggaagtctggcttgaaagaatcccaaagttaagcgtgctcaacttggagaaatctaggatgggtgaccagatgggaagttccctactggaatga

SEQ ID NO: 25454 - DNA, 279 bp, Zea mays
  Peptide Sequence Number=SeqID_68829
atgcttcgtcgtcgaaggtcctgcaggaagaaacagcttcggctgaagctgtctaaaacacaaccatttcgaactctcaatctaaatcgcgtgatacaaaacagagggagaaaaattgtggagcgttacctcattggcagcgcaaggttcagggggttcggccttcaggcactagggcagtacaacagaggagaaacggagcccgccgatgggcttgcttatttgggccgcaggcctaacacataccaaccaactgtcaagtcccttggtgacttgtga

SEQ ID NO: 25455 - DNA, 2673 bp, Zea mays
  Peptide Sequence Number=SeqID_68830
atgacgctgaaggttcgaacaggaaagatcatggttatgtatgttgaaaagaagataattatagggatgcacatagacacaagggacacgagggctcctccacggtcggtcacaccacgattgtgcggctgcgcggaggggacgacgaggcgggggcatggcgttcgggcagttggggcatacgaggcgggtgcatgggctaggggacgcgagggctccgagacagccgaccacaccgcggagtggacgacgcagaggggacggcgtggcgcctggaatggttggtcgggcgggctccgtcctaggcaagtcggcggcatggctggtgatgcagaggaaacgacggcgcagaggagaagtgaaggcatcgcgagcacagattcgggcgacgcagcgggtgtggggcaggacgaaggcagcctcagcgagaggacgaagggggagtcgccgagcacggggggcgtcggactggggcgggcgtgtagcgaagtgccgaggacggggagaatggggcggcgcgacgatggctggggtaggggcgagcaatgtgaggggagcgtaggacgggtccactatggcagtgacatgttggaggggagtgggagggagaggcgaggcgggggcatgaccgcgccgagcgtccacactgctttcttaattagtagtaggattatcgggcacgcggagcacgcgctcggcctcgccggtgcggccgacctctccgcggcgcgcgtcccggcgctggtcccctgccgcgtcacggcagtgcgctacatggctgacccagacaccgatgaggtcttcgccaggatccgcctcgtcccgctgcgcggcggggacgcggacgcggacgcgggtggcgtcgaggacgacgcggccgcggcggacgagcaggagaagccggcctcgttcgccaagacgctgacacagtccgacgccaacaacggcggcgggttctccgtgccgaggtactgcgcggagacgatcttcccgcggctggactacgccgccgacccgcccgtgcagaccgtcgtcgccaaggacgtgcacggggccgcctggaagttccgccacatctaccggggcacgccgcgccggcacctgctcaccacggggtggagcacgttcgtcaaccagaagaagctcgtcgcaggggactccatcgtgttcctccgcggcgacagcggggacctgcacgtcggcatccggcgtgccaagcgcgggttctgcggcgccggtggaggcggaggcgacgactcccctgcggccgggtgggaccattacgcgggcctcatgcgagggaatgtgagcccgtgcgcggccgccaaggcacggggcaaggtgcgaccagaggacgtggccgaggcggcgaggctggcggccgccgggcagtcgtttgaggtggtgtactaccctcgcgccagcacgcccgagttctgcgttcgcgccgccgcggtccgcgtggcgatgagggtgcagtggtccccagggatgcggttcaagatggcgttcgagaccgaggactcctccaggattagctggttcatgggcaccgtcgccggcgtccaggtcaccgatcccatccgctggccgcagtcgccttggcgccttcttcaggtgacctgggacgagccggacctcctgcagaacgtgaagcgggtgagcccatggctggtcgagctggtgtccagcatgccggccatccacctcgcgtccttctcgcctccgcgcaagaagccccggatcccggcgtacccggagttccccttcgaagggcagctcctgaacccggcgttcccgcccaacccactgccgcacggccagcaccaccaccatttccttcactcccactcccaccagcaccaccacccacccttcttcccgttcccggccggcagtgctcctgcagccatacagggagccaggcatgcgcaattcgttccacctttctcagaactccacctcacccacttgcagccgagcctgctgtaccccaggctccgccgtcccgaccatgtcggtccgacgaccccgatcccggcaagagtcagcacggacctgaccatcggaggcgcggcggcggcggcgcgcgacgacgacgacgacgacttcccgtgcgctcctccgtcgacgggtgccaacaggcagaagcccgacgccaagccggcggggctagtgctcttcggacgcacgatactaaccgagcagcagatgagccgcagcggcgcaacctccccagcggcgaccggcaacagctccacgtgctggaacgccgagaaggggcccaacgcctcggagggctcggggggatccggcgtcatccagaccagcccggccaaggccgcgtcgtcggagcggccgccgtggctcgggggcgacggcagccagcagcagcaggcctccggcgagctcgggctggggctggagcccgggcagtgcaaggtgttcgtggagtcggacacggtgggccgcaacctcgacctcgcggcgctgcgctcgttcgacgagctgtacggccggctgtccgggatgttcggcgtcgcgggggcggagctgcgcagccgcgtgctgtaccgcggcgccgccggcgacgagcccttcagcgatttcgtcaggtcggcgcggaggctcaccgtattgaccgatgctgggagcgacaaccttggaagctaa

SEQ ID NO: 25456 - DNA, 1017 bp, Zea mays
  Peptide Sequence Number=SeqID_68831
atgaacaaaacaccgacattcaaggtgccatcacaaacggaactccggttccgtccccgcgggtatgaacaacctccacaccggggagcctgcggggcgacaagttccgggcgactcgccagcgacctctgcagcagcagctatggtcccaggacggacgcggccaccggaaggctctcgttcgcgtccccgctcaagggacgcgaaccagacatcaaagccaaagagtcgtgcggcgtccgcctcttcaccaacgccacaccggcgaacgcgggccgctccaaagcgcaccggcaggacacctcctccgcagagctggaggatggtttccaccaccagaagctggaagaggaggtggccagccgacccgtgcgggaggtagagccccggctcgcctcgctctccgccccagcaagcatgatgaacatccttgaagctgagggtgggaccaagatcgcagcccggcttgcttctccccatccaggggctggtggtcaccgtcttgggacaggcggcgcctcaagcaggagaagcaagcgacgcttcgccttcgccataatgaccgcgtcaaaaaagggaccgggaaagggggataccccgaaaaggatccttctccgtgaaggaaacaggcctcgagcctccctactgatcagaggttcaaaggctggcccctcggaggggtataacatctgcctcagagcgcttgggttccgcgcccactactggtcagaggttcgaaggctggcccctcggaagggttcaacggccgcctcaggccgctcgggctccgcgcccactactgatcagggcgggaacgatcttgtaacggaatcccatcagagggaggcatcgagcccttggaccccgtcgaaaggggaccgggtccggcagatcacccgcagaggctcgggggctgctctcacaaacccggctccgtccaaaccgttgacagcgtcaacataccagccgagaacttgggacccgaccgtgcacccgggctacggccagctcgcatga

SEQ ID NO: 25457 - DNA, 288 bp, Zea mays
  Peptide Sequence Number=SeqID_68832
atgacgcgggacgaccgtagaaactgtgcataccgtttttattggaaaggtcttggcggcgaacatccagaggacaagcctaatttgtcaatatcattatttccatatggtgataaacaacctccgggtactgtcctgtgcggttattatgtatgcgaatggtgtcgtgtcacctttcattacatggtcaatcgtgaggatgttcctaaatccaagatcaatgctgaatggttagaaagagatacggtttccgttggcgtggctaaggttgtaaaagacctgctttag

SEQ ID NO: 25458 - DNA, 567 bp, Zea mays
  Peptide Sequence Number=SeqID_68833
atgtaccgcgggctgaggcggtggctcgccggcgagatcatggctacggcgagcagggccagctgctggggcgagtcgtcgtcgtcggtgacggtggccgcgggcggcgacgtggagcggagctgggagtcggccttcatacagaagcactggtcggcgcagcagctgcggcacaccgagcagcagtgctggcggccccagcgcagcctgccagagaagtccgttgccgtgctcaaagcgtggatgttcgagaacttcctgcacccgtatcccaaggaccatgagaaggacgtgctggcggcaaggaacagcctcaccaggaaccaggcacagatcgaaatcccaccagactcgtttcaaattcgattcttttttggcgagatggggttttggaattggttcataaacgcgagggttcgtctgtggaagccgttgatcgaggagatgtaccaggaccttaagaggagctcgggtgcaggaggaggagggcacggtccggcgatggagccgccgcagcagcacttgagcaagcgtcgaatttgcgagctggaagatggtggccagtga

SEQ ID NO: 25459 - DNA, 831 bp, Zea mays
  Peptide Sequence Number=SeqID_68834
atgggcccccatcgtttccccttccacgcagccagggcccccaaatttggcaatgcaccattccccccaacaagcgcgctcgatctggcaattgcgtgcattatctccgtcgccgatttggaaagcgcacgatctacgacgctgatttggaaagtgccttgccaaatgattccaacacaaatcccccaaatcgtgcacccaccatcattaaaaaggtcgcaattgccagactgctacaaccatcctacaacgacggaaatccttcgctcacactcctccagcttgtaccagaaggttatgtgtttgtgctgggagataaccacaacaatagcttcaagtacaaataatctgaaaagatggttccctaccgtttctgcatataggaagaacgaactagtagaagaattggctgaaaggaagcacctcttctgcgcacgcccacaagcactgggagagaccatccggacgatggacctggagacgttggttccttacgagccaggggctgtgttgagcactaaaaagagcacggacggtccggccctgaggccggacggtccgcggtccggacagtccgcagccgtgggcgagacggtccgcgcaagcgcagaacatattagggttccgagtttcttgctatgtttgtcggcatttcgaacacggggggtccctggaccgacgagtaaattatcgccgcgtgccccagcccagatgggtcggcgcgagacggagcacgaaggggggaggcagccggagggagacgggcgtgagaggtggaatcccgcggccttcgtgtttgtcccgcgcccaggtcgggtgcgcttgcagtag

SEQ ID NO: 25460 - DNA, 501 bp, Zea mays
  Peptide Sequence Number=SeqID_68835
atggcgaactcgaggagcgcatccttactacgatcccgacggtttccggccctgttcacggcgcacggtgaatccacggcgatgggttttcgccaggcggaggagggagcacaagtcgaggttttatactcccccgcaggtcgatacgggcgcaagtggtgcggtcgagcaggcgccatcgtcgccagagaaatcggtggggttgttagagatgcttctgaccgagctggcccaccggtcagaggcaaaggacccaagcgcgcgccgcgaatgaccgacaagcgggccccggccagcagcgacccgagtgcgcgcgcagaaggttactggcaggctggccccacatggcagtgtcacgatgtagaagatgggctggcgcaaggtagggacgagtgccctagtggccagggtgtcacgctccacaagatcgtgacagccataggaggtggtgtatcggttgctaaggcgcagcgtctttggaaggctgtagtcgggccgtga

SEQ ID NO: 25461 - DNA, 813 bp, Zea mays
  Peptide Sequence Number=SeqID_68836
atggcgcctcctgttgacgtggtcggtccgtgccctagtttgggcgaggtggaggctcctccggggtcgaggtcgagtctgtcttccaaggtcgaggtcgagtccgagcccccgggtcggacgaggcatagaccatcggctaatgccagggctgaatccgagccctggggtcgggcgaagcggagttcatcgtccttcggggctgagctcgagtccgagccctggggtcgggcgaagcggagttcgtcgtcttcctgggctgagcccgagtccgagccctggggtcgggcggagcggagttcgtcgtcttccggggctgagcccgagtccgagccctggggtcgggcgaagcggagttcgtcgtcttccggggctgagcccgagtccgagcactggggtcgggcgaagcggagttcgtcgtcttccggggctgagcccgagtccgagccctggggtcgggcgaagcgaagttcgtcgtcttccggggctaagcccgagtccgagccctggggtcgggcgaagcggagttcgtcgtcttccggggctgagccgaagtccgagccctggggtcgggcgaagcggagttcgtcgtcttccggggctgagcccgagtccgagccctggggtcgggcgaagcggagttttccatggccccttgggccggacttgcctgctgtcagcctcactttgtcgagtggctcagcagtcggtgcggcgcaggcggcgctgtcctcttgtcagaccggtcagtggagcggggaagtgattgcggtcacttcggctctgtcgactggaggacgtgtgtcaggataa

SEQ ID NO: 25462 - DNA, 372 bp, Zea mays
  Peptide Sequence Number=SeqID_68837
atgggcaagggtaacaaacgcaagcgcgagccaacgcctccatccgaggactttggtgactcggaatactcggaggaggagttctcctctgagtccgaggggtctccggctcccgccgtcgagcgctccgggctcgagggctcggatgagtcggagtactcctcggaccaggaggactcgcccgaggaggacggcgaaggtgacgacgacgacgacggaggcgacggcggcgatgacggtgacggcggcagcaggggcagcaacggcggcagcaggggcggcaacggcgacgacaagggtggcgacggcggcagcagcaggggcagcaacggcggcggcagcagcaaaggcagcaacaaggccagtggctag

SEQ ID NO: 25463 - DNA, 1869 bp, Zea mays
  Peptide Sequence Number=SeqID_68838
atgaggtgctctctagctgctgtgaacaacacagcgcttacattgtcggacagggtaactgaaaggttaaaggatttgggttttggtttgttgccaataatgaatatagaagtgctcgaggatagggtgctaggggcatacttgctttctagcgtacatgataatcctttgtgcattgaagttggcggacgctcgttgccaataacagctcaagttgtccacctcgtcactggtttgccaatgggtaatcaaaagttccctgagcttggctaccacgagatgaccagtgccaaaagtagattcagagccgactgtcaaaatggcatgtctgcttttaagaggctgagcacgaaggaagtcctccgcgaagggggcgcttgggccttcgcatggacgacgttcgcggccaggctggcagagcgtgctagcgcggccttcggcctgcggaacgttgatgtagaaatcgacgagcgaggggggcgtgttcgccttcaccccaacaccaataaccatcaggaatatgatgatgactggattgtgcagtgctttttggttcttgcaaacaactcgcttcttttacctacagcgagtctgaatatatccggggcagattacaccctcgtcgaagaacatagcaaaggatatgactcgtgtcagaaaccgacggccgagattagatctgcggccgagggcgcgcgcgcgggcgggcgagtgctgacaggcgggccaaggggtgtcagcgacagagggggagggcgcactgaccgagcgggcccagcgctaggggacacgagcgctgacaggcggcccaggggcgcagggcgagtgtgcgggaagcggtatccgcgatctgggtcgtgcgatcaagatcggacgggggagatcaggccggggaggggtgaacggctgtgggcagcgctgctcctctcagcgctggtgaggtcgccggagttgaggcaggcgcgagctagggtggctccggggtcgccaggattgggcagagagggagaggatgccacggcgaactcaatggcagggaaaaggccacgaattcgagggcagagaggggagaacgacagggagaaggcctcgggcagaccggaggaactccgggacgtcgagaacatagtatactctgccagccgaggtcttggggttgtcgataccagggcatcacatcatgttgttgtatttgttgcgcgtggtggctcgaccagttccattagaggaactcatggtagacttcgtcaaaaggccgccgcaaacaggggcagcagaccaccaacggcttcagatgggaggcaaccaactggatctgctgatacaggccgagccacaaatagtgaaagaggtatcctatatggggttaattcattggagtcatcattggctgggtttgcgtcgtcgctccatgacgaatcttcaagggaggcatttagaaaagcattgatagagcatgacaattcaattagggtggcgctgactaatattgaagtgatagagaagcaaattgcagactcacatgttaagctgaagaagaataaggaggttgcgccaagtgatcggccagtgacaacagtagatgatgtgactgttgaacaagtggcacatcaggctatagatttagctcaaacaccacaacctacagcagaagaagaagctgcaccatctcatcagcttacaacagaagaagaagatgcaccatctcatcagcttgagacagtaggagaaccgatattggctgaagaagtgttagatcttgctgcatcagttgagtcacaggaggacactggcactccagatgccccctcagctggagcatacacacctcatctagagggtggacaaacagatgctgatgaaccttag

SEQ ID NO: 25464 - DNA, 234 bp, Zea mays
  Peptide Sequence Number=SeqID_68839
atggcgcggtcggtccgagcccaaggacgggcgaggcgaagactcctcccgaggctgagccctgagatgaggatcaagctcaagataatgatgatgaagatcaagaagagccacctcaataggaggacaatgatcaagggggagatgctaataatcaagacaaggaagatgatgagggaccaagaccgccacacccaagagtccaccaagcaatccaacgagatcaccccgtga

SEQ ID NO: 25465 - DNA, 92 bp, Zea mays
  Peptide Sequence Number=SeqID_68840
atggatggacaaagtgcaaatcaagagcaaagccaagaggctgtttcggtctggggcaccggactgtccggtggtgcaccggacagtgtccg

SEQ ID NO: 25466 - DNA, 2436 bp, Zea mays
  Peptide Sequence Number=SeqID_68841
atgacgcagcttggtcatcgtggtgttcatatttcccatgccgaggatgaacgacaacgttaccacgtccagcagggacaactcgcttgccagaacgccaagcacagccccagcactagacgtgcacacaggagcttgcgctcagctctgctcgccgatccaccataccaaaagcgctctccttcgtctccaaccccaccctccctcacaccctcaccagtcacctccacaaacgagagaataaaggtgaaaggacccctcggattcacaacggtaaagcctgcggcaccctgctccttacagcccactcaccactctcgctccaactccgagtttgagtgcagcagaaggcagagcaggaaaggaatttcggaagggacgggtacagcccgcagcgccaccacaagggagcacctggaccaggagcctccaagcgcaagcaaccaagcgcagcgcagagcacaacccgacgcccagcacaaccagcagccagggcagcataaagcaatgcagccgggaggcgcggcttccagtaccgccaccggtggacggaggcgcgtgtcggtgcagtccaccaggagcgccggcgccacaccggcgtcgtcggtgtgggaggcgcggatgaagatggacgaggtcaggggcggcgtcaaggtcttcagcgccggcgccgccgacgagccggcggacgaggagggcgtgcgggtctaccgccgcctgcgccgcaaccagagcgagggcggcggcgccggtgccgcggacaccgccgccaagaagaggcgcagctggaaggcttccaagccggtcaccgcgatcggggacctccgcaagtcgcgctccgacgccgccgccgccgtgacgacggccaccaccaccgccactgcggtggttgctaggcgggccgtggcgcgggtatccatgcccgagaagaaggtggcgccggcgccagcggccgccgccggcgaggtcaaggaggtggtggtcgtggaagtgcacaaggctgcggcggcagacgcgaagaacgtggcgcgaggaccagatgaggagttggacgacgacgacgacgaccacgacgacggcgcggaggtggacgacgacgacgagcaagatcttgagccaccgacaaaagggattaagcccacgctgtcggtggaagaagagagagcgaccaacccagagccggtgaagccgccgcctccagggaagaaactagcctcggtggtcgatctccgagcggtcaatccggaacccatgacccctgctcctccgccagtcgagaagaaggcgacaccgatagtggttcaccgcatgaccaacttcgagctggcacaatcttttccagagaagaaagctttgccggcggtgggtccccggattccgaagacagagcctgccagcagtcctcctggtggtgaggagtatgaggagatccaaggaagaccatctcaaccgagcagaagtcaagcgagaatgcagaacattgtgaatctggtgatgtggaccgacgtgtcaaaatccgcgctggtgttcggactagggactttcttgctcgtctcctcctcctacgccaaagacctaaacttcaacacgatcacggcggcgtcgtatgcaggcctgatctacctcggtctacgcttcctgcgcaagtccatactgagcaggggtgaaagtgtggagtgcgacgatgatggaggcgtcggcggcgataggtgctgctacctggtcggggaggaggatgccgtgtggctgctgaggctggtgctgccgtacgtcaacgaggtgctgctaaacctgaggtctctcttctccggcgagcctgcgaccaccatgaagctggcgctgatactgttcgcgatggcccggtgcggcaactttgtcaccctctggacgctggccaaactggtgttctttggggtcttcatcatccccaaggtgtgctcctcttactccacgcagctggcacgatacggcaggttctggctggagaggctgagggacgcctgggagtcgtgcacccacaagaaggccgtggtggcggccgccttcacgctggtctggaacgtctcgtccacggcgtcgcgcgtctgggcggtgttcatgctggcggtggccgtcaagtgctaccaccagcgcgtcggggagttcggctggagcagcagcagcgcgggggcgcaggaacagccagcggacgacgacgacgagccgccgccgccgccgccgaagcacagggcccaggacgagtcgtcgtcgccgcggcaggagttcggggcgccgccgcggcacaggcgggcgccggtctccggcgagttcgcccgcgagaggctcagggctcggggcggcatccagcctcgacgcagtgtgttcgcgctaaacgcctcgaccaaaccactcgagcccactgctaatgagccacgaatggagttggttggggggatg

SEQ ID NO: 25467 - DNA, 249 bp, Zea mays
  Peptide Sequence Number=SeqID_68842
atgaacgtatgtgagctcactgttgttgtctcacacccccccataggtcaagcacaggtaccacaggatgaggcacatggggatgttgcgatattcacgtggtctgtgataactctcctccgattaattcaccctgatggtgatttgcctcatgaagaggttcatcttgatgatgaaattcctagcaatgcgagcaatatcattgtgctaggaatacagaacaatgaatcttttgtttttgggaaatga

SEQ ID NO: 25468 - DNA, 1164 bp, Zea mays
  Peptide Sequence Number=SeqID_68843
atggtcgcttctcactacgagatcatcctcgagcgggtatgcgagggctacgtcttccttgacgagcctgaccttgtcgatgccaagatgcggaggctcgttgatgctgtcgaggggccagagtctttgctggcttgccacttagaggccgagcaccttggcgatgatgaagggtccttcccagggaggagtgggcttgtggcgcccttggttgtcttgccaactggcaacctcggcaggatcacacgatcctggtggtgttggcgactgcggtcggccagtaaaatccttgccaaaggcgttgccgacgagggtctggggtgccgcatggtgcccgcaagcccccgagtggatcgcgcccaacaattcctgcccctggctgatgggtatacatcgctggaggattccccaggggctgctcggtacaactccttttcttctcctagcagcacaaaagtttttgctcgtcgtgtgaggcgtcgggcctcggccttctgtagagggagctcccctcggaggagatactctaggtatggtgccctccaatccatgactggggcagccccattgttgtcattgtcaatctgcatggcctcgggcccatcgaatggggatgcgtcatggggggcaggttcgggcacctccttgggtactactgaggctcgaattcttcatgacctggtcgatgacgagctaggagtctccccaaacgtcgaggcatctgactcctacttcaatggcaatgcacaagccattgaccaaggcctcatatccgaccacgttgttggacgcggcgaagtggagtcgtacgccataccacagaaagtcggccatgatctgggacttgatggcctttctgcgggcaaacgagagagcttctcccatgagttcgaccgcccatttggctaccctgcccgaggcttccctgctctagacgatttccccagagggaaggatgataccaccgttactgggattagcgaaccactcgggatggaacacttccttgatgaatctggtcgccaaaagcttgtggatctcctccccgatgttcctttgcgtctccttatcgaatcaacgcaggtgctgcctcataggcctggagttggctcggatatccaaggagtgttcggcgacttccctcggtatgctcgacatgtctga

SEQ ID NO: 25469 - DNA, 993 bp, Zea mays
  Peptide Sequence Number=SeqID_68844
atggaggcgctggtgtcttctgacggcggcagcgtggagaccaggccgcgggtgggtttgggaaagggcgccgatggtggggaggaatttggggtgcggctgccggcgttgaaggtgggcggcgaggatttggggcgagggtggcagccgcagcgtgtggggaggaagccacgcgtgggggataggcgagggcacggtgaggcctcggccacctgctccaccgcgaatcccgcagatgaccactccgttaactgtggtgcacgtcagggagaactcgaccatcgcctcaggaagacttccgcctcgttcgagcttggctctaacctcgatatctgcatcgaaggacaccccacgtcatccaacacaggggcgctgaggcatcccgtaagcggacttttacccataccgaggtcttgttgcaaccactacgatatgggcatcccctccccggtggctcgggcgtgtggccaactcctcggcctcggctctcaacggaaaaacggcaaattcaagctgaccgatgacgtaaactccctttcgagggacctggccaacatcagcgtcacgcccaaagcaccagcagctgcacctacatgccacacatcaactctcctggtaccacctcctctggaatgggaagtgccaactccccacgccatcgagaaggctatacaagccacaccggatctcccactctcgggtcaggagaggtcggccactccttggcaggacatgtcaggggctagaggagaaccgtccgtgttcaacccaatcccctttcgaccaagctttgacaccagttctgtcaccaggctatatgtcggacttcctttcccctcaaggtgcctagacttcgaagaggaagatggttcaggctttggcctggacttctttgggctacgagatcctgagtccacgctgcagttcctgtacgcatgtgacgagttactctccgacatctcaaagggttatgacatcggcgaggagagctag

SEQ ID NO: 25470 - DNA, 306 bp, Zea mays
  Peptide Sequence Number=SeqID_68845
atggagcccagtcgcatcccatggagggccagtctccaatggatccatggcttgaaggtgtcatcacctctcgaggattcaagatatgaggcactaaatcggcagagaggcgctttgagtttcttttgccagtgcacccatgtccaattgtccaagttcaacaggatcttcgggaagcccaaggagcagcccaactccaatgccttgatcactctagacaagttctgtagtgtgcctcatgttgcccagtcgagtatggggatgacagatgcatcccattctcttgtccagctcttctggctctga

SEQ ID NO: 25471 - DNA, 594 bp, Zea mays
  Peptide Sequence Number=SeqID_68846
atggcctccaagctgagtttcaagagggcagacagcatcgccgaaagcatgcccgatgcgctgaggcagagccggtaccagatgaagaaatgcttccataggtatgtttccaagggaaggaggctcttgaagaaccagcagctcatagaggagctggacaaatcactggatgacaaagtcgagagggaaaagcttgttgaaggcttcctgggttacattatttgttccacgcaggaagcagtggtgctatcgccctatgtcgcatttgctgtcaggatgaatcctggcatctgggagtatgtcaaagttcattctgatgacctgtcggtcgaaggaatcacaccctctgagtacctcaagttcaaggagacattatatgacgagaactggctcattgcaagtgctagcgtctacacgagtgataggactggcgtcactatttcgcaagatcgtcgtggccctatcgagaacggagatgctcttagcgaagcaggaggacatggtggacgtgaacatgaagctaaagctgacttccagccaatccaactagcagcagtaggcggggagtggatgcgcctgctagaagagtgctag

SEQ ID NO: 25472 - DNA, 1683 bp, Zea mays
  Peptide Sequence Number=SeqID_68847
atgtcagggttgtgcggagtcttcacggccactgcttcattcaaggcggcgtacacctgcgaacgagacaactccgagctaatcccaacgcttgctgaatctcagagaggcatcgggccaggcaccacttatgcgaccgtggtcggccctgatgccgtcgggcccgtgaagcaaggaggagaccctaagacgactccaagcaccaccgatgtccccaagcaggcgatcaaccagaggcgcctcagtcgacaacagaggagagagatgggcgcacaccatgctaacaaccagacgaatcacttggagtttggtgctcctttccgagagaagggcatccgcccggtgccccgcagcaacggcattttcgcgagcaagcaagagcttgcatgtattctccgtggctgtagccttcgcttcatcctccgcgaccttcgtatcccgcgcttgagtgagaattttgcggacctctgcgagaataagagcgtgaggcagtcagaggtggcaaatggtgaagagacagcacccgcgcggagcaactctatccccacctgtgccgtttgcagtgcctccaccgagcctccgatcgtgcgagaaggtgctggcccaaagcggggtcgactcaagtcgtcgccactcctccgcctctgctttgtcgcccttcacaaaccccacaggcaacatggatccgccggcgaccatggtcggcgttatttgctcctaaagatggacggacccaggggctggcagcccacctctaggctgcaagcgacccctgtgacaatgatcggcggaggggcaagggcaggaagaggcaaggtcagagcagatgattgctctgtgaggacacaccaggggcaactgcgcgcggtctccaggtgcttccctaggacagatgaggatgacgatgagtcgataagaaccatctccgggatggccacgctcgtctcccttggaacgacctgggacgacaatgccaccatggggatggggacgacgcgtccacaccaggtgttctgcctccaccctgacatcctccgctccgcttcgatcccggatggtggtcgcgcctccgcctccgccttccaagattttcgcgtcgtacctccaccattttcgccgccgtgctcgcgacaccacctcccaaggatccacaccttcttgcccccgccaccgcctctcgcccgcgacctcccgcaccacgcgccagcccgcacctccaccattttcgccgccgtgcatgccgcacccttccatccttgcctctgtcgtcctcgccgaccacgcccgcggccacgaatctcgcctacgacaaagcaaggatcgagcccccgccttccaacctcggcggctccttccatcgtcacgtatacatcgacgtctccttccatccacgccaaaagagacgaccttcaatcccgtgaccactgcccctgctccagccctccatccctcctccatctcgtgctgctccttcggacttcggatcccatcgccccgctcgcctcctccctccctcctcccgtcgctgcagcacaaatctctgtcgcccgccgtgacatcctatcgtcggctcccagcacaccttctcaattttgtgtcgcctccgtgatgagcctatacggcggtcagatcgacacatggaggaacaatcgcggtgaggagctcctcttcaccagtagcaag

SEQ ID NO: 25473 - DNA, 867 bp, Zea mays
  Peptide Sequence Number=SeqID_68848
atggcattgctacgtaccgtcggcggcggcgggcggtctgcttcaatcgagccagaacgccggcgagcaaaacgagcagcggaggaagaggagcagcaagacggcgggcggctagggttttacggagcgcggaaagcaaagttcaaacagcgccgacccccgcccccttttataggcagggcgcggctcttcgggaaacccgcaatccgacaggccgcgacgcttcgggaaacccgcaatccaacagtacgccgtccatcaacggtcacatcaaaaacccccgcggaaccacttcgagcgagggcagcgtctccgccatctagcgacgtcttcggcaccagagagcaagttccaacagcggtgcgcacgttcctggacatgtgggacggggccggggtgtggcccaacgagctcaccgtcagcagcgtcctgccctcgtgcgctgcgctcggggccctcgcgctggggaggaaggtggagccctactctagggggagagggatgctcaggaacgtctatgtcgccaacgccttggtcgagatgtacgccaagtgcggcagcatccgccgggcttggaaggtgtttcggggcatggggacgcggagggatctttgttcttggaactccatgatcatggcgtttgccgtgcatggcctctggacggaggcgctggccttgtttcataaactgaggatgacaggggcaaaaccagatggcattacatttgttggagtcattttggcctgtactcatggaggcttggtggatgaaggcaagctgctcttcaactcgatgagaggggagttcggtcgtaagccaaggaaaaagatcataagaaatatgctgggtacagcgttattgagttag

SEQ ID NO: 25474 - DNA, 225 bp, Zea mays
  Peptide Sequence Number=SeqID_68849
atggaggcaagctgttcctcgcggtgcgcttacgagcttcgccgagccaaccccacccttcaccggacctccctcgccaccgactgtaatcttgctgacggagagtacatcctcgtgccggagcaaggagctgctcaggaggtagccccagatccagcacccgagcctgcaccagaggacctgcctgccactgctttggaaggcaagccccggttttatgcataa

SEQ ID NO: 25475 - DNA, 903 bp, Zea mays
  Peptide Sequence Number=SeqID_68850
atggaagaaacacacctccacgtgttcgacgcttcctgcccgcgccagagcacgctcgcgcgcgcccccgcacgcccagcgccgcgcccgagccaagccagcgccatgacccgcgcccgcgcctataaaaccctcccagacttcggttgtacccttccgcgcaccctcaaacctcaccggagtctagctcgtcgccgtttgcccgtgcgcagcgagtccgcggccgcccaatccctctgccaccgtagaccggccagtggagccattcccaactccgtccagccctcggagaagactgtgcacacctccgtgaggctccccgagcgaggaatcggagtttgcttcgccggagaggccagtccacgctcgccggagctctcaaccccgccggagtacgtggaccgggtaaaccactcaaccatccttcgattccttgtgcacacggtcgctgcgttaccccgtgaagctcaccatgccctcggatcaaaccagttcgccgtggtttggccggtacactcgccgccgacgagaacacccgcctgcgcgtgtggaccgggcgattccggccatccccgacgtcaagccgttcctcgacgtgaccgccagagcctccccgagccaaccccacccttcgccggacctccctcgccgccgcagattgccctcctcacgcgacctgagacgaggtctcccattccggttatggtgggtacaagtgcggtcactgcacgacggccagtcggggtcagtgaggcattgtacgccaaggcgccttgcttgtggcataattttacaggttctctggaggaaatggttgctggaataacttggccgtccaccttgccaccgggttggactgtcgagtgggaccctgcctcggctgaggaggagcatgaggagtga

SEQ ID NO: 25476 - DNA, 336 bp, Zea mays
  Peptide Sequence Number=SeqID_68851
atgcagtatgagggtgaatggttctacgttaggaatcaagccgatagtgccacgtgcttaaccggtcgggagccggtgtcgacggacgactggaatcgtggggcagagccgagtctaaagggcaagcaccaactgttcgagattgaagctcgagttaaggtcgtcaccgcgttgtcgtcaaggttcttcaaggatgaggacttccccaaccctctttcccggggcatatcaggtggtctggggattggtcctctagcgctcagtcttccactgctccccaaggggtcgctgttcaggcagagcgtaagcgcaaaaggagtgacggggagaccctag

SEQ ID NO: 25477 - DNA, 624 bp, Zea mays
  Peptide Sequence Number=SeqID_68852
atgcagctcgtcaccgaggtgctcgctttcgccgtcgcgcagtccatcaaggtactcaccaccagacgttctttgagggatgatcccaattatgatgcactgattgcagccctatatccagatattgataagtatgaggaagagtttcagttgtttcttcttctccttcctgtcgatggacaaaccatacctaacttggaaaagccttatctaagctgtcgaccaaccttgtccattaaacatcttgcacatttgtcttgtgaagtcgaagaacttgatatgtacataaggatggaccgccaccgtgtaagtgttggctcgaggccttccagtacaggtgaggcaaaatcacgtccatttgatgacttggaaagactgaacgaagaaaaacttgttttggagcttcatccttcatttgtctctagcaacggtgatatgggcttatggattagggtttgtggattatttcgatatgcagggcgtggagttgtgtatgggatcaacgtgcccatgggcgcggcggctgggtccgtacatgaggttagggactacttgaagaacatgttgcccagctccagatacacgctacagggcagagctgagttctctgatagtactacatga

SEQ ID NO: 25478 - DNA, 297 bp, Zea mays
  Peptide Sequence Number=SeqID_68853
atggccgacggtccatcgcgcaagcttggctcactcaccgtcctgttcggcgtcggtgcctcggcggaaacgtgggacccacgccatgggtacccaaagtctgctcagtctgggttcaccggactgtccggtggtgcaccggacagtgtccggtgcgccaggctggctctggcgaacaggctgctctcgggacttcgacggcggcgaactcatcgctctcgggagaggattaacggcgtacggctaaaattcactggtctgtccggtggtgcaccggactgtccggtgagtgaatag

SEQ ID NO: 25479 - DNA, 174 bp, Zea mays
  Peptide Sequence Number=SeqID_68854
atggagagtcatgatctccgggcagaaagggaatcacagcttgtgggtggcaatgagattgatggttctggttatgattatggtactggttgtcagcattgcaaccactgctcaggagaagatgaagccgtggaaggagacttccaggagttccaggactacgacgagttctag

SEQ ID NO: 25480 - DNA, 2514 bp, Zea mays
  Peptide Sequence Number=SeqID_68855
atggtagtaggcaagcgcttgcgctgcccgcgttggcttggcgcattcggaaatttcggatcagaacgctcgtccacggaacctgccgtccgtgtaatgtgggcgcagctctgctttagtgctttgcaccccccacttgctactaaacaagaagagtgcagagacgaccgcggttccatcgacagagtggggcaaggaggaggagaatccaatagagatagatctaatgttatgacaaacaaatacatggcaaacaaatggttctggatcagtgtggattacagctgcaacattcctaatggttttaacccaccggcagcgaacagccatggaagcttgtcagaacctctgtcgccagctgcaagcctgcaattgccacgaagcaccacagcaccagggccaaaaacgtctttagaccaccacccgatatacaatttaggtgctgtttggttcacgaaatgtaacaagctgtctgaaaaactgagcgtttggcagtccgcagtagcttttggtggccagaagctgccagaagccgaaacaaacagggctattgtggcctacggcgaggctcaacggaaagaaaggaaaccgtcggccaaaagagaatgggccagctatcgttggggcgctttttcgcatataggcccctctttgctcaggataaatgctattgcttgcataacttggggacgttggaacccgcatgcgctggccatgttcacggaggggctagatcgcgacgccctcaagtgggtgcgagagggccagggagcggcggcgctgcatagccacgaccggatggacgcgctgcgtgccgtgcgcggagcggccggccgcggcgggcttggcatgccgacgccggagaagtttcggagcggccacatgccgcgcggcgcgacggtgccgctgtcacgctcctcgctgcgcagcgacgacggcaccgccgcctcgggatccgacatggacgagtcgtcggacaacgatgagatcgaggtctgcagcggcaggtactcggtcgactcgtcaccccgccgcgacgacgtgacccgacgaacggccgttcccctctaccgctacgccaccatgcctgggcagcagagctactactccactgatgatggctactcggacttgagctcttcgcgtgacacggcactgccaagagctaaggcacagccgttgggacggccgcaggcacgggtcgttgagtatgctgatgaggagtactccgtatctccaggcacctccgaattttctagccaggtggaagggcagagcaatggtgtgacctccaagggtgggtatgtatcagagtactcccatactggtccagcccgaagagaagcaaacaatttgggtcctaagaatcgtgcagcagctccagcgaggatgcgataccaacatgacagccattctgctcatgtccccgctcgagaggatgtgaaatcaacacgtaaattgtttcttggtgtgacttccttaaagacacccaagcttgatgatttctttcatgtacagaatgggtcatctggtgatattcctagtgcgccgccaataaatgattatgaccaggaccatcagccagtaactcatgatgatactcggtcttgtgataattcaaatttcaccaatggcttatctgccaaaaaagatcaccgggaagtcaatggaggagtaaacttagctgacaaaaatgacagtctgcaggggccctggtattctgtacttgcttatgatgcttgcgtccgcctttgccttcatgcatgggctagaggctgtatggaagctcccgtttttctcgaaaatgaatgcacactcttgagaaatacattcagcttgcaaaatgtcttgttacaatcggaagaggagcttatgtcgaagcgtgcgtcagagctagttagtgaaggggctgcatcaaagcccaagaaaacaataggcaagatgaaggttcaagttcgcaaagttcggatgtctgtagatatgccttctggttgcaacttatcatcactgccaatggtgaaattggattctgtccggtaccgtttgtccaatgtacaatccacactttcatcaggatgggagtctgtacggagagttcgagttctaccacagcttcctgctaacagttcgttctcaaagcacagcttagcatacatgcaagcaagtgctcagtatatcaagcaggtgtctggcctattaaaggtcggtgtaactactctgcggagcagttcagcctatgaagcaccacaagaaacatactcctgccagttgaggcttaaaagttcacctgaagatgatgtggtacctatgcagccaggatctggtgaaacacatgtcttctttcctgatagcctcggagatgatttgatcatcgatgtgtctgattcaaagggaaagtcttgtggtcgtgttgttgcccaagttgctacaatggctgaggatcatgcttgtacttgtggtgtgattatgtgtggtgtcggtgtgagtacacaacaacaacaacaacaacaataa

SEQ ID NO: 25481 - DNA, 1797 bp, Zea mays
  Peptide Sequence Number=SeqID_68856
atgaaagcacaacgcattcaacaaaggaaccttgttgtgcatggctcctggaagtggttattgacagaatttgcattgtattatggggtttcagatgcctacacgaggttgaggtacctgtcttatatcatggatgttgcaactcctaccgctgattggctcaatctggttcacgggcttttgttacctatactgatgaaaagcgatggtactgctactttgagccaccaagagaaccgaatactgggggaagttgaagagcaaattgagcaaactctagctatggtttgtgagaattacaagtcgctagatgactctataccgttgggtttggcggaagattttaggcctccaactggattggctgctgctgctctggaaccagctattaagttgtacagtcttctacacgacgtcctatctccggaagctcaactaagattgtgtggttacttccaggcagctgccaggaagcgtacgaggcgttacatgattgaaactgatgagtatgtatcaggaaattcagaaggcttcagggtagacttggtaaccgttaccacggcttaccagaagatgaaatcattatgcaacaatctacgaagtgaaatttttactgatattgaaatccataatcagcacatacttcccagttttgttgatctgccaaatttagctgcctccatctatagtgtagagctgtcaaatcgtctacgcgcttttcttgttgcttgccctcctgctggtccagcatcacctgttgctgatttggtggttgccacagctgattttcagaaggatctggctagctggaatatctgcaatataaaagcaggtgttgatgcaaaagagctgttccatttgtacattgtattgtggattgaagacaaacgcaggatgttactggaaaactgcagactggacaaggtcaaatggtcaggagttaggacccagcatatgacaacaccttttgtggatgagatgtatgatttgctgaagaagacattgacagagtatgaagttatcatttgtcgatggccagaatacatatttgttctcgagaatgctattgcagatgttgagaaagcggttatcgagtctctggaaaaacagtatgcagatgttttggctccactgaaggattgtattgcaccaaaaaaatttggcctcaaagttgtccagaaactcacaaagcgcaattcaacggtgccctacactgtacctgaagatcttggcattctcttgaatacattgaaaagattacttgaggttttgcgacctcggattgagagtcacttgaaatcatggagttcttgtatacctaatggaggaaattctgcggccattggagaaaaacttagtgaagttacagtgacattgagagctaaattccgaaattacatgcaagcagttgttgagaagctttcggagaatacatctccatctatcagaccatactggcagcaaggaattatgtattttagatcgcaaacaatcggacaggtcagcagtacagcacaacacaatgcgcccagccttgccattctaaggggaaatgtaggggcagtacatccggagctggactccatgggagaaggaccgagatgtgttatcaaactcacggcccttgtcactcagaatggccttaatggtgtgatcaaactgagtggaaacacaagcgaagaagtggagacagagtcacaaaagtatcagactccgaatgcaatgcaaaagtctagaaataatgagagcaatcatcaagaatcatcggataatatttataacatgagacattggtaa

SEQ ID NO: 25482 - DNA, 477 bp, Zea mays
  Peptide Sequence Number=SeqID_68857
atggagcagagtggagctgtaatggtagaagtggtgaccggtgccggtggcgcagagacccgtatgcaaaataccacaaagctcaaaaagatcattcaggattcaaaagagttggttattgaatctgatatccgcagcaggatgcaggccttgaaggatcagctaattgaggcaataaatcatgtgcacaaagtatctgaagtacatgtttttttagccatatgccgaggtttttgggaccggatgggacaggatgtgctgagtttcctggagaatcgcaaagaaaacaaagcctggtataaaggtgcacgagtcgcaatctcagtattggatgatacttttgcatcccagctgcaacagctgctaggtaatacagtcccaccgaaggacctagagccacccagatctatcgtggaagttcgttctattctctgcaaagatgcaccccgccagaagaattctagtttctattattga

SEQ ID NO: 25483 - DNA, 510 bp, Zea mays
  Peptide Sequence Number=SeqID_68858
atgcctgccccgcctcctcctccgtcggcggggaaggtgacgggacagacccggatgttgctctcccgcaacgtggggaagacatcgtcgattccaccgcctgcgggcgggctgacggccgacattgtcgttgtcgcgcggtggaggaaggagtatcatgtcgtagctgccatcgagggacatgaactcaagactctcgaaatgaagcatcgtcttgggttggagaggttcctggagactacccatctggagcttgacaggaagctgttcgtcaacacgcagcagtcccctacctggcgcgccaactgtcggcgtttcgaccccggggggtccctggaccgacgagtaaattgtcgccgcgtgtctcagcccagatgggtcggcgcgaggcggaacacaaaggggggagaaacagcaaaggggaaacccgcgaccttcgtgttgccctgcgcccaggtcgggtgcgcttgcagtagggggttacaagcgtccgcgagtgagagtgagtga

SEQ ID NO: 25484 - DNA, 101 bp, Zea mays
  Peptide Sequence Number=SeqID_68859
gtggcaatgagattgatggttctggttatgattatggtactggagaagatgaagccgtggaaggagacttccaggatttccaggactacgacgagttctag

SEQ ID NO: 25485 - DNA, 393 bp, Zea mays
  Peptide Sequence Number=SeqID_68860
atggcgcctcctgttgacatggctggcctgcgccctaggttgggcgatgcggaggctcctccgaagccgaggtcgagtctgtcttccgtggccgaggccaagtccgagcccctaggtcgggcgaggcggaggtcgtcggctgaggccagggcggagtccgagccctggggtcgggcgaagcggatcggagtggcgcaggcggcgctgtccttctgtcaggccggtcagtggagcggcgaagtgacggcgggcctcgggcgagccggagatatgttcgccgttggaggggggcctcgggcgagacggaaatcctccgagctttatgctgatgggggttaccagctgagaattaggagtcttgagggtacccctaattatggtccccgacagtag

SEQ ID NO: 25486 - DNA, 165 bp, Zea mays
  Peptide Sequence Number=SeqID_68861
atggcggcaaccacccccgcggcggacaggcgacacctttggcaggcgaagcaggcgacgcttcacctccgccatgatgaccgcgacaaaaagggatcgggaaaggggatactccgaaagggatccttctccgtgaaggaagcggaccccgagcccccctactga

SEQ ID NO: 25487 - DNA, 429 bp, Zea mays
  Peptide Sequence Number=SeqID_68862
atgctgttcgggaagcctgagaagagtgatctcgtggctctcaacttggatttcgatcaagtcaaggagtttatcaaggagcggctggggattgagagaggttgggcaacattatcagcttctcagagtgttggagggattgaaatcgaggagaactgggacaaggttaagactatttttcttcctactgagaagccaacgacgtctaattcatgtgctcctttgattgcaacccatccattggagccccaaccaccaaacatgaccgttggtggaggccgtctgttcgatggcgcaccggacagtccggtgcacaccggacagtccggtgccccagccacgtcaccagtgtcgttggaaattgaccgttggagttctgacttctgggcccgccttgatgtccggtggcgcaccggacatgcactgtag

SEQ ID NO: 25488 - DNA, 780 bp, Zea mays
  Peptide Sequence Number=SeqID_68863
atgacggccccccgggaacaggagagaagcaaaagcgaaagcacggaagcaccacgccaccacctgtcgtccaaccaccaatgcacaagaatcggctcggccccagacagcagagacccaaacgcacagccaggcaagggagccgtgagtcgtcggaactcggacgtcagtacgtcacacaaactgccgagccgttgtggggcgagcaggaaacggactgcaggagcaggactgcaggagcaccaggagccttggaggtgcactccaccagtaggagtacttcctcaagtcctcatcccccattcctcctcgcggctcatagaaacctcaaaacccaaccaggacagcgtccacagaaagaagaaagagcacagagagtggagtagtggacagaccatggagctctgcgtctctacacccccatcctccgtccgcgccaccgccgcgcccatatccttcgccccgccccgacgtggcgcgtctgcctccaccgccgttccgccccaccgccgcatcccaactcgagtttccgtttcagtctggcgctgcgccagcgcggccgtgcctggcccggtgccctccgaagagccggcatccgcctcctacgccgtcgtcgtcacggacaagcccgatacgcctgccgacgacaaggccgaggaggttagcgccgcgcctagtggctccgcggaggcgcctatggcagagctggtgccgtcagaggcgtcatcatccccagatgatggcggcctggatgagattctaagcaaggaaggaatttaa

SEQ ID NO: 25489 - DNA, 405 bp, Zea mays
  Peptide Sequence Number=SeqID_68864
atggtttcgctgacatgtgggaccagagcgtcagctctatcatcccctcaggtcttcaaccaagcatgtcacatgctcgcctgggatgcggagttctcggctagagatcctaaccaaccggcaagattgatgggcgggaagccggtaatcgctcatcggagtaacccagtcaccaagaagtcgtcgtgcgccatgggtggagctctctgtgtcatgggatcgggtaagaccacatccatgacattctatatcacccgtacatcacgtagcgcccgttcattcgtggattcgagcaccagggtgtcgagtgccttcactccggcgatgggccatggcaagaaggggcagcgctgccgatgcatggagtcgggtgggggaagatgtcccctagccgttgtgttatag

SEQ ID NO: 25490 - DNA, 300 bp, Zea mays
  Peptide Sequence Number=SeqID_68865
atggaatttccgctgcaaatgttggtgtgtgatttgtgtttacttaatcctacgatcttggcggtggcaatcctgcctcctggtgttgaaatcataatgccccatttgtgtgatgaaaaggaaaaatccaattggaaatgtcttggctcgagcagccaagaatctgctgagtctgggagcaccggactgtccggtggtgcaccggacagtgtccggtggtgcaccagacagtgtccggtgcgccaggctggctcgagcgaactggccgctctcgagaattcaccggcgatgtacggctaa

SEQ ID NO: 25491 - DNA, 165 bp, Zea mays
  Peptide Sequence Number=SeqID_68866
atggcggacctcggcggctgcgcagcgaacggcggaaaagaaaaagaggggattgggaagggtgtgaaaagagaagtaacacctgaatttgtgaatatgagcaaagaaattttatacccccaaattcagggtgttacagtatcccaggtgataggagttgagtga

SEQ ID NO: 25492 - DNA, 537 bp, Zea mays
  Peptide Sequence Number=SeqID_68867
atggcgcatgggcccaaaccactagagctcggcccattacgcttttccttcgcgtggccgagcgtccaaacaggtgtgccgacatgtgggccatatctgccagtctctcgcctccgcatacgcatcggtaacctggctgtcgcgtgggccctccactcgctcctattcctcttcctggccgaggaccgcggtgcgggttgttgcgcccgcccggcaatcgcgctatccgcggctccagctcgtcgtagcttcaaaagcggaccatacgcccacgtgctcccttcccttcgcctcgtccaaccgacccgattaaccaaagtcgcggggactcgccatcgggttggaatcgtgcgcgtgcgaagcatcagacgcaagtgcaacggaattccgggggattgttcgtcggagtaccgagggccgccatgtgctcgttcttccgtcgacagtgctctgtgccgcgccatttctggtatggaccccattcctgagttcgctcttgttactgcaataagtagaacccatctaattgaggtttag

SEQ ID NO: 25493 - DNA, 813 bp, Zea mays
  Peptide Sequence Number=SeqID_68868
atgagcaggccggagcacacgccgccgacgagcccgaccgcctgcgcacgcggtcagccctattctggccatcaccgtcgacgactcgcacctcgacgtgactgccaggacctcacccaacccttcaccggacctccctcgccgccgctgttcgaggagcaccgggtaccccgctgtagggtgtggatgactttggagcctcatcccttgcagtcgggctggcgtttgttggactccgagtccttcggtttcagggctgaggatactatcgagtccaccgctctccacgtgctgacgaccttctgcggctttcaccccttggagctatcaacccatcccattggcttgttccccgctgagaaggaggacgacccaatgtggaaggatcgagtggagcacgccaaggatgtgtgggctctctacccaggacagactgctcacctaacagttcggtgcatgaatgccatgtatcgtctgcaggcagtgcgaggtgaggcaatgtcccaactgatgggactagtggagtataccaagatcaccctggataacagggaggaccttgtggtagaggccagggagaacatcatcgaggttctggaagatcagctccagaccacgcaacaacagcttgaggaagccaaccagcatttggatctgcaccatcaggagattcaagacatggaggcagaaggggccgatgaggatgtcgacatcgagggaggagaggagcaggagcctgcatccagcttggacactgctggctcagggggaccaccttcccccgagtctagcgttgcctcgtttgcccattag

SEQ ID NO: 25494 - DNA, 342 bp, Zea mays
  Peptide Sequence Number=SeqID_68869
atggcgcaccggacagtccggtgcacaccggacatgtccggtgccccagccacgtcaccagttccgttggatttcgaccgttggagcatctgccttgtgggcccgcctggatgtccggtgcacaccggacaagtactgttcattgtccggtgcgccagtatgggcgtgcctgacttctgcgcgcttctggcgcgcattgaatgcgcctgcagacaatcattgagtgtctggaaatttcttgcatcggcgagctgccccccaactcatttagatctgagagtgaagtttgaaatagggcatgagatagaggattggatatgggatctaatggagatagcctaa

SEQ ID NO: 25495 - DNA, 894 bp, Zea mays
  Peptide Sequence Number=SeqID_68870
atgtcttcttcctcccttatgcgtcgtgtctttccatcttccaagcccccggatgggggatatccgccgcctttccgcctcctcgttggaggagcgcaaccccatgggagttggtacctctcagccatcgttcgacttcaaggattttcatcagccggcccggccgcacccctacgccggcgatcacccaggatggtgaccaccagtttctgggtggggaagagcaagccgggctgcgatcttggtcccaccctcagcttcaaggatgttcatcatcctcgctggggtgggggccacgctgagccggcgctctgccttccgcgcgggtccgcgggtcgccctttcccgcggcgtttgggggtagaggcgctcgctggccctgcggacggcgcggacttagacaacgtggggctgatcgacggcgggcgtcgtcacctccagcgtgtcgaagtcgtcggccgggcttccggcggcccctcctgccggagggcgaccgccgcgccaggccggtgccccactcgcctgggaggattcgagtggggatctgccggggggctggtgtcccctgccatcggcgccgaggcggaggcggctcgagaagtcctcgtcgccgatgggatcactgccaccacccgcgccccgggccaccgcgccggcgtgcttgtcctcgcccctcaagcgtcggcgggggcgagagcaagatcgcagcagcgccagcccactgtcgccgtagttagaacgggcggcggcgagccgctcgtcagtcttctgctgctccgcaggccttccccatggagtggggtcgttcgtacccgcggagggggaaccggagttccgtacgtaatggcacttcgaatgccagtgtgtttgttcattgtggctgtcggggcctga

SEQ ID NO: 25496 - DNA, 771 bp, Zea mays
  Peptide Sequence Number=SeqID_68871
atggggattagctctccctgggcaaaacgggaatcacggctcatgggtaaaatgatgactctaatgatgatggttaacgatggtgactttattatgtttctagtattcctctctaaggagatggctcgtcttagacacactgcacgtaagtcggtgattcctttcctgccgtctctccttgcggagcgtcctatgcgccgcaccgtgtccggtcagtcgagtcacctggagagactgcaccaccgcctgcgtgaggagcaggaacgccggcgtcagcacagagagcagcagggctcttcctccccacctcagcaggaggtggagtccgtgaggcgtcgttcctctgctccccagctggaggcgccccctgtaccactgcgggacgccccggctgctggaggaggtcctggaggagaccccgacgacgacgactcagaccacagcacggagtcctctaagccgcaggaggcggatggatgggtcgcccgacccatcacccgtgacgccgctcgcggttgtcacttccacgacgcactcgacaccttgctgcgccaggctttcgaccggcacacctggtcgatcgagtatcgttgtgtagtctaccagcacagtcgcgggaggtacccggaccgctgggaggctacctgcctagttcgccgtccggaggacgatctccggggtgcggaggccgtttcggagcactactccatctccgagagggacactgcaaaggcggctatgcaggatgcagcacggcgtgcactctcctag

SEQ ID NO: 25497 - DNA, 204 bp, Zea mays
  Peptide Sequence Number=SeqID_68872
atggcacagggagcttcacgggatgctaaggatgctacaggtgcaaggaatcgacaaatggcttactttggagctcggtctacgtgcgatggcggttggttgaagtccggcgacgttgatccggcgtctccgggatatgccttgggtaatttggccactttttgctatttggtccaagtggttttggtgccagcacaagggtga

SEQ ID NO: 25498 - DNA, 1377 bp, Zea mays
  Peptide Sequence Number=SeqID_68873
atgttccaaggccctcccctgcggcgcgggggctgggtcccgcatgtcatgcagaccggctccgagcagaagaagccaaaccgccgcgcatggcgcgcgcaaccgcccagcggttacaagaggccctccacttttgcccagaccaacgggcgaaagaggcgagcagccatgcaggcggcatgcagccgcgccaggcaactgcaccgccacttgtgccaccatcgcgccccttcggttgcggaatcaatgccgcgactcgaggcgacccagcggcgccagcctgacgcgacggtcaatgcggccgaaagtgggccggcagtaatgacggtggcaggcgggcgggagcagcggtcacgtcgtcagccaggctcacgtcccatccaggggcagcaggagagcctcctctcacggcgtgaagacggcgcacccgtgatccgcccctcgaacggctcgcgcacgcgcagcggctgccccgccaactactcgccccgtcgcattaactccgcggttggacaggcggtgcttctggcaggcgcagcgggcgacgcttcgccttcgccgaaacaaccgcaccaaaaaagggaccgggaaagggggataccccgaaagggatccttccccgtgaaggaaccaggctccgagccccccctactgatcagaggttcgaaggctggccctccgcggggttcaacagtcgcctcagatcgtgtgggccctacacccactactgatcagaggctggcccccgaagggttcacagtcgcctcagacgccgagcgagggatgaccagggctcaccggagacaccatgttcgatgcccattgaggaggctcgggggctgctctcgcaaacccggctccggccaaaccgttgacagcgtcaacataccagcccgagaacttggaccccgaccgtgcacccgggctacggcctactcgcatgagggaacaaccagaccagccgaagcattacgcaaggcattaagacctcgaaggagtgaaaccactcctccgaggcctcgggggctacacccggcgggtgcgctcgcgcgcacccaccggaacaaaatgcaaccgagaaaggctggtccccttgcaaaaaagtgcgacgaaagcctccaagcgagtgccaacactcccttcgaggctcgggggctactgtcggggaccataattaggggtaccctcaagacgcctaattctcaactggtaacccccatcagcataaagctgcagaggcctgatggggctcagactcgggctaagccccggaagacggcgaactcagctccgcccgacccagggctcggactcgggctaagccccggaagacggcgaactccgctccgcctgacccagggctcggactcgggctaa

SEQ ID NO: 25499 - DNA, 459 bp, Zea mays
  Peptide Sequence Number=SeqID_68874
atgggcaagaacaacaagcgcaagcgtgagccaactcctccatcggaggagtttggtgactcggagtactcagaggaggaattctcctctgagtctgaggggtctccggcccccgtccccctgcgtgagtcgtctgacgactcagacgactcccaggggctcgcagtggaggtctggacgtacatctgggccgtcgagcgctccgggctcgagggctcggatgagtcagagtactcctcggatgaggaggactcggacggcagcggcgaggacgaggacgaggacgacggcgacgacgacgacgatggcgacggcgacggcagcggcggcggcaggggcagtggcggcggcagcaaggacggtaacggcggtagcagcaggggcagcaaccggggcggcagcagcaggggcagcaccaagggcggcggcggcggcagcagcagcagggccagtggctag

SEQ ID NO: 25500 - DNA, 4038 bp, Zea mays
  Peptide Sequence Number=SeqID_68875
atggcgacgatcgccgacgaggccgcggacgcgggggacgcggcagccgcgctcgccgcgctctgcgaagtgctcgccgagtctggctcggcctccatcctggccaccccgcacgcgggcctcgccacgcgcctgccggccctcctcgccggcggctccggctcccagggcgatggcgtgccgctgctcgccgcgcgcgccatcgcggaggcctgcgacaccgcgccccagtgggcttcgcacttcgcgcgccacggcgccgtcgaggcgctctgcgacaggctcctcgccgttgactgcgtcgaactcgccgaggaggcaccgttgctggccgcgttgttggagttggagccaggccgagcgctcctgcccatcgccagctggtactgctgctgtgaggaagaggcaccgttgctggccgcgttgttggagtttggagccgaagctgatgaggttgttggcatggtcgtcgtcgggctcctcggttcctcgcctaagcaactcttacgggccgggtctgggtcagcacggcccgatgcaagcccgccgtgctttagggccgtactgggtctacattttagaacgttactcgtgtacgttagtcttaatgatccattaatatcttatttcctcaagttgctcctaaacagacatctctctttcctttcgcttcgacagtgtttgtgggctctgaacgccatatctttggaatgccctcacgagtgcctcagccggggagtggcagctgctgtgctgcagttcttggacttcttttcaacgagcaagcagattcttgaatctgttgttccgtgcttggtatcgattgctgttggtgcttgtgaaaatgataaatacatgagtaagctcatctatgaaacgaatgtggtcaaggcaacattgaccttgatgtgtaatgagaggtggaagagcctcaatgatgccaccttagaggtcgggatgctcctggagctcatttaccaacttatgccacctcttgaaacttctggtcaacatcttaaattactcactgcaaagaaaaaaatcatcatgcgacatcgtagatacatgacccagcttgctagcacctttgcccttatagtacaggttgcaaaatctgctgcactatcatcaatttgctactgctgtgttgttgtcattggcagctttgttaaattatgcacacctaatttcctagtggagttacagaagactgtaaatctctctagcttatttaattgtttgttggcccagaaaaaccaacacgtcttatttgaaacactcaaaatttcaaggatccttgcaaaaaaagatcagcactttttcttggagagctttaccaaggagggtgtaaagcatgcaattgagtatatagtatcacaatcaaaaaataccagtcaccagaacatgaaagaattttgcctttgcttttacatgaaaacttcctcgactgttgaggcatgcagcattgcgaataattctgttacggaactagcaaaagagataaagaaaaacttcttatcggtaaaagggagtaacaaatctccaaataggtttggattcactctcaaaagtgtcagggacttttttgctaggttgaatttatattcctcgacacaccttgctgaaaatcctgatagctgcaagcagttgtttgatctttcaaggagattattgtcagatgaactgccagttacttctaattttgagtttgtgcagagtgggtctatcaaatgtttgtcagtttatctctcaaacggggcatactgcaatgcagaccttaatgatggacctgtacttgagcagcttagtgtggtgcatagtcggttgcataaatttgctaatttggctctcacccccttcaatgaaagttcagcaaatccacttgggattttggtggagaagctgctagacactttgcacatgtgctatggcagttttccggtactgctatcttatgaacagatgccacgtgaggacatgatgattccgctgagatatcctaaggccaagaaaccaacatcattgctattaaaattccggaggtcgcagaaggagagagaattgtataactacaatggtgttcttagtgtcgaccttttctcaacaccagatagcaccgaaccaattctatttcctgagatctttagaagaactgatcaggaacctgcatccgagaattccaatcaagataaaaatgatgatgggaacaaatcctcaagactggaattcttctacaatggcgtgacactccaaccatctgttacattttttgaatcgattctccatctgatgtacaagggacaatctgatgtatggatcgaccaatctttctgggttgaagaacacagcataacctataggaaaagaatcaaaagcaataaggagatctcgtctcagagttcctactatactcggttatcccacgtgcatgaaatccttcaacgtgcatggttaaaggacccttttttcactgccatacttaatggcaaacttcctggcaatctggatgtgtctgacctgtcatacaatctcttattcatgctgaaagttcttgaaggggtgaaccgtttttcatatcaactcttgatggatgaacagataaacaaatttgctgaaggtattcaagaagatatcaatgatattgaagtggcaatatgtccagtaccacgacatcagttcctcagtagtcttctcataaataagctagagatgcaaatgcaagatgtcttgttcgatgatggcctcataccctcgtggtgtgtctatctggtcgagaactgcccattcctgttgtccttggacacacggtggaagtacttctgtctgactgcacatcgctcattctttccagaccagattaaccgttattatccacaaactaaaaagtacagggtagcccgaagtgctatcattgaaggtgctgtatcagtgatgaccaatcatggtccaagcaatagaaccattgtggtggagttcgaaggagagattgggtttgggcgaggtccaacatttgaattctactctacagttagtcatgaacttcaaagagctgggctcggaatgtggagaggagacagcggtgaacatggattcgttcatgctccttttggactatttccaaagccgtggccatcatcatcacaaggaattgattttactaatatgctacaaaaattcaaacttctagggaatcttgtagtgagagcggttctggatggaaggattctggatattccactttctaaagcattttacaaaatcatgcttgagcaggaactcgatatgtatgacatcctatcatttgatcctgagctgggccggacagtaattgagtttcaagcacttgttagcaggaagaattttttggaaacctcttcagaggaatctaaccctacggcggctgacttgtcctataaaaacgtgaaattggaggatttgtgccttgacttcactcttcctggaaatcctgaatatgaacttgttcctggaggctcagagaagatggtaacacttgacagtttagatgaatatgtatctttggtcgtttatgccacactgaagagtgggattgccaagcagatcgaagctttcaagtctggaattaatgaggtttttgatctcaaggccctcaaaatgtttacagaagaggaaatggaacgcatactatgtggtgaacaggatgcttgggatttaaagaaccttgaggatcacattgggtttgaggatggctacgatatgagcagtcaaccggttattatttttctggagatattgcgagagtttggaagagaggagcagcgggctttcacacaattcagcactggagcccctcatctcccacttggcggcctagcttcgcttgatcccaagctcactgtcgtacgcaaggaatgcaatggcaatgtagacgacgaattgccaagcgtcgctacctgctggcactgtatcaggctccctccttactcctcgaaggagataatgagaaagaagctcaaatatgccattacagagggtctaggcgctttccacttattatga

SEQ ID NO: 25501 - DNA, 474 bp, Zea mays
  Peptide Sequence Number=SeqID_68876
atgggcaagagcaagaagggtggtagttcttcgcatcactccggcgacaagcggaagcatgagccgactcctccctcggaggacttcggtgacttggagtactcggaggaggagttctcctccgagtccgagggctcgccggtccatgcctctcccccggcgttgtctgatgactcagacgactcccaggggatcgccgcagaggtgtggacctacatccgggccgtcgagcgcgatgggctcaagggctcggatgagtcggagaactcctcggactcgtccgaggagggcggcggcggcgatggcggtgacggcgatgacgacggaggcgatggtgacggtggcgaaggcgacagcaagggtggtgacggcagcggcaaaggtggcagcggcgacggcggcgatggcagcaagggcagcagcaggggcagaaacaagggcagcagcaagggcagcaacaaggccagtggctag

SEQ ID NO: 25502 - DNA, 456 bp, Zea mays
  Peptide Sequence Number=SeqID_68877
atgggcaagaacaacaagcgcaagcgtgagccaactcctccatcggaggagtttggtgactcggagtactcagaggaggagttctcctctgagtcggaggggtctccggctcccgtccccctatgtgagtcgtctgatgactcatacgactcccaggggctcgcggcggaggtctggacgtacatccgggtcgtcgagcgctccgggctcgagggctcggatgagtcggagtactcttcggatgaggaggactcggacggcggcggcgaggacgaggacgacgacgacgacgacgatggcgacggtgatggtggcggcagtggcagcggtaggggcaacggcggcggcagcaaggacggtgatggcggcggcagtaggggcagcaaccggggcggcagcagcaggggcagcaccaggggtggcagcggtggcggcagcaacagggccagtggctag

SEQ ID NO: 25503 - DNA, 621 bp, Zea mays
  Peptide Sequence Number=SeqID_68878
atggcaaatccgccaagaacagagttcttgcggaggaagaaccccgatagatacgaggtggagaagttcagtttcggaaatgatggacatgtgcgagcagagtggaaggcgaatggcggagaggattcagaagcggaaaggcaagaactagggcacggaaagcaaaggcggctaaaagtgcagctcttatgggatattctcaagccagataccgtttcaaaaagtgcccagtcatcacccggcggttatttccaaaaccccagcatgccacgtggaaacccggcagttatctccagaacaccggtgcgccacctcatcactcggccatcgtcctcaaatcggctcgcgcagcctgctatcactcggcgttgcctccaaaacaccgatttcgtgttcagtcgcccggcgttacctctaaaactgccaacgtcgctttccagtcggtcggtgttgcctccaaaacgccgactttgcgttcagtcgctcggtgttacctctaaaatgctgacatcgctttccaatcactcggcgttacctctaaaacgccgatacagtgttcagtcgcttggcgttgtttctacaatgctgatatcgcgttcagttgctcggcgttacctctaa

SEQ ID NO: 25504 - DNA, 93 bp, Zea mays
  Peptide Sequence Number=SeqID_68879
atgaagagatggggggaggaccggaggaggagacgcagtctgcatgatattgatggttacaatgtagtggtgaaacaggttaagatcatgtaa

SEQ ID NO: 25505 - DNA, 3270 bp, Zea mays
  Peptide Sequence Number=SeqID_68880
atgagctcggatctcgataaggcagtaggatgggaccttccaagattagagctcaaagcaatggtgttgaggtgggataacaaaggagcaacatgtctagtgccaaaagaggcagcaacaattcagggtcttggtgaggcgacatgtcgagctcttaaaacatcgaggatgagttgggatttggacaaggatgacaaggggaatctcaacgaggtatcaggcttagagtcgattttgggtttggaggaggacgttgaatggaatctcgatgaggtaccgggcttagagcattgttcagatttagatgaggatgttgagtgggatctcgatgaggtaccaggcttagagacaagttcggatttggacgatgatgcagagtggaatctcgatgaggtactaggcgtagagtcgagttcagatttagagggtgatgaatggaatctcaatgaggtacgaggcttagagtcgagttcgagtttggatgaggatgttgagttgaatctcactgaggtaccaggcttagagccaagttcagatttagacgaggatgttgagtcgaatctcgacaaagtaccaggcttagagtctgaagaaatagaggaccattatgaaccaacacgacatgtcttcgcgtcgtccttgatgtctactatcgcgaccccgccgccgccgattgcgcaagagaaggccgccagccggaataagcgcaagtaccgtgccgagccaccttccgccgagttgggcccatacgggctggagtacccgctgacggcggactgcatgggattcgagtttatgtcgcctgagaaggctgccatggcagcagcggtagccgctgccgagggtgtcagccttgacctcctccagaactcgtgcgaaaagtgcaaagatctccaccctactgcggaggagttactggactgccaacgatatgtgaattggagcgacccaaacgagacgcagctggaggagatccttctcaagagtctgggcaccacctttgacaatgctgtgagtctgatcaccacaatgggctactctgaggcggttgcacgggctgctgttgtgcgggcagctgcgcaatacaactggagggagagccttgcagggtttggagaggcagcagttgaggttctcaagacggaaggggacatgttgccgagggagggtgcctctgttgaagacatgaggaggattgagcaggctgtgcttggtagtatggttatgtgggtaaatgaggctcagccactctgcaccacaggcgatgtaatgttttgcttgcttatgtctgacatgaacgtggcaaatgccagtgccatggactacaatacttcttccctcccatctgttgctgctcaagttattgcccaaccagacgcggggaactatgttactggttcaggttcaaatttatcagtttctattaccaacccacagactggcgttacattccgtggaaaacttaccccaatgccaccgggctcttatggtgctgtaaaagctgattcgtcaatggcaccagcaagcctcaatgtgtcaagtaccaaaccctcggtgccgggcaagactcagtgtgtgataccaaatattgagccaaaagaacaacctgttcctatacatgatcattcagaggaccaaccatttgttgctgctgcgacacaatctgtgaaaaatgacaagccatccccaagcaagagggggggctctaagagggactccttgcatcgacagaagttgacaagctttgataaaagttcccgagcattgggttccaaaggttctcttaggtctggcaagcatagctattcggccagtgcggtattggagaggaagtgccggtcattttcagattctactactagcaacttgaagggtgcatcaagagttgctaaagggtttgctgcaagcatatctggatcagaagtatcagctgacctttcctttactggtaccctttccccttctccatcatttgatgccaagatagttagtaactcaaacccagcacctactgctagcacagatctttcattgtcattgccctcctcaagtgatagtttaacaccatcttcgaatcatgattccattaccgagggagtggactctagtagcaaaattaatttttcgtatgatgaagaacagaaggtctggatcccacaagataaaaaggataaaattgtcttgattcttgttcagaggcagaaagaactgcaagcacatatgcatgactggacagactgggcccagcagaaagtgatgcaggtcgcacaccgacttgcaaaggagaaggatgaacttcagtcactcaggaaagagaaggaagaggctgaccgcctgcaagaggagaggcaccatttggaagagagtactcggaaaaagcttctggagatggagtctgcaatttctagggcaaatgctcagctggagaaagcagaagcttctgctcgcagacgtgaggttgagaatgcacaactcacgttacagatggaagctgcaaagcgacatgcagcagagtcagcaacaaatatttcagagcttttaaagaaagacgagaacagccgtaaaaggtctcagcgttgggaatctgatagagccctattacaagaggaacttgcagcacaaaagagcaggttatttcgggttcaagaacaactccagcatgctaaagagctaaaaggatcaagtgcagtcttcactatatacgatgacatctttggtcttctccatgattttgaatacttgcaggcaaggtggaaacaagaggaggctgcaaagactgaggcaattgcccttgtaacctcagtgaggaaagagagagggcaaattgagacctccatgaggtcagaagagaatttgctgcatctcaaagcagcgaatgacgcacaaagatacaagagtgagatccgtgtccttgagcagcgtattgcgcagctgaaggtgtcattggactcttcaagggttgctgcccccaagtggggagccgacaataaatcctatgcattgcatctttctgaagggagaaagaacaacaatgcccaagttttgtccaacacagcagtaccccaaggtctcgattttgacgatatacagcgcgaccgggagtgcgtcatgtgcttgagcgaggagatgtccgtggtgttcctcccctgcgcccaccaggtcgtctgtgccaaatgcagcgacctccatgagaagcaaggtatgaaggaatgcccttcgtgccgggcccccatccagcgcagggtgcgcgcccgccccgccggttgctag

SEQ ID NO: 25506 - DNA, 396 bp, Zea mays
  Peptide Sequence Number=SeqID_68881
atgcgcgtgcccccgtctccgcccaagccgcccgcgtgcaaccaattcgcctggctttccctcgcccgcccaccgctcggagccgatacaagacaagggcaatcgatctgcctttgcaacttggaccgtgccgaggtcatcaacaacgatggtggtgtggcgcagcgaaacaagagcgatgatgacatggtcgtcgaggcattatgtgtcaagtggtctctcgccactgcccaagagaagtcagaggctgagttgctagagcttctggggaggcttggccagctagaattcatggaggacgccatcagggttactaagattgaaatggttgtgaaacctcttcgaaagcatgtctcgaagaagattcgtcaactcgtctgttcgctcattgagtaa

SEQ ID NO: 25507 - DNA, 939 bp, Zea mays
  Peptide Sequence Number=SeqID_68882
atgttcgacgcacacacgggactggctcctactagggcggagtccgggcaactggctgttgtcccggcggtggtgtcggtcggcccgacggccgtggcaaacgtgacgaggggtggcatggggtcctcgcaggacccatggtccaagttctgtgccggcggcgagattgcctcggccaccaccacgaaggacgtggccgcctcagttgcgcagcagctgaaacatgcggctgccttcgccgagcgcattgcttcgggggcgttgacctcagagttttctgctgagaggcagcgacttgaggggaggatcgagtgcctccgaacgcaacatacggaggcggtcagagacaagtcggcggcagagaacaggagccgtaacctgcttgttaagctaacggcggcggaggcgaagaatgaggacctcagctgtcggcttgcggaggagagggagggcgcggaaaaggcccgcgctgaggcccaagctgcccgcgccgaggccagccttgccctcaagcgcaccaccgacgcgaagttgggtctgaagagcttgcgtggctacgttgacaacacggaggcctccacctggctggggtcgaccgagagcacgcgttgctcgttgacgcgtaccgtctgctcagcgcacgaaccgccccttttaacaaatccggcgaagaggcatttcgaagtctttgatcgggtaactgaggacttcgatcgcaggatcttacaggtcaaagacgagatgctgaacaatgaagaagtcgaggacttcggcggccttgaaagctcgttgacccggacagaggacgcggggacgggggctgaagagcaattagcgcctcaagccggccctcgcgaagaccctgcggcggaggctgccccaactggcgaagaccctgcagcggctgttgctccttcgcaggtggcggggtcgcgttag

SEQ ID NO: 25508 - DNA, 235 bp, Zea mays
  Peptide Sequence Number=SeqID_68883
atggccgcggcgagctgcccctctgctcagctccttggacgcagcagcgtaccagccagggaagtcccagcggcgcccttcttcttccccgagaagggcagaccgacgcccctctctgctcccttccgcgccgagccgagttcctctcccatggctgctcagccgtcctcatgctgcagtaacgtcaaggaagaagatgaccccctctctatgacgtgtgggcccaaggccaagg

SEQ ID NO: 25509 - DNA, 489 bp, Zea mays
  Peptide Sequence Number=SeqID_68884
atggacgttgtagtgatcacactgtcacgagagctgagcaaactacaacctgcaagagctacacatggcatgcttgaccacatcatggtggagaatgcaagtgttaaagttgcattgaatcgcattgccgttgtttctatcctggatgcacataccctgcgtccacacctccatggtgcacgttatgtcgcgcccccgcatccgcctgcggtcgcacgccgccccgcatcccgccggcagcaaccatctttgctgactgatggctgcaaatatttcttcacggtagctctctgctcagcaaccatctcccagcagagccgccacgccatctccctgaccatcaccagctgttccctctcggcatttgcaaggaaccttgctctgcatagtgttgatatctggccttttcttcattccggaatctccaagatggctggtatatacatgcacaagtgggataatgaactttgcatcactgtgccaaactga

SEQ ID NO: 25510 - DNA, 237 bp, Zea mays
  Peptide Sequence Number=SeqID_68885
atgggagtggatcgcgctgatctgcgcgccgaggaggagatccgcgccgcaacacgagaggggatcgcgcggatgggtgggggatggatcgcgccgatggagaccagaatctcgcgatgcgggacatacccgcatgtgagggcacagcaggggcctataaggtggggggaggagggtggggtgcatcctcggctatctacccctgcgtgcgccttcgacggctcggataggaagtaa

SEQ ID NO: 25511 - DNA, 276 bp, Zea mays
  Peptide Sequence Number=SeqID_68886
atggccgcggcgagctgcccctctgctcagctccttggacgcagcagcgtaccagccagggaagtcccagcggcgcccttcttcttccccgagaagggcagaccgacgcccctctctgctcccttccgcgccgagccgagttcctctcccatggctgctcagccgtcctcatgctgcagtaacgtcaaggaagaagatgaccccctctctatgacgtgtgggcccaaggccaagggtaatggtgcttcaaattccagatttcgtaatatcatctaa

SEQ ID NO: 25512 - DNA, 1164 bp, Zea mays
  Peptide Sequence Number=SeqID_68887
atgaccgcacaggaattcgaagccacacgtgggcgcgcggaaacgaacgtggccagacgtgaggatatatccgtacctgtgccgtgccgctctcggatcgtcgacacgttttcctgttttgacttcacaacatcagctattaggggaggcctcgagctcccagtgctcccctcctcaaccacccagggtaagtggttcccattcctaccattgccgcggatcccccaccctcctccccctctgctcggtcctcgccctagatctcggtcttctacaggctttccggagtgcagcaaggacgcttggggtaggaggcctcgagctcccagtgctcccctcctcaaccaccccggggagagtcgagctgttgacatggagttcttgtgtgttgttgccgggaagcatgtctggtctgtgcatgtggaccttcacatattggatgacggagggaatctcattgatgcagctaatatcgctgcattggcagctttatctactttctggaggcctgaatgcacggttggtggggacgatggtcagcaagttacagtgcatgatcctgaggttagggatccacttcctcttacgatacaccatatgcccatagctgtaacatttgcatattttggtgaaggtaacatcgtggttcttgatcccacatacaaggaagaagcagtaatgggagggaggatggctgctatagttaactcaaatggggatgtttgtgccattcagaaagctggtggagagggtctcatgtcaagtgttaccatgcagtgtttaagaattgcttcggtaaaggctgctgatataacaagcaaaataaagaaagcagtacttatttgggatgttgaagcacaaccaaatagacatgctgtcctaggatcaagcgagtctcgccctgatctgatattaacaggacataaggaaaatgcggaatttgcgcttgccatgtgtccagcagaaccatatgtcctatcaggagatgttgaagacgagaagatggcagcgtggaaggcgcttgccgcgatgttgctggtgcagctgttcaacacgggcaaggtgttgttttccaatgtggccgtcgacggcggcatgttcgtcttggccctcctcacctaccgcagcttcttcgcggcgccatcatcctccctgtccgtctga

SEQ ID NO: 25513 - DNA, 438 bp, Zea mays
  Peptide Sequence Number=SeqID_68888
atgggggacgatggggattggattgggggcgattctggatttggcttcagtgcaatggaggttgaggtgaacaggggcttcaacagtgatgctgttttagcaatggagacgatccattccctgtcagcttcaaaatcaagttacccaatggctgatctcacccaactcttcatgacagctacccaagaagggaaaagatcagaatcgcaaggccagattcttagggtgattacttgcctacatcgctttgaagatactggatattctttcagtgtagaaacagcagctagagtgaaagtaattgattttggatcagcacttccatggagggttcttgatggtaagccatacaacaataagtgtggtgtttacagttttggcatttgtttatgggaaatctatttgtttatgggaaatctattgttaaattacagttaa

SEQ ID NO: 25514 - DNA, 723 bp, Zea mays
  Peptide Sequence Number=SeqID_68889
atggatatgacatcccactcatccaccggagatcggggccagggcaaatctgccgacatttggtgcaaggcggagaagcgacatctcaagaggttttccatcaacctcagacgacgtctcaacaggcgtgcagctgccatcaagcggaggtcggtaggagcctcgcccacaacagagcaggttatcgctgccaccttcccactagtctctaccttacctgaggtcacctctatcgagctccagtctgagatggaagtgctagaggctctcgtcgtcggccagcagccaagcatagacgagagtggctccatcagtcggccactatgttccatgtctccaactgtactggaggagcccgacaaacaagctagtaaaggttgtgccttcatcaacctcatcatgatggaggtgcccaggactcatggcattcgaggtagccatcgtcgacttccaacatgctctgcctctggctatcaccaagacatcctagggtgccgcttacccttcaagtatgaagggcaacaacaccccagtgaagctgaaaagggggccaacggcggctacacctacatcaacctcgccacgacgaaggtagtccacacgctccggagtgatatgatacaggtgccaacacctaactcgtcgaccacaagctccatggtgtcttgggtagcagccaacggcctccgtcaagctctgtcattggctatcgacaaggcataa

SEQ ID NO: 25515 - DNA, 195 bp, Zea mays
  Peptide Sequence Number=SeqID_68890
atggatgttttgatgattaggaaccttggagaggaccagcaaggacttgggaaaggcctaggtgttgaggaggagcagcaagggcacaacaacaggaaggagatcaagcaggaattagccctcgtggcgaggtcaatcgcgcagtgcatggttgataaccagaggagaagtggtgctgcgattgcggggttctag

SEQ ID NO: 25516 - DNA, 1548 bp, Zea mays
  Peptide Sequence Number=SeqID_68891
atgggcatgaaaaacttctatttattgaaactgtttgaaagacctgatttccctcagtttttctcaggagcaactccactagtggggaggtttgtcatagtgacaccatcacttaatatccttactatttggttttggatagccagtttgccctacgcacagtgctatggaggacatcagtttggtgtatgggctggtcagttgggggatggaagagcgatagctcttggagaggttgtcaactctcgaggtgagagatgggagttgcagctcaaaggttgtggaaagactccatacagcagatttgctgatggtcttgctgtcctacgcagcagcatccgtgaattcttatgcagcgaagccatgcacggcctaggcattcctacaactcgtgctctttgtctagttgaaactggaaaatcagttgtccgagatatgttctatgagcatagtggttttatttctttgaatgacagcttgcttcatgtctttttattatttgatgcgtgcacaggtggcaatgtactgcttggcaatgcaaaggaagaacctggtgcaatagtttgtcgtgtagcaccgtcttttttacgttttggttcgtatcagatacacgcttcaaggggcaaagaggacattgagattgttcgtcgtttggcagactacacgatacatcatcactttccacatcttgaaaatatgaaaaagagtgaagcttgggcagttgaggtggcggagaggactgcttacttgatagctagatggcaaggtgttggcttcacccatggtgtacttaacactgacaacatgagtgtgctgggcctaactattgattatggaccatttggatttctcgatgcatttgatcctagctatactccaaatactactgatcttcctgggaagaggtactgttttgcaaatcaacctgatgttggcttgtggaatattgctcagttcactggaccactgtcctctgctgaacttatcagccaagatgaggcaaattatgtgatggagaggtatgggacaaagttcatggatgagtaccaatctatcatgaccaaaaaactgggcttaactaagtataataagcagctaattagtaagctgcttagcaacatggcagttgacaaggttgactataccaacttcttccgtcttctttcgaatgtcaatgcggatcctggtattccggagaatgagctgcttgtcccactgaaggctgctctcctagatattgggaaagaaaggaaggaagcatggattagttgggtacagacttatattgaagagctggtggagagcggcgttcctgatgaagaaaggaaagccgcgatgaactctgttaatccaaagtatattctccgcaactatctctgccagtctgctatcgacgtagctgagcaaggcgattacgaggaggttcgccgggtgcttagggtaatgcataatccgtatgacgagcagccgggaatggagaaatatgcacggttgccaccagcttgggcatacagacctggagtgtgcatgctgtcctgctcctcgtga

SEQ ID NO: 25517 - DNA, 477 bp, Zea mays
  Peptide Sequence Number=SeqID_68892
atggcggtggcaggcgggcggaagcagcggtcacgtcgtcagctaagcttacgtcccatccagggacagcaagggaaccctctcccacggcgtgaagacggcgcgcccgggttccgttcctcgaacggctcgcgcacgcgcaacggctgccccgcgaaccactcgccccgtcgcattaactccgcgggaccgggaaagggggataccccgaaaaggattcttctccgtgaaggaaacaggccccgagcctccctactgatcagaggttcaaaggctggcccctcggaggggtttaacaactgcctcagagcgcttgggctccgcgcccactactggtcagaggttcgaaggccggcccctcggaagggttcaacggccgcctcaggccactcgggctccgcgcccactactgatcaggggttcgtaggctggccctcgaagggttcacagccgcctcagacacagagcgagggatga

SEQ ID NO: 25518 - DNA, 824 bp, Zea mays
  Peptide Sequence Number=SeqID_68893
atggcagaggacaaggcaaaactagaggagtactactcacctgctatggtgcagtggagaactcggcccacggtaaacagtgacagtgcggtgcgtccacaacggtatatggcgcacggttctgcctcggcgatcaacgcctgtgcgacccccgccatcctccccaccgcccgcgtgacccccgccatcctccccaccgcccgcgacccccgccatcctccccaccgcccgcccttgccccccgccatcctcggatccaccgcgcccccgccctggcacctccggcctccaccagcgcagtcgcgcccctgcgcccccaaatctcacatccccaccctcctccccacgccgtcaatggcgcgcgaccctcctccccacgccgtcgatggcgcacacagatctaggtggccgaggatccaccccaccctcctcccccaccttctaggcccctgctgtgccctcacatgcgggtatgtcccgcatcgcgagattccggtctccatcggcgcgatccagtcccccacccatccgcgcgatcccctctcgtgttgcggcgcggatctcctcctcggcgcgcagatcagcgcgatccactcccatgtcgcgccaatgtctcctaaaggatctacagcggcggcgaggcgtccacaacggtatatggcgcacggttctgcctcggcgatcaacgcctgtgcgacccccgccatcctccccaccgcccgcatgacccccgccatcgtccccaccgcccgcgacccccgccatcctccccaccgcccgcccttgccccccgccatcctcagatacaccgcgcccccgccctg

SEQ ID NO: 25519 - DNA, 204 bp, Zea mays
  Peptide Sequence Number=SeqID_68894
atggagcctggcggagggacagctgtcggagcggttgagtccttgctgacgtcctcttgcttccgtaagggggctgagagccgccgccgtcacagggttgggcgaggtggatgctcctccgaggccgaggtcgagtctgtcttccgtggtcgaggtcgagtccgagcccctgggtcgggcgaggcggagttcgtcgtcttctag

SEQ ID NO: 25520 - DNA, 204 bp, Zea mays
  Peptide Sequence Number=SeqID_68895
atggagcctggcggagggacagctgtcggagcggttgagtccttgctgacgtcctcttgcttccgtaagggggctgagagccgccgccgtcacagggttgggcgaggtggaagctcctccgaggccgaggtcgagtctatcttccgtggtcgaggtcgagtccgagcccctgggtcgggcgaggcggagttcgtcgtcttctag

SEQ ID NO: 25521 - DNA, 1131 bp, Zea mays
  Peptide Sequence Number=SeqID_68896
atgacggtggcaggcgggcaggagcagcagtcacgtcgtcagccaagctcacgtcccatccgggggcagcgagagaaccctctctcacggcgtgaagacaacgcgctcgtgttccgtcctcgaacggctcgcgcatgcgcaacggccgccccgccaaccattcgccccatcgccttaactccgcggcgggacaggcggcgcctctggcaggagaagcaggcgacgcttcgccttcaccataatagccgcctcaaaaaagccgcctcagatcgcgtgggccctacccccactactggtcagatggttcgaaggccggcccctcggaagggttccatggccgcctcaggctattcgggctccgcgcccattactgatcagggcgggaacgatcttgtaacggaatcccatcagagggaggcatcgagccctcggaccccgtcgccaggggaccgggtccggcagatcacccgcagctcactggagacaccatgttcggcgcccatcgagggcaacatggcgctttcccccctcctccttgcggaaaggcgacgcaggggcaggctcaggggctgctctcgcaaacccggctccggccgaaccgttgacagcgtcaacataccagcccgagaacttgggacccgaccatacacccgggctacggccagctcgcatgagggaacaaccagaccagccgaagcattacacaaggcattaagacctcgaaggagtgaaaccactcctccgaggcctcgggggctacacccggagggtgcgctcgcccgcacccaccggaacaaaacgcaaccgagaaaggctggtccccttgcaaaaaagtgcaacgagagcctccaagcgagtgctaacactcccttcgaggctcgggggctactgtcggggaccataattaggggtaccctcaaggctcctaattctcagctgagtgagactgacaggcagtcaggccctgccaaaggcatcataggaagctccgcccgacccagggctcggactcgggctaagccccggaagacggcgaactccgctccgcccgacccagggctcggactcgggctaagccccggaagacggcgaactccgctccgcccgacccagggctcggactcgggctaa

SEQ ID NO: 25522 - DNA, 459 bp, Zea mays
  Peptide Sequence Number=SeqID_68897
atgggcaagattaacaaacgcaagcgtgagccgactcctccattggaggacttcggcgactcggaatactcggaggaggagttctcctccgagtccgaggggtctccggctcccgtctctcccccggcgtcgtctgatgattcagacgactcccaggggattgccgcggaggtctggacttatatccggaccgtcgagcgctccgggctcgagggctcggaggagtcggaatactcctcggacgaggaggactcttcggactcgtccgaggagggcggcggcggtgatggcggagacgacgacgacggaggcgacggtgacgacggcgacgacagcggcggtggtggtgacggcggcagcaagggcggcaacggcggcagcaagggcggccacgacggcagcagtaggggcagcaacggcggcggcagcagcaagggcagcaacaaggccagtggctag

SEQ ID NO: 25523 - DNA, 468 bp, Zea mays
  Peptide Sequence Number=SeqID_68898
atggacagtagagggaaacgctgggggagctcgattgctggccgaccacggagaagacgactccctactgcagccgctcgccaggaggaggagcagggagggcgctcggctgctgctgtgcgagggagaaggagcagggggcgctgcgagagggagagcagaggcgccacgccatggacgccggcgagctcgctgctcgagctcggaccagaggatatgccgcgccctggctggagcagaggaggcgttggagaagaagaccccctgtcccagccgctcgccaggaggaacatggagggtgccacgccatggctggccttgctccctgcactggctgctgctgccttgactggagtcccaatgggtgctgcgttgcgtgaaacggtgtcagccgcctggcgtatcttcagacggtttgaagtgtatattgaatttttgcgactgttcagtgaccgtggtaggaggtga

SEQ ID NO: 25524 - DNA, 834 bp, Zea mays
  Peptide Sequence Number=SeqID_68899
atgtcgtcgattccgccgccagcgggcgggctatcgaccgccattgtcgctgtcgcgcggcgggggaaggagtatcatgttgtagctgccgtcgagggacatgaactcaagactcccgagacggagcaccgtcctgggctggaaaggttgctgaagactgcccatctggagcttgacgggaagctgtttgtcaacacgcagcaggcccctacctggcgcgccaactgtcggcgtttcgaacccggggggtccctggaccgacgagtaaattatcgccgcgtgccccagcccagatgggtcggcgcgagacggagcgcgaaggggggaagaagccagagggagacgggcgtgagaggtggaggctcctctgaggtcgaggtcgagtctgtcttccaaggccgaggtcgagtccgagccccgggtcgggcgaggcggagaccgtcggctgaggctagggctgagtccgagccctggggtcgggcaaagcggagttcgtcgtcttctggggctgagcccgagtccgagccctggggtcgggcgaagcggagttcgtcgtcttccggggctgagcccgagtccgagccctggggtcgggcgaagcggagttcgtcgtctttcggggctgagcccgagtccgagccctggggtcgggcgaagcagagtttcccatggcgcctagggccagacttggctgctgtcagcctcactctgtcgagtggcatagcagtcagagcggcgcaggcggcgctgtcctcttgtcagaccggtcagtggagcggcgaagtgattgcggtcacttcggctctgtcgactggagaacgtgcatcaggataa

SEQ ID NO: 25525 - DNA, 180 bp, Zea mays
  Peptide Sequence Number=SeqID_68900
atggaaataaatcgtgatcggttttgtttaagcggtatgcttaagtggttcgctcaagaggttgagcttcatgttgatgatgaagttatgatactgaactccatggatgctagtctagtgatacccccggtcatcttcctgtggaaggatgtccatgtttcgctgtactttgatgaataa

SEQ ID NO: 25526 - DNA, 222 bp, Zea mays
  Peptide Sequence Number=SeqID_68901
atgatgagtagcaacaacggtggtgacgtaggaggccctaacggggcatgggtctgggagtgggtggaggagggcagtcggcatgatgacgaggccacactcactgggttcctctcatccctcatggactacacccccatgaacgagactggttgttgtagctacccagaagttcttatcagacattttgggggtgcatttgcaaccccacaaagaacatag

SEQ ID NO: 25527 - DNA, 444 bp, Zea mays
  Peptide Sequence Number=SeqID_68902
atggcggcgagcgggcgggtggttcgcggagatggagccgcggcgggcgattcgtgggtggaggcgggttccgcggtgggggaggcgcgggcaggattcgccgcgggggagatggctgctgtggctggtttcgcggcgggggaggcggagcggcgcattgatgggagtgaccagaccgcacagtggatcgttcggggaagagctccggacgcgagtaatggcggcatgccatcggcctacccagtacccacccgcagcagccacgcgccggacccggtcctcgtggaccacgccacaaacggcacgtacgatatactatgccgccactgcaagtctgcaagtgacacgtcgtgtggtgtgatcgtgacagcaaccgcatgcaggagagccgtggacctggtccaggcagaggcagctaggggcattctttcccagtggcagtag

SEQ ID NO: 25528 - DNA, 525 bp, Zea mays
  Peptide Sequence Number=SeqID_68903
atgactcccgcctccgcctgtgcaccgccgacgactcggcctcgccgtattcacgcagaggatgccctggatggtggatccgaggcgttccatggcctgccctatggcgttaaggcgacatgctgcgccgaggtggaggtcgggttgaacaccgtgtaccggcggtgccggagccttgaccgctccatgggaccgctagagatccgcatggtgtccctcgacgccgcgattacaacatcaccatgttcggagcctacgcgcaagaggagttgtccctgtggcatcatctctggctccgccactctgactagaattggtcagtcctttgctgatagtagttcgtctgttgattcaggttcgagagatgccgaggggctgtacctcgccaacgatttggacaagcgactattgatctacttccccttcatgcaagtggtcaagctacattccgtgctattcaaaggccctaaggatgacgaattgcagaccatgagtgctgaaagtcgcctagaggggggtgaatag

SEQ ID NO: 25529 - DNA, 771 bp, Zea mays
  Peptide Sequence Number=SeqID_68904
atggcgtcttcagctatgcccgacccagcctcggacggcggcgcggtccagggacccctccgggaatccgacccgagcaggcggctcggccggagccccagacaacaaggccgaacgggccgagggattcctacgcctccgggatacggatacctcactcgtcaccttgacacggggcgactcatgcttggcctcgacagccacaatgaacaaacacactggcattcgaagtgccattacgaacggaactccggttccccctccgcaggtacgaacgaccccactccatggggaaggcctgcggagcaacagaagactgacgagcggctcaccgccgctcgttctaaccacgacgacaaccacctccaccctgggcagcgaagcggcttaggcagcagctttggggcaggtgtcacgacaggagggctctcccccgctgaggacgagaaccagccattcaggcagggagacggaggcctaggaccactggcgccctacctatcccggcatggctggaggaagtccccgtgggactcgaggacgccattccccccaggcgcggggggaagaaaaaggcagccgacccacgcgggggcggcccctcgactcgcctcatcttccatcttggcctggatgacgaaaatccttgaggccgagggaggagtagaagccgcggcctggcccgctttccccaccgtcgaactggaggtcaccattttgggtgaccgccggtggaggggagcagccgggctgcatgatgaaaatccttga

SEQ ID NO: 25530 - DNA, 276 bp, Zea mays
  Peptide Sequence Number=SeqID_68905
atggagtcttcggcgaagacaaggcttccactccactctaacggtatcatttacccttcaccgtcactccacatcactctccaaattggtataatcttcactcatatttcttttaccaatggggagaaaaatgtaaagcaaggtttagaagactcctccaatttttcccgaggtatcgaagagtcagcactctccactagtcctcgttggagcacccgcgcaagggtatcgctcccccttggtcctcgcaagaaccaagtgctcactacgagatga

SEQ ID NO: 25531 - DNA, 95 bp, Zea mays
  Peptide Sequence Number=SeqID_68906
acgacgccgaggttgttacgaggatgaggggttgtggatccccggcatcacggacgcgcgcagcgtggggggagcaggggcggggagggggctag

SEQ ID NO: 25532 - DNA, 402 bp, Zea mays
  Peptide Sequence Number=SeqID_68907
atggggagggctatcaataagactatcatggttgtggaattgatcaaggtactccttatggctctagtgcttgctaatattacttatcacttgattctaattgttactattattactgtgaagaggaggattgttggcctccatcagaataccaccactggatctactgatattactgatatgtgggagccattggaagaaggcctacttccgcttgagacaacaagacatgtctctatgatcactataactctttcaaagaaagagctggacacatcatctatcgggtatgcatactgcactcttttgtcaactgcatttaatgactttctttgccagtttgtcttaaccaaattctatggttttctatgccatgaactcacatctcgctgcgtcaagtaa

SEQ ID NO: 25533 - DNA, 165 bp, Zea mays
  Peptide Sequence Number=SeqID_68908
atggagcagctggtgacggagttcgaggccttggaactccccgtgacgctgtgcggcacgcgcctctacgacatgctgtgtcactacggcgtcatgggcgccacggacgacgtcgtcaatgtgtgcttcaatactgattctttagaaatactaaaacatttataa

SEQ ID NO: 25534 - DNA, 366 bp, Zea mays
  Peptide Sequence Number=SeqID_68909
atggccagtggcgtcctgtcgcagctgtaccaccagggcgtggaggtcgacgcgctggtgcgggtcgagacggacaggatgcgcgcgacgctccaagaggctcggcggcggcacgcgcggggtgtggtcgcggccgtgggccgcgcggcggatgctcggctccgcgccgcggaggcagagctggagcgcgcccgccgccgcggcgcgtatctggaggtgcggctccggcatctggccggggagggccaggcgtggctgggcgttgccaggagccacgaggccgtcgccgctggcctccgcgccacgctcaacaaagtgctccaacatcccgccggcgaatataaatgcttcgtggcaaaaaactaa

SEQ ID NO: 25535 - DNA, 324 bp, Zea mays
  Peptide Sequence Number=SeqID_68910
atggagagggcgcagctgctgagattgcccacgcgtggggacaaggtgcggtgcacggtgaccacgcttccggacatcgcgtccccatgggtagaatcgcacgcgcgctcgatttgggaaactcctacaccgtcgggtggggccctatgccagcctctgggcgtccggccgggagccctcagccgcagagcgaaagccgggaagaaagctccgtcgtgtgcaccaaggcgcgatggcggatttgccggtcatggcgccaccgttagggctggcgacgtcgccgtcgggatggttaaaggagagaagaaagggtgcgaccgttga

SEQ ID NO: 25536 - DNA, 375 bp, Zea mays
  Peptide Sequence Number=SeqID_68911
atgccgcgccagcatggacgccggtggaaaaactccgcggtcgcactcactccattctcctttgacccaccaaagacttgtaaccacttcatcgtcgcgggtgcaagcccagcgcctctcttcaagctcgaagaaccccgggacttcgccgtcgacaatgccatgcttcggttcacaccggcgtgggtgggcagagcgtcttcatcagccatccatcgaatcgaggacgctggcaagtttgccttcgtcggtcgtgccttctcaccacctcgtcgtgctccccttgacgctgagacaaatggtaagttaggtcgcattataggtagaagtactacaacggtgaaaacaatcccggagataagtgagagcacctag

SEQ ID NO: 25537 - DNA, 492 bp, Zea mays
  Peptide Sequence Number=SeqID_68912
atgaacaaaaacactggcattcaaagtgccattacaaacggaactccggttccacctccgcaggtacgaacaaccccactcgatgggggggagcctgcggagcaacagaagaccgacggacggctcaccgtcgcccgctccagcagcagcgacaacgaccccctctacgggtggccgaactgcagcggcgatggcctcagggcgaacgccgctgcaaccccgccctcgcccacgccgacgctcgaggggcgaggacaagggccgtcagcccgccggcagatccccactcggatcctcccggacgagcagggcaccgacctccgcgtggaggcaccgtaccggtgcaaaggcaggaccgccccagaacacgaacgctgccctagcagcgcgcgacatcttgggcggtcctcccgtgcacacggcgcggcagccgccttccggcaggagggggcaccgggggccaagccgacgaacccgacgcgctggggctga

SEQ ID NO: 25538 - DNA, 2421 bp, Zea mays
  Peptide Sequence Number=SeqID_68913
atgcagcagcagcagcaaggcttagacataggcaagctacaagaggtagtgaagacccgctggctaaagcctcaagaagttctcaagatactgcagaatcatgagctgttcacgatttcgcataagccccctcagaagccacagagtggttcttggtttcttttcaaccgtagagtactccggtacttccgaaatgatggatttgaatggcaaaagaagagaaatgggaagaccattaatgaagcccatgagcgccttaaggttgataatgtggatgcactgaattgctactatgctcgtggagacaaaaatccaacatttcagaggcggatatattggatgcttgatccggcttatgaacacattgtccttgtccactatagggatgttctagagggcagcatttcagtatctgcacgaaatgattcttcaacattgaatcagaatggcagtgctagcagagctgaagtacatagttcacctggttggacaagcgagttaattgcacattgtactaattcgtgcagtccgggatctgctgaagaagtcagttcccaaattagtgcaagtgaatctgatttgattcaacataaggcagccttgcggaagcttaaaatgcagctgagtctggaagacaaagaagattgtgatgttaatgccgaggatgttccagcagataatgagcctattattttacctgtgattcagaatgaggagccaggcacttctagaaatcatgatgatatctttgatgtgctggactttagtgaagatcatatcaacggaactggaacccatccatgtcacagtgctattgacgtgctaaaaaattcagacacatggttagaggatgatcaacttgaggcaattctgcatccagcgtgtatgacattgactgaaaatcaatggttcaggatacatgaggtttctccagaatcagcgttttcttatgaaagtacaaaggttatcattgtaggagacttcctttgcaatccccctcacagttcatggcaagtgctgtttggtgatgttaagcctaccaaatgcatgattgatggaaacacgaacccctgcaatgaagcacaagatgtcaaactgcatcagatacctaccaaaagtagtgaggagctgtcactgttactacattatgtgcatacactttttgatggtcatgctagtgggctattttcaaattttagcttgccactccaaaatcttggctgtggaatccaaagcaatcaaatggatgttatgaagaaggcgtataagcagctggaccctgagaatgtgaatattgatggagaccatttgcttcctaagcaataccgcaatattatacatacggttgcagccttgggatatgatttggctttgaagccactgcttagttcaggagtgcctataaactaccgtgatgcaaatggatggactgctctacattgggctgcaaggtttggcagagaagatatggtggtggctcttcttactgctggtgctgcagctggtgcactttcacatccgacatcagaggatcctgctgccaaaacacctgcttcaatagctttagcatatggtttcaagggcctatccgcgttcctttcagaagcacaattaacaactcatcttgattctatcgagtcaaaagaaaatggaaaacttgattctagggaagaggggatatgtcgtgctgtggacagaatatcagacaaaagcagccacgtgcatggtggaactgatgatcagcttgcgcttaaggattccctgggagctgtccggaatgcagttcaggctgcagggcgcatacaagctgcattccgaattttttcctttaagaagaagaaagagatggctcttgggaacagaaatagctgctgcttgtccattagtgaggcaggagcagtttcacatgatatgctggagaaagctgtattatctatccagaagaacttcaggtgctggaaaaaacgtaaagaattcctgaagatgcgaaataatgttgtcaggatacaggcccgggtgcgagctcatcaagaaagaaacaagtacaaggaattgatttcaagtgtcggaatccttgagaaggtgatgatacggtggtaccataaaggtgttggtctgcgtggattcaattctggggcaatgacaatcgatgaagaggtggacgaagacgttgccaaggtcttccggaagctcagagtggaaacagccatcgatgaagctgtttcaagggtatcatgtatcattggtagccctaaagcaatgcatcagtaccgaaggatgctcaataggtaccaacaaacaaagttaatacgttcgccgcagtcctctattggcagtgacattccaacagttgaacgccagctgtttcatgcctttggcatcagctttcaaatggagcagcgatcaaagaaagcctcgtag

SEQ ID NO: 25539 - DNA, 321 bp, Zea mays
  Peptide Sequence Number=SeqID_68914
atggcagtaaagcaatttctggccactactgagattgatatagatgaggaatccatcacatggatgactggtttcaagagatattctgcaacatttgctgaatttgcagctgtaaacagtctggattatggtaccatttcagctaggattgatttatacactgaagataactttgaagaatttgtgcaattctatgagccagcaaggctgggaatacctaggaggtttggagagacagcaggactgaggcatcatcctgctgtgattaacaaaattgctagagtcacaattcttcccaagagtggagacgagcaaaattag

SEQ ID NO: 25540 - DNA, 351 bp, Zea mays
  Peptide Sequence Number=SeqID_68915
atgtcgctcatcgacgacgagaagaagcttggtgactgccagttcgacctttggaagcagtcttacgtgcccgcattgaaagggaaatacagtgtccggtgcgccaacggctctgaatctccaacggtcggcttcgccaaagaagaaaagaaatccgcaccggactgtccggtgcgccaggcgacagaaggcaagaattgccttcctggaatgctctcaacggctcctagctgccttggggatataaaagggacccctaggcgcatggaggatgataccaagcattctctaagcattcctaagcaccaagactccaattccgcgtatttgattctttgtgatagcaactag

SEQ ID NO: 25541 - DNA, 471 bp, Zea mays
  Peptide Sequence Number=SeqID_68916
atgggcaagaacaacaaacgcaagcgcgagccgactcctccgtcagaggactttggcgactcggaatactcagaggaggagttctcctctgagtccgaggggtctccggctcccgtctctcccccagcgtcgtccgatgactcggacgactctcaagggattgccgcggaggtctggacgtacatccgggccatcgagcgctccgggctcgagggctcggatgagtcggagtactcctcggatgaggaggactcggacggcggcggcgaggatgaggacgacgacgacgacggcggcgacgacgacgacggtggcgacggtgacggtgacggcagcggcagcggcaggggcagcagcggcggcggcagggacgatgacggcggcagcagcaggggcagcaaccggggtggcagcagcaagggcagcaccaagggcggcggcggcggcagcagcaacagggccagtggctag

SEQ ID NO: 25542 - DNA, 384 bp, Zea mays
  Peptide Sequence Number=SeqID_68917
atggggatacaagattctgttaccgaagacgtgccgaggacggggcatccaggattccaggaagcacggcgcgcgacggccgacgcctcgacgtcgacggaactggccactgggtgcgaggcggcggtcgacggggaaccgagggaaccgggtgcgagcaccgcgagggaaccgatggccggcgagccgagcaccacgagggaaccgacgaccggcgagtcgagcacccacgagggaaccgacgggcggcgaggcgagcacccacgagggaaccgacggggcgaaaaggcgactgggcgagggcggagcggacagcggagacggagagaacgagacgagtgcacgactggggttagggttagggttacggacttcgggtcgtag

SEQ ID NO: 25543 - DNA, 1593 bp, Zea mays
  Peptide Sequence Number=SeqID_68918
atggacggcggcgcgggcgcgggcgccggccggaggaacgtctcatcgtcctccggatccaggaggagggtcctgcccgccgagaacgggcacggccatgacgccccgccgccctccaggcggtcctccgtctccctctcccgcggccactccacgtcactgaccggcgagaggaccgtgaaaaggctgaggctgtccaaggcgctgacgataccggatcacacaaccgtgcacgaggcttgtcggaggatggcgtcacgcagggttgacgccgtgctgctgactgactccaacgctttgctctgtgggatcctcaccgacaaggacataaccacaagggtgattgctcgtgagttgaagatggaagagacaccggtctccaaggtcatgacccgaaaccctgtatttgttctcgcggacacgcttgcagtcgaggcgttgcaaaagatggtgcaaggtaagttcaggcatctgcctgtcgtggagaatggcgaggtcattgcaattctggacatagccaagtgcctatatgatgctattgcacggatggaaagggcggcggagaaaggaaaagcaattgccgctgccgtcgagggcgttgaaaagcattggggagcagctgtgcctggtcctaacaattttattgagacgcttcgagaacggatgtttaggccatcgctgtctactattatctctgagaatccaaaagttgtcactgttgcaccatcagacatggtgttgacagcatcaaagaagatgctggaattaaaagtcatgactcagagtcctgaatgtgccacagtggacaccccaattcttgatgctcttcacacaatgcatgatgggaaatttttacatttgcctgtcctggacagggatggaaatgttgtgactgttgttgatgttcttcacataactcatgctgcaattgctacgatatttgtgcttccatcttacctattacccctatgcactcacttttgctggtctgaggttggaaacagcggggcagctggatccgaggcaacatctgccatgatgcagaggttctgggattcagcaatgtccattggacctattgatgatgacgatgactcgagaagtgaagggtcgactagagtggtatctgaggcaacagatataggaagaccagccttctttccagcttctggcttatcaaacacttttgggttcaagattcaggataagcaagggaggatgcacagatttaactgtgaaacaagcggcctggcagagctgataaccagcattcttcagagggtcggcgacgacattgacagaaaacacctgccgcaaattttgtacgaagacgaggaccgtgataaggtcgtgctttcgtcggacagtgaccttatagccgctgtggaccatgcgagaaagatcggttggaagagcataaggttgcatctggattacgccggcgttggccggcggaagggagggggtggaccttcggacttggagtacgctggcaaggacgcagcatgggcttctgcgtacagcgccgtcgcggcaggggcggctctggttgctgggctcggtgtgatggcctacttgaaacggtcggggtaa

SEQ ID NO: 25544 - DNA, 222 bp, Zea mays
  Peptide Sequence Number=SeqID_68919
atgtcgtggtcgggacaaaacttcaatagcgacctcttcaggaagggagtgacgttgcagacgtcatcgtcgcatgtccaagatgacaggctttcacccatagaagacagtgctgaggaatgcgacgctctcaagtggatgaagtgtccactccgtttgggtaattatactacaaaggacaacgcaagcgaacaaaatactgggcaaattaatggcaagtga

SEQ ID NO: 25545 - DNA, 345 bp, Zea mays
  Peptide Sequence Number=SeqID_68920
atgaagcctaaggaagaaagaaattctatttgtttggagatagccaagtttttctatgagtgtggtataccattcaatgctgcgaactcaagcctcctactttacatgagctacgtgagcctttacttgctagggttgtcaaagacagatgagaggaagaagcacaaacaaggaatccacgaaggaaaaaactttgatcctttgattttagaagactttgattgggacaatgaatgggttgatccattagctaattcttctcatgttagcaatgctcttggagttgatttcaatttatcatgggatgctcatggtcttaatattgataagtttgatgatggttaa

SEQ ID NO: 25546 - DNA, 249 bp, Zea mays
  Peptide Sequence Number=SeqID_68921
atgccgccgcctatagttgtgtcatcgatgctcggatgccatccacgccccgtagaagacgtcatcgcactgctgctgtggcggcacaggaatggggcggtgaacaacggggtcgatgaaggagacgttgccatcgtgaattatggtgccattgatgatgagagggtgtacgatggaattggcgatgatgatggtggcatggagatgagtcgagtaaagagtagcatggcctatgaaagcttgatttaa

SEQ ID NO: 25547 - DNA, 561 bp, Zea mays
  Peptide Sequence Number=SeqID_68922
atgggtcggatcacgcacgcgtgggcctccatgttggatgaggccgcggaatgggacgaccccgtcataggccttcgtcctgcgacgcgtgagacgaagcgagtctggcgaaggcatcgagcgaagggtggcatcttcgtcttcgccccaacactcttgtacccgctcagttggcagagtcctagtcaaatcgaagaatccatgtgcaacatgatgaatcccaatggagatgaagtggatgatgtcaacaacaagattccaaccccaacggttatgaacaagaaggatgagtcacatggatatctgttgaacgaaatgaagaacaacaagaggaccagaagaatatttgggtacaagattaaaccacctcagccgcaagcaaaagcctcgaagctcatgaatacccaaacgagagaatcaagtcaagctcagttgttcaacatgcagacaaccgatcaaccatcatctgccggcaatcaagcaaagctgactcgtagagaggtcaaagcaagaggtgcttgtttctactgcaaggaagaagggcatttcattcgccaatga

SEQ ID NO: 25548 - DNA, 252 bp, Zea mays
  Peptide Sequence Number=SeqID_68923
atgtcgtcggcgggtggagaggaccttccttcaaatcagactcatcgaacgaggactaccggccggtgccgccaatgcctccacgagctcacgacaccgaggccggtggctcgagctccgcactccacagggatccagcacttgtccgcatccttcctcgaccggatgcaggaccagcagcaacagatggtgcttacagaagcgcagcagaggcaggacgagttccagaggcagatccttgcacagcagtag

SEQ ID NO: 25549 - DNA, 405 bp, Zea mays
  Peptide Sequence Number=SeqID_68924
atggcgttcgggatgaagcgggtatggacggatggctttgcagcgggcgccgtgatgaagcagtccgaacgccgggaagacgactccgccctgcgctcaccggaagccgcgcttgctgttgaagaccccaccaccgaggaccttgaatctgataccactgtcacaacccagggacggtggaacacaatccaccgtcgtgagttgttgccaggcggaagaacaacttccagatgcgtttcaacagcccaacaaagtttccaatcagttctttacactgctcctcgtggtgcacgttccttaaaacgcacgaagctactggttgaggctggagctgaccctaacattcctgacaagatcaggttctgcatccctcatagtactaggctgtctatggcaaaccattga

SEQ ID NO: 25550 - DNA, 444 bp, Zea mays
  Peptide Sequence Number=SeqID_68925
atgggcaagagtaacaaacgcaagcgcgagccgaatcctccgtcggaggacttcagcgactcggaatactcggaggaggagttctcctccgagtccgaggggtctccggctcccgtctctcccccggcgtcgcctgatgattcagacgactcccaggggattgccgcggaagtctggacgtacatccgggccgtcgagcgctccgggctcgagggctcggatgagtcggagtactcctcggatgaggaggactcggacggcggtgaggacgaagacgacgacgacgacgacggcgacgacggtggcgacggcgacggtgacggcagcggcagcggcaggggtagcggcggcggcgacgggagcaagggcagcaccaggggcggcggcagcaagggcagcaccagggtcggcggcggtggcagcagcagcaaggccagtggctaa

SEQ ID NO: 25551 - DNA, 267 bp, Zea mays
  Peptide Sequence Number=SeqID_68926
atgccgaaactggagagggcaccggccatccatgggggaaggctcggcatggtgaaagagcagaggcagggtagggcaagatctagggaggggctacaggcggccatggaagctgagagagatgggaacgaggacgactgctctagggcttcacggggtcgacggtcgagaagggcgaggatcgctgcaacagccatgcagctagacacgatccctccaacagccatgcagctaaacgcattagaattagtttatgatgtatactga

SEQ ID NO: 25552 - DNA, 735 bp, Zea mays
  Peptide Sequence Number=SeqID_68927
atgccgtcttcctcctcgtctgctgcgaccacgccgacggccgaggcgtcttccgaggatctctcgggcactgtggcggtggcggaattacgaccgggtgatacggtggaattcagtgtttcgcggatgtcgttggtccgcgtgcaagatatgcaacggttggggtattttggcagcggggttgggcatgtctcgggggcagaggagattcctgagcccgagggcgaattggttgtttttgaggcattttcatcgccggccttcgtctgcccgcacatcgttttgtgtcggaggttttgcagaagttcgaagtccaggttcatcagctcacaccgaacgccgtggtggcgtcggcgaaaggctgaagtcgaagatcacccagggctccctgccgccattatgtgctctcattattatgtggcgtacccgccatttgaagtggcggaggacgacgagaatgaaagggcccttcggatcgctgcccgtacgagtagtgggcgtgatctagttgaggaattcatagggtatggggtgtggcccttggtgcatggatgggcgctgggcgaagtatgccctcgcgagatgccctccctaggtgggcggaaagtgcgaagttcgcttttttctttggatgtgcgagggcgggatcctgccgcggttgtgcgtgaggtggaggatggggcggcgcgcattattgggcgctacgtgccgaagacggaggcccagcggagctag

SEQ ID NO: 25553 - DNA, 912 bp, Zea mays
  Peptide Sequence Number=SeqID_68928
atggagttgatggggacatgcgcggcccccgggggaaggatgtcttcgcccgagctccgggagtcttcggcgcgaatgctggaggttaccgggggtcgatggcccaagaacgttcctatcccccgcgcggctggtgaagacttctttacgtctcgcatggctcgtgacttgagagtgttttcttacggacggaatattgctgctgttgtgttggcagtgatgaacaaggatcgccaggacgctgcgcagaagcgtcgggcggtcatcagggtccccgatgctaggcgtgaagcaaagagggcacgggggagtgcgaaggctgccgtccccgggggcagccagccgatgctggctgcgaagccagccgcgcctggatctagcaaggtgtcggagagcgcgaaggcggtcggcgccagcgggaccaagtctgccccggacgtagctacgaagatccgggagctgccctcgccgggaaaacgcgttgccgacttcggcacgaatattagcgtggacgactatctcgttgggtcgggcgaagggcaactggttgttgtcccgcctgcggtggcaaccacgacgtcaaccgctgtgcttggggcgaagggtggcgctttcagcgctggcggcgagattgcggcggccactgccgtcaaggacgaagcgggcaccatgtcccgccggctgagggaggcgtcgcagcagttgtcgcagcagctgagtgaacacgcggacgccgtccgggagaagttggctgcggagagcaagagccgcaggctggctaagaaggtggccgccctggagggcgagaggacggacctccggcgccagctggtggaggaaaggagggaggccaaccaggccatcgccgaggcgcaggctgcgcaggcggaggccaaattggcgcgggcatag

SEQ ID NO: 25554 - DNA, 498 bp, Zea mays
  Peptide Sequence Number=SeqID_68929
atggcgcgtgccgaggacgtggaggacttcggacatctgaacagcacgcagcccgaagtggaggtcaacccggtggtggccgaggctgaggttcaggattttgggcctgcgcacgcaaccgctactgctaattttgtggcggcttcgactgtggtcgctggaaatgaatcgaatgagtctacgtctaagttttctgagtttgatgactctgggagtttggttgtgtggacggaagagtcttcggatgaggacttggattactttgcggccttggatgtggctgcggcggaggcttctccgcgtgttacggatgctgaagttttgcctggtccgagtgctgggcgtaggcggcgaaggacggtggcgaagcgtagagtgagtgaagtggatggtggtcggcttcgtgtgggcagggctggcaagcgggaattgttgtcctcgccggttggggcgagtgtgtggcggaaccgcccgaattattccaacttaagtgcctaa

SEQ ID NO: 25555 - DNA, 609 bp, Zea mays
  Peptide Sequence Number=SeqID_68930
atgacttctcacgagtcctcggaaggagggaacgcacattcccacacggacggacttgcgcaagagggttttccctgcattttgtgggaggtgctgcagggagccggttatctggtgcagttgttcgaggagcaccgggtaccccgctgtagggtgaggatgaccttggagcctcatcccttgcagctgggctggcgttcgttggactccgagtctttcggataccgggctgaagacactattgaggccattgctctcctcgggctaacgaccttttatggctttcaccccttggagctgtccactcatcccattggcttgttccccgctgaaaaggaggacaagccaatgtggaaggatcgagtggtgcatgccaaggatgtgtgggctctttacccagagcagactgctcacctgacgcaacttgaggaagccaaccagcacctggatatgcaccatcaggagatccaggacatggaggccgaaggggccgacgaggatgttgacatcgagggaggagaggagccggagcctgtatccagcttggacactgctggctcaggaagaccaccttcccccaagtccagtgttgccttgtttgtccattag

SEQ ID NO: 25556 - DNA, 540 bp, Zea mays
  Peptide Sequence Number=SeqID_68931
atggggaaggaagcttggctgcgacacgcagagaagctccgatccgaggacagagcgctcaggcgctatggagggagcaccgcgagggagctgcgtggagagggagagctcggctgggaggagtggaagaccactcggctgagcgagggagaagatcagtggctgcaaacaaataatctgtcggatgggaagcggcggcagcagcctacccagaactccacatatttctacgacgagcaggttttgtttctccatgcaatcgctcatccaatctttcaccgcttccacctgttggttgcagttcaccactgtggcttggaagtaaggggacaagttgatggacttgctactgacattaggacgatgcatgaacgacttgattcaacagccacttcgacgatcgcacgtttcaaccagcttgatcttgctcaaacggagactcgcaccacactcgacaccatcctggcactccttgatgcgttgaccacaaagatggagcaggactacggtggtgacactgagcaggaactacagcggtga

SEQ ID NO: 25557 - DNA, 642 bp, Zea mays
  Peptide Sequence Number=SeqID_68932
atgggcactgcgcagcagcacgcaaacagggaggaagccgagtcgcgagccatgacggggatgctccaaggcgtctgttgcagtacgtcatggggagttggaggggctgctggagctctgagcgccggccatggagagaaggggaggagctactgctgcaaatttctgggcgccaaggaggaagagcaggggcgtctggtttccctgaatggtgagcgcagggctgctgcgctggccggagtagaggcgtggggctgcacggagcgagcgccagggagggcgccatggtggccgaggggaggagctgagctcgcgccatggctaagggaaagctcgggcttgagccatggagcagggaagtgcgcaggcttgggccctcgagtggggaaaaaggaaggaggccggctggaggtgcggcgccctggaggagaggaggagctgctgctcgcctacaccattggagccgaggagaggcagggcgccatgggaggaagggagtcgatctccctgcacgctggggaagaaggccccctgctgcgcgtaggggaagaagccagggagagaaggttgtggcggttggaaaaatggaggggtgggaatgcaaaattgccaagtgcaagagaggggcacttctatttatag

SEQ ID NO: 25558 - DNA, 957 bp, Zea mays
  Peptide Sequence Number=SeqID_68933
atggctcgtcttagacacactgctcgtaagtcggtgatccctttcctgccgtctcgccttgcggagcgtcctctgcgccgcatagtgtccggtcagtcgagtcacctagagaggctgcaccaccgcctacatgaggagcaggagcggcagcatcagcagagggagcagcagggctcttcctccccgcctgagcaggaggtggagtccgtgaggcgccgttcccctgttcctcagctggaggcgccccgtgcaccaccgcaggacgccccggctgttggaggagctactggaggaggtcctggaggagaccccgatggagacgacgacgacggctcagaccacagtactgagccctctgaggagcaggaggcagagggatgggtcgcccgacccatcacccgtgacgccgctcgcggttgtcacttccacgatgcactcgacaccttgttgcgccaggctttcgactggcacacctggtcgatcgagtatcgttgtgtagtctaccagcacagtcgtgggaggtacccggaccgctgggaggctaccttcctagtacgccgtccggaggatgacctccggggtgtagaggccttctcggagcattactccatctccgagagggacactgcggaggcggctatgcaggacgcagcacgacgtgcactctcccagtactgttccttattcggtggggtggccaatggtcttaaccttaggtactacccccgccgtcctactggtagcacagagagtgtggttgtctcgcctattggtgaggataaccctaggttgagccacacagtcaacctagtcgctgtgcttaacaccgagctggaccactctctggacaagctgagcagggctcgagcggagattgttgagttgcgtgctgagctggcagagcgccgccaccaggagggtggttcccccgctcctgttgggactcagcacccttaa

SEQ ID NO: 25559 - DNA, 474 bp, Zea mays
  Peptide Sequence Number=SeqID_68934
atgactcgctcccatccatcaattgacagtgagatggttggggtaggatttgatggcagcaaaagcgccctcggcagggttaccttggaggaatctcatactatacatgaatttgcaacgccatgtaatgttgatggcaaggtcatgactgacaagacctaccctgctgggttcatggttcaagctctgcaaggtgaggccaacgacaccatcaagatcgatctggagaccaacaagatcatggacttcttcaagtttaacgtcagcaacgtggtcatggtgaccggcgggaggaacaccgggcgtgtaggagtgatcaagaacagggagaagcacaagggcagcttcgagaccatcgacgtgctgcttggagctttttgctatgtctattttatcctatttgttgtacaagaaaacatagaatggaattcaaatttggtggtcacaaaagtgtggagacttgaattcatataa

SEQ ID NO: 25560 - DNA, 438 bp, Zea mays
  Peptide Sequence Number=SeqID_68935
atgaccgccagatctaaaccgacgccccagattagatttgccctaatatcgaaatggcgaatccccaagacccaacaggataaattcccaagcggtggcgaggcaagttacgcggttgctgcacatgccctgttctacgaagtcgagcgggctctgtccgcctacccgtgcgccaaccagcgcgcctgcccccacctgcgccacgaccggggaaaccgcagcgtcgcgagtgcccccgcctataagtaccggtgcgccctcagcctctccctgcgcgcccattgcaagccttctttgtcggagttcacgaccaccggagtacgccaccacccgccttgccagccgaagggccaaccaccatggcccgcccaacaccatcttccaaccctcacgccattgccagtaggagtttccctagcccccagtgaccttggctag

SEQ ID NO: 25561 - DNA, 405 bp, Zea mays
  Peptide Sequence Number=SeqID_68936
atgcagccacaaccaaaccaaggactcaaagcagattttcatgctacaaatagagcaaattccaaagggtcatggaaggacaatatggtgtgtactatccagaccacccaggtgaacaccaactacatccctccgccacggcaggctcctgtctacctagtggtagtagaggaagtccctgtggatctccatcaccttcgtgtggggaatggagttattctggagggcagctcagaggagattctggcaacacccacctcgttgtcagaattactagcctttgcagttggagcatcatttggaggcgacaatctagatgattctagtgatgatggtgaagatgatgatgatgatgatgatgatgatgaagaggagaacaacaatgaggaagacaacgacgagtag

SEQ ID NO: 25562 - DNA, 246 bp, Zea mays
  Peptide Sequence Number=SeqID_68937
atggcgggaaagaaagacggagccatgtatgacaatgtcgacagcggtagcaagggcaaggatggcggtggcgacggcggcaaaggcggcgttgacagcagcagtagcaagggaagcaacagtggtggcgacaacgacagccgtgttaagggcagcgatagcgacgatggcaatggcgatggaggcaatggtggcggcaagggcagcaacgccggtggcaagcccgccaacgggcttagttcgtag

SEQ ID NO: 25563 - DNA, 918 bp, Zea mays
  Peptide Sequence Number=SeqID_68938
atggcgctctcccccctcctccttgcggaaaggcgacgtaggggcgtatgtaaaaaagccgagtctgtccctgatcgccctctcgcccctgtgcggaggctcgggggctgctctcgcaaacccggctccggccgaaccgttgacagcgtcaacataccagcccgagaacttgggccccgaccgtacacccgggctacggccagttcgcatgagggaacaaccagaccagccgaagcattacgcgaggcattaagacctcgaaggagtgaaaccactcctctgaggcctcgggggctacacccggcgggtgcgctcgcgcgcacccaccggaacgaaatgcaaccgagaaaggctggtccccttgcaaaaaagtgcgacgaaagcctccaagcgagtgctaacactcccttcgaggctcgggggctactgtcggggaccataattaggggtaccctcaagacgcctaattctcagctggtaacccccatcagcataaagctgcaaaggcctgatggggctcggactcgggctaggccccggaagacggcgaactccgctccgtccgacccagggctcggactcgggctaggccccggaagacggcgaactccgctccgcccgacccagggctcggactcgggctcagccccagaagacgacgaactccgcttcgcccgaccccagggctcggactccgcctctgccgaacgacctccgcctcgcccgacccaggggctcaggctcggcctcggccatggaagacagactcgacctcggcttcggaggagcctccacgtcgcccaacctagggcacaggcctgccacgtcaacaggaagcgccatcatcaccctaccccgagccgactcgggccgcagagaacaagaccggtgtcccatctggctagctccgctagatag

SEQ ID NO: 25564 - DNA, 636 bp, Zea mays
  Peptide Sequence Number=SeqID_68939
atgaagaacgcgtcctctaggacgacaaattccatgtggccccacaacattcccagttgctcggtcaacaagaccattgtcgtcatcgaaggacaaagaccaatcaagaacaaccccgttcccaaaagggtgtacctctggatgcctcacgttctcgcgagagatctgcatccaacccctctaggcgcgtcacctccgcccaaggcttctcagcctaagagtgagcacgaacagctcccgctcctccgaactggcagcttcagtgagcaagtgctccacctcctactgcgctgcaagcacggggagagggcttatctctggggcatcgagctgtccgacctcgatgacttggatgagtcaggggaggaggaggacgatgacgatgacgatggctacgatggtggtgatgaaggagccatggatgacaatgttgacaatggaagcaagggcaaggatggcggtggcaacggcggcaaaggcggcgttgacggcagcagtagcaagggaagcaatagtggtggcgacaacggcagccgtgttaagggcagcgatagcgatgatggcaatggcaatggcaatggaggcaatggtggcggcaagggcagcaacgccggtggcaagccgccaacggcttag

SEQ ID NO: 25565 - DNA, 1221 bp, Zea mays
  Peptide Sequence Number=SeqID_68940
atgcattgcgcccttccaccttccgagcccccggatggggagcgcccgcgttgctttcgtcttgctgctgttggaggagcgcaacttcgtggaggttggcacccttcagccattgctcggcttcaaggattttcatcaggaagctcggctgcatcccctcaccaatggtcacccaagacggtgaccaccagttcgatggtggggagaagcaagccgggctgcgacttctgcccctcccttagcttcaaggatttacattatccttgctggggcggggggcgagctgagccagagctctacctcccgtacgggccggcgggccacctcttccttcagcatccagaggagagggctctcaccggcctagcggagggggcggacttcgacaacgcgggaccggccggccgcaagcgtcgtcagctccagtgtgttgggctcgctggcgcagctggctctggctcagcttccggtgccccctcccaccgctgggcggagtgtggctatctgcccgccgtatgggcagctgttgcgccgcgcgcaccgggggaccgcccaagacgtcgcttgctgctagggcggcgttcgcgttcttgggctgtcctgccctcgctccggcacgacgccaccacgcggaggtcggtgctcgcccgtccgggaggactcgagtggggatctgccggtgggcaggtggctaccgtcgtcggtgctgaggtggtggcagctggagaaagcttccccaccgacgagggtgtcagcgccaccctcggaccgacctccgactctttggctttgatagcttgtcctcgcccctcgagtggggacgcgggcgagggccttgtcgtagcagcgtctgccctaaggtcatcgctgctgctgtttagccgcccggggtggaggtcgttatcgctgctgacggagtgggcggcggcgagccacctggaatttgtcgtcccgcaggccctccaatgtgggaggttgaaccctcggctgctctacgatgagccggagccggaggcagcggtgtcagcatggacagaggcagagttggctcgaaaaggggcttcgtcggcccaggagcgcggtgttgatatcttccttcgaggtggagatccttcgcccgtgtcgtcgttcgaggccgggccagatcccgccaaaggtggaaacaacgctgagggtgttgttgttccctctattgatgtcagcacttatcgcggaaggtga

SEQ ID NO: 25566 - DNA, 402 bp, Zea mays
  Peptide Sequence Number=SeqID_68941
atgcaggtggcgtgcaaccgcaccacgggggggcaccccttcggcttcgtcgcatccagcatggaggcccaggcccacacgtcatgtaaccggcgcgccggttactacgtgcgagaaaccgcaccgccacttgcgccaatgtcgcgccttctcgactgtggaaccggtgtcgcgactcgaggcaaccctgcgcatggcccaacagcgtcaatcgagcacaacgatcacggggaccaggaaaggggatatttcgaaaggggtccatctccacgaaggaagcgggccccgagccctcctactgatcaggggttcgaaggctggcccctcggaaggacggagttacgtctcgcccgagggcctcctaaaggcagtgggcgcaccctcgactcgcccgaagcctag

SEQ ID NO: 25567 - DNA, 573 bp, Zea mays
  Peptide Sequence Number=SeqID_68942
atgccccaatttcccctctccctccctaatttcctctgcccgcgctcacccgccgtcctctgcgcagtcgccgtggtccgccaccatcgacccgggccatcgccgcgccttcgccgccaccgaggagttccctgggttcgccttgaggccaccccggtcgccctaaggacccgcagagccctcgcgcccctcgtcttcggcgagctcccccgccgcgggtgcggtcgccgccgcctctgctggctggagaaggggacagaagccggccgcccaatcccagccgtccatctcagatcggacgaccctattttaaataacccgggcccgatcctggccgtccgcctggaatccgacggcccaaggccgcttcccccacaccccgctctgcccgcccggccccgcctgtcagcttcccgcgcccgctctgcccgcccggccccgcttgtcagccgcccgcgcccgctctgcccgcccggccccgcctgtcagccgcccacgcccgctctgcccgcccggccccgcctgtcagccgctcatgccgccgcgcgctcgcgcgcccgcccgcagatctaa

SEQ ID NO: 25568 - DNA, 171 bp, Zea mays
  Peptide Sequence Number=SeqID_68943
atggagcttgagaacgacccgaaccgctcaaccgagtacacaccatacttaatggtctatggggtcgaagtggtcctcggcatcgacctcgagtacggcgcctgtggtggaaccacccagattattctagctcacgtgccttggtcttgcctcaatgcaaaacataactaa

SEQ ID NO: 25569 - DNA, 327 bp, Zea mays
  Peptide Sequence Number=SeqID_68944
atggcgcgtggcccacctagccccctcttctcgttttcccccctcgtcctgggccgacttggtgcccccgtggcccagccgaggaccccagcgcgcggcccaccggggaccttcccccgcgcggcccagccggctcgtgccgtggccccgctcgcctcctgcccattgcgcgctgggcccaccgagcagacgcagccccggcatccccaaccacccgcgcgcagctgccgccgtgagcggcgcccacgacttccaggtccaaccgacctcctccctcccacgatcccaaccgaaattcctctctcgtttgacgccgcacagggatga

SEQ ID NO: 25570 - DNA, 150 bp, Zea mays
  Peptide Sequence Number=SeqID_68945
atgggcgggggcctcctggcagcagcatccgccctgaggtcagtgctgccgctgttcggccccccggagcagaagtcgtcgtcgtcgccgctgttggagcagggatgtttgtgcgagcgagagttgcttctcgcggaaggtgatgagtga

SEQ ID NO: 25571 - DNA, 213 bp, Zea mays
  Peptide Sequence Number=SeqID_68946
atgaggatgcaacacctcaaaagaagacataaaaagatgcataggagtccaatactcaagaacaaaagaagcccgaagaaatcagcgaagaaatccaagaagtgggctgtcagccagcgcctggtggcgcaccggacattgatgtccggtaaagaagaaggcgtcgaggcgaatctcgaggagttccaggacttcgacgagttcgaggattag

SEQ ID NO: 25572 - DNA, 204 bp, Zea mays
  Peptide Sequence Number=SeqID_68947
atggagcgtggcgttgccgccatcacattggagaagacatggtcagggttacctttagctgccaccaaaagagactgccgcgcctctaaattgtttgcgcggtgtgccggaggtggccatggtggagttgtgctgctcgcgaaggcgtcgtggcaatggcacggctgtttccctaaccctagcagactggcgaaggatacatga

SEQ ID NO: 25573 - DNA, 1452 bp, Zea mays
  Peptide Sequence Number=SeqID_68948
atggcggattgtcacgatgccggaagagcaagactcggcgcgagggaaagcccagttacatttaggaagggggatgacttgggtaaggtggaacttctggcacaagggacactttacagaaagatgactggtgtcgaagctgccgccatatctgctgtagcatctggaatattaaagattgtgggcaacaagttggcaccactggttataagaaagtatagctcaatcgtgggtgtggaaaaagatctccagaagctccagctgaaggccgagagaaatgatgcttctggtgatggtgattttgtatccagatatatgcgtagaaaaccagaatcgttcatatttcagtgtaaggcagctaagaagatcaaggcaatcaagaagagatttgctgcaatcgtgaagcaaagagccgacatcaatataatagctactagtttaactggtagtggtcattctatttcccatatgaaaaagacagctgtggggctgccatcagtgcctaccatggatgcaacattaatactcggaagagaaatggagaagcaccagctaatatctaaattaactgaaaccaatgaccaacaaaaaaccatgatagtttccatcgttggacttggtggatctggcaaaactaccttggctaaacttgtttttaacgatggtaccactatagcaaagcattttaaagttagactatgggttcatgtgtcacaagagtttggttttgaaagtattgttgggaagctgtttgaagctattgcccatggcaagtctgaaagccataacttgcagcacatggtcagaagaatatcagacgagttgactgaaaaggtgttcttgcttgtactggatgatgtctggactaaggaccgaatggagttggaacaatttatggtacttgtgaggagcggtgcatctggaagcaggattttactaactactcgcaatagcgatgttgctgaagcggtggaatcttcatatctgatcaacctgccactcttgtctttgtctgacagctggcaactatttattcaaagctttggtacgacggtggaaggtttggacagagaattcctagatgttgggaatgccattgtaaacaaatgtggtggggtgccactagcaattaaagtaattgcaggtgtcctccatgacaagaaacggatacaagagtggcaggccattagagacagtaatctattcgatgctgagggcaaagagcgtagagtatctgcatgtttgaggttgagctatctgaacttgccctctcatctgaagcagtgcttcacgatttgttcactgtttcctaaaggtcacaagattgacaaggaacgtttgattgaccaatggattgctcacgacatgttcgctagtgcggatgctgttgattacttggagtacactggatatgagtgttttagttctcttgtgcaaatgtcttttttgtag

SEQ ID NO: 25574 - DNA, 417 bp, Zea mays
  Peptide Sequence Number=SeqID_68949
atggtgagagaacgaagaacactaacaaacacaatgagcaagaacacaagagacacaagatttatcccgaggttcggtcacaccaccaaggtgccctacttcctcgttgaggcgcccacaaagagccgggtctctttcaaccctaatcctccctttgccgaccacaaaggggaaacccggttcactaacctactcagccggagactcgaccggatccaaaaccggttgagccgggaaaaaatccggttgaaccggttttcccaaaagatctgcaacgacttttctgacagctctgactgtcagacaggtcagagcagggatggcagaggaacagtcccaaaaccggttgaaccggttttaggaccggttgaaccggtttccaaggctgaaaaacaagttttgaactttttgaagtga

SEQ ID NO: 25575 - DNA, 291 bp, Zea mays
  Peptide Sequence Number=SeqID_68950
atggccctagctacaactgcaaatagtacaagggacagcagtagagaaaacaaatgcggtgagaatgagaatcaagtttccctattccttggatgtatcatatgcatcggggatgtcatattgaagaatcagtataataatatggactatttggaggggtctttaaatgagcttggaagttggtgcataaggctgcaacaccgtctagtggagggtgttttggacaaagaaagcttgtaccttaaaacaggaggatacaagaagctggagtggttgtctgaaggcttttga

SEQ ID NO: 25576 - DNA, 114 bp, Zea mays
  Peptide Sequence Number=SeqID_68951
atggagatgggcgccgcgcctcgccgcctggcggcctggcgggtgggggcctgggcatggccggctgtagctatgaactcgtgggcgcaagaatttggattcaatggacgctag

SEQ ID NO: 25577 - DNA, 237 bp, Zea mays
  Peptide Sequence Number=SeqID_68952
atggcgttggggaagaagaaaattaccaaagcagaagaagccgcgcaacaggacgagcctcacctgcgcctcgccgcgccgagggggaggggggtcgatcggtcgggggccgttggccagatctgcggttgcgacgacgcgaggaggcgtgaaggtggtgggcactggccactggggcttccgctccgcgtcgaatcccgcaggaagaagcctgcctgcctgggtgatgaatactaa

SEQ ID NO: 25578 - DNA, 2088 bp, Zea mays
  Peptide Sequence Number=SeqID_68953
atgggagaagttagtgatgataattccaacatgtcctttctaaaaagaatcgctacaagtgacgtgccactgttgaaagagtatggtgtgaatggagttgttgtcgccctgcttctggctgtagttactcctgtcctgctttccatgatgtttggcaagaagacaaagcaaagggcggtgcgagctgatgtgggtggagaggagggatttgcaatgcggaacaacaggttttcctccttagttgaagtcccatgggagggcgcccacgacaatgtcagctctgttcgagatggccagcaaaaaatgggccacgacctagatagtcatgctgctatcttctctgatacaagagctgagtggatcattgctgctcagggatgcttccgacaaaatttaacggttgtaacaatatatgcatctcttggtgaggatgcattggtgcattcactaaatgagacacaggtttcaactctgatatgtgattcgaagcaacttaagaagatacctgcaatcagctataaattgcagagtcttaggcgtattatctatattgaggatgaacctgtcgaggctgagacactgaaccaagtgaagcatttgacaacattgtctttcactgaagtagaggagcttggcaagacatctcatgttgatgcaaggttaccttcaggctctgatactgcagttatcatgtatacaagcggaagtactggtcttcccaagtggtcaaagctttcacttgacattgcttataaaatatgcataccaaactctgatgctagtgcactaaaatgtggtgtaatgatcacacatggcaacatggtggccacaactgcagcagtcatgacaatagtcccaaaccttggcatgaatgatgtttatctggcttatcttccattggctcatgtctttgaactagcaggggagactgtcatgttagcttctggcagtgccattggatatggttcagcattaactatgactgatacatcgaacaagattaagaagggaacaaaaggagatgtttctgtactgaatcctactcttatgatttcagttcctgcaattttggatcgtatcagagatgcagtatttaagaaagttggtgagaagggtggcctgacaaaaaagctgtttgatttttcatataagcgaaatattgcagcaattgaagggagttggtttggatcttgggcaccagagaggatgttatgggatcacattatttataaaccaatacgggcaatgcttggaggacgtctaagatttgttctttgtggtggtgcacctctgtcaagtgacacacaaagatttatgaatatatgtctaggtgtcccagtgggtcaaggctatggattgactgaaacttgtgctggagcagctttcactgaatgggatgatacaagtgtgggtcgtgttggtccaccacttccttgttgctatgtgaagcttgtctcatgggaagaaggtggttacaagatttctgattctccaatgccgagaggagaggtcgcggttggtggacacagtataacaaaaggttatttcaacaatgaagcaaagacgaacgaagtatacaaggttgatgagaggggcatacgctggttctacactggtgatattggtcagttccatcctgatgggtgccttgagattattgacaggaaaaaagatatagtaaagcttcagcatggagaatatgtgtctcttggcaaggttgaatcggctctagcaacaagcaactatgtggagaacatcatggtttatgccgatccatttcataactactgtgttgccctggttgttccagcgcaccaggccttggagaagtgggctcagaattccgggatgaactatgaaggctttggagagctttgccaaaacgaccgagcaattaaggaggttcagcaatcgctatcaaaggccgcaaaagcagcgaggctcgagaaattcgaggtgccagcgaagatcgtgctgttgcctgaaccgtggacgccggagtccgggctggtgaccgcagcgcttaaactgaagagggagcaaataaaggccaaattcaaaggcgatctggacaagctctaccactga

SEQ ID NO: 25579 - DNA, 465 bp, Zea mays
  Peptide Sequence Number=SeqID_68954
atgggtgatcagagagccgatgagcagcagaaaacacagtctagcatagacgttggcctacagccggcggcagacaattttttcccctgtccgccgccccctcccgcaagccgccaaatccacatcgcaaaccctaacgccgccgccgccaaaacccagcagcccccactgcaacaatgtctggcggggcggtcgcggttcaaggacgtggacatgcgggtccgcgtccgcggcggcgggaagacgtcgcaggtcttcgccatccgccaggccgtcgccaaggggctcgtcgcatactaccagaattacgtcgtcgaggccgccaagaaggaggtcaaggacgtcttcagccgataccagcgcaccctcctcgtcgccgaccccaggcgctgcgtgtgggggatggatatccccgggcccactaaagaaataaaagacctcacgaaaggcccaaggacccaataa

SEQ ID NO: 25580 - DNA, 207 bp, Zea mays
  Peptide Sequence Number=SeqID_68955
atgccgatgtggcagccggagagatctgggcatcctgctggcgtgatgtcgtggctatcggagggcgacgtggggtttccttccgaagccgaggttgagtctttgccttcagttgccgtgggccgaaccccgagccaggggggtcggggcgaaggcggaaagtcgtcccggcccaaggccccgggcgggagtcccaagcccctgggg

SEQ ID NO: 25581 - DNA, 186 bp, Zea mays
  Peptide Sequence Number=SeqID_68956
atggcgctcgaagatcttctaggcgacactggcattggatacttctatattgtttcctccattttgcacctgggcccgcatgtcggggctaagcaccctttggcggagctctcggtatggcaaggtgtggcgctcgccatacctagatctgacacctcggcgcagccctactgccctagaccctag

SEQ ID NO: 25582 - DNA, 748 bp, Zea mays
  Peptide Sequence Number=SeqID_68957
atggacagtaggccacgtggcagcatcgggtctctgcctgagcgaggatcagaagtgtacatggtatggtccagacacgtgtcggctctggacccccgcctggccttgattaaagcctgggtattctttgtcccagaatcctgggaccctgctgagggtggcccataccctacacagagaggtctgggacccgtcccgggggtccgatatgtacctgcggaggtcctagaccctgcccggaggtccggtcctgatatgcaggggtccgacactttcccatgggggtccagacccaccgttgataccttggaggatatttccttccctggccatgtagcgaccctagagccgtccatgtggtggggtcagggtaccgacagtggcccccgggcccacctcaggggaggatacgagcctgcagcgggcgctaggcgcgcgtcggactggatttccaggggcgcgagcgggagagccttccctgaaaagggattcaccccgcggccagcagtcacgctttcgcattctctccaaccgctgcgccctttcgtctccgagccctctgcgcttctctgtactcgtgttcttctgctttccaccgccgcagtcgccatggcctcgctggttcgtcccgagcatttccagaccgaggaggcactcgacatggtgcgccgcctgctcggatggagtgcgccggtgttcgacgggaggatccgggccggcaccacccccctcggtgacctcgccgcct

SEQ ID NO: 25583 - DNA, 471 bp, Zea mays
  Peptide Sequence Number=SeqID_68958
atgcggcccgtccagccgcctggtggtggtgccgacaggtgggccacccttgtcatcccgctctcacgcgcacttggcaagaaacttgttacgctgctggcgggccccactcgtcagacttatctcccttctcacaacaacccccgcgtcagcgcaacagaaccgtggtgctgcccagggattccgagctcgcgcatacgcctaccgaaatcgaagccgaaattcgtggaagactacctgctcgggctgccatcctccctccgattttccccgtcgcaaccatcgccgttgatctcggatgccgttgagggtagtccgcacatggggaaggcctataagttgggcgatatcgggcggtctgaacttgtcgataccgcttcgttggccactttgctaaagagccctcgggaaactcagaaaccaacccgcgatccgtccctggtagattctgagtctggagaaatcttataa

SEQ ID NO: 25584 - DNA, 168 bp, Zea mays
  Peptide Sequence Number=SeqID_68959
atggtcagagtgaggttagctgatggtaagaagaacttgataagggaagactccgtccaaggtgatgtaattgtggacattactccacaactcatcacactcaatcaaagatccaaatcaggcaagtatcataagaacaaacattcaagggcacagataattatataa

SEQ ID NO: 25585 - DNA, 717 bp, Zea mays
  Peptide Sequence Number=SeqID_68960
atcacggtcggggcctcgcccgcgcccgaccggaagatgtgtgtcgactccaccaggatccggaaaggaatcaccgcaaggaaacctctgcgcccttgtcctcccgtcttcggcgccccacaccatgtccgccgcgacctccgcccccacccccacctccaggtcatccagcctcatcccaatcgcgacaagccagaggagagcgcgagaaaatccccaatccgcaggccaccgcttcccctctccgtctcctccaaatccagtcgtctccaaccgtcaatccgccccgccacctccaccaccgaatcccaggcaggcatggagtgcgagccagaggagctccgttgggcggcgtcggcatcgtggagggggagcagctggggcgccccaccatccgctgcaccaccgatgacgtctacttcgcggatcgtctccaaccgtcgatccgcccgccacctccaccaccgaatcccaggcaggcatggagtgcgagccagaggagctccgttgggcggcgtcggcatcgtggagggggagcagctggggcgccccgccatccgctgcaccaccgacgacgtctatttcgtggatcgtctccaaccgtcgatccgcccgccacctccaccaccgaatcccaggcaggcatggaacgcggatgagttggtgatggcggccgccaccaaggctgccgacagtggagaaaggttgaggtcttga

SEQ ID NO: 25586 - DNA, 681 bp, Zea mays
  Peptide Sequence Number=SeqID_68961
atggggagaagcaagccgagctatgatctcggtcccgccctcaggttcaaggatgttcatcatccttgctggggcggagagcgaggcgagccggggctctacctcccgcgcgggtcggctggccacctcctcttccaacttctggtggtggaaaccatcctccagctctgcggaggaggcgtcctccagccatgccggggaaggagaactgttgctgcgcagctaggatgcaacattccgccctcttcctcgctttcgtggcgaggacgggagcgaggacctgccgttaaaggaacccctcggccgctctttgatgagccgaagccaggggtagcggtgtcaacacggatagaggcagagttggctcgaaaagaagacttggtcggccggagcctggccgggtcgtccgttagcgggaccgacgccggagttgatctgccgaggcctcgggccgggctgatgtcttcgggggacagctggccgaggcctcggggtgaccagccgagccgcctgctcgagccggattcttggaggagacccgggcggcgatggcccgggcgtgatgatgaagtcgtccttcagagtggagaccctcggaccgtgtcaccgtcggaggctaggtcggacctcaccgaaggtgtagttgacgccgagggtgctgctgctcccttcaaccgttaa

SEQ ID NO: 25587 - DNA, 249 bp, Zea mays
  Peptide Sequence Number=SeqID_68962
atgacgaagcctgaccctggcaaccggcgcaacgaggcggcgaagaagatcacggcgacgaattcccgtggccacactggtcttctcggtccgatacgccgcagcacgattcaccggacccaggcaaaactccacggccaacgaagggcaccgaaactccacggcggcgacgcaatcacgttctcccagcaccgacacactcgcaatttcgtaatggcagatgagaaattggggaggggaaaggcttag

SEQ ID NO: 25588 - DNA, 1008 bp, Zea mays
  Peptide Sequence Number=SeqID_68963
atggatgctcaatatgatgtgactcaagaatggcttgatagggtgaagacatcaaggaaagggcttcaagggaccaagggaagaaatcgtcgtactatcaaggagggtccaaaaagaaggttggtgtttgccaaagcgtactatcaaggagggtccaaaaagaagctgcagttgaacttcacttcaactgtgtgttcagctgcagttgagctttttcaattgcaattgaacttcacttcaactgtgtcttcagctgtagttgagccttttcaattgcagttgaacttcacctcaactgtgtcttcaactacagttgagctttctcaactgcagttgaacttcaacttcaatgtgaacctctctgactatacaccagttgaacttgcctctgggccagttgaaactgtccagcagtctacagtcagactggcagacagcaaagggaggattagggttcaaagagacccagctctttgtgggtgcctcaacgatgttgatcctagggcagtagaccttgccatgagaatcatcgaaagtatgttcctcaaaatgaaggaagatgaggcgaagaacatgattgaagaagaagaaaatgatcgatggagaccaaacgacaaatccacctcttcacaaggtttgtctttcaagtccaattctcatatttgctttgtcgctaatgggagtgacagtgaaagtgaggatgaggaggagcatgaaagtgatagtgaagatgaggatgatcttcaacaattcttcgctcaactaagcaagaaaaattggatgagcttgctcaaactcatgaaaagagcggaagaacaaaaagaaatgcttcataagcaagaagatttcctcatcagaaaaattaaagatttagagaagttgaccaaagagcatgagaagctaaagtgctctcatgatgatttggtccaaaggtacccagtgatagtagacgcggcccgatcttccgtgagatacgataacttgattgagtggagatctcgacgttga

SEQ ID NO: 25589 - DNA, 186 bp, Zea mays
  Peptide Sequence Number=SeqID_68964
atggagtttgccaacaacaccttgatctcgctcctgggaatgatcctgtcggagaggaaagatcctaggattgcatctttctcggccatgaccatggatcaaaagactggtgcctctgtccatgggtggactgtccggcttggttggccagaccatctgcatgagcatcggaccgtctgcgcgtag

SEQ ID NO: 25590 - DNA, 2652 bp, Zea mays
  Peptide Sequence Number=SeqID_68965
atgccgctgcagctgatgccgccgcactactatcccgtcctgctgccgctactggttcttgcggctgtggcgggcgtctccgcgggtggtggcggcgacggagatgtcgtggagcggacgtacatcgtgcgggtggacgccgacgcgaagccgtcggtgtacccgacgcacgcacactggtacgaggcggcggtgctggcggccgccggcgacggctcggagtggccggaaggggggccgctgatccacacctactcggcggccttccaggggttctccgcgcggatgtcccccgcggccgccgaggcgctggcgtccgcccccggggtggcggccgtggtgccggagcgcgtgcggcagctcgccaccacgcgctcgccgaggttcctgggcctgctgtcctccccgccctcggcattgctcgcggaatccgacttcggggccgacctggtcatagccatcgtggacaccggcatctcccccgcgcaccgcagcttccacgaccgcgggctgggcccggtcccgggcaggtggcgcgggctgtgcgcgtcgggtcccgggttcccgcccagctcctgcaaccgcaagctcgtcggcgcgcggttcttctccaaggggtacgaggccacctcgggacgcatgaatgagacggcggaggtcaggtccgcgctcgacaccgacgggcacgggacccacaccgcgtccatcgccgcggggaggtacgtgttcccggcgtccacgctcgggtacgcgcgcggcgtggccgccggcatggcgccgaaagcgcgcctggcagcgtacaaggtgtgctgggtgggcggctgcttcgactccgacatcctcgccgccttcgacgccgccgtcgccgacggcgtcgatgtggtctctctcagcgtcggtggcgttgtcgtgccgtactacctggacgccattgccattggggcgttcggcgccaccgaagccggtatcgtcgtctctgcttcggccggcaacggtggtcccggcgggctcacggtgaccaatgtggcgccctggatggccaccgtcggggctggctccatggaccgcgcgttcccggctaacgtgcggctcggcgacgggcaggtgctcgacggcgtgagcgtgtacgggggacccgcgctcgagtccggcaagctgtacgaactggtgtacgctggggcgagcggcgggggtgcctcgtccgcgtccgacggctactcggcgtcgatgtgcctggacggctcgctggacccagccgcggtgcgcggcaagatcgtggtgtgcgaccgcggcgtgaactcgcgcgccgccaagggcgacgtggtccgccgcgcggggggcgtcgggatggtgttagctaacggggcgttcgacggcgagggccttgtcgccgactgccacgtcctgccggcgaccgccgtcggcgcggccgcgggcgacaggctccgcaagtacatcgcgtcggccaccaagcagaggccggccaccggcaccatcctgttcgagggcacccacctcggcgtgcacccggcgccggtggtggccgcgttctcggcgcgcggcccgaacccgcaatccccggagatcctgaaaccggacctgatagctccaggcctcaacatcctggcggcgtggcccagcggcgtcgggccggccggcatcccctcggacggccgcagcacggagttcaacatcctgtcgggcacgtccatggcctgcccgcacgtgtcgggcctcgcggcgctgctgaaggcggcgcacccgagctggagccccgcggcgatcaagtcggcgctgatgacgaccgcgtacgtgagggacaacagcaacggcacggtcgcggacgagtcgacgggcgcggcggccggcgcgttcgacctgggcgccgggcacgtggacccgatgcgcgccatggacccggggctggtgtacgacatcggcccaagcgactacgtgagcttcctctgcaacctcaactacacggagcggaacatccgcgccgtcacgcggcgcccggcggactgccgcggggcccggcgcgccggccacgcgggcaacctcaactacccgtccctgtccgccacgttcgtggccgccggggcggcggcggcggcggcggcgagtaggacgcacttcatccggacggtgaccaacgtgggcggcgggagcgcggtgtaccgcgcgtcggtcacggcccccgaggggtgcaacgtgacggtgcagccgcggcggctggcgttccggcgcgacgggcagcggctgagcttcgcggtgcgggtggaggcggcgctcggagggaggatggagcccgggagctcgctggtgcggagcggcgcgctgacgtggagcgacgggcggcacgtcgtccgtagcccgatcgtggtgacggtgcaggcgcctctgcagaaattttcgcgagcgggtggagggaagcaggtggcgagtgcagagagtgttgagagcgctttgtcaaaaggcgccgacgtagggaaattaatggcccctgacgagatggtactagcgagggctggtgcagagcagcaggcaggcggcgaatacccgccttgtggtttactccagcattgccagctttcccagcagatgactgtggccagtgttttcttacatcgcaaggagcactgccatatctag

SEQ ID NO: 25591 - DNA, 186 bp, Zea mays
  Peptide Sequence Number=SeqID_68966
atggcgccgtcacaccgtccaactcatcatccacctgaagctcaacctcccacccaagagtcatcggtactcgccatgtcgtgcgcgttcgacgactactatatcaaggactatggcgtcatcttggcaccagaggtgacgcagaggaggaccgacaacaatgaccactcgtcatcgttggggtag

SEQ ID NO: 25592 - DNA, 162 bp, Zea mays
  Peptide Sequence Number=SeqID_68967
atgaccggaagacgagggccccactggcagtggttcatcgcgcaggaaaacaaggtctgtgagggtgacgagtggggccgcggtgccggcgccctcctcctggaactgggctacgcgggagctctcggttctgcatacgcatacccggacggtgcggcgtaa

SEQ ID NO: 25593 - DNA, 162 bp, Zea mays
  Peptide Sequence Number=SeqID_68968
atgtcgaaaacccccgcggaaccacttcgagcgagggcagcgtctccgccatctagcgacgtcttcggcaccagtcgctggtttgacgaagacaaaacgggcagggacacccttcgcttcgttcagcaccagacgaaggcctgcggtgacgtctccccgtag

SEQ ID NO: 25594 - DNA, 282 bp, Zea mays
  Peptide Sequence Number=SeqID_68969
atgaatcctctagatcctccaccagttagaatcgatcaagtggttgccgcccaaatgatggaggagggcgccgacaccgcggccccactcgtcaccctcgcgcaccttgttttcctgcgcgatgaaccgctgccagtggggccctcgtcttccggccgtcgtctccgcgggtatggcagaccacaccaacagctctccgcgcccggccgcaactcgcacgcagaaatgaccccccaccatcaccgtgaacctgtggatatcagtggggcacgtggaccgtag

SEQ ID NO: 25595 - DNA, 906 bp, Zea mays
  Peptide Sequence Number=SeqID_68970
atggaggcactcccggctgatgaccaaagaccctttaaggatctcgtgatgcgtgatgagaaggaggtgatgcggcaatggaacgaagaacgcgacaaggaggaggcggaactgctgcataaactcaccgaacgacacaaagaggcggcggaaaagtacttgtcacacttcacagtggatcgccaccagaagatcatccgtcaaggggagatcgatatggaatatctcctacctccacttcaggatcctgctgtaagtgctccagatctatctcttacgactttcatggatcaacgaggagatcggttaaagcaatatgtagatgaatctattaaaatgcatatacgttcatatgagaaatcaactgctcctagttttccttcgcccaccgccactaggcacgcgacaggttctggatgtggtcggaccgtccgagcatcatcccagacactcagaccacattgcggaccgtccgatccgacacaggcctgcacacagatcgctcaggtcgcaccatgcatggtcggatcatctgggtacaacctcagaaaattcggccctgtcgtggaccatccggtacattacgtcggaccgtccggatatgtcacggatcgttcgataccttatgtcggaccgtctagatatgtcgcagattgtccggtaccttataccggaccgtccggatatgtcgcggaccgtccgataccttacgctggaccgtccggatatggcatgaaccggccggcgtattacaccggaccgtccgactctacacgagtccacgcacagaccgcccaagtcgcgccatatatgaccgaaccgtccgggtatagccctggaccatttggcccgattgcggaccgtcctgccctttacgatgaacggtccgggtacgagactacctag

SEQ ID NO: 25596 - DNA, 396 bp, Zea mays
  Peptide Sequence Number=SeqID_68971
atggggtctcacctggatctggatgatgatggcgaaggtacggtttgccgcggcgagcatagcgtcggcgtcattgctgcggcgtcacctctcaacctcctctccactggcgcgggggaggacggcgtggaggccgaggaggacgagcaagacgcgcgcagggttagcgggtgcgaggagagcgtggcggcggcgatggaggtgggcttgcgcatcgcgagtcggggcgagcgcggcgcggaggggaggacgtcgggggcggccatggcgcggtggaggaggatgtcgcaggggatccaggatctcattggggcgtgtgcgacgggcgtgttggagacgcgcgacgcgagatcaggggagcgtagagagagacggggcgggggcgagaggccgtga

SEQ ID NO: 25597 - DNA, 165 bp, Zea mays
  Peptide Sequence Number=SeqID_68972
atggcgtgggatgtaccagttatttttttagtgcatcttagctgggctagtacaatggttgtttattaccagggaacacgggccgatggcataaaagaagtgatcttgtctcatgcacatgctttgtcccttattgcagccggagaagtattctggctatcataa

SEQ ID NO: 25598 - DNA, 687 bp, Zea mays
  Peptide Sequence Number=SeqID_68973
atggaaggtggcctcggatccaccccatcgcgcctcctaggtatgtgcccgtgcgccggggccaggccatcgacagccacagcctcaccgagcgggtacgctgtcggtagacacccacctttgcttcgattcagcattataaatgggagaaatcaaggagttcatgcttttgtagctcaaattatggatgaagatggaactgtgttgcctaatatccatatagctgattgtggccataagattggactgaatggcgttgataatgggcggatttgtttggacctttgtcacctcggacaacagaatccctgctactctcccccccataagtctatcatacgtggtaatttgcaatatgcttatctaagtgcactaagaaggctttcacttgatcctggtaatcaaacattcctccaacgagatgtgcaaggtttgaggaaccttcgttacagtgcatggttactttgtttctatgacttggataaatacagttacttctttttggagatattctccgcaatgatatgtccagtttgtcgtggcatctataattgcagtatatgcagaactaagaaaggatggttccctactggttctgcatgtaggaaggcggtcggacttgggtacaaatctgtagcacactttctaattgccaagcataataacaaacaagtgccactgatatag

SEQ ID NO: 25599 - DNA, 270 bp, Zea mays
  Peptide Sequence Number=SeqID_68974
atggcgcacagggctgctgggacagagggcggaactgatatagaagtggaggaggcgaggcgacctggctccactatgtactccacctccggcagcgaggcagaggatccgaacacgcacgaggtcacggacatcacagagcctatcgacgagggagtggacgacgatgactcagggggtagcgagagcgaggtggaggggttcatgttggacttggcatacgacaacaacgatggtgacaaggaaggcagagaagagggagggaaataa

SEQ ID NO: 25600 - DNA, 648 bp, Zea mays
  Peptide Sequence Number=SeqID_68975
atgcacgacctcctccttgcgctgacactgcttggttgttctggttggttgctgggacaggaaggcggggtgccaggttgctctgacgctgatattgatttcctccctgctggttgttctgacggtactactgctgatgctgaaactgcctctggtactactactgctggttctgacactgatcctggtgctggtgaccttgcttgcattgctgagaaacttgtccctgtactcactgacagacaggggatcttgcttcaaggcgagaaactcctccttccttactatcatcagtccctcgggcacatggtagcgacggaagttgtccctgaattcctcctaggtgattgcttcagggttggcatgggtggcgaggcacctgtggcatctggacttgcacctgaggttgaggtgggggtgattgttgctacacctgctgcattgctgctaaggtctaaccaattgcttggactacttgggtctgcatcaggaacatctgctcaatggtcatcgggggtggcggtggcaactgctgttgagctgcatcttcctggggtgcctgctgttccggctgagcacgccttgcacctcggcacctattctcagacatatgtagaaagaacacacaaatcagatctaactctgtag

SEQ ID NO: 25601 - DNA, 594 bp, Zea mays
  Peptide Sequence Number=SeqID_68976
atgcaccaggggagtctttgtaaaggctacgtagtgtatccctggccattcaccttggtagtgaagatcagaagaactttggttacttttatgatgatggttaataatgatggtgataattctgatccttggtatttcctcttggaggagatggctcgtcttaaatgcactgcacgtaagtcagtgatccccttttgccttctcgcctggcggagcaccctttgtgtcgcacggtgccgggagcaggagcgccgatgccaggagcaggagcagcaatactcttccccctcgcctcggcaggaggtggagtctgcgaagcaaccttcccctgcacctcagccagagatgccccctgcgccaccacagggtatcccggctactggaggagaccctgccggagatggatacgacgacgatgtcggtggcagttcgagccacggcacggagctctcagaggagcaggagcctaaagatggattgctagccccatcactcgcgacaccactcgctgttgtcacttccacaacattgtcaacaccttgctgcgtcgggccttcgaccgacacacttggtccatcgagtaccattgtgtag

SEQ ID NO: 25602 - DNA, 903 bp, Zea mays
  Peptide Sequence Number=SeqID_68977
atggcgggcggaattgagctcgccggagctaagggaaagtggctggccggtgaggggacagggagttgtagcgtcaccaaggtgccagtgtcagaatgcctggtcccgaggtcaagctgcgccaaaaccatgccaaatgaatttggtttgagttcaaatttttctaggacgtgttcaagggaatttggcacgactttgatatttggatctcctggctttgagtttcgaaaggcagagaacgcagatgatctttgggaagaggtttggcatttgagagaaaccctaggtgacactggggtgtcacaaacgacaaggcggaaggactgcgggcatcccccatccgggggctcggaaggtggaaatacacgatgcataagggagcgtgaagacatggtcgcctttcgagggggtcaccctccttttaaaggcgactctccctacttgcgtcctcggccgtcgtgggctgagtcttctccaacacgctccaaggtcctccccctgcggcgcgggggctgggtcccacgcgtcatgcaagctggcccagagcagaagaagccaaaccgccgcgcgcggtgcatgcaaccgcccagcggttacaagcggccctccacttttgcccagaccaacgggcgaaagggcaggcagccatgcaggcggcatgcaaaccgcgccaagtgggcgcacttctccgacttccaacacgcccagcatggaggcccaggcccacgcgtcatgcaaccggcgcgccggatgctgcgtgcgagcgactgcaccgccacccgcgccactaccgcgcctcctcgactgcggaaccaatgccgcgactcgaggcgacccagcacacgacccagcagcgccagcctggcgcgacggtcaatgcggccaaaaatggaccggcagtaa

SEQ ID NO: 25603 - DNA, 468 bp, Zea mays
  Peptide Sequence Number=SeqID_68978
atggcgcctcctgtcgacgtggtcggtccgcgccctaggttgggcgatgtggaggctcctccgaggtcgaggtcgagtctgtcttccgtggccatggttgagtccgagcccctgggtcgggcgaggcggagaccgtcggctgaggccagggctgagtccgagccctggggtcgggcgaagcggagttcgtcgtcttctagggctgagcccaagtctgagccctgggtcgggcgcctcactctgtcaagtggcactgcagtcggtgcggcgcaggcggcgctgtccttctgtcagcgatttggtcagggttgcttcttggcgaagacagggcctcaggcgagccgaaaatgtgttcatcgctggaggggggcctcgggcgagacggagatcctccggggtcggctgcccttgcccgaggctaggctcgggcgaggcgtgatcgagtcccttgaatggaccgatccctga

SEQ ID NO: 25604 - DNA, 417 bp, Zea mays
  Peptide Sequence Number=SeqID_68979
atggctctgcatgtgctgacaaccttctacgaatttcaccccttggagctatcaacccactccattggcttgttccccgctgacaaggaggatgacccaatgtggaaggatcgggtcgagcacgccaaggatgtgtgggctctctaccctgggcataccgctcacctgacggttcggtgcatgagtgtcgtatatcgtctgcaggccttgcgaggtgaggcgatgtcccaacttatgggcctagtggagtctaccaagatcaccctggataactgggaggaccttgttgtcgacttgtccactgagctggtggaaaaggatctccaggtggagcagatggccaaccaaatccaagaactcgagggtcaggtggaagccagggagaacactatcgaggttctggaagatcagctctag

SEQ ID NO: 25605 - DNA, 195 bp, Zea mays
  Peptide Sequence Number=SeqID_68980
atggcgggggacgagattcataccaccgttgatggtgcagaggatcccgaccacgatgaggcatggttccactgcggcccgacggcggtacagaccctcacctgcggcggcgcaggtgtggccaaggcggtgccattgccggcccccagtggcacgagttcaccctcccagttctctttccgccgcctagcctag

SEQ ID NO: 25606 - DNA, 1266 bp, Zea mays
  Peptide Sequence Number=SeqID_68981
atggcgccccgtactgtagtgcctatagtggtcagcgccaagccctatcagttggtgggtcagtttgggaatttggcacagtggaaatgcagtggaggtccacggccagagccggccgtgaaaaggatctggcaattccaggtaaacttgagtaaagagaaatgccgaggaaattcagaaaaatctgatgcagagtttttccaggtctggataaatcttggatctggagcccagactcgctctcatgaactcagactacaccaccaacaagggcgccaacggggcggccgcatggcaagaagaatcaagcgttggctcggcccaaggcgacgccgtccaagtgggacgacgcgcagaaatggcttgtgggcatgtcgaacggccacgcggacggaacccacgggtgccagagtcaagcctaggagctctaacgccgacgacaggcgcctcctcggctcggcctcgcagaacggccgcgtgtcctgcagcagcgtggatggcgccttggagtacagcatggtggtggccgcgccctcgacaccgccgcaggccgccgagggcggcggcgacatggaggaaaccaagaagatcgactgcatggtgcagctgcatgactcgccccaagcggtgatgcggtccgtgtgcctgcgggacatggggacggaaatgacccccatcgccagcaaggagccgtccaggacacccacgccccggcgcgcctgcacgcccgttgcgctgagcccgatggcctcaaggtcgtccaccccggtgagaagacgccaggaagggcccgtgggcgtgaccacggccattgtagcagggacgctgaccgagcaggtagcggcagcagacgaggtcgcttgcgtcggggacgagcgccccgtggctggtcatgtgcccagcgtgaactctctggagtctcgcgcggcagcctgggatgaggctgaacgggccaagttcatggcgaggtataaacgtgaagaggtaaagatacaggcctgggagaaccatgagaagagaaaagccgagacaaagatgaagaaaatgcagatgaaggctgatcagatgaaagcacggggccaagaggagctgtccaaccggctggccaccacgcgtcggatggctgaggagaagcgggcgagcgctgaggcgaagctcaatgagcgtgcggccaggacatcggagaaggccaactacatcaggaggactgggcacctgccgtcctccttcaagatttcttgcttgtgcggctcgagctttgagtaa

SEQ ID NO: 25607 - DNA, 438 bp, Zea mays
  Peptide Sequence Number=SeqID_68982
atgggcaagaacaacaagcgcaagcgtgagccgactcctccatcggaggagtttggtgattcggaatactcagaggaggagttctcctctaagtccgaggggtctccggctcccatccccctgcgtgagtcgtctgatgactcagacgactcccaggggcttgcggcggaggtctggacgtacatccgggccgtcgagcgctccgggctcgaaggctcggatgagtcggagtactcctcggatgaggaggactcggacggcggcgacgagggtgaagacgacgacgacgacggcgacgacgacgacgacgacgacggcgacggtgacggcagcggcagtggcaggggcggcggcgacggcagcagggacagcaccaagggcagcagcaggggcagcaccaaaggcggcggcggcggcaggggcagggccagtggctag

SEQ ID NO: 25608 - DNA, 357 bp, Zea mays
  Peptide Sequence Number=SeqID_68983
atggacaagatttgcaggttcgggccgcttagaagcccacgaaagaatgaccttacgaattattgggcccttgggcctttcgtgaggccttttacttctttagtggacccaggggatatctatcccccacaagcccccgatctttgggttgatttagaggtaatcaactcaaagatccaaggtccaaaaaatgattccctgccgtcttttctggctctgatcactcgtccgaccaaagtttggctttgtgcttgtgccttagaggtcggcattttagattgtaagactccggaattcattgagtgcaccggaggtgcacccaatgggtgtagcccccgacctttgagtagattttag

SEQ ID NO: 25609 - DNA, 414 bp, Zea mays
  Peptide Sequence Number=SeqID_68984
atggacgagagcctcattagtggtgccataagtgaaggcacttaccacgtcggcgtcagtagcgtcgggtcttttgttgtttttctgggagaacctctagacgtaaccccggagactctccccactcttttgggtacacctcttgaggtcctaggttctcccagggcatttatagttgtcctagaagtttccgatgaaggccttcctgaggtcggcccagtcatggatggtggcgcttggctagtgctcaagccagcccctcacccccttagcgaggtgaatggggaggaactagataatgagatggtattttttgattcccgccatgcggaaagcaaggcggggaacgtgtgtcctcgtggattgggagggttgtgccccctgctccaggacgaggtcgtgcgtgggctatag

SEQ ID NO: 25610 - DNA, 570 bp, Zea mays
  Peptide Sequence Number=SeqID_68985
atgaccagtcctctaagcaaaaacaccttcggcaaggccatatgcaagcaggcacaacacgaaggtgaacagtgccccgtactgttcacgctgactggtattcactcgcacgtcactcttgaattcttaccttctgtcaagccgaagagaaatcattctatggtttttttaatccagtctcacctcatgtcgtccatgtcttctaaataccctggcacaaatattcaatgcagaacattgacagacaacatcatcgttggtgtgtcgaaaggattcgataagaagcttcagctagtgggcgtcgggtatcgtgcggcggtggagggcaacgatctcgtgatgaacctgggattctcccaccctgttcggatggccattcctgaaggcctggcggtcaaggtggaggagaacacaaggatcaccgtgagcggctatgacaagagcgcgatcggtcagtttgctgctaccataaagaagtggaggccacctgagccatacaagggaaagggtatcagatatatggatgaagttgtccgaaggaaggaaggaaaagccggaaagaagaaatag

SEQ ID NO: 25611 - DNA, 234 bp, Zea mays
  Peptide Sequence Number=SeqID_68986
atgacggacaagtgggagccactgtcgttgcaaatgctggagtacagccccaacgacgaggacatgtgggagctagatctgaggggtggcagcgacgggggtgagaggcgagcgcgcgccgcagtaggtgttgtggaacgtgacgtagaggaagaggactccgactcgccgtcgccggagatgtcagtggatgagcccaacagcgggcaggtgggagctagatccgcccgatga

SEQ ID NO: 25612 - DNA, 201 bp, Zea mays
  Peptide Sequence Number=SeqID_68987
atggagcctggcggagggacagctgtcggagctgttgagtccttgctgacgtcctcttgcttccgtaagggggctgagagccgccgtcgtcacagagttgggcgacgtggaagctcctccgaagccgaggtcgagtctgtcttccgtggccgaggtcgagtccgagcccccgggtcgggcgaggcggagaccgccggctga

SEQ ID NO: 25613 - DNA, 864 bp, Zea mays
  Peptide Sequence Number=SeqID_68988
atggtcgccttccaagggggtcaccccccttttaaaggcggctctccctacttgcgtccccagccgtcgtgggctgagtcttctccaacacactccaaggtcctcccctacggcgcgggggctgggtcccacacgtcatgcaagccggctcagagcagaagaagccaaaccgccgtgcgcggtgcgtacaaccgcccagcggttacaagcgactctccacttttgcccagaccaacgggcgaaaggggcgggcaaccatgcaggcggcatgcaaccgcgccaagtgggcgcacttctccgactcccaacatgcccagcatggaggcccaagcccacgcgtcatgcaaccggcacgccgaatgcttcgtgcatgcaacaacaccgccacttgtgccactaccgcgcctcctcgactgcggaaccaataccgcgactcgaggcgacccagcagcgccagcctggcgcggcggtcaatgcggccaaaaatgggccgacaataatggcggtggcggcacctctggcaggagaagcgggcgacgcttcgccttcgccataatgaccgcgtcagaaaagggaccggaaaagggggataccctgaaaaggatccttccccgtgaaggaaccaggctccgagcctccctactgatcagaggttcgaaggctggcccctcggaagggttcgacagccgcctcagatcgcgtgggctctacacccactactggtcagaggttcgaaggccggcccctcggaagggttccacggccgcctcaggctactcgggctccgcgcccattactgatcaggggttcgaaggctggcccccgaagggttcacaaccgcctcagacgccgagcgagggatga

SEQ ID NO: 25614 - DNA, 201 bp, Zea mays
  Peptide Sequence Number=SeqID_68989
atggagcctggcggagggacagctgtcggagctgttgagtccttgctgacgtcctcttgcttccgtaagggggctgagttccgccgtcgtcacagagttgggcgacgtggaagctcctccgaagccgaggtcgagtctgtcttccgtggccgaggtcgagtccgagcccccgggtcgggcgaggcggagaccgtcggctga

SEQ ID NO: 25615 - DNA, 513 bp, Zea mays
  Peptide Sequence Number=SeqID_68990
atgcaggcggcatgcaactgcaccacggggacacaccctttcgacttcaacgcatccagcatggaggcccaggcccacacgtcatggaccgagaaaggggatactacaaaaaggatccttctctgcgaaggaagcgggccccgagccctcctactgatcaggggttcgaaggctggcccctcggaagggttcgacagccaccccagagcaatcgggctccgtgcccaatactggtcagaggttcggaggctggcccctcggaagggttcgacagccgcctcaggccactcgggctccgcgcccactactgatcaggggttcgaaggctggccccccgaagggttcgacagccgcctcaaaacacgcagagcgagggatgactctgggtacgtccgatacatggccgaggctcgggctacgctcccgagaggctcgggggctgctctcgcaaaacccggctccggccaaatcgttgacagcgtcaacataccagcccgagaactcggaacctga

SEQ ID NO: 25616 - DNA, 486 bp, Zea mays
  Peptide Sequence Number=SeqID_68991
atggttgccccgcctcctcctccgtcggtggggaaggtgacaggacagactcggatgctgttcttccgccacgcggggaagacgtcgtcgattccgccgccgtcgggcgggctggcggccgtcgttgtcgttgtcgcgcggcggaggaagaagtaccatgtcgtagttgccgtcgagggacatgaactcgagactcccgaaacggagcagcgtcccgggctggagaggttgctggagactacccatctggagcttgacgggaagctgttcgtcaacacgcagcaggcccctacctggcgtgccaactgtcggcgtttcgaccccggggggtccctagaccgacgagtaaattgtcgctgcgtgtcccagcccagatgggttggcgcgagacggaacacaagggggaacaaaaagggcaaccacggctcgtgttgtcctacgcccagggcggatgcgcttgcagtagggggttacaagcgttcgtga

SEQ ID NO: 25617 - DNA, 339 bp, Zea mays
  Peptide Sequence Number=SeqID_68992
atgaagatgctgaacatggtattcagctgctttggccagtacttctgcctacacttcgaggccttccagctgggcatgtcacccgtctacatcgccttcctgaggttcatgggagacgacgcggaagcgaagaactacagctacagcctggaggtagggggcacggggcgcaagatggtctggcagggggtgccgcggagcatcagggacagccaccggaaggtccgggacagctacgacgggctcatcatccagaggaacatggccctgttcttctcgggtggcgacaggaaggagctcaagctgcgtgtcaccgggcggatctggaaggaacaatga

SEQ ID NO: 25618 - DNA, 369 bp, Zea mays
  Peptide Sequence Number=SeqID_68993
atgtcggtacttttatttttagacgtccgatcgcaatccaacagtttcaaaactggcacctcgatacggggctccagagccatcgagaaagcttacgtggaaagcgcaaaactcctctgccccgcctgtcctctccattacagcaacagagctcgccgccgatggacgcggggtcatcggagatggtgcaggatatcgcgcgacagcggaagggatgctagggagatgttgcacgacctcactaaatccgagtacgagctctcgctcaccaacctcgtcaagaaggccggaggcgggggcggcggagctatgccccgcgcccaagacgaggggaaggaccccgagcgccgcacggccagcaacaactaa

SEQ ID NO: 25619 - DNA, 543 bp, Zea mays
  Peptide Sequence Number=SeqID_68994
ccctactccttccctatgccgacgctgctcactgcctctccatcatctccccacgccagcaacaaggaggcaaggacgtcgtacctttcctggtggccgccatccctctcctctcctgtttctggtggtcgatgccccttgttccagcagcaagcagctcccttcccttgccatggatgtcaactacctccccctgcttcctactcctcccatggataagctcacccttttgctgcccgccctcaagccctagccgctcccgcttcctcctgcacgtggccagcgcagcgtgcgcggcttgcccgcagcagcgtggtcagcgcaagctcggcgtggctgacgcagcgtggttggtccggccatggcgcggccaggccaatgcctcggcatggccgtgcgtgtgtccccggcacggcatcgcgctcgcgtccggcacggcctgcgcagccccgactcggcctttgtgcgatcccagcgcagcagcagcatcgccgtccacgtgcctcgccgcgagctcgtctacccatccgtcgtcgcttagag

SEQ ID NO: 25620 - DNA, 546 bp, Zea mays
  Peptide Sequence Number=SeqID_68995
ccctcctccttccctatgccgacgctgctcactgcctctccctcatctccccacgccagcaacaaggaggcaaggacgtcgtacctttcctggtggccgccatccctctcctctcctgtttctggtggtcgatgccccttgttccagcagcgaacagctcccttcccttgccgtggatgtcaactacctccccctgcttcctactcctcctcccatggataagctcgcccttttgctgcccgccctcaagccctagccgctctcgcttcctcctgcacgtggccaacacagcgtgcgcggcttgcccgcagcagcgtggtcagcgcaagctcggcgtggctgacgcagcgtggttggtccggccatggcgcggccaggccaatgcctcggcatggccgtgcgtgtgtccccggcacggcatcgcgctcgtgtccggcacggcctgcgcaaccccgactcggcctttgtgtgatcccagcgcagcagcagcatcgccgtccacgtgcctcgccgcgagctcgtctacccatccgtcgtcgctgcgag

SEQ ID NO: 25621 - DNA, 930 bp, Zea mays
  Peptide Sequence Number=SeqID_68996
atggctggagaacgcctcctccgcagagctggaggatgcccttcccctgaatgccggaggaagaagcgggtcgccggcccacgcggaggtagggcccaactcgccccgccctcctccccagcccggatgatgaaaatccttgaagccgagcgatggctgaagggcgccaaccaccacaaggtcgcgctcctccaacagcagcaagacgaagccaacgcgggtgctccccatccgagggctcggaaggtggaaggggttcccaccctctgccgcgggggctgggtcccacatgtcatgggagcgggccggaaacagaagaagccaaaccgctgcacacgaagcagggcaagcgacacctttgacaggcaaagcggacgtcgtttcacctccgccatgatgaccgtgtcaaaaaaggctggcccctcggaagggttcgacagccgcccagagcactcgggctccgcgcccactactgatcaggggttcgaaggctggcccctcgaaagggttcgacagccgccccagagcacgcagaaatcccaccagagggaggcatcgagccctcgaaccctatcgaacgggtccgggtccggcaaatcacctgcaggtcaaggcttcgtctacccaagggacgagatctcgcctcgcccgagcccagcctcgggcgggaactgtagtccaggacgaagttacgtctcgcccgagggcctcctcaggcagtgggcgcaccctcagctcgcccgaggcccagctcgggcaggcttcgtcgagaagcaaccttggccaaatcgcctctccaaccgaccgtatcgcatgcgcattcaatgcgaggatcgcctgtcaccttatcctgacacccacccgggcaaggctgacaacggcaagtttagcctcaggcgcaacaggaagctccgcctcgcccgaccttag

SEQ ID NO: 25622 - DNA, 1020 bp, Zea mays
  Peptide Sequence Number=SeqID_68997
atggtcgtcccgcgcgcgggccggccacgtccaggtttccctgcaccggggggtcgcacaacacgctgtacgccgcgagggcggtactcgtgttctgggacggtcccgttctcgttcttgtggcaagaacgggagtgcctgccggtgcactttggggcggccgccgctcactggtgcagtgttggtgggcaggtggttgctgtcgtcggtgctgaggcggtggtcgccataggtgaggctgtctctgctgaagaggttgcctccgccgacgagaccgtcagcgccacctgcgctccgggcctccggctctttggctttaatggctggttctcgtcccccatgaggggacgtgaacgagggtcttttagcagcagcgtttgccctgaggccatcactgcagctgtcttgccgcccgagacgaaggtcgttgtcgctgctgatgaagcggttgccggcgagccacctggagtttgttatcccgcaggccctctggccgaggaggtgcagcagcggcggctggagcttggccaggtcgtccgcgagcgggaccaatcccagagtcacaccgccgaggccgagagccgggctgaggtcctcgggggacaaccggctgaggctatggagcggctagccggggtgtctgctcgggccggaacccttgtggagaacctggtcgtgagggcccaagcacggtgctggcgtcctccttcgaggtggagatccttccgtccgagtcgccgtccgaggctgggccaggatctgccgagggtggaaacatcgccgagggtgctgctgctccccctgccgatgtccgaacctgcaggaacagtttgtctgaaagtccctcgtccgagcgtgagttacttttcgcagaaggtgatgagtgagtcgaaacggcacgaaagtcgttctggcagaaaagacttttccgaggaaaattttgatgcagagggggttcccccccttctagcccccgagggagggtcgggctttgccgaggcaaggctgatccttcattga

SEQ ID NO: 25623 - DNA, 198 bp, Zea mays
  Peptide Sequence Number=SeqID_68998
atggccaaggttgcttcactgcgaagcctgcccgaactgggcctcgggcgagtcgaagccgagtttaggagtcttgggggtacccctaattatggtccccgacaacccccaaccgaccatttcaaggtgtgggagcccaagcaacataccaagacatattgtagatatttccaagtgctcaaacacccaagtgcttaa

SEQ ID NO: 25624 - DNA, 1035 bp, Zea mays
  Peptide Sequence Number=SeqID_68999
atgtcgtcgtcttcgtcatcatcatcatcatcgtcgtcaggagtctccggcgacggctccctcgggagcccgtccctctcctgcctccgacgcgaccctccgcgcggctcggtccaccgcgtcctccgggaccggtggcagggaaggctcatgacaccccaactcctggagacggacggaaatctcgactgtgagaaccaagggcaatctgacacaagaaagaagaaggagcggacactcaccagggacatgcacctgcactcgggatgcatcaagggttgggtaagggcgccggcgtccagcctccctaccgtgccagctacccgcctgtggaggtcatcggcggagagggggaccgaggacatctgcgaaccctccaagtcgacccccgacaccatctccgaaagcagcaatcgccgctctgtcaagggaagcaccctccgacgatggatggcagcgaccacccccacgacggagcgctcgcatgaaacggcttgctggcactccgaacccccactcatggaaggagacgaaactcagcacataccccagcggcggggtcggggcggccccgctcggagggaccatccactctggctgcgggtcactagagaggggacggagcaagccatcggcaacaagggcctccagatcgtccaccgtgacggtggagaaaggccacaggtcgcgcggcgaaacgacggttacccggtcggccatcgccaagcgaagggggtggcggcggagcgaacaagggcaggcgacacctttggcaggcgaggcgggcgacgcttcacctccgccatgatgaccgcatcaaaaaaggtgtgccacatcgttcaatttcgtatccttttcctcttcccctttctctctcttgctacagagaccgggaaaggggatactctgaaagggatctttctccgcgaaggaagcgggccccgagccctcctactgatcaggggttcgaaggctggcccctcggaagggttcgacagccaccccagagcactcgggctccgcgcccactactga

SEQ ID NO: 25625 - DNA, 226 bp, Zea mays
  Peptide Sequence Number=SeqID_69000
atggacagcagctgtcaccctgctgcagataatcaaggccacctcaactctgcccgcaatggcagccacctacgcagagacagcaacggcgcagatctgcagccctgcccacaagacgaggtgactgcgatggtgacgagggacagcgggacggcagatgcggcaggatttgacagcagccggatctgcgcactccctggacgtcggatcttgcgcagagcaagcc

SEQ ID NO: 25626 - DNA, 366 bp, Zea mays
  Peptide Sequence Number=SeqID_69001
atggggaaggccaagcgcgaccgcgaggagggcagctgcaagacagatacaccacatgctcatccacggggtggcggagctagagctagagttcctggtagtgaccgccgctgctggtcatggagcgctgtgggatttcggaccccccgccccccggaccacactcaccgcgagatctacgagcttggcctccctgacaatggtcacaaacacaactacctctacgagctccatcttgacaccgctgcaatatcatccttcgtccccaactccaccggttgccttgatcccctcccgctcgatgtcaaggttgatgatgcatgcaggttagggaattgccatagcgacgttgaagtggtcaactga

SEQ ID NO: 25627 - DNA, 726 bp, Zea mays
  Peptide Sequence Number=SeqID_69002
atggcgcctcctgttgacgtggtcggtccgcgccctaggttgggcgatgtggaggctcctccgaggtcgaggtcgagatcgagtatgtcttcctggtcgaggtcgagtctgagcccctgggtcgggcgaggcggagaccgtcgactgaagtcagggctgagtccgagccctgggatcgggcgaagcggagttcgtcgtcttccggggctgagcccgagtccgagccctggggtcgggcggatcggagttcgccgtcttcgtcttccggggctgagcccaagtccgagccctgggttgggcggagcggagttcgtcgtcttccgggctgagcccgagtccaagccctgggtcgggtggagcggagttcgccgtcttccggggctgagcccgagtccgagccctgggtcgggcggagcggagtttcctatggtgcctgaggccgggcctgactgcctgtcagcctcactctatcgagtggcacagcagtcggagcggcgcaggcggcgctgtccttctgtcaggccgggttgcttcttggcgaagactgggcctcgggcgagccgggagtttgttcgtcgctggaggggggcctcgggcgagacggagatcctccggggtcggctgcccttgcccgaggctgggctcgggcgaggcgtgatcgagtccctcgaatggaccgatccctggcttagtcgcacccatcaggcatttgcagctttgtgctga

SEQ ID NO: 25628 - DNA, 1053 bp, Zea mays
  Peptide Sequence Number=SeqID_69003
atggcgggggaaagcaaactgggctgcggcctctgcccctccctcagcctcaaggattttcatcatcagtgctggggaggggactgccgcgtgcctggctctcggacccgagtggcttcggagccgctcccggcgccgccttccgccacgacagctggaagaggttcttccgccgacgagatagccggggccgcccacggactgacctccaactctacggccttctgcccgtccttgcctcacgagtttgggcacgggcgagggcctcatggcagcagcatccgccctgaggtcatcgctgctgctgttcggccccccggagcagaagtcgtcgtcgtcgccgctgctggagcgggcgacggcgagccgttcgtcggtcttccgttgctccgcaggcccccccaatcgagtggggttgttcgtacctgcggaggtggaaccgaagttccgtttgtaatggcaccttggatgccggtgttctgttcattgtggctgtcggggcctgaacgtgagtccctcggctcggtcggccttgctgtccgaggcttctcttgcttagttaaaggaacccctcggccgctcttcgatgagccgaagccaggggtagcgatgtcagcacggacagaggcagagttggctcgaaaagaagacttggtcggtcagggcctggccgggtcgtccgttagcgggaccgacgccggagttgatctgtcgaggcctcgggtcgggctgatgtcttcgggggacagctggctgaggcctcggggtgaccagccgagccgcctgctcgagccggattcttggaggagaccctggcggcgatggcccgggcgtgatgatgaagtcatccttcagagtggagatcctcggaccgcgtcgccgtccgaggctaggtcggacctcgccgaaggtgtagtcgacgccgagggtgctgctgctcccttcaactgtcaagatccgagcctgcaggatcggattatcttgtatctctggactttttcgtcggtaacagaattgtctgtgcgagcgagagttgcttttcatggaaggtga

SEQ ID NO: 25629 - DNA, 276 bp, Zea mays
  Peptide Sequence Number=SeqID_69004
atggcggaggtgaaacgacgcccgcttcgcctgccaaagggtgaatcagctcgaactcttcacctttgggtttcccaggcgcagctccgctataattcaccggactgtccgaaccttcggccgctctgcgatgagccaaagccagaggcagtgatgtcggcgtggacagaggtggagtcggctcgaaaagaggcttcgtcggcccgggagcacgtggcttccctggccgaggaggtgcagcagcggcggctggagcttggccaggtcgtccgctag

SEQ ID NO: 25630 - DNA, 378 bp, Zea mays
  Peptide Sequence Number=SeqID_69005
atggaggacgaaccagaggcggagatggatttattagggtttgtgatgaagagtagcagcggatggtggatgggccgggcttgggcgaatacaaaaacttgtcaggccgctttgcaagcctctacagtcgtgaaggggggcggctgcggtcgggcgaggcggagacttctcctgaggccgaggccggggtcgggcgaggacgcgattcctcatgaggttgagccctggggtcgggcgaggcggagaccaccttcagaggccgaggttgaggccgagccctggggtcgggtgaggcggagctttctgttgcgcctgaggctgaaattagctgttgtcagcctcaccctggtgggtggcatagcagtcggagcggagtga

SEQ ID NO: 25631 - DNA, 210 bp, Zea mays
  Peptide Sequence Number=SeqID_69006
atgcaggcggcatgcaactgcaccacggggacacaccctttcgacttcaatgcatccagcgtggaggcccaggcccacacgtcatgtaaccagcacaccggttactacgtgcgaaaaactccaccgccacttgcgccaggaccgggaaaggggatactacgaaagggatccttctctgtgaaggaagcgggccccgagccctcctactga

SEQ ID NO: 25632 - DNA, 774 bp, Zea mays
  Peptide Sequence Number=SeqID_69007
ggcggatgcgcttgcagtagggggttacaagcgttcgcgagggagagggagagagagagactgtccgtcagcccgtcctcccgcgcggccaccttcccgtacgagggccctggaccttccttttatagatgtaaggagaaggcccagggtaatgatgtacccccctgtagcgtggtcggtccgagcccaaggccgggcgaggtggtgactcctccgaggtcgaggttgagtccgagccctggggtcggacgaggcaaagaccgtcttccgaggtcgaggctgagtccgagccctagggtcgggcgaggcggagaccgtcttccgaggtcgaggctgagttcgagccctgggttgggcgaggcggagaccgttttccgaggtcgaggcgggggccgagccccggggtcgggcgaggcggagcttcctatggcgcctaaggctggactcggctgctgtcagcctcaccctagcgggtggcacagcagtcggagcagggcaggcggcgccgttttcctgtcagttggcgaggcgatctggccaaggttgcttctccgtgaagcctgcccgagctgggcctcgggcgagttgaaggtgcgcccgttgcttgaagaggccctcaggcgaggcgtgaatccacctgggtctattattcctgcccgaggctgggctcgggcgaggcgagatcgtgcccctggagtggacggagctttgacctgtattgcgcccatcaggcctttgcagcttgtgctgatggtggttaccagccgagtttag

SEQ ID NO: 25633 - DNA, 249 bp, Zea mays
  Peptide Sequence Number=SeqID_69008
atggagcacaaaaaccgcagctctcaagctcactcaaagattcctctccaaagatttgaaatgggagaggcaagagatgtgtgtgagagagagggaggtgtttcttgggttagaaatggagttcaaatcgtgctcactactttggggagagaggtcaggcagactgtctgccagtctgactgccagactgacctgcagactggtcaagttgaccaagaccggttgaaccgcccaggggggggcggttga

SEQ ID NO: 25634 - DNA, 492 bp, Zea mays
  Peptide Sequence Number=SeqID_69009
atgagcactcccattcgccagggggcttacaaaggcaagaccatgacccacgattggctcatggtgaccatcactctcaaccaaggtcagtctgtggccttgcccaaggtagctatcggtcgtgatggccctactaagggagccaccaccaacatcggtagtgtttcaagggcagggcagtgccaagacctgcatgggagtggagccaacatcagttacgacagcatcaaccttgccacaacaaaggtagcctgtcggtcatgggagattctcacaaggacattccacatgcttcgaaagggttcaatactggcaccaagactcaacttgttagccacaaggttcatggtgttcagggtagcagccaacgacctccgccaagttctatctttggccatcgccaaggcagaacgagatgctgcttacccttcaagtcagatgcacaacaaagctcaagcggttttaggtcagcctcataccttccatctataa

SEQ ID NO: 25635 - DNA, 114 bp, Zea mays
  Peptide Sequence Number=SeqID_69010
atgaggcttggttggtggccgatggtgacgaccactttgttcgctagaggcaacgcccttattaaggcgctgcctaagatcaatggcaagtcgcttgagccatcatttctctag

SEQ ID NO: 25636 - DNA, 186 bp, Zea mays
  Peptide Sequence Number=SeqID_69011
atggcgatttcggcggtcggcggggtggctggcgcgggcttgcgcgggaagatctgccccgtctctgttgctacgaccttgaccccaaggtatcatatagatgatgcagccgtgttctttttccttactgattcattttgcaaccatgttgaggccaagcaggatggatccctctttgagccgtga

SEQ ID NO: 25637 - DNA, 129 bp, Zea mays
  Peptide Sequence Number=SeqID_69012
atggctcaacttcttagtgatggtagcaggcctggcaaggtcttcaaggacaaggatgtcaactctatggccaaagcccttaaggagtacaatggggaggcagagtactaccttggccactgcaagtga

SEQ ID NO: 25638 - DNA, 468 bp, Zea mays
  Peptide Sequence Number=SeqID_69013
atggtgcagagggttacccggtccacgtgctccgacggggttacgaactccggcgagcgcgattgcactattctggtggggctggtcctcggctcaagctcgggcaagcttcacggcctccgggggaagctatccgagggctcggatcgagcggaggtgggcggaaaagggtttggccacggtggttgccctcggacggctctggcgggtcacggggaggtcaccggggctgcgggcaagctagggagggttaggcgcggtgcgggggaggcaacggggaagatggccatgcacgagggtgggctttatagccgttcgcgggcaaggtacgggcgtgggcacgggggtggccgaccacgcgcggggggcgcgcgcggcagcggccagtgcgcgcttggccggtcagacaagtgctcaagtggatttgacctcgggttggcaagttacgaggagtgcaggcttgagtga

SEQ ID NO: 25639 - DNA, 1254 bp, Zea mays
  Peptide Sequence Number=SeqID_69014
atggagaaagatcaccaagatgcccagcggaagaaacggaaggcccctcttcggctggtggacccatgccgagatgctaaggtggtgcggctcaatgtgaagggagctgctccgcctgtgacgatgactccccccgcagtgctggccatcgctatgaaactgccttcgccgccgcgcgtgactgagacgacggtgtcggggaccgaggggacgggccaggagttgtcaatggacgactacctggtgggcagagtcgctatgtttgatgcccagactgggctgccgcctactggggcggaggctgggcaactggcgttggtaccgtttacggtgcctgctgacctcgtgggtacagcgaagggtgacacagggacttcattggacccatggtcaaaattttgcgccaccactgatggcggaggcgaacttgcctcggcggttgccgcttctggcgtaactgggtctgtcgcgcggcagctgcgatatgtgagtttttttgctgaatttggaaaattgagatgtcaggtgacgaccttcgtggaccaggttgctttgggggcactgaccttgcagctgatttctgagaggaaacgacttgtgggtggggttgagctcattcggaggcagcataccgaagcaatcacggacaagtcggcggccgaaaataagagtcgaaaccttctcgagaagatcgaagatgacgtgttcaagcgctctgcgggggcactttacgataggatgtggggccctcatggacgcggtgtcatccgagagagggtcgaccgagcgcgggcacaagcgatgagggatgaagaggtggaggacctcgccggcctcgagagctcggtggctcgaaaggatgctgcggtggaggcgggagcggaggagctatccttgcttcaagaaggtggcgctgagggtcctgcagcggcgggtgcttctacgcaggttgaaaaaatgtcggttgctgcgcaggttccggcgactaggcctgtgcaagcaaaccttgatgataacacgaatgatgatatgttggtgtgtggaaatgttgtgattcttagtagtgacgcatctgaggaatctgatgttgggtcgtggtcttcggaaggtgaagaactagggagcttgtttgcttggatagatgacgaatcttcggaagatgatttagattattttgtggcgctagatttagctgtagcggagtctcctttgaaggtcgcccccttgaggcagcgacgacttcggtcagggtag

SEQ ID NO: 25640 - DNA, 1227 bp, Zea mays
  Peptide Sequence Number=SeqID_69015
atggatcctggcacacatatgatggttcgcactctccaaactacccgcgtcaacaccagctacgcccctcagccccggcagatcccggtctacccagtggtagtcgaggaagttccagcggatctccctcctgtccgagtggagaacgtaatcaacctggaggatagctcggaggagcagttgccgacccccactccgttggccgagtccctggccttcgcagctgggtcatcgacgtccgcatcgtctgcaccagccttccaagcacctgcacctggaggcgacgaccccgacgactccagagacggcgatgacgaggatgacgacgacgaagacgattttgaaggcgaacatatcaacgaggaagctgactacgcccagcaggacaacttcatggggtttggtcctgttgtcgaacattacacatcaatgttcgagacggggcacttccccaacctgctgcaagaggtgctgcacgcgctaggcacctacgtccaccccctgtacgagacgaggcaagtgagcgagcctccccgggcttgctattacatcactcgcatccacttcagggtgatggatgcagaatgggtacttcgggtaccacgggttaatacccgattaggcccgaacttagttcgggtattcagtttcgttacccgttggagttgttcgggtaacgggtctcgggctaaacgggtacgaggttcgggtattttgggtaacgggcttcgggctcgggttttatgcccagtcctagatgcaggtgacaggggattcaggactctatctgctcacgagtccctgataccactgtccacctatgttgcctcggtcagcgatgctgcccgtcggaccctgtggtcgctcagccacacctaccggcagcagctgcagaacacgaggttcatgcatctttctcagcgtctgcgtggagaaagccagaccaacatcgtcccaggagaagccggtgaggatcgcctcaacaccctagctggtgtagtggccggtctcaacaccgacctagacagtgccaccctagatctctacagggtgcacttggagctagagaatgcccacgccaggattgcagccctggaagcccaactgcaaggactagatccgcccgaagctcaggtccccgccatggcgttgtctcctccccgcaagaggctgcgctatggagagcccggatccgtcactaggctgcttaagagttttgagtcatga

SEQ ID NO: 25641 - DNA, 496 bp, Zea mays
  Peptide Sequence Number=SeqID_69016
taaccgcggcggaagaaagggcggaggggcttaccggtggcgagattgctccggtgaagtggtcgaggacgtaggggaggtctcggggatcacaacggtgtgcgggtcgccgtcggagagaggttcacaggatgccagagaagatatgggtgcaaggaattggtcggagactcactggatagctcagtccacgcgcggcggcggaagaccgaagtccggtgaggtagatctcgggcctccggtgaagtctggctgggtccgagggcttggcaagcttcacgggctactggcggagctagccgaagcactggctcgacttgaggatggctggagtgggctggccacgatggccgaagctctggcggcaatggcgggcggaattgagctcgccggagctaaggagagggggctggccggtgaggagatatggagccaggaaatccggtctgtctccctgcccaaacccgaggcaaatccaaggttttgtcgtgtctag

SEQ ID NO: 25642 - DNA, 603 bp, Zea mays
  Peptide Sequence Number=SeqID_69017
atggaaatcggccttttcactggtggttgttttgcaaccgccagtggaaataacattagcactggcaggttgcttaagaaaatcgcctatagaaacaagatttgcactagcggttttcttaagcaaccgtcggtggaaataatattagcactggccgggtttttaagaaaactgccggtggattggggtactgatcgctctctggaaaacaacgctattcaccccgttccgactactgtgccaaccaccagggtaaaactgacagcagtaagtcacgacctcccccgagttcagcctcgggcacaacagggagctccgcctcgcccgacccccggcctcggcctcggaagaaggtctccgcctcgcccgaccccaggcctcggtctcagcctcagcgttgggaggagtcacatcatcgcccgacctcgggcctcggcctcgggaggagtcacatcatcgcccgacctcgggcctcggcctcaggaggactcacatcctcgcccgacctcggcctcgacctcaggagaagtccccgcctcgcccgacctcgatctcggaccgactacgctacaggggatacatcattaccctaccactagctag

SEQ ID NO: 25643 - DNA, 1287 bp, Zea mays
  Peptide Sequence Number=SeqID_69018
atgggcaagccacccatgggcgagcctatgaaggggcgaaggttgccttcgctgtcgcgtactaacgaggcggcggagcgtgttgccgacttcgacacggatatctgcgtgggggattatcttgttgggtcggacgtggggcaactggctgttgtcccgccttcggtggtggccacttcgccagcgggggcggttggtgcgaagggtgcttcgcaggacccgtggtccaccttctgcgcgagcggcgtgattccgtcggccgccgccgctaaagacgtggcgggttccgtgtcccagcagctgaggcaagcgtcacagcagctgttgcagcagctgaagcatgcgggtgacttcgccgaccatgtcgcgtcgggtgctctgactgcggagtttgctgccgaagttgagtgtctccgtgcgcagcatgcggatgctgttcaggagaagtcggctgcggaaagtaaaaaccgcaggctgacggagaggttggccgctatggaggccgagaagggggatctccggcgccagttggtggaggagaggagggaggcaaacaaggccattgctgatgcgcaggctgcgcaagccgacgccaagcttgcacgggcggagggcagtctcgcctgccaacgcaccgaggagctggaggcgaggttcaacagcctgcacaaccgcatggacaaagccgaggcctcgacgcgtgcggaggtcgagcggacgcatgcacagttcgtggacgcgtaccgggaactaggtgcacggaccgccgccttcgaagcgcctggccaagaggcgggcctccacttccttgaatggttacaagagaagttgggggtgctcccgacgatcgtgacgggcctcatgtcctttgcctccctcgacacctgcgaggggggccataaatgctttgtcccgcgaggggtcgaggacccggtgctgaagcagtcagcgggggtgctcttcgacaggatgtggggcccgcacgaccgagagaaggtctgggagaggtccgaacgggcaattgatcagatggcacatgccgaagaggtcgaggaccttggtaaactggacagcacgctgtccgtagcctcgggggtggaggtggcgccgccatccgatgccggcgaaggcccctcgacggcccccgcgacaaccgcgccaactagagctcgtgaagacctcgcgcgagcccctgggcagacgggtggggatgcttcgaaggcgatggtggaaacagctgtcgaagaccccgcggcggcgaccaggcctttgcaggtggcagaatag

SEQ ID NO: 25644 - DNA, 120 bp, Zea mays
  Peptide Sequence Number=SeqID_69019
atgggaacaaatgggcatctcgacctcgacatgggagcgaggacggcgaaggccatgagcgaagggtggcgtcttcgccttcgccccaacatttgccctccgagggaccagttcgactaa

SEQ ID NO: 25645 - DNA, 823 bp, Zea mays
  Peptide Sequence Number=SeqID_69020
ggcggtgcgcgcctgggtgctcgggcacgcggctgggaacgcgcgcatcgcacggctgcccggcagcggcttggcgggcccgcagccagggtcgctggtcggctgctcgcgctcggccgcggcgctcgggacggacgcggggctggctcggtcctgtgcgcgcgtgaaggcagagaaccgtctcctcagacgacgcgtcggccggcggcataacgacagcagaagaagaagaggtcggcatcgctacgtaccgtcggcggcggcgggcggtctgcttcacacgggccagatctccgacgaacaagagcaaggagggcagacgagcagcgagaggtttgagaaggcggttagggttttcgcggagcgtggaaagataaagttcaaaactcgccgccccccgtccccttttatacacagggcgcggcgcttcggaaaacccgcaaaccaacagtacggcgtcaatcaacggtcatgtcaaaaacccccgcggaactacttcgagcgagggcaacgtctccgccatctagcgacgtcttcggcaccagatgacttagtcgaactggtccctcggagggcaaatgttggggcgaaggcgaagacgccacccttcgctcatggccttcgccgtcctcgctgcaccaaagaagagaagacaacgggcagacttacccttcgtctcatgcgccaccggacgaagacctgtgacgaggccgtctcatcttgcgacctcgtccagcatggaggcctgcgtgtgatccggcccattgacgctgggcactcagatacctatacatacccccgcacagtgcccttgagaggctag

SEQ ID NO: 25646 - DNA, 72 bp, Zea mays
  Peptide Sequence Number=SeqID_69021
atggtgcagtatgggtgggaggaaggggatgacaagggtttcccactcgccagccaactatttaaattctaa

SEQ ID NO: 25647 - DNA, 105 bp, Zea mays
  Peptide Sequence Number=SeqID_69022
atggatccatccgaggatggcgacaatattgatattgaggaagacaacgctaccattcgtcctacgaagccaagtcatatgaactttggttgtgcccgaagctga

SEQ ID NO: 25648 - DNA, 534 bp, Zea mays
  Peptide Sequence Number=SeqID_69023
atggcgccttccgttgacgtggctggtctgcgccctaggttgggcgaggtggaagctcttccaaagctgaggtcgagtctgtcttccgtggccgaggccgagtccgagcccctggtcgggcgaggcggaggtcgtcgtctgaggccagggtggagtccgagccctggggtcgggcggagcggagttcgccgtcttccgggacttagcccgagtccgagccctggggcgggcggagcggagttcgccgtcttccgggacttagcccgagtccaagccctgggtcgggcggagcggagttcaccgtcttccgaggctgagcccgagtccgagccctgggtcgagcggagcggagttcgccgtcttccggggctgagcccgagtccgagccctaggtcgggcggagcggagtttcctgtggtgccttctgcaggacctgactgcatgtcagcctcactctgtcaagtggcactgcagtcggcgcggcgcaggcggcgctgtccttctgtcaggccggtcagtggagcggcgaagtga

SEQ ID NO: 25649 - DNA, 612 bp, Zea mays
  Peptide Sequence Number=SeqID_69024
atgaacaaaaacactggcattcgaagtgccattacaaacggaactccggttccccctccgcaggtacgaacaaccccactccatggggaagggcctgcggagcaacagaagaccgacgaacggcacgccgtcacccgctccagcagcagcgacgacgacgacttctgccccggggggtcgaacagcggcagcgctgaccttagggcggatgctgctgccaagaggcccccgcccatgcccaaactcgtgaggcaaggacgggcagaaggccgtagagttggaggtcggtccgtggccgaccctggctatcgcgccagcggaagaacctcttccagctgccgtggcagacgccggcgccgcgagcggctccggagccactcgcgtccgagatccaggcacggtgcagctgccggcgccacggacgacgaccgcccttccctccaatcaccgagtgaaggggcgggctaccgcccacgcaggggccgaccccaactcggcacactcccctccctagtcctggtgatgaaaatccttgaggctgagggaggggcagaggccgcagcccggctcactttcccccaccatcaagctggaggtctccatctcggatga

SEQ ID NO: 25650 - DNA, 504 bp, Zea mays
  Peptide Sequence Number=SeqID_69025
atgaggctgggtcctcggagcgcggaacctacggaagatgcaaatgagacgcgtcgtaggataaccggcgcggcggaggttcgccgtacgtaccacgatgcggggaggagacggaacgccggcggcgcgatgggttcgcggcggcggcgcgatggcttggcggctgcgggggagcgtcgcgtgggctacaaccctagggaagtgggcgccgcttcgaaccgaagccaagtgacgggcgcttcaggcgttaagtgcgcggacggcttccagcggaagcgcgtggtggagaagcggcgcgagaagcggcgcgtttggctccagcttctgcttctggcggccagaagccgcccggaagctgaaccaaacagccacataaagagccgaagactgaagctatctatggctcagattagttcaagtgttggggcggtggtgttcctcgtggcggcaccagagaacaaagacccgatgactctgagtgtctccagcaatgggatctactag

SEQ ID NO: 25651 - DNA, 294 bp, Zea mays
  Peptide Sequence Number=SeqID_69026
atgattctcttaatggatgctcaatatgatgtgactcaagaaaggcttgatagggtgaagatagcaaggaaagggcttcgaggaactaagcgaaggatcgaaccatatcatgcaggaaaccaatcactagctgaagcctggccatcggctcctgtcggcctggacacggatggcctggcaaccaatcacaggggtagtgatcaaaacatatttggtcaaccaatagcagcgcaacaacttgcgaggacgcagccagtccacccgatggtgcagcaagacgactttgttgaataa

SEQ ID NO: 25652 - DNA, 471 bp, Zea mays
  Peptide Sequence Number=SeqID_69027
atgatggtcctcacctcagttgccaccaccttgttcgccattctacttcttttctctctcccctcatgcctccacctctgcgccatcccattatcggcagagggcgtaggagcatgcgcctcctccccgtattcgttcgacaccggccctgacaccgactcgagcagtggctattgcacgtccacgaggacgtttcacatcatgcgcacaccatcgtttttgccatcgtcggacatcccattcgtcttctcggccttcaccctattcttcccccccaacctgctgcccccgcccacggtcgctgccgcaagccgaccgacactcgtcgacgcgggtacggcgcaagtcggtcatgctcctggcctttctccatgtgtgccgtcgaggaggacatggtggcgcctgccatgcttaggttatcttgccgatgaggagtccaggtctaagatattggacaaccaaggcccatag

SEQ ID NO: 25653 - DNA, 960 bp, Zea mays
  Peptide Sequence Number=SeqID_69028
atgctcgacgatgggcatgagcagagcgtggacgacgctggcaagctcctggtggggacgttcaggtgggccccaggcgcgcacagggcacatggacagcggcgaggcaactgcgaggaggagttcgtcgacacctcagcttctgggtgcacggggcacgcgggctcgctggctggccgaccagctgccgcgccgcactgccacgtagcgctgctagggctggccgggcgagcaggggctgctgcttgcaggcgattctgcgcaaagcccagaaaatggggggggcgaggagcgtgcatcatgggggagcagggggagaatatgggaaagagagatatggctgggtgggtcccacagcggcgatggcgttgggcaactgcccacgcgcgcagcaggcacggcagggcggatggcgacgcgggcgaggctgctgcgcgcactggtgggccgcggggacgtgggctcggaagcacggtagctgggctaactgagtggccagcggcccaagaggggagaagggaggagaagcgcggtagggggctaggtgggccaaggaggggcgctgggccgcgctcgcgccagcccaggagagcaagccggctaggggagactaggcaggcgcctgctagttgcaggtgcttcccatcctcgccagtttttgtggttacatttgacaagccccaaggggccaaggaccattggcttctccacaaggaagcccaaaagttgctctgtgtgcgggcgcaccagacagttcggtgcaccatcagacaatccggtgcaccattggacagtctagtgcaccactggcagtccagcagcaatggtgcattccccgccttcccatggtgggacacgatgtcacgttgtttcacttcctccccattaactccagcagtttcaatgttccgccaatggctcaccgtccctctgtctccccgtgccaagtctggagtgtag

SEQ ID NO: 25654 - DNA, 315 bp, Zea mays
  Peptide Sequence Number=SeqID_69029
atgcacagacagtcgaagactggttgtgaaaaatgcctcaaagaccaccaaatctccctccggttcagggacctcttcggcccccagaacacgccccacgtcgccgacaaaataacccaaatgttccatctcatgcacgcgccccaaggagatctgcaacatcctgaactccaccgtatgcccggtaacagctccgtaatcaacaccggatcgctaactgtcttctttgatgatggcgtgctcgacgacgtggttgcgacagacgatgatgaagaagacaacattacgtaccgtctgcgacggtacaggttgtga

SEQ ID NO: 25655 - DNA, 357 bp, Zea mays
  Peptide Sequence Number=SeqID_69030
atgaatgatcgcgtatcacaggaatacagcaactacggtgacatcgccgctggtctgcgagtatttgtagagcagctgaatgagaaaaaccgaggcttcgaggattacgtgtcgcagattgatgcgatagatcaacaggtgactgagtttgaggcagtggtgtccatgctcgacaagcatgttgccctcttggaaaagaaagccgtgctgggcaagacgggccagaatttgaggtccgacccaatcccgacttcgggccatactagtcagggcgtcaccgtcgagctcaagtcttttgggatattgctgcagctgcaggcaccggtccctggactcttgggatattgcgtgatgatg

SEQ ID NO: 25656 - DNA, 420 bp, Zea mays
  Peptide Sequence Number=SeqID_69031
atggacatgtggctgagatctggcgcacaggggttaacggctttgggcggcgctactcctatccgctgtggcgaagtcacgggagatggggtgggtgcgggctccaagggatttgaggtcaccggagttggccaggaccgacgaggagggcccgacgaactcactagcggggctccagccgtgagaataggactggggacgagggaacgacagagggtgcgctccgtgcggatcgggataactccggtgagcaatcctggccacgaggaagggaaatcgggtgtgataaggccaaggcaagctcagcgagggagggggatactacagaccaaagcaggggctcgaagaggggctgaatcgaccaaccatcgcgcggacgcggagaactggcgcggcgaagctctagcgagcacgaattag

SEQ ID NO: 25657 - DNA, 165 bp, Zea mays
  Peptide Sequence Number=SeqID_69032
atggcgagtgtaaaccccgcggtggcggaggcagaggcggaggcggtggggcggcgggacgagctgtcggagtcgctggctgagctcttcaccaacgtctccctcatggtccgcggcgagctccagttacagactctattagagaagaacggctcaattatctaa

SEQ ID NO: 25658 - DNA, 135 bp, Zea mays
  Peptide Sequence Number=SeqID_69033
atggcgcagcgacttacccggtttgcgtgctccggtgggcggaggggttccggcgagaacgatccggcgcttctggccgaggcgttccttgggctgtgcagtgagcagtcgaggccccaagattggtctgtgtga

SEQ ID NO: 25659 - DNA, 774 bp, Zea mays
  Peptide Sequence Number=SeqID_69034
atggcttcacccacccccgctgatggaggagacacccgcttaagctttgactacctttcacgagagggcttttcctctatcttgtgggaggtactctgctccgctgggtaccccacaccccctgtgtacatggtgcagctgtacgaggagcaccaggtgccacgttgtagggtttggctaaccctggagtctcaccctctgcagcctgggtggcgttcacttgatgctgaaactgtcaaattcagggcggacgacaccactgagaccgcgacactaaaggctttgacgaccttctgcggataccacccactggagatgatgatgcacccacttggactcttccccgctgaaaagagggatgatccgatgtggtgcaacagagtgagccacgtcaaggatgtgtgggccatgcatcctgaccaggttgggagaatcaccatccagtgcatgagtgcactgtaccgcttgcaggccctacaaagcgatgccatgacgcacctcactgggctcgctcaaacggaaaagaccaccctcgacgatagggaggacttcgtggtcgacctgtcttcagaattggtggagaaggatctacaagttgaacagatgagcaaccgcatccaagcattggagcaccaggtggaaatccgggacaacaccattgaggtcctggaaaatcagctccatgatgtgcaagaggaacttgaggaggccaacactcacatagaaatgcatcaccaagacatgaacgcaatggaggcatgcagtgaagagtag

SEQ ID NO: 25660 - DNA, 423 bp, Zea mays
  Peptide Sequence Number=SeqID_69035
atggaccgccatgcaccgtggctagagcatatgggtgcacgattctcgaagcgaggtgatgaggaatctgaagatcaacttggtgaagtacttggaatcacaacagctaggatatccacagatggcatattctattgcctaacacctgcccgcagtcgcagcgggaggctcccggacgcaaagactggaccgaaattctcgaaagagtgttgtcgaaagccctttagtcatgatgtcggcgaactggtgagaggagggcacatggagaacccgaatttcaccaagggccaccttttcgcggatgaagtgaatgtcgatctcgatgtgcttcgttcgcttgtggtggacggggttggccgtcatgtagacggcgctgacattgtcgcagaagacaactgtggcagaaggcagctggatgtgtag

SEQ ID NO: 25661 - DNA, 201 bp, Zea mays
  Peptide Sequence Number=SeqID_69036
atggggctcggtgtatgcggctcgctctgccaagatgatgatgaggaggatggttatgattatgcttatggtaatggtaagttgtattctttccgtttggaaagggttgccttgggtgtgatctatgctcaggtaaagaaggagaacggtgtcgaggcagatctccgggagttccaggacttcgacgagttcgaggattag

SEQ ID NO: 25662 - DNA, 168 bp, Zea mays
  Peptide Sequence Number=SeqID_69037
atggtgccattaccgcccatcgcgagctcgcccagcgacaataaccccatgacgctgacaccgttctcaatttgcaactatcagattttggtcattacaattttaccttccaaatgtattgaacgtatgctcgctttacttagacaacaagcagctcgtggttcctga

SEQ ID NO: 25663 - DNA, 207 bp, Zea mays
  Peptide Sequence Number=SeqID_69038
atggggctcggtgtatgcggctcgctctgccaagtttgggtgggttatgagattgatggttctggttatgactatggtgctgggtacatcgagttaataacttgggttaatgctaggctctccgggaggggaaggcaccgctgtttacatccgtctgcaacggcgaactcgcataccgcgcactttttgcgctacaacggcacataa

SEQ ID NO: 25664 - DNA, 369 bp, Zea mays
  Peptide Sequence Number=SeqID_69039
atgcaaccgagaaaggccggtccccttgcaaaaaagtgcgacaaaagcctccaagcgagtgccaacactccctttgaggctcgggggctactgtcggggaccataattaggggtacccccaagactcctaatctcagctggccaaggctccgcccaagggacacgatcccgcctagcccgagcccggcctcgggcaaggacagccgaccccagaggattcacgtctgcacgagggtcccctcaaacaacgggtgcgccaccgactcgcccgaggcccagctcgggcaagcttcgcggagaagcaaccttggccagatcgccacgccaaccgaccgaatcgtaggagcatttaatgcaagggtcgcctga

SEQ ID NO: 25665 - DNA, 594 bp, Zea mays
  Peptide Sequence Number=SeqID_69040
atgctgcccaccagctccgccgccgcaatagcagctgcattcggacacccaggatgtggcggccttccatcaggctcctgcaagcgtcgaaccctacgcttcggtggaggccacgctggagaagaagccatacccacctgccacgatcgcagaggaggtgaggttggctggcgctcgaacccgaagtttcgaaagcaaggggtatatcctatttttgtattcaatttcttgccagctcaagatgggattggtgtcaagtcactggaggaggagcagggtcttggtcctgaagcacaggaggaggagcacaacatcacgattatttctgtaaaaggctcctctctccaggttactatgattcagctgcattcggacacccaggatgtggcggccttccatcaggctcctgcaagcgtcgaaccctacgcttcggtggaggccacgccggagaagaagccatacccacctgccacggtcgcagaggaggtgaggttggctggcgctcgaacccggtaccacattccactcgccgtcgctgatgtgcctgtccaaggtgagtccgccaccgaggaccctcctctctgtgtagcctga

SEQ ID NO: 25666 - DNA, 405 bp, Zea mays
  Peptide Sequence Number=SeqID_69041
atgggcaagagcaagaagggcggaagttcctcacaccactccggcgataagaggaaacgcgagccgagtcctccctccgaggactttggtgactccgagtactcggatggaggagttctcctccgagttcgaggggtcaccggcctacgcctctcccccggcaaggggatcgccgccgaggtgtggacgtacatccgggccgtcgagcgcttcgggctcgagggctcaaatgagtcggagatctcctcggatgaggaggactcctccgactcgtccgaggaagggagcggtggcgatggcgatgacgaggacgagggcgacggcgacagcggcaagggcgacggcggcagcggcaagggcagcagcggtagaggcagggccagtggcaaagcgccactggcttaa

SEQ ID NO: 25667 - DNA, 693 bp, Zea mays
  Peptide Sequence Number=SeqID_69042
atggaccttgcgaggagcctgatggaaggccgccacatcctgggtgtccgaatgcagctgctattgcggcggcggagctggtgggcagcatctggggtctggcgcgacggacagggtgatacgaacgcggagcggcagaggtcagaggagagagcagatctagaatcggagagtgaggagcggacgcagaggcacggagcggtggatgggcccagcatgggtgacaaagaacttggtgacgaggtcggaaggaggcagatgctcgacaaggctggagagagcgagcggacgtggacgaacgactgcgtcgaattgaagaaaccattcggcacaaaaggaaacatgcatgagcaggacccgaagttcggcatcataagttgtggcgccgagctaacacgtctcggcgccacagatcttggcgtcgagtttattgacacggcagcgcacgtgccgtaccgtgcgctgaccgccgctaacccacccgcccttcctgcaccccggccggccgcccgcccgctcacgcttccgaccgccgccccaccgtcgccctcaccgacggcggctcgccagcgccgactgccgcacaaggatgctagagagctgagtaaacggctaatagatgagatagatgttttcgatggggtgcccctaggccttatatactcgaccgtgcggcgatacatgcggatatga

SEQ ID NO: 25668 - DNA, 690 bp, Zea mays
  Peptide Sequence Number=SeqID_69043
atgggcaatggccatgaaccggtacagggccgacctcccaatgatggcattaaaggggaggttgacctctgcgacatcgaactagacgtttttcgtgcagaagtttccctccgtcccaaatgtaaccgggagcgttatgctcctgaggggatatacaggttgtgggcccaccccggagaatgggcgagagggccccagccgggaccccgggatctgcagctgcttgaatgctgcatggttgatgacattgaggtcagcccctccgtcaatcaacacgtggtgcaaccgcatgttggcgacaacaggggcggtgacgagtggcagtacgctggcccccgccatgttgtcggggcagtcggatgccccgaaggagatggtggtgcccctccaccgttggtgtggagcagctttggggaccccagggaccaccaaaagaacctcccgtcgcagagacttgacactcctgtgggagatgagctcccagcttccgccgtacattacatacagcttcttgcggtggtcgttgtcgtcgccggagtcagaatctctgatgaaaacgtctttaaggtctccctcgggcaattgttagccaaggtcttgtccctccatagtcgcggcttcttcgtcggcccccttcttgccaggccggtggcgaggcatccttggaggactgcttgcgccgctcgctaa

SEQ ID NO: 25669 - DNA, 591 bp, Zea mays
  Peptide Sequence Number=SeqID_69044
atgacccggaaggagaaagggctggtcaagaagaaggagcacttggaccaaagggaggaggtcatctcggcgttccataataagctaaaagcctataatatgatgctggagaaacagcggcacgagcaggctgcggttgaggcgaagctgcagcaggaacttgacgacaaggctagcaacattgctcgcattgaggaaagccacatggcgaaggatgcctccctagagaaacaagcgactgatctcgcctggcaggagaaggacctcgccttcagggaggagatgtgggaaaggcggaacaagttgctggtcgagtttgagctcgaggcggaggagaaagagaagcgattggaggggaaggagcgggaactggaggagctgctcaagcgacgcagacggccccgggccccaggcggtggagcgtccatctccgacgcgctcctggtactggattccactgtcgagcgcctccgacgtctagatcagattcttggcacccgcctggaggctgagggtccggtggccgatactgaagatgccgcccgggagggcgtacaggatgttgtggacgtggtggtcgggcgcttctag

SEQ ID NO: 25670 - DNA, 1530 bp, Zea mays
  Peptide Sequence Number=SeqID_69045
atggccatgctggttcgtcccgatcatttccagaccgaggaggagcttgacacggtgcgccgtttgctcggatggggtatgccggtgttcgccgagaggatccgggccggcactactccccttggcgatcttgccaccggggagtttgtgctcttcgtctcctatctcttctacgggttggcgctgccgatttcgccgttcttcctgctactgcttgaggtctgggaagggcaaagaccaccttgggcttactacttccagacgaggtcagatccaacagtgacctacatcgccacccttggcggtgcgaggtgggagaactggcgtagtgtctgggtgatcgccagcgctgaggccaacgaccgccttgcccttccgggcgacgggcccagactcgaccggaaggggatcactggtgaggcttttatccccaaagctttgatacctccccagggcatttcgccgctttgcgacaatccacggttgcggtcggcggtgctggcccgactgccgaccctcgatgagagcggtgtggcgattcgtcagaccggccgctgggacccccaccagggaatccatattcctggtgtatcggtcaggggttcccagcctgccgatgtgggctccagagctcctcctgcggcccccagttcctcggacaagggcaaggggcctgcgagtggctccgccgccccgggtgccaccgggagttcggagggagtgaggcgacaccggttgcgccgcgccgatgggtcttttatctcggatctgccccttgattcggactccccccagaagcgtcagaagacagctggtgggactagggaggccgaacttcaggggcagcggcagcaacaacagcaggagtggcagcagcagcaacaacaacgacagtgggcaccccgcttccagggtcactggaaggtcttgatccgttctttgcccatcagggcctcctcctcttctgtttttaaggatgctcctcccccaccggtcgctatgcccgtcggtgggtctggttctcagcagcacacatctgctgggaatgtcgccggcgatccgtcagcggctaccacagcctcaccagcgtcggtgtcaaatacacccccggcagcggccgaagaggttcctgctgcgtttgcccccaccatgcggggtgacgcgggtgctgaggtggcaccatcaggcccccaggatctgcctgccaccatcgaggcaatgctttcgggttcccaagttccggctgggggtccagaggcggcagtgccgccgacagctactgtagatccaacagcggcgatactgttgaatacaccgttggcggtaggcgtggggggtgtgtccagctccatcccgccgccaactccagaggaaccggaggttattcttgggcgaccgctccggtttggcatcgagccagaagcaatgccgactcccctccctcaggtgttgtcccgctctcatcaggctctctgggaaatcgaggcagtgatcctacgggagtgggaggcgctcgagaccgagcactag

SEQ ID NO: 25671 - DNA, 591 bp, Zea mays
  Peptide Sequence Number=SeqID_69046
atgaaggaatcgccaaggacgctgtggctaaaattcaccgaactgtccggtgtgcaccggactgtccgttgcgccaacagcgtgatcagcgcacaatcaacaggcgacgcgtggccagagccaacggtcaccaggccgcactggactgttcggtgtgccaagtggaccgcggctgcaatggtcggcttcgccaaacaaggaaagaaatcgcgcactattcatgtccgtcatagccgccctcccgcgccgcccctgcaccagccacgccgcgccaccgcctcgccgcccccaccgccgggtagcgagttcgagaacaacctcaaggtcatcaagcagtgccaggccgggagcatcttcacggagagcgccaagctgccggacgaggcgctacagaacctcgggcgggcggtcatcttcgctgcaggtttctgctgggacatcctggcgctccttgctacggtcaacctccagtgctttgcgaccttctggccgccgctgctcgagtgcttcatcgccgtatcacagctgccgctcttcgcgccgcgctgcccctgcaccatcaccgccgcgccgcgccaccgcctaccctag

SEQ ID NO: 25672 - DNA, 342 bp, Zea mays
  Peptide Sequence Number=SeqID_69047
atggaccttgacgcggctgtagaggaggaggagcgccggcttgaggatcacaatgaggtgcaggatgctaggtactttctggggttcggtgacacccatggggatcctattgaagttgatactgttgtcagctctcaaattggtactggcactagatcaacaagcccaccagtccctgatcctagtcaggctgatcctgatgctagtggtaccaagatgaagaaaaggtccaagtggtggaatgacttcgatgaattgactaagactgtcgatggtaagaaagtcagcgttggtgaaagggaaatgtgcccttgggccatttctaagtattttggtgattga

SEQ ID NO: 25673 - DNA, 348 bp, Zea mays
  Peptide Sequence Number=SeqID_69048
atgggcaatagcaaggaaggcggaagttcatcgcaccactccggcgacaagcagaagcatgagccgagtcccccctccgaggacttcggtgactccgagtactcggaggaggagttctccgagtctgaggggtcgtcagcctacgcctctcccccggggatcgctgccgaggtgtggacgtacatccgggccatcgagcgctccaggctcgagggctcggatgagttagaggtctcctcggatgaggaggactccttagactcgtccgaggaggggagcggtggcgacagcgatgacgagggcgacagcggcagcggcagggccagcggcaaagtgccgctggcttaa

SEQ ID NO: 25674 - DNA, 129 bp, Zea mays
  Peptide Sequence Number=SeqID_69049
atgatgatggatctatcaaaggccttgataggttcaacatcagaaaagatgtacctctgccaggaccttgtcgatgtaggcttgatgattgaggaccctttaactggtcacatgcctcgtcatgggtaa

SEQ ID NO: 25675 - DNA, 1716 bp, Zea mays
  Peptide Sequence Number=SeqID_69050
atggcgcctcctgttgacgtggtcggtccgtgccctagtttgggcgaggtggaggctcctccgaggacgaggtcgagtctgtcttccaaggtcgaggtcgagtccgagccctcgggtcggacgaggaggagaccgtcggctgatgccagggctgagtccgagccctggggtcgggcgaagcggagttcgtcgtccttcggggctgagcccgagtccgagccctggggtcgggcgaagcggagttcgtcgtcttccggggctgagcccgagtccgagccctggggtcgggcgaagcggagttcgtcgtcttctggggcggagcccgagtccgagccctggggtcgggcggagcggagttcgtcgtcttccggggctgagcccgagtccaagccctggggtcgggcggagcggagttcgtcgtcttccggggccgagcctgagtccgagtcctggggtcgggagaagcggagtccgtcgtcttccggggccgagcccgagtccgagccctggggtcgggcgaagcggagtttcccatggagcctagggccggacttggctgctgtcagcctcactctgtcgagtggctcagtagtcggtgcggcgcaggcggcgctgtcctcttgtcagatcggtcagtggagcggcgaagccacctttgcattaaatgcccctgcgatttggtcggttggcgtggcgatttggcctaggttgcttcttggtgaagactgggcctcgggcgagccgaagctttgtgctgatgggggttaccagctgagatttaggagccttgaggggcatgggttcaaccccacctcctgcaccgtttttttgacattttacgctgatttaattaaatggatcgacggctttcctccccaccccaccgccactcctaccccgccacgtcgtgtagtcgcggcggcggatatgcaagccgccgccgccttcaaccaggcagccttcaccgtccgctcgctgcatcgccccccgaggcccctccatctagctgttgcggaggatgcttttgcggggataagaggcgcgccccttacacggccccggtgctgcgggagcctctctgtcggcgtcggcagctacgacagcgagcacactccagtatttccaagacaacaatcatgggatccctacaagcttcttggtgttgatcaagatgcatctgaagaagaggtccggagtgcacggaattttcttctaaaacaatacgccggatatgaagaaagtgaagaggccattgaaggtgcttatgacaagataataatgaatagctacacagaccgtaagaaatccaaattcaatctgaaaagcaagctaaaagagcaagttgaaggatccccatcatggcttaaggcactgtttggatattttgaggtgccatcactagagatcatttcaaggagatttgccttttttgcgttctttgccgggtggagcattgcaacttctgctgagactgggcctgcctttcagcttgcgatgtcactcgcctcatgcatatacttcctcaatgagaagatgaagaatcttgtcagggcgtccaccacagggttcggaatctttgtgggtggctggatcttgggttctcttcttgttccagtgatcccagctttcgtcatcccgcctacatggtcccttgagctccttacttcgctgacagcttatgctttcatgttcgtgggttgcactttcctcaagtga

SEQ ID NO: 25676 - DNA, 462 bp, Zea mays
  Peptide Sequence Number=SeqID_69051
atggacgaccctgttcagccgatgacgacggcctcatcgccagcacaggctgcttcacccacggcgtgcggctgtcgcggaatggtggagaagatgacgctggagggcctcggcgtctgggacgagaggagcgtcggcagccacctcgagtcgctcacccagggcgtgcggctgtcgcgctacggcgcgcctctggacaaggggaccggcatgtcgatgaaggagcaccgcgacgacaccatggtcacggggatcgtgcagcacgacgtggaaggcctcgagctgcagtgcagaccaaggacgggagctggaccgacgaccctcgcgacccggacacggtcaccttcgtcgccggcgagcagttcagggtacggacaacgccagccacggtgcgggcgatggacgagctcgtcgtcgacggtgaccgacttctgcggtacgaggactactccagcgcactaa

SEQ ID NO: 25677 - DNA, 366 bp, Zea mays
  Peptide Sequence Number=SeqID_69052
atgaagctacaggagccctcatttcaggctaagaacctcgggggactcgggaatttctcgccggagtcgcgtcaccgtcgtacaccgcgactgtgctcacccgttgtccgtctccggcacgggagctcggggttcaccttctccggtgatggcgccgtcgtgatggttgtccgccaccgtactcgggtcggatggaggaaagggaaggatctggggccgttgatgaggatatgctcggctgagattagatcgggggaggaacgcaatttagccgttggatgggacaagcaaactactgaggatcctggtgcccagcagatagaagttgctgagcaggagctcattgaaggcaagttgtgcccttga

SEQ ID NO: 25678 - DNA, 219 bp, Zea mays
  Peptide Sequence Number=SeqID_69053
atggcaggcggacgggagcagcggtcacgtcatcagccaagctcacgtcccatccgggggcagcaagagaaccccctctcacggcgtgaagacaacgcgcccgacaggcggcgcttccggcgggagcagtgggcgacgcttcgccttcaccgtaataactgcgacaaaaaagcagggaccgggaaagggggataccccgaaaaggatccttcctcgtga

SEQ ID NO: 25679 - DNA, 357 bp, Zea mays
  Peptide Sequence Number=SeqID_69054
atggccggcggtccttcaaggccattgatggctacggcggtttccaaaggaaagaaacggggaaggagaaatggtcgtagtgatgctccattaacaccgaggatgaacggacgcgtggtgtcgggccttcaaggcgcggtcgggatagggcggctcggcggctggggctgggtgctgggtggcgcggcgtcacgccgtcggggcagctccctggcgcacgggaccgatgctcaaggcatcagtggctccatttacacgagacatctcgtgtgtatgttcgatgtagtcgtacgcagtcgatgtacgcattgcggtacctcgaacggcgtcggcgacgaggaacttgatcagcgctag

SEQ ID NO: 25680 - DNA, 1236 bp, Zea mays
  Peptide Sequence Number=SeqID_69055
atggacggcggcgccttcaccatcgtcgtgtacaacgccattggtggtgcagatgacggcacatgcgtgcacatggagcccacgccagcggcgccgcgcatccacctccagtccccgcagactgccgtgccgacgcgggcggtcgagcctgggcggacgcgccgcatcaccgtggccgcgcccccgctcccaccggccgcgctgcagcggcgcactcgcgtggtgctctactaccgcgcggacgccgctggcgcggacggccgggcctcggtgcggctgtgggaggaggcgatgtgggcgaaggagtcgctgagcgaggccgtggccgaccacccggagatgggcggccggctccggcgccacgccgacgggtcgtgggaggtaaagctgaacgacgccggcgtgagattcacagaggccacggcagaggcgaccctcgacgagttcctggcgaccgcccaggacaaggaccgggcgcctagctgggaggccgccctggcgccgtgggccgacgtgaacgcggaggaccccgacgtgagcgcgctcgtctacgtgcagctgacacggttccagggagacggaggcttcgccgtgggcgtaagctgcagcctgatgctgtccgacccgctgtcactggcgaggttcctggcgtcgtgggcgcgcacgcacgccaggatgaaggctcagaacgacgccgccgcccacccgctgatgcagtacgcgagctacttccggcgcccggacgccagggccgcgcgcgcgctcgtcaagtccgtccccctcgacgccttcgcctccgccgacgccgccgagaccgtcctcttcagagccagacctaccatgctgcccgccggcgcgggcgcaccaccggcgcccgaccaccgcgcgctcgccgtcgcctgtgtcgcccaggcgcgggaacggctcggcgatggcaaggtggtgccgccgcagttcccgctcgtcgtcttcgactgcgaaggcggtgtgagcgtcgagacgtgcgcggcggcggcttacgggcagccgccgtcgccgagcggcggcgggcggtacaagattgacgttgccctgtgggaggagctcgggctggaggagctggtgctcagggacagcaagccactgcacgtgtcgtacagcatcctcggcgctggctgcgatgggctcgccgtcgcgatgcctgccggcgctgccggtgagctccttgtcgcggcgacggtccccaaacccaagtga

SEQ ID NO: 25681 - DNA, 903 bp, Zea mays
  Peptide Sequence Number=SeqID_69056
atgccatgttctgacatgtcttcattgttgccacttttgaatcctttgtcggcgtgcttcattcgacggtctatgcgtggatctagcccctgtttggttgggattctgggcggattctggccgccagaagctgaagccgcggccaaacgcctagcttctaggctagcttctagcggtcgcgcttcccacagaagccgcccgcgttcaggaaaccaaaagctgcccgaccgacgcgtccgctggaagccgggctattcgcgagggtttccaccaccgcccgaccgacgcgtcgtctccaagcctcagctctctgcctccgccgccgcctcctcctccgccacatcgggtcggggacctcgaccacagtcccctccgcggcattcgcttctcaggattttgcccgcgccgccgccagttcgtccgcaaggttggactcctcccgtatccgaactcgtcgtattcgcagatcacggggagttaggtgtttgtctctgttgcatcacaacctccactcctacgaagatggattcagcagactccatagctgacaaggcaattggaaggatgcaagagattgcgaacaagattttttcggtagcgagggaaacaatccgtcctggtcgcgggttgacctcatttgacgctacaaaacttcgtgtagcattggaggacatagcttgcatgctggagcaagactctctggtgttgcaagagaatttggacatcgtgaacaacgtaaacaacccgggtgacagcagctacgaaccttctaccttgtcctcaccaccccctgctgacgacgaccttactccagactgggactttgcggagcacttcaaaaacttctggggtgttgaatatgactccgatcagatgccttcgtttagtgacaatgaggtttaa

SEQ ID NO: 25682 - DNA, 408 bp, Zea mays
  Peptide Sequence Number=SeqID_69057
atggcgggcactgagctgagcgagaacgaggagcagaggagaatgactatgcgcggttatacgagagaagaaggagcacggctgatatttgaagactcccaggggcggcgccgcgaaggagccctcatcgttggaggcgacgtcgaggccatcaaagccaaagaggtggaggcgcggcagcgcccggcacttggcggcctggccgctgagccagagacggagctggaccagttcatggaggcgtaccacgaggtggtggagccgcagctgaactcgttttccatctccggaaggtcgatgcgcaacaccctttcatccgagggctggcgaagcaccacccccacaaacatctcgcagaggtgggcgaagatggccgcctggaggatggagtggggcgtgagatgctga

SEQ ID NO: 25683 - DNA, 408 bp, Zea mays
  Peptide Sequence Number=SeqID_69058
atgtggttcctgctttgggcggccccgaaccagtggagtttttcaagcttgagctattcttgcctgaggaatatccaatggctgccccaaaaagcccagtgccaggcacccttccaatttgttataggctacctatctattcctgtcttccatacatgcaagtacttcaatccagttggtgctcatcctagtggatatcttggcgaggacccacgaggaattcccaacaatcttatgccctatgttcagcaagttgcggttggtaggaggccagctctgacagttttaggaaatgactatgcaacaagagatgggactgagctgagaaggaggctcatgtcaaagagagagggaccgtctaaaagtattgtgcaagatatagagcatgcactcatcatatctaagtga

SEQ ID NO: 25684 - DNA, 2043 bp, Zea mays
  Peptide Sequence Number=SeqID_69059
atggaggtagtcgagttggttccttgcgcccgcaacaagtgggacaattggaatgagttttggttttacatcgcggagggtgccgtcgaagaccatgaggggctccccgtgtccgaaatgtgttcgcatttttactcagcatacccgccttttgaggtggcggaggaggatgcggacgaaggggcccttcggtgtgccgtcggcctgagcagtaggcgcgacttggttgaagaatttgtggcgtacggggtatggcccttggcgcatggctgggtgttgggcgaagtgtgccctcgccagatgccttcccatggtgggaagatggtgcgaagtcctgccttcgcgctggatctgcaaagccgcgacccggccgcctttgtgcgtgaggtggaggatggggcggtgcggatcgtgggtcgatacgtgccgaggacagagggccagcgtagctgggatatccgcgggtcgaatgaccgtttgaacagggtttttgaattgaatcgactgtcgtataacggctatccgggccatgatgatgtggaccgccgcgggaagaagccggtgagagttgatgaggacatgcgcggccccggggggaaggatgtcttcgcccgagctccgggagtcttcggcgcggatgctgaggtgatggacaaggatcgccagggagctgcacagaagcgccagacggttgtcaggcttcatgaagccaggccgaagaggcagcgaggggctgcgaaggctgctgcccccggtggaggcaagccgccgctggcggcgaagtcggatgttcctgcatctagcaaggcgccggaggctgcggctggcgccggtggttccagacctgcgaaggctgtgccggcgtccggcagggtgtcggaggtcgcgaaggcggcccgagggttgccgtcgccgagcaagggcgtcaccgacttcgccaccgatattagtgtggacgactatcttggtgggtcggacgagggccaacttgttattgttgcgcctgccgcggtgaccacggcggccgccgtagtgccgaaggcgaagggcggtgctcttggtgccggaggcgagatgtcggcactcgcggctgtcagggatgaggcgggcgctgtgtcccgccggctgaaggaggcggatgacttcgcagaccgcacgacgtcgggggccctcactgccgttgtgtctgccgaagtcgagagacttcggacgcaacatgctgacgccgtccgcgaaaaatcggccgccgacagtaagtgccgcaagctggcggacaaggcggaggccaatctggcacgggcggagggcaatcttgccagggagcgcgccgagcagttgcaggagcggctcagcgccttggagagccgtgtggagagggccgaggctgcggcgcgcgcggaggctgagcggacgcgcaaacagcttatggattcattccatgagctgggcgcgcggaccggtgacttcgaagtgccggaccgagagcccggacttcgctgcctggagtgggtacaggaggagttgcaggcactccccactatcgtggaggggtttatgtcgtatgcctccctggcggcgcgtggcgagagggtggacgacttcggggcgttgaacagcgcgctgcctgacccggagccgatcccggcggaggccgtgtctagggccgctctggagccgcccccggagattgtggaaggcgctccggatgccctcgcagctgctgcggccggcggagacccgcccccagagaccgccgaaggcgcgcctgatgcccccgtagccgctgcgccgagggctgaagatcctgcgacggtggtggcggagcgacagcggaggcgacggtggaggctcccgcgacggctgggtcttcgcaggtggcgtagtggctcggttgagtggactgaggagtcgtcggaggaggacttggatttctttgcggccttggatgtggcagcggcggaggcttcaccgcacgccgcggacgcggaagatggctggccggcaggaactgttgtctttgccagccgccgcaagtacaggtga

SEQ ID NO: 25685 - DNA, 192 bp, Zea mays
  Peptide Sequence Number=SeqID_69060
atggcgagagtagcgtgtaccctccatggcaagaggctggacggtggtgtatctgtgctctcggttgacgtgaacctgatctggactgactggcagactggcagtgacagaggggaacagtgcagaaaccggttgaaccggtttttgaactgttgcacagattttgagaaaaccgaagtgaaaccagggtaa

SEQ ID NO: 25686 - DNA, 319 bp, Zea mays
  Peptide Sequence Number=SeqID_69061
atggcggtcacgatcacgtgggtgaaggcgaggcagatcttcatcagccgcgacaaccccaccgtcgaggtggacgtgggcctcagtgacggcagctacgcgagggggccgtacccagcggcgcatccactgcatcgctactacagagagtccatgcctttcggtagcaaagccaaggcgtacatcgactccaagtccctagcgtatctcacggccaagcaggcgcttgcttacttcgctgtgctgctcactgatctcaagaggaacctatcagcagagggcagccccgttgtgctctttggggactcatacggtggaa

SEQ ID NO: 25687 - DNA, 480 bp, Zea mays
  Peptide Sequence Number=SeqID_69062
atggcggcagcaggcaagcagaagcagcggtcaaatcgtctgcaggctcatgtcccctcctggggcagcaggagagccctctcccacggcgtgaaaacgacgcgcccgtgttccattcctcgaacggctcgcgcaacagctgccccgcaaaccactcatcctgtcgcattaactccgcggcagggcagccgacacctttggcaggcgaagcggacgacgctttacctccgccataataaccgcgtcaaaaaagggaccgggaaaggggatactccgaaagggatccttctctgcgaaggaagcgggccccgagccctcctactgatcaggggttcgaaggctggcccctcggaagggtttgacagccaccctagagcactcgggctccgagccctcctactggtcagaggttcgaaggctggcccctcggaagcgttcgacagccgcctcaggccactcgggctccgcgctcactactga

SEQ ID NO: 25688 - DNA, 120 bp, Zea mays
  Peptide Sequence Number=SeqID_69063
atgacgcccgaggagatacttggaaagttcgtgttggggaccttcggcatccgaaggtatcttcgaactcaagtcggcatcacagtaaaccagaataatacgaaggtatatccttcataa

SEQ ID NO: 25689 - DNA, 117 bp, Zea mays
  Peptide Sequence Number=SeqID_69064
atgggtgtgctccacctgctgctgaccccaatgggggtgctccatctgctgctgaccccaatgggggtgctccatctgctgccgaccccaatgggcattggtggatgggatggctag

SEQ ID NO: 25690 - DNA, 222 bp, Zea mays
  Peptide Sequence Number=SeqID_69065
atggactccgcctcgcccgaccccaaggctcgacctcgacctcgaccccgaaagatggtctccgcctcgcccgaccccagggctcggcctcgacctcgacctcagaaggaatcgcgtcctcaccctaccccgacctcggcctcaggaggagtttccgcctcgcacgaccttgggctcggaccgaccacgccacaggggagatcatcattaccctacccctag

SEQ ID NO: 25691 - DNA, 492 bp, Zea mays
  Peptide Sequence Number=SeqID_69066
atggtccctgctcagggagtggcactggctaacaaggcagtgatgactggcggcgcacagatgcatgcactcacctaccgggaagcactatcgcgagcagccctctcaaaagcccttttgacgttgctggctatcaatacgcacgacctccttgcgcacatcgccagctttgattaccggcccgggatgatagacgagctcgacgcgcagatggggttcgtcgtgggcggaaccattctcatgctactcactgtcgtcttctatgagattcagatcctaggcgctagccgccatcgctctcacccaagccacaaccaagaaccaacctcagtgccctcaagtcgttgcgcccagcggcaacaggtcctcgctcgccatcactgccgcaagcgtcgaactcaatcccgcgacgttccgcgtctgaaaggtccgacctctaagctctgggtaccaggaccgccccacgagtcggcgcggcgagcagatggataa

SEQ ID NO: 25692 - DNA, 1266 bp, Zea mays
  Peptide Sequence Number=SeqID_69067
atggaggacttgagtacaatgaccccgataattgtgatcggaaagattgcggcatttgagatgtcgcgaaaaatgggtcgacaagaggagccaacttcttttagaccatatgcaagaaaaggcaagaagaaggctccactccaagtttctcaagtgaagaagaggaagaagaagacagtgatgattgtgaagataatcaaccatcaacatcatcctccgaggactaagaaacaatccgacgtgtcggaaaggtcgaggatcttctctttaacattgataggaaaaaacaaagaaagagaggatgcttcgtatgcggggaaaagggcaaattcagggacaaccgtccaaatatggtcgtacccacaaaggggaggagcaacggcaaggcgcttacaagtgtcaaaacttgtaatgactcttcaagcaaagatgaacctccaaggacgcgcagccaccgatcctcatcacgatcatcacggtgatcacacaagtgccttatggcaagaggcacaacttaaaactttgaaaaataagttgattatctctcaagatgattataaatgtttcctagaaaaatttaaaacatttgcaaatttaaattatgaactatcaactaaaattgagcaactagagtctaatgctccatccttagctaccgatgatagcctcattaaaaagaatgaaaaacttaaggctaagttagccagcactcaagaagccattgaaaacttgttagggaaaatggaaattattagcatacacaccaatgagctaactattaaactagaaaacattggtagcaccccaggagcatctttggttgaaatacctgaatttattaagaaagattcttctacttcttgctttgatttaattgattattctaacccctgcaatcaagttcttgttaagaatgttattatagaaacatgttcggatgagattgcaatggagaatgagcaattagagcaagaggtggctcgccttggcaaggataacaccactacgggggtgaacaagcctgtggagggagaaactgtgatttgtaggttatgccatatggaaggccacaagtcttaccaatgcaaggcgaagaccggggataagcaaaagcaaaagctcaagcaaaagccaacaagcaaaatctccaacacctacatcaacaaggtggataaaaaggttgctacaccatatttattcaaaaagaaaaaaaatggaaaggtgatagcaatcaaggccaacaagcaagccaacaaaggaaaatga

SEQ ID NO: 25693 - DNA, 582 bp, Zea mays
  Peptide Sequence Number=SeqID_69068
atggcgggtgcggccgccacctcacccatggttctcgctgcgcccctcttcaagctggcaactccacctcgaagtccgttgcgcgatcctgcttctcccttggctcacgcactcgattttcctggtgccgcgccctgctccatccgcgcgtccctggccccggcatggaactcgcccagtttgcgcgccgagctcggcctctgcagctctgcttctcttgcgttgcgccagcccccggcgctgagtcaccccgtttcgatgtcggtccctacgagatgcctccgaattgtgatcgcgcggacaaaagaatccccaagagaagatgtcaaaagattggatggtggtgtgcgtgaagttcgtgtagcaccttccaaacgttcgacaaattgtttgaatcggaaaatcattactgatatcgtggattcgagtcagctattggaacggtgtttaattcgctatcgcgtagcactatttaagcttgtaatattcctgtccttatgcattcatgtgcataatgcatctcatttaggtatgataattaatcgcgtgacgcggaaggcgacccaagtcgacccaggataa

SEQ ID NO: 25694 - DNA, 309 bp, Zea mays
  Peptide Sequence Number=SeqID_69069
atgcctccgaattgtgatcgcgcggacaaaagaatccccaagagaagatgtccaaagattggatgttggtgtttaattcactatcacgtagcactatttaggcttgcaatattcctgtccttatgcattcatgtgcataatgcatctcatttaggtacgataattaatcgcgtgacacggaaggcgacccaagtcgaccctaggataatgcggagattggacatctccgcaagacgacgtcgtcagtcggatcaacctgaagatggacagacgaagcaagtatcggaacaaaggagagtcgtcaagtga

SEQ ID NO: 25695 - DNA, 345 bp, Zea mays
  Peptide Sequence Number=SeqID_69070
atgagggagccgcgggcgagggaggaaggaagctccctggccgagcttgaggggcgcggccagctgtcagagacgatggccggatccaagcatgaggaaggtgcgcgcgcacagggaactgggaccgagccgagggaactccgagctgagcggcggggaagctccatggcgggctcgcggagatgggcacgcggcaagtcaggcagccggatgcggcactggagggcagggcagggcggcggccatggaagcttcaaggtcgagcgaggagcgcggcagggagaagataagaaagcaggggagggcggcggcttgagaaaaaagataaggggaagagagtgttga

SEQ ID NO: 25696 - DNA, 789 bp, Zea mays
  Peptide Sequence Number=SeqID_69071
gagcaggagcagcaggactcctccccctcgcctcaacgggaggtggagtctgagaggccgccttcccctgcacctcagccagagatgccccatgcaccagcacagggcatcccggctgctggaggagaccctgatggagaaagagacgacgacgtcgccggtggcagttcgagccacgacacagagctctcggaggagtcggaggcggagggatggatcactagacccatcactcgtgaggccactcgcgggtgtcacttccacgatgctctcgacaccctgctgcgttgggcctttgaccgacacacttggtccatcgagtaccgttgtgtagtctaccaacatcgtcgcgagttatacctggaccagtgggaggctacttgcttggcactttcgcagtattggtcgttgttcagcggggtagctgatggcctcaacctaaagtactatcctcgccgttcgaccgacagtgcaggaggtgtgattgccttgccagttggtgagggcaatcccaggctgaacaacatggtcaacttggctgtcgtgctcaacacagagttggaccacgtccttgacgagttgggcaaggttcaggcggaggttgcggaattgcgtgatgagagcgcagcacgccactatctggatggtggttctcccgcccctgtcgggattcagcacccttaccgttcaccgccccgtggtcgcttcgactatggtaccccagactataggacacggatagatttggatccctggatcgacagagtcggagtctttaataatgcttag

SEQ ID NO: 25697 - DNA, 507 bp, Zea mays
  Peptide Sequence Number=SeqID_69072
atgcacgacttcctccttgagctggcgctgcttgattgttctggttggttgctggggcaggaagacgagctgcctagttgctatgtcgctggtattgatttcctccttgctggttattctgacagtactcctgctgctgctgaggaaactgcctctggtactgctgctgctggttctgacgctgatgctggtgctggggatcaaccgatcctctcaaaattggtactgccttttggcattcgtgttgacatcttctggggcataacgcgacagctgcagaaacatgtccatgtactcgctgacggacaggggaccctgcttcaaggcgagaaactcctccttcctcactatcatcagtcccttaggcacatggtagcgacggaagttgtccctgaattcttcccaagtgatggcttcacggttggcatgtgtggcgaggcacttgtggcacctagacttgcactggaggctgaggcggtattgactcttgttgcacctgctgcatag

SEQ ID NO: 25698 - DNA, 300 bp, Zea mays
  Peptide Sequence Number=SeqID_69073
atggctgggaagggctctgcaggccggtctatggtggcgggggatcgggtggccgcgggcacactgtctgcagggcaaacgccggtggtttctggcgccgggttttgggagttaagggctcaagaagggtctagggtttattcttctcttgcccaagactgtaatctcattgaaggggaattcatcctcgtgccggagcaaggaggtgctcataaggtagcccaggatctagcaccagagcctacccttgaagatctgcctgccctagctttggaaggcaagccccagttttatgcataa

SEQ ID NO: 25699 - DNA, 321 bp, Zea mays
  Peptide Sequence Number=SeqID_69074
atggagttaagttcttttggtgcttggttaaagtttatttcacatcttcggtatatatgggaatctgaggagctacgtcgtgctatggagcctgtggatttgattagaagagtgaaggaaattgagcaagaagcttatggtgagcatggcatggcgacagatgaagatcctaagcagactgccgctgttgatttatcaaaacggcttaaggatttgagggcagggaatgatggcagtagccaaaaagtgtcacacccgggctttaaggaacaaagccgggtgcatctcatacatgcgccaagaagacaacatatacaataa

SEQ ID NO: 25700 - DNA, 312 bp, Zea mays
  Peptide Sequence Number=SeqID_69075
atgaagtactcaaagatccaagacgacgatcccatctacgtcgccggaataggaggtgaccgaaatctaaggaggtatcctcgttgtaatgtcacagatggactagttgggctggcagctcagctagaaaggccaaaagacttttggcccattcacagctttgcagctgcagcttggtctgtctcagtatcagccaaccatccagattgccatttagccgagtttacgcccgaaaaatcattaggcatcgcggtcatttttgccagtaaaggatctaagagcaagtcagatgtcggtcctaaaggtgtttaa

SEQ ID NO: 25701 - DNA, 342 bp, Zea mays
  Peptide Sequence Number=SeqID_69076
atggggaagcctatcccatcactcctcatgctcctcctcagccgaggcagggtcccactcgactgtccaacccggtggcaagatggacgaccaagtcactccagcaaccatatcctccagagaacattgaccgcacttgtacccaccataaccggaatgagagaccacgtctcaggtcgcgtgaggggatatgtccactgccaggttcactcagtgggttgttgggcccatgcttcgttgcgccgaaggtcttgcgtgaagaagcagcttcggctgaaatcgtccccaggaaatggccgaaggttcctttttatagagcttcggcgttgcaaaccgacataa

SEQ ID NO: 25702 - DNA, 204 bp, Zea mays
  Peptide Sequence Number=SeqID_69077
atggagcctggcggggggctccccgcggcggatcgaagtggcgtcctcctggacttgtggttgggagcaggccggcggcggcggtgggaggtcgggtggttctttggaggatatggttgctggagtgacttggccgccatcttgccaccgggttggacaatcgagtgggaccctgcctcggctgaggaggagcatgaggagtga

SEQ ID NO: 25703 - DNA, 351 bp, Zea mays
  Peptide Sequence Number=SeqID_69078
atgtcgtcgacggaggcgaaggccgtggcggtcctagagtctgtgctgcgcttggagaagtgggcggcatacaagaaggcccttgctgacaggaagaaggcgcttgagaaccgtaagatcatattcactcgctccaaacagtatgcccaggagtacgacacagaggagaaggagcttgtgcagctcaagcatgaggctcggttgaagggtgggttctatgtttggcatgggggcgaggggcaaaggaaaagattacatgattctaaaactaagaaggagaagaaaatgattcgaaaatttaatttgaaggagcacaatgcatgtgctgctaccttctatgcatgcctttag

SEQ ID NO: 25704 - DNA, 438 bp, Zea mays
  Peptide Sequence Number=SeqID_69079
atggtcgtgggggcgacggtggccacagatttggtagtggtagaggtgagagaggagaagggagggagaggtggtaggacgcctaggggcggccgtggtggtggcatgaatggcgagagcaaggctgttgtggtggtgcacaagcacgctggtgtcttcatctccaagtccaaggaggatgcgctctgcaccaagaacatagtctcgggagattctgtgtacggagagaagcgtgcttccattcagggtgtggaaccccctttccgttcgaagctggctactattgtgcttggtggtgttgacaacatctggattgctcctagtactcgtgtgttgtatcttggtgttgcttctggcacaattgtgtctcatatgtctgatattcagaatcccttccctttcatagtgcacatgtgtaatgatagaaagaaaaggtga

SEQ ID NO: 25705 - DNA, 604 bp, Zea mays
  Peptide Sequence Number=SeqID_69080
ccgccgccagagacctgctcctgtgttcccggccatccagctcgccggagaccgctccaagcctccccaagctccgccccgaggtgagacactcgtccccgtgcctaatttcccctattgcgccctgtgttcggccaatttcaccttcgccggtgctcggccacggcagtccaccgtgctcgcgcggtggctggccgatttagcccagtctagatcaccggagttggtccctgggtcacccctgtctcttctgaagccacccaaggccttagtgcgccttaagtcccctccccatggccggaatcgctcaccagagttactctggcccgcccgagactctctcaccgtcgttctcccctctctgcccatgggattcatggcctcttcctcgccattgagttcgcccttgcgccagcctcaactccggcgacttcaccgccgcggagaggagcggcgccgcttcgcgcacgtctgtttccaccggtctaatttcccacgtccgatcttgatcgcacagcacagaccgcgggataccacttcgtgcaggggcgatgctggcaacatggatgacttcaaggagttccaggaatatgacgagttttag

SEQ ID NO: 25706 - DNA, 399 bp, Zea mays
  Peptide Sequence Number=SeqID_69081
atgggctcgtctcgagtctcaaaacgtatttaccacgtctcagtatgctatgatagtactcagactcaggataaaagcatacatgacgggagacatggtcatgacgaaggttgccgctgctccgaagctacgctcaaagggagcttcgattcaatcgcagaaaaaggaaccgacttaaaggggaaagggctatttagtcctcatagatttatctataagtcaatagtaaattatttgagaataagtccccaacattggcgcccacctcgagtgaacgcttttttcgaccaccttcggcaagcactgaccttcgacatgccgccgaagaaagtttcagcgctaggggctaccgcactgcagccactggacccaaatcaggagattcagagtataacataa

SEQ ID NO: 25707 - DNA, 741 bp, Zea mays
  Peptide Sequence Number=SeqID_69082
atgcaccaggggagtctttataaaggatacgtagtgtatccttggccattcaccttggtagtgaagatcgggtctgtacaacccaggctggaaagggatgacgacttgtggatggcccgtatcaggtgcactgcacgtaagtctgtgatccactttttgccttctcgcctggcggagcgtccactgtgtcgcacagtgccaggtcagtccagtcacctggagagactgcatcgtcgcctacacgaagagtgggaacgccgatgccaggagcaggagcagcaggactcttccccctcgcctcagcgggaggtggagtctgagaggccgccttccccagcacctcagccagagatgccccctgcaccaccacagggcatcacggctgctggaggagaccctgacaaagatgaagacaacgacgacgccggtggcagtttgagccacaacacggagctctcggaggagccagagccgaacggatggatcgctagacccatcactcatgacgccgctctcgggtgtcacttctacgacgcgctagacaccctgctacgtcgggccttcgaccgacacacttggtccatcgagtaccgttgtgtagtctacaagcattgtcgtgggttatacccagatcagtgggagaattctgaaattcagaccttgagccaaagatcagggatgttcaccttgatccttaactcgaatcctaatggccccattgacaaaattgtgtctaactaa

SEQ ID NO: 25708 - DNA, 372 bp, Zea mays
  Peptide Sequence Number=SeqID_69083
atgctggtagaccacacaacgatactcaatggaccaagtgtgtcggtcgaaggcccaacgcagcaaggtgtcgagagcatcgtgaaaatgacaaccgcgagcggcgtcacgagtgatgggctgggcgatccatccttccggctcttgctcctccaagagctccgtgctatgactcaaactgccaccgtcgtcgttgtctcagtctctgttagggtctcctccagcagtcgagatgccctgtggtggtacaggggacatctctggctgaggcgcaggggagggttgcctcctagactccacctcctgctgaggcgagggggaagagtcctactgctcctactcttggcatcggcgctcctgctcctcgtgtag

SEQ ID NO: 25709 - DNA, 1914 bp, Zea mays
  Peptide Sequence Number=SeqID_69084
atggacggcggctgttgcgtggggagcggggtgcgggcgacagagcgtaacggcgacgggagcggaagggcgcctagggaggcgtggagcacgggctgggccagagcaggcaccgcccaggcgatgcctccggcgctggggacgcaaggcaggggcgggggatgtgccactgcgtgggcgtgggcgagatccaagggcgggggctcggcaggggtcgcgagtgtgggaaagagagaggcgggggcacgacgggggcatggaaggccaaaagtaatattcaaaaaacatttgaggtgcttgggtgaagaatgccacaatggaattggatcgacggtggtgcccccactcaaagcagctgcagcttatcaccaccgcctcaggctcaggattgcacggctccgccgcgctcgaattccccccaccttccaccaggccagcaccatggccactaccgccctcctcctccgcactcaccaccatccctgcaagccgccggcgccgcgcgcgtccgtactctgccgcgccacggcggggatggctgggccggcgtcggccgcggcgctgcggtccctggccccgcccacgcggccggagctgctgtcgctcgacctgccccgctacaacccagcgcccgcccgccccgtggacctcgccgtggtgggcggcgggcccgcgggcctcgaagtggcgcagcgcgtcgcggaggcgggcctgtcggtgtgcgccatcgacccgtcccccgcggtcgtgtggcccaacaactacggcgtgtgggtggacgagttcgaggccatgggcctctcccactgcctcgacaccgtctggccctccgcctccgtcttcatcgacgaaggcggcgccaagtcgctcgaccgcccctacgcccgcgtcgcgcgccgcaagctcaagtccaccatgatggaccgctgcgtcgccaacggcgtcgtcttccaccaggccaaggtcgccaaggccgtccactacgacgcctcgtccctcctcatctgtgacgacggcgtcgccgtcccggcaagcgtcgtgctcgacgccacgggcttctcgcgctgcctcgtgcagtacgacaagccgtacaacccggggtaccaggtcgcctacggcatcctcgccgaggtcgacgcccacccgttcgacatcgacaagatgctcttcatggactggcgcgactcgcacctccccgaagggtcggagatcagggagcgcaaccgccgcatccccaccttcctctacgccatgcccttctcccccaccaggatcttcctcgaggagacgtccctggtcgcgcgcccggggctcgccatggacgacatccaggagcgcatggccgcgcgcctcaggcacctgggtatacgcgtccgaagcgtcgaggaggacgagcgctgcgtcatccccatgggagggccgctgcccgtcctgccgcagagggttgtcggcatcggcggcacggcagggatggtgcacccgtccacgggctacatggtggcgcgcacgcttgccaccgcgcctatcgtggcggacgccatcgtaaggttcctcgacaccggcaccggcaacggcatgggtggcctggcaggggacgcgctctccgccgaggtgtggaagcagctgtggccagccaacaggcggcggcagagggagttcttctgcttcggcatggacgtcctgctcaagctggacctcgagggaacgcggcggttcttcgacgccttcttcgacctggagccacactactggcacggtttcctgtcatccagactgttcctgccggagctcttgatgttcggcctcgcactgttcgggaacgcctccaactcgtcgaggctggagatcatggccaagggcaccgtgcctcttggcaagatgattggcaacttgatacaggacagagatgggtga

SEQ ID NO: 25710 - DNA, 393 bp, Zea mays
  Peptide Sequence Number=SeqID_69085
atgtttacatcgcttgtacgtgaacaaggaggcaaagaggaagtgcaagaatgggccaatgaaatagttggcgacacccacattggcaagcggagacaagacttggtctatcagataggaaaggaaaaaagggtcaaaatcaccgatcaaatcgaagaggatgaagacaatgatgataacacaacccaccctagtgctggtgatgatggcaaccatggtgatgctggattatatggtgaaggagggagtggtgcaggagattggaggtccattggaggaccacactatgggtatgaacaagtttccgctgcactgacctatcactatgacagattgaaacaatatcacgatccttacaacatgcctcagtactatcacaatgactcgagctga

SEQ ID NO: 25711 - DNA, 432 bp, Zea mays
  Peptide Sequence Number=SeqID_69086
atgaacaacagatttacaaagataagagagcaaggttcaaagggaaagaaaagcaacccactagtgcttgaagagcttttgtgggaaaatgagtgggttcaggagtctgaagaagatgaggagctttggagtgcagtagatgaagttttaggtgcaactcaagctacccagggcagaaacttgcctagggcatcagctgcacgtggtgggaggacctactccgagacctatgttaggagtaggaagcgccaaaaagttgcagtagctcaggacttgcagcaaggagatggcagtgacagtgacagtcacaacgaaaatgatcatcaaaagcaaactcaaaatgaccaagatgctgcaggaaaagcgattgatgaagaagaagaatctgtggctgctagtgatcaattcaagctggatgatgatctcatatag

SEQ ID NO: 25712 - DNA, 321 bp, Zea mays
  Peptide Sequence Number=SeqID_69087
atgggcatgggtagcaggttggggaggaagaatagggcgaaggccggaaagacggacgaggcggatgcaaaagggagagagaaaagaagcaggatggcgaatgaggtggcggcaactaaggtgaggaccatcattatcgtgcagaggtcagcagaccgacgtgccatgcctgggccagagctgcgggccgcgggcatcgagcctagcgggcctgtgccgggcagcccgtttggccatctatatgcagagaggctgggcctgggcctggacctggacctggacccgacctgctcaccaaccaaccaacctgcgtacgtgtga

SEQ ID NO: 25713 - DNA, 432 bp, Zea mays
  Peptide Sequence Number=SeqID_69088
atgagggtgcaggaccacggcggcgttattgctcccctctctattggcgacgatggtctaatttgtgctgtcaataaaatgcagtaccacaaaactattgacaagaggaaaggcccttataaattctcaaaggtcttacaaacggtggtcgaggcacgacggggtctcgggtcgacagtggcggagctgctgcggtgcggagaaaaggccgatgagcatggaccgagagaaatagaggggaaaggagcgaaccgaggggtgtcctgggttgctggcgaggaggcggagctcaccggggcaacgaacgcgacaggagctcgacgacggccaccgaacggacgacagaccacgatggagctccacagagtgtcagaaactggtatatcaatcgtgctcacggttaaaagcggccttgggatcctctttgattag

SEQ ID NO: 25714 - DNA, 660 bp, Zea mays
  Peptide Sequence Number=SeqID_69089
atggaggagcaggagccagaaggatggatcgcatggcccatcactcgtgacgccgctcgcggttgtcattttcacgatgctctcgacaccttgctacgtcgggccttcggccgacacacttggtccatcgaataccgttgtgtggtctaccagcatcatcgcgggttatacccggaccagtgggaggctacttgcttggtgagtcatcaggatgatgatctccaggcttcagaggccttctcagagcactattctatcactgagagggacactgccaaggcagccatgcaggatgttgcacggcatgcgctttcccagtactgtacgttgttcagcgggatagctgacggcctcgacttgaagtactaccctcgccgtttgaccggcagtgccagaggtgtgattgtctcgcccgttggtgagggaaatcctaggttgtgcagcatggtcaacctggtcgctgtgctcaacactgagctggaccacgcccttgacgagttgggcaaggctcgggcggagatcgtggaactgcgtgctgagtgcgcggtgcgccaccatcaggagggtggttcctcgctcctgtcgggattcagcacccttaccgctcgtcgtcccgtggtcattgtggttatggcacccctgactacaggacccagatag

SEQ ID NO: 25715 - DNA, 309 bp, Zea mays
  Peptide Sequence Number=SeqID_69090
atgggaaccaatgggcatctcgacctcgacatgggaggtaaatccgtagatcaaaaggtataccggtcgatgttgggggccttcggcatccgaaggtcctcaaaaacaggatttaacagtatttctggaagtataatgtgtgagcaggtgaacagtacccccgtactgttcacgctgacttggcattcgctttttgcgtcacacttgtattgtcatctccttccgattgaaggtatgtccttcataaccttcgtctgcaagccattacgtcctaagggaaataatgctttggaggacgaaggactttaa

SEQ ID NO: 25716 - DNA, 597 bp, Zea mays
  Peptide Sequence Number=SeqID_69091
atggacgagagttgcactcaactcctctcaagtgatccaatgatcaacttgaataccacggtgttcttttcactttgctcttttcccgtttgcgaggaatctccacaacttagagtctctcgcccttacaataagaatcaatatgaagcccacgaccgaccgttggcgcttttggagccgttggcgcaccgaacatttgtccggagcacaccggacagtccgaaatggcccaaggcacatttccctttcaatcacgacttcgacaagttggcctcttcttcgagtgatgaggagcttgagaggcgctttgaggaaaagctcaatggactctgcttcatcgccgatactgcaggaggcctttacaccatggcccttggtgatgatgcggtgggcggcgatggcaagtacattggtgacgactctgcttctgaggtatcacattccaatgatgatcttgtcactgaggtagaagagttgaacgctgctttggaaaatcaagacatgttgcttaagcttgctgctcgtgagaggaaagagtttaaattcaagtatgagagcacacttgtgaacttgagtctgctagagcttcagttgtga

SEQ ID NO: 25717 - DNA, 615 bp, Zea mays
  Peptide Sequence Number=SeqID_69092
atggagagtcatgatctccgggcagaaagggaatcacggcttgtgggtggttatgagattgatggtttcggttatgactatggtgctgctagtccactacaaccaaacaggatgcttgctgagtatgttgatgtgtactcacccttgctctacacaccaaaccccccccatccccaggttgtcagcattgcaaccactgctcaggcgaagatgaagctgtggaaggagacttccaggagttccaagactacgacgagttctaggtgtgggttagcggcaacccccagtcggctgcctgtgaaggccgcggttatctacgtttcttttccgcactttgatttatttgtccacttaatagggaggcgagtatgcaaaatcggcagaagttctggccacacgactggaactgtgatggcttatgcccttgagtacaattaccagaaaggaataagcttcttcactgacctccttgtcgtcagtgagaaccgccaaacatttgatctagaaggtgatagtggaagcctcattatcctaactagccaggacagcgagaagccgcgtcccatcgggataatgtggggtgccacagcaaaccgtgggaggctaaatgcttag

SEQ ID NO: 25718 - DNA, 219 bp, Zea mays
  Peptide Sequence Number=SeqID_69093
atggtgggtacaagtgcggtcactgcacgacggccagtcggggtcagtgaggcattgtacgccaaggcggtgagccctgatctgctgacggggaatcgatggggacggttgatgtacctccttgaattggttgatggtgtgacttggccttcgtccctgccaccgggatggacggtcaagtgggttattgcttccgcaggagacgaccaagaggagtag

SEQ ID NO: 25719 - DNA, 117 bp, Zea mays
  Peptide Sequence Number=SeqID_69094
atggccccacgcgccagggtcccgggaacaccgtgcggcacgattgagcagctggagcgcgagcccacacgccagtgcggcatccgcgcgcgcgggaaaaaaaaggatatcaggtaa

SEQ ID NO: 25720 - DNA, 978 bp, Zea mays
  Peptide Sequence Number=SeqID_69095
atggtgaagggcggtcatgcaatgcatgtcttaaatgctgaagagaacgaccaacacctcacaacaggcctgatggcattctcacctcctataaaacgtcttgcagaactggacacgttcaatatatcaacacggtcaccaagtcctctccggatggcaaggccttgtgaccttccgccggtgcggcaagcagcggctcttctcctggcatgcgcgcttgctctgctcgcggtgcagctgcggccgtgcagagcccagcagcagcagcagcctccgtcgccgggatactaccccagcggcatgttcaggccgctgggcttctccgaggcctaccgcaccctgtggggcgcgcagcaccagacgctgtcgccggacggcaagtccctgacgctctggatggacagcagctcgggcagcgggttcaagtctgcgcgggcgtaccggaacggctacttcggcgcgtccgtcagggtgcagccggggtacaccgccggcgtcaacaccgccttctacctgtcgaacagcgaggagtacccggggcaccacgacgagatcgacatggagctgctggggacggtgccgggggagccgtacacgctgcagaccaacgtgttcctggtggacgacgtgcccgtcaggcggtacgagaggaaggcggaggccacgttccctgaccgggagatgtgggcgtacggctccatctgggacgcctccgactgggccaccgacggcggccgctaccgcgccgactaccggtaccagccgttcgtgtcgcggttcgccggcctcagggtcggcgggtgcgccgcggacgcgtccgcggactgccagccagtgccggcgtctccggcggcgccggggacggcggcgatcagcgcgcagcaggaggccgccatgcggtgggcgcagcggaactccatggtgtattactactgcctcgactcaaccagggaccgcgcgctctaccccgagtgctga

SEQ ID NO: 25721 - DNA, 348 bp, Zea mays
  Peptide Sequence Number=SeqID_69096
atggccgagctcgccctcgcctcctgctctccatgggcgtgggtccccatcctctccctcctcccaaagtgcagcagccgagctcgccccacctcccctcgctgcgcagcccctcggcgaaacgccgctgttcctgcaagccccggcttcctcgctgctaccgctgcgcgtatgccaagtgctcggcataatgtcaagggagatgtgttgttgcagcacgttgtgacgctcgccgggtgttcactgtttttggcgcagccccgttcgcgatgtcgtcgaccctcgctagtggtcgacgccgcgcttcgcgccttgcccgttcgacaaaatgccgagccatgtgtatag

SEQ ID NO: 25722 - DNA, 231 bp, Zea mays
  Peptide Sequence Number=SeqID_69097
atggagattttgaattcccattatggcatcatcaaacatctcatcaactccctcaaacttggagttgagatcactgaactacatgtccatgtaactcctcatctcctgaaaccgaggagtgatagagttttggattccctactgcatgctagcaaagtaaggatcaaagtacccaagggtagcacccagaactgttgctactatggtggtggaggaggaggcatatgctga

SEQ ID NO: 25723 - DNA, 1101 bp, Zea mays
  Peptide Sequence Number=SeqID_69098
atggagcctggcggagggacaactgtcggagcggttgagtccttgctgacgtcctcttgcttccgtaagggggctgagagccgccgtcgtcacagagtacgcggggcgccatcattgcctatctggcgcattcggggtagggtgatgatggcgcctcctgttgacgtggctggtctatgccctaggttgggcgatgtggaagctcctccgaagccgaggtcgagtctgtcttccgtggccgaggtcgagtccgagcccctgggtcgggcgaggcggaagccgtcggctgaggctagggcggagtccgagccctggggtcgggcggagcggagttcgtcgtcttctggggctgagcccaagtccgagccctgggtcgggcggagcggagttcgtcgtcttctggggctgagcccaagtctgagccctgggtcgggcagagctgagtttgccgtcttccgggacttagcccgtgtccgagccctgggtcgggcggagcggagttcgccgtcttctggggctgagcccgagtccgagccctgggtcgggcggagcgtagttcgccgtcttccgggacttagcccgtgtccgagccctgggtcgggcggagcggagcttcctatggtgccttcggcagggcctgactgcctgtcagtctcactctgtcaagtggcaccgcagacggagtggcgcaggcggcgctgtcctttctgtcaggccggtcagtggagcggcgaagtgacggcgctttatgctgatgggggttaccagctgagaattaggagccttgagggtacccctaattatggtccccgacagttctcttcttgccttgtgctgtttataattggaccccgcctgagggtgcttgacagtttcatggtatacccttggatgttaagatttggaggtggtcctccttcagttggagatggccctaatgcttttcctttcaagcccttagatctgaaatcctcacactacactgctgaagcaatgaaggagagcaaagcagttgttgtcccaagaaccatatgctaccagaacaagaaagatgagagcggttggtggccaaggctcctgaaaaaggacttgtgttcttga

SEQ ID NO: 25724 - DNA, 1347 bp, Zea mays
  Peptide Sequence Number=SeqID_69099
atggcggcgacaacccacgccgcctccatgtcgttcctcctctcccacccccagtcgcgctctgccaccccaagctgccacctcccgctccatctggcagcccgccgcgtccggtgcgccaccgacgccgccgcactttccccggcggtcaacaccaagcaccggcgcacggcggatgagaacatccacgaggaggcggcgcggcacccggccctgaagcagggcctgtcggcgtggtacgagcccttcccgccggccccgaacggcgaccccaacgagcgctactccctggacgagatcgtgtaccgctccagctcggggggcctcctcgacgtgtggcacgacatggaggcgctggcccgcttctcgggcgcctactggcgcgacctctttgactcccgcatcgggcgcaccacctggccgtacgggtccggcgtgtggtccaagaaggagttcgtgctccccgagatcgagcccgaccacatcgtctccctgttcgagggcaactcgaacctgttctgggccgagcggctggggcgcgaccaccaaggcaggatgaacgacctgtgggtgaagcactgtggcatctcccacatgggctcgttcaaggacctcggcatgaccgtgctggtcagccaggtgaaccgcctccgccgcgcgccgctgtcgcgccccatcgccggcgtcgggtgcgcgtccatgggggacacctccgccgcgctctccgcctactgcgccgctgcggggatcccgaccatcgttttcctccccaccaaccgcatctcgctggagcagctcatccagcccattgccaacggcgccaccgtgctctcgctcgacaccgacttcgacgggtgcatgcggctcatcagggaggtgaccgccgagctgctatcatcatctttatgcattattttcactgcatttctagagcaaaagcttgtggaatttgataggacggagaggctgaatcattttgttttaactgattccgatatagcagtggttgatgatcttggacatatatttgaaaaatatccccattttcatctggctgttacttttcgtaataacaaagagcaaccattgaattctgggtttgttgctgtaagaggaaccagggatggcatcactaaagctgtggaattcttgaaacaagtccttggaacttacagcttaagatatattaaggcttcccgtatgcttggtgaccaattagcacttgcatgggtcgtcaagtctcatctaccattggctttgggaaaattttctaagcatgaagcatttactggtgaagttaatggaacatctgttcttgtcggcgtttcgagaccggggggtccctga

SEQ ID NO: 25725 - DNA, 312 bp, Zea mays
  Peptide Sequence Number=SeqID_69100
atggcgtgcagaattggaagggagagagagagtgattgtgcgcctgtgcggatcctcaacgagcgcgtgatggaccgccatccagcaggctcaccggcgatgccccgttgtggccacaggcagcgccgccgttaccaggcttgggcgatgggggtggaatatgggccatcaatcccagatgaagggctgagatttgatcccggattctggttcggcctgaactcttctcggccgtccgatgtggatccaggcgcctggtcgaagatccaacgacaaggattgcataactcttcgcttaaaggattcatttaa

SEQ ID NO: 25726 - DNA, 330 bp, Zea mays
  Peptide Sequence Number=SeqID_69101
atgcagagcaagcctaggacgcgcgtgctggggcgttggcgagatctcaggcggggtaaatcggcgttctgttgtgatcccgtgatccagttgcgtcgaccccagcgaaatgtgcgatggatgtttccgtcgccgccgcacgaggtggaggacgacccaggcctccttggcccacctgccagaggcgcgagacgccaagttgaccgttatggagagcaaagtgcctcagaggctgacgagagcgacccaccgacagaggtccacgcggcgcgcggcattgaagcggagttgaggaagataccgctgacgatcgggcccaccaggcggtga

SEQ ID NO: 25727 - DNA, 702 bp, Zea mays
  Peptide Sequence Number=SeqID_69102
atggctgtcggagaggtgttggtgccctgttcatgtgatgtcgtggccgttggaggagcgcttgagccctgtagaagcacagctgtcggggctgtcggcgtggtcggtccgagcccaaggccgggcgaggtggtgactcctccgaggtcgaggttgagtccgagccctggggtcggacgaggcaaagaccgtcttccgaggtcgaggctgagtccgagccctagggtcgggcgaggcggagaccgtcttccgaggtcgaggctgagttcgagccctgggttgggcgaggcggagaccgttttccgaggtcgaggcgggggccgagccccggggtcgggcgaggcggagcttcctatggcgcctaaggctggactcggctgctgtcagcctcaccctagcgggtggcacagcagtcggagcagggcaggcggcgccgttttcctgtcagttggcgaggcgatctggccaaggttgcttctccgtgaagcctgcccgagctgggcctcgggcgagttgaaggtgcgcccgttgcttgaagaggccctcaggcgaggcgtgaatccacctgggtctattattcctgcccgaggctgggctcgggcgaggcgagatcgtgcccctggagtggacggagctttgacctgtattgcgcccatcaggcctttgcagcttgtgctgatggtggttaccagccgagtttag

SEQ ID NO: 25728 - DNA, 435 bp, Zea mays
  Peptide Sequence Number=SeqID_69103
atggtgtttgaggttgcctctgtcagcaccccgctatgctccactgcacctgaggtcaccaccattgacctccagccacacatagtggcattcgaggttgctaccgtcagccagaatccaagcacaggtgaggttgaccgcactggtcagccactatgttccatgcatgacggaggtggtccgctggctacgatgagcactcccattcgccagggggcttacaaaggcaagaccatgacccacgattggctcatggtgaccatcactctcaaccaaggtcagtctgtggccttgcccaaggtagctatcggtcgtgatggccctactaagggagccaccaccaacatcggtagtgtttcaagggcagggcagtgccaagacctgcatggtccattacgtcggcctactactaggccccacatcgccaaggcctag

SEQ ID NO: 25729 - DNA, 1383 bp, Zea mays
  Peptide Sequence Number=SeqID_69104
atgcaggcggcatgcaactgcaccacggggacacaccctttcgacttcaatgcatccagcgtggaggcccaggcccacacgtcatgcgggcggaagcagcagtcaaatcgtctgcaggctcacgtcccctcccgaagcagcaggggagctctctcccacggcgtgaagacgacgcgcccgtgttccgtccctcgaatggctcgcgccacggctgccccgcaaaccactcgtcccgttgcattaactccgtggcagggcaggcgacacctttggcaggcgaagcgggtgacgcttcacctccgccatgatgaccgcgtcaaaaaagggaccgggaaaggggatactacgaaagggatccttctctgtgaaggaagcgggccccgagccctcctactgatcaggggttcgaaggctggcccctcggaaggggctggcccctcggaagggttcgacagccgccttagagcacttgggctccacgcccactactggtcagaggttcgaaggctggcccctcggaagggttcgacagccgcctcaggccactcgggctccgcgcccactactgatcaggggttcgaaggctgcccccccgaagggttcgacagccgccttagaacacgcagagcgagggatgactctgggtacgtccgatacatggccgaggctcgggctacgctcccaaggagcattcaatgcaaggatcgcctgacaccttatcctgacgcgcgttcctcagttgacagggccgaagaaaacggcgccgcctgccctgctccgactgctgtgccacccgctagggtgaggctgacagcagccgagtccagccttaggcgccataggaagctccgcctcgcccgaccccggggctcggcccccgcctcgacctcggaaaacggtctccgcctcgcccaacccagggctcgaactcagcctcgacctcggaagacggtctccgcctcgcccgaccctagggctcggactcagcctcgacctcggaagacggtctttgcctcgtccgaccccagggctcggactcaacctcgacctcggaggagtcaccacctcgcccggccttgggctcggaccgaccacgctacaggggggtacatcattaccctacccctagctagctcaggctatggggaacaagaccggcgtccgatctggctcgccccgggctcaagcgctcctccaacggccacgacatcacatgaacagggcaccaacacctctccgacagccatgtcggcatggccctcgtacgggaaggtggccgcgcgggaggacgggctgacggacagtctctctctctccctctccctcgcgaacgcttggaccccctggggtcgaaacgccgacaatagtacatatgcctattag

SEQ ID NO: 25730 - DNA, 219 bp, Zea mays
  Peptide Sequence Number=SeqID_69105
atgtcgttgtccgaggccgggtcggattccgccgaaggtggggtcgatgccgagggtgctgctgctccacctactgatgacttgtttgtcggtagcagaatcgtttatccgagcgagagttacttatcacgggaggtgatgagtgaggagtccctcggctcggtcggccttgccgcttacgtgtactccgtcattttcaggatcccactatcgaagtag

SEQ ID NO: 25731 - DNA, 621 bp, Zea mays
  Peptide Sequence Number=SeqID_69106
atggacagcagctgtcaccctgctgcagataatcaaggccacctcaactctgcccgcaatggcagccacctacgcagagacagcaacggcgcagatctgcagccctgcccacaagacgaggtgactgcgatgggacagcaggcagacagcgtccctgttgttgaagatgcagagcagacagatctgcacagggacccagggacagcaggaacgcagagcgcgcggcacctcgcgcgcaggagcacaggggagcacgctgcgcacagggacggcaggatccgcggccggatcggcgcggctggatccgcgcgcacagggacggccgccgcaaaggccggatccgcggccgcgcgggacaggacggccggatccgcggcgcctcgcgcgcagaggctgaggggcggccggatccgcgatggcggctggatccgcgacggagcagaggcaggggcagccggatccgcgacagagcagaggcaggggcagtcggatccgcgacggagcagaggcaggggcagtcggatccgcgacggagcagaggaaggggcggatccgcgactgcggcgatccgcgcgacggagcagaggcaggggcagccggatccgcgacggcggcggctag

SEQ ID NO: 25732 - DNA, 81 bp, Zea mays
  Peptide Sequence Number=SeqID_69107
atgcccaagcccatcaagacacccatgggaactaatgggcatctcgacctcgacacgggaggggatccacttttgatttga

SEQ ID NO: 25733 - DNA, 132 bp, Zea mays
  Peptide Sequence Number=SeqID_69108
atgacaactgacgggccactggagctccttcacatggatttattcggcccgatagcttacataagcatcggcgtgagaaaaatcacaaacccaagagacattgaagggattcttgagacgagctcaaaatga

SEQ ID NO: 25734 - DNA, 351 bp, Zea mays
  Peptide Sequence Number=SeqID_69109
atgaaccggtggatccctcggtggtgtacgcaagtggtggtagcaaagcgcatggacgtgagatctcagagaacgggttcatcttcccgtagctcatgctcttgtcgaccgaacgagcaggagttggagattatgaggatgcgtgaagagatgagacaacaacgtgaatttatggaggcttgcaatgcacataaccaagcgatgtatcaagttacgcctgaagcgggtggcagtgggtctgatccagcagtagggactggatttgttgactcgctcttcgcgttccctcctcctggtggtgaaggcggcagcggtcaaagctctaaccacccaagtggtggttatctctaa

SEQ ID NO: 25735 - DNA, 666 bp, Zea mays
  Peptide Sequence Number=SeqID_69110
gcgctgggacaccgacccagtcggctcgggctacccgacgggattgagcaacgcaagaacgcgcagctcggccgaaacaaatcggcctgtcctactcgagtagtccgatccggacgcgtccgcatctcccgcgccgcgccccgagctcagacgcatcggccccgctccggcaagcccgtcccgagcttgggcgcgtccatcggtcgcagctccggcgaccaggccgcccccgcgcccggccgcccctccggcgagccgcccctccccctcccgtgtccggctcggccccgccctcgcgcccgctccggcgagccgccccgcgcgcgctccggtgagccgtcccccgtccccgcctcggcgacccgcccgcccggttccccggcgagccgctcggcccctgcgccccgccccgcccctcggctcggccggccgtggtggcccggcgtcctcccgcggcgcggcgagccccgctcgcccgcgcgcgcccgcccccggttcaactgccccggccccggctcggctgctcccgccccgccccggcccggtggttatgagattgatggttttggttatgactatggtgtggtattcttttcgtttggaaagggcgaagatgaagctgtggaaggagacttccaggagttccaagactacgacgagttctag

SEQ ID NO: 25736 - DNA, 2475 bp, Zea mays
  Peptide Sequence Number=SeqID_69111
atgcaagtagtggagttggttccatgcgcccgcaacaagtggggcaactggaatgaattttggttttacgttgttgagggtaccgtcgaaggccatgagggactccccgtgtccgagatgtgctctcattattactcagcgtatccgccctttgaagtgacagaggaggatgcagacgaaggggcccttcggtgcgccgccggtcagagcagtgggcgcgatttagttgaagagttcgtggcgtacggggtgtggcccttggtgcatggctgggcgttgggcgaagtgtgccctcgccagatgccttttcacggaggaagggaggatggggcggtgcggctcgtgggacgttacgtgccgaggacggaaggccagcgcagctttgatatccgcgggtcaaatgaccgttcgaacagggttttcgagttaaatcaattgccgtacgacggctatcctggtcaagacgacgcggaccaccgtggaaagaagccggtggtggagactggagacgactctgcgccggcggccgccccttcctccaaaaagagaaaattaggtactgctatgggaggacttggggtgtctgatagttttgctagagagttgatgaggacgtgcgcggccccggggggaaggatgtcttcgcccgagctccgggagtcttcggctcggatgctgagggttaccgggggttgctggcctaggaatgttcctatcccctgcgcggctggcgaggactgttttacatctcgcatggttcgtgaatggagagtttttccttacgggcggaatattgctgctgttgtgtcggcagtgatggacaaggatcgccaaggggcagcgcaaaaacgccaggcggttgtcaggcttcatgaagctaggccgaaaaggcagcgggggactgcgaaggctgcggcctccggcggaggcaagccgccgctggcagcgaagtcgggcgcctctgcatctagcaaggcgccggaggcaacggcaggcgccggaggctccaaatcgacgaaggtggtgccgccggtcagcggagtggcagaggtcgcgaaggcggcccgagcgttgccgttgtcgggcaaacggtcggacgaaggccaacttgctatagttgcgcctgccgcggcgatcgcgacggctgccatagtgccgaaggcgaggggcgaggctcttggcgccggaggcgaggtgtcggccctcgcggttgtcagggacgaggcgggcacagcgacccgccggctgaaggaggtgacggaggcgctgagtcaggagaggagggaggccaacgaggccgtcgccaaggagcaggctacgcaggcggaggccagactggcgcgggcggaaggcaatcttgccagggagcgcgccgaacatctgcaggagcggctcaccgccctggagagccacgtgaagggggccgaggccgcgatgcgtgcggaggccgaacggacgcgcacacagcttatggatacatatcgtgagctgggtgcgcggaccggtgacttcgaggtgccggaccgagagcccgggcttcgctgtctggaatgggtgcaggaggagctgcaggaacaccccactgtcgtgggggggtttatgtcgtacgcctccctggtcacctgcgagggggcgatgaacgcactctcccgcgaagggtgccggcacttcgaggtcttcgaccaggcagatgaagattttgagcgagatgtctataaggtcgaagaccctgtggtgaaggaatccgccggggccctctatgaccggatgtggggtccgcacggtcgtgaggtggtcagggagcgggccgagactgcgagggctcaggcggcgcgtggcgagcgggtggacgacttcggggcgttgaacagcgcgctgcctgacccggagccgacccctgcggaggccgtgtctggggtcgccctggagccaaccccggagaccgcggaaggcgcaccggatgcccccacatctgctgcggcctgcgaagacctgcccccaaaggttcaagattttgggcctgcgcacgcaaccgctactactgaatttttggcggcttcgaccgcggaaggtggtaatgaatatggtggatctgcatctgagttttttgattttactgactctgggagctcggttgagtggactgaggagtcgtcggaggaggacttggactattttgcggccttggacgtggctgcggcggaggcttcgccacacgccgcggacgcgcaagatgtgccaggtcctagcaccgggcgccgacgacgaagggcggttgcaaagcgtagggttagtacggaggaaggggctcggcttcgtgtgagtagggctggtcggcaggaactgttgtctttgccggccgccacgagtacaggggaaggggaactgcgaagtctttttgcgggtgaggagcttaggataatgttatttaattatagggagatgggaattattcctaaggttgagccgatgtag

SEQ ID NO: 25737 - DNA, 144 bp, Zea mays
  Peptide Sequence Number=SeqID_69112
atgagggtggtgatgaggaggatggttatgattatgactatggtaatggttgcctttggtgcaatctatgctcaggtaaagaaggagaatggtgtcgatgcggatctccgggagttccaggacttcgacgagttcaaggattag

SEQ ID NO: 25738 - DNA, 603 bp, Zea mays
  Peptide Sequence Number=SeqID_69113
atgttcatcgtcctcgctagggtggaaggcgggccgagttggggtcctgccttccgcatgggctggcgacccgcttcttccttcagcattcgggggagaagggcgttcaccagccttgcggaggatgcgaacttcggctacgcggggccggccggctgcaggcaccgtcagctgtcgcgtgcctggctccttggcctagatggctttggcgccgcctccggcgctgcctcctgccgcttggtcggggtgtggctgtccgtccaccacacgggcaatgatcgcgccgtgcgcaggacagatgggaaccgtacgggtgggttagataaaaagtatcatctgaaaaactacaagaccaacaggacgggtttatggggacggaccccactgggttggcgtacacggtccttcccagctgggggacgtggagcccttcttggtttggtacttgtcgtagggctaggtcccgaccctgggttcccatccgcgttttacgtgggagccctcgtcttcggctgcgaccatttctgcatgatcctgtcggaagtctggtcccgtggggagtccagaagggtttccgggggaagacagacttcagcctcgtag

SEQ ID NO: 25739 - DNA, 1911 bp, Zea mays
  Peptide Sequence Number=SeqID_69114
atggcggcagcggcggagatcggtggtttcgcggcggcgagagtggcggtggcgacgctcaggccggctgcgcacccagccccggcggcggcaccgcagcagcctaggagggcggtggcggcgcagtcgctgcggacgaccgccaccgaggcgctgacggcggatctcgccggcacgaccaacggcgctgtgcatgctcggatgaatagtaaggctacaagtgaaatcacttcacaggcagttactgcaaattctaggagaaagacaaagatagtctgcaccataggtccctcaaccaacactcgtgagatgatttggaagcttgcagagactggaatgaatgtagcacgccttaatatgtcccatggtgaccaccagtcgcaccagaaggttattgatttggtcaaggagtacaatgcacagaacactgatggcaatgttattgccattatgctggacacaaagggtcctgaagttagaagtggggatgttccagagccaatcatgctcaaggaaggtcaagagttcaacttcacgattaaaagaggggtgagcactgaagacactgtcagcgtgaactatgatgacttcataaatgatgttgaagctggcgacatactattagtggatggaggaatgatgtcgcttgctgtgaagtctaaaacaaccgatacagtcaagtgtaaagtagttgatggtggggaattgaaatcacggcgccacctaaatgtccgtggaaagagtgctactttgccatctatcactgagaaggattgggaagacataaaatttggtgtcgaaaacggtgttgatttctatgcagtttcctttgtgaaggatgccaaagttatccatgaattaaaagactaccttaaaagtgctaatgccgatatacatgtcattccaaaaattgaaagtgcagattcaataccaaacctgcagtccattattgctgcttcagatggggcaatggtggcgcgtggagaccttggtgctgaacttccgattgaggatgttcctttgctacaggcagagattgtccaaacatgtcgaagtatggagaaaccagtcattgtcgctacaaatatgttggaaagcatgattgaccatcctactcccactagggcagaagtttctgacatagctattgcagttcgggaaggtgctgatgccatcatgttatctggcgaaactgctcatggaaagtatccactaaaggcagtcaaggtgatgcacactgtggcactcagaacagaatccagcctttataacccaactacttctcctagtcttgttgcatctgcacagggtctacagaatgaggacttctccccaagccagctaagtaaaatgttcggatctcatgcaacgatgatggccaacacccttcgcacaccaatcattgtatttacacagacaggctccatggctgtcctcctgagccattatcgtccctcgtctacactatttgcatttacaaacgaggaacgagtgaagcaacggctagcactctaccagggcgtcatccctattcacatgcagttctctgacgacgcagaagaaactttctccagagcaattagcagcttgctgaaagcacaatatgtgaagaagggagactacgtcactcttgttcagagcggagtgacttcaatctggagagaggaatccactcaccacatccaagtgaggaaagttcagccttttctctgcttctgcgcatcatgtcaaggtgataaccttggcagcggatgtggtgacccagcagattgggcacggaacacacctgctgtacctcgtatcacgaccatccgcgaaaagtgcacgaaccacgataacgtaccagctgctagcttcggattccctgcaaggctgcaaactcgagcctcgccgcctcggtttttgctttga

SEQ ID NO: 25740 - DNA, 978 bp, Zea mays
  Peptide Sequence Number=SeqID_69115
atggctactgcccgggggatggacccctttttaaaggcagatttccccacttacgccccgaagcgtcacgggcaaggtctcctccgatgcgtactggggttcccaccctatgacacgggggccaggccccatgtgtcatacaggctgacccgaagtgcgaagaagaaaactgctacacaaggagcatgcaaccgccctgcggttatgtgccccttcgttttcgccgcaaccagcggtcagaaagacgaaccgccgcatgaggagcgtgcaaccgccccgcggttatacgccccttcatcttcgccgaaaccagcggtcaagaaggcgaaccgccacgcaggaagcgtacaaccgccccgtggttgtgcaccccctcagcttcgctgcaaccggtggtccaacttggatgtcatgcaaccggcgcaccagttactgggcgcgcaggagcagcaggccaaccgccaatcagactctagccccacctgcaggctcgcatcctcccctaaggcgggcccgggggccactttcgataccctgaatcaggggggcaccgcgcggcaagggaagatgatgcaccccaggatgcatcattgggtccggacctccacggatgaataccggacccctgtacgcacaacccggacccactattacgatctgggactcccaagaaggcaggccgggccttaccctacgtgctcgcgctacccgcgaaggtggaagcccgttgctgccgcgtggctggtggcccgtgacataagccaacgggcggagcctgactcctctccgctggcagacgacgtcagggtcatcctgcagatggcgcacctgtccagtctgttgtcaaacagtcgcccgtgccaagcagcgcactgtgctcaccatcccttatacaagaagcttcccctgcacgccgaggagacgcagatctcggatgtcaggacgcgagaagattgcaccagtggtgaatatctatag

SEQ ID NO: 25741 - DNA, 1236 bp, Zea mays
  Peptide Sequence Number=SeqID_69116
atgattgctgacagttctcgtccaggcgtaggtgatgagttggtcacccgaattgtaccgcttgagaacgttcctgctcgtgacctggcccccctgctccgccagatgatggatgcgggtagcgtcggtaatgttgtgcattatgaaccctccaacgttcttattctgaccggtcgtgcctccaccattaataaactgattgaagtcataaagcgcgttgatgtcatcggcacagagaagcagcaaattattcatctggaatatgctccgtcccaggaaaaactcgccacggtaattgcgcgtctggacattcgccgtgcacaggtgctggttgaggcaatcatcgttgaagttcaggatggaaatggactaaacctcggcgtgcaatgggcgaataaaaacgttggcgcacagcaatttaccaataccggattaccgatttttaacgctgcgcaaggtgtggctgattataaaaagaatggtgggatcaccagcgcgaatcctgcctgggatatgtttagcgcctacaatggcatggccgcaggcttcttcaatggcgactggggagtactgcttaccgcgctggccagtaacaataaaaatgacatcctcgccaccccaagcatcgtaacgctggataataaactcgcgtccttcaacgtggggcaggatgtgccggtgctatccgggtcacagaccacttcaggggataacgtctttaataccgtcgaacgcaaaacggtggggacaaaactcaaagttactccgcaggtcaatgaaggcgacgcggtgttgctcgaaatagagcaggaagtctccagcgttgactcttcctctaactcgacgctcggcccgacgtttaatacccgtactattcaaaacgccgtgctggtcaaaaccggtgaaacggtggtcctgggcggattgctggatgatttttctaaagagcaagtgtcaaaggttcctctgcttggcgatattcctttagtggggcaactcttccgctatacctccaccgagcgcgctaaacgcaacctgatggtatttatccgtccgacgattatccgtgacgatgatgtttatcgctcactgtcaaaagagaaatacacccgttaccgtcaggagcaacaacagcggatcgacgggaaatcaaaagcgctggttggctcggaagatttgccggtgctggatgaaaacacgttcaacagtcacgcccctgcgccatcgtcacggtga

SEQ ID NO: 25742 - DNA, 405 bp, Zea mays
  Peptide Sequence Number=SeqID_69117
atggagtcgccgacagcgggaggtcgcagatccagcgtccccaaggccagatccggaccttcactgactgaatctacggtgggtgacggtgggggcgtcgagcgcggcggcggcagtatccggcaaaggactacggcgagcgttggcgggcggtcggccgcgggcttggcggtggcgtggcgcctgcagggcgtgcatagcgcagcacctcgtatctcccaacgggcgggaacggcgccatggtggcgcggctctgaccccggcgcggcgactgccagccctgacgcgcgaggtgcggcgccgcggaggtgcacacccacttctgcgacagtggttggcagtgggaggattgcggctgcagacgccggtggaggccgcctgcggtggcggtggtcggggagttaa

SEQ ID NO: 25743 - DNA, 630 bp, Zea mays
  Peptide Sequence Number=SeqID_69118
atgcaaggcccgctcctggccggaggccgtgctccacgtcgagccatgccatggctaaggtcgtgcgcgccgctggagccagcgtcgtgcgcccgcgcttacagggcccgtgcgcccgcgaccgccgctggggccacgctgagtctgccccacggccggctgcctcgcccacaaccgtcgggacgctcccgcgcgccgtcggggctggtcagccgccgcggccggatcaccgcaccacggggagacgcgccgggacgggagacgccggggactacgctaccgcgccagagtcgtcccgagcggatctgcctgtgcgcgccgccggggactgcgcaccgagccgttgaggccgggggccgccgtggccgaaccgcccgcgcctggcaggctgggccgcgcccgcgcgcgccgggacaggagccaccgaggccggggccgtgctcccgcaccgaggccgccagcctggccggggctgcgctgccggtgtgctcctgcgagccgatggggctcaccaccgagccgaggccgcgattggcgggggtaggcaggggcgcccgagccgatggggctggggtcgccgcgccgcggggtgccgcgcccgtgacgccggtgccccgccgccgcgcctag

SEQ ID NO: 25744 - DNA, 300 bp, Zea mays
  Peptide Sequence Number=SeqID_69119
atggctgcgtacgatccaagcgcaggcaggcaggcaggcgtcaataattcctctgccagtgagctgcgacgcacgacaacagcaatgccaggcaggcaggcagctttgctgccgtattgcactagcattggaatgcaggtccaaaccatcatgaagcacataattgttgaactctatcataacgctcagtggcaaatggagattaacagagacaaagacaaatcgcaggggcatcctttattgcagagtagtgaagtatatatacaagagttcccaaggggtgtgtcccttgggaaataa

SEQ ID NO: 25745 - DNA, 567 bp, Zea mays
  Peptide Sequence Number=SeqID_69120
atggcgcatctccaagctggcacccccaaccaactgatgttgtcccctggccatcccagggcgacaatgatacaagtatttccacaacccgaaatgtggcagcacgcctgttggggcaaaggcaaagacgccacccttcgctcaaggccttcgctgcagtcgctggatagaattggggttcaaatgggtcaagttaagatggtagaaatcaaggaggctgcggaaaaagggagaaatgggaaggccaaggccgcggagaaggaaaggggcataaacaacagactcatgggtatcctcagttggaacagtaaacccatggcaaatccgccaagaatagagttcccgcggaggaagaacctcgatggacacgagatggaggagttcgggctcagagatgacggacatgtggttacctgcgaaaggcaattggctgttggggtcgattggtggaatcaccacagcagacgaactcgaggctttcctcttgggcgccatctcgattctaccggcgagcagaataggaggcgaattgcagagaggatttggaagcaagaaagcaagaactag

SEQ ID NO: 25746 - DNA, 1329 bp, Zea mays
  Peptide Sequence Number=SeqID_69121
atggagacgttcatatcttccttgtggtacgatccattgatggataaccagaatagtggaataaaccaacccatgagtttaaatattaacaagggaggttctgatccactgcaatttatgctacaggttagagctctttgtgagaaggcaaaggagattctgatggaggaaagcaatgttcagagtcctgttactatatgcggtgatattcatggacaatttcatgatcttgctgaactcttccgaatcggtggaaagtgtccagatacgaactacttgtttatgggagattatgttgaccgtggttactactctatcgaaactgtcacacttttggtggctttaaaagttcgatatcctcagaggatcaccattctcagaggaaaccatgaaagccgactactcacctgtcatatagtttcatcgatcaacctaccggccggtctcatcgatccaggtgaaatatgcgccgcagctgcccttcgttctgaccatgaggctgtcatcacaagaattcaagtatcattcataaatcaagggagtgctacactattgcctattgaaggaaactattctcgcggaaatttgatgcttcagagaataaagacatacattgcatttctggagcaaaagcttgtggaatttgataggacggagaggctgaatcattttgttttaactgattccgatatagcagtggttgatgatcttggacatatatttgaaaaatatccccattttcatctggctgttactttttgtaataacaaagggcaaccattgaattctgggtttgttgctgtaagaggaaccagggatggcatcactaaagctgtggaattcttgaaacaggtccttggaacttacagcttaagatatattaaggcttcccgtatgcttggtgaccaattagcacttgcatgggtcgtcaagtctcatctaccatcggctttgggaaaattttctaagcatgaagcatttactggtgaagttaatggaacatctgttctcttcttgccttgtgttgtttataattggaccccgcctgagggtgctggacagtttcatggtatacccttggatgttaagaattcaagtatcattcagtatgacaatgatcctattagatttggaggtggtcctccttcagttggagatggccctaatgcttttcctttcaagcccttagatctgaaatcctcacactacactgctgaagcaatgaaggagagcaaagcagttattgtcccaagaaccatatgctaccagaacaagaaagatgagagcggttggtggccaaggctcctgaaaaaggacttgtgttcttga

SEQ ID NO: 25747 - DNA, 456 bp, Zea mays
  Peptide Sequence Number=SeqID_69122
atgtcgttgtgcaatgatagaaatggatcattttgttctgtaaaaggaaacctcgtcatttccctgtaccgacaacctagtatgaaatttacacgggacagagattcaacctctttggaagacaggttcgtgcggatatcagcccatcccaaggcaaatttctgcgtggaaacgcatccggcctctggacgtcgggcgactttccacttctcgagcatgtcgcgtctcctctcgcctctcgctcagagtcgctcgagcacgccgccgccccgcttccgctcgcctgagcacgctgccactagagtcgcccgacgttgccgtctccgtcgactgccgttgctcgagcacgcccccgctcctctcgcctggaggctggagtcgcctgagcacgtcgccttctctggcctagagtctccgagcatgttgtcgcctcagtcactccgcctcctcaggtga

SEQ ID NO: 25748 - DNA, 177 bp, Zea mays
  Peptide Sequence Number=SeqID_69123
atgaaggacgctaaacccatcaagacacctatgggcaccaacaggcaccttggcctcgacatgggaggtatatccatagatcaaatgaacgagtctcctagagagcatgttttggagaagtcgaatggtgcaccggatcagtcatacacccaacggttggatgagatagaccaatga

SEQ ID NO: 25749 - DNA, 330 bp, Zea mays
  Peptide Sequence Number=SeqID_69124
atggcaatggaacttttcgatcaggtaccgaatagcagacgaggagtgaatgtttctgaagctggcttaacaaaaagcattccgatccaaaatccacttcacccttctgatcagctgatgggacaccatgcgggacgggacgggatcgctgggcgacctgtggaccatctcctgcctgccggcttgtccgatccccgtgctgcagggggtggggcagcacggtggccacgaacgccgccgcgtctaacacgtaccactcctcccgtggctgtgttctcggaagaattccacgccacaagtgcagacccccaccgcgtctcccggggataa

SEQ ID NO: 25750 - DNA, 504 bp, Zea mays
  Peptide Sequence Number=SeqID_69125
atgtggagcggagtgccgatcgggagcgtgcacgtcgccatacgtcagcagactttaaccatcatcaggacagattcgagactcggcaagtcgtctcttcatctattggacgccaagcacccaccggaacgaagcaacgaacgagccccgacggcgtgcaagccagccagccagctctggaggaggcagccacagccaccgcgagagcgagcgaaccgtaccggcggtggcctcgggtgctcactgctcaggcttctcacgcttttactcaaccacgacggctacggctacggctacctccggagctggccgccggcgagagcccactcctggaggaaggaacgggaaaggaaggccaggcaggcgcccgataccgatagaatggtttcgttgcagctcagcgctggagtagtaactgatttgctcggccgcatactgacgtcgttgcccaactactacccggaagccaccgccgccatgaaaccagcagcaacgacacggtag

SEQ ID NO: 25751 - DNA, 357 bp, Zea mays
  Peptide Sequence Number=SeqID_69126
atggaccggtcgcgcgcgtggtgggagcagtgcagcagcgccgactacccgaaggcgaacttccggtccgcctttcggatggggcgcgccaccttcgcgatgctgtgcgacgcgctgggcgcgaccgtggccaaggaggacaccgcgctccacgccgccatccccgtccggcagcgcgtggcggcagcggcgcccggctgccgcgcgaaggaaaacgcgacgggtatggaggagaacgcgacggagatggaggagaacgcgacggggatggctagcgatggagaactgacggcgacagcgctggggacggaacccggtttcaacgagactaatactgctctgaacctgttaatgtag

SEQ ID NO: 25752 - DNA, 330 bp, Zea mays
  Peptide Sequence Number=SeqID_69127
atgaagttcgatgctgatgctgtggattacctgttccccatgttcggcgatgtgatggaggcgcaccgcggggccgggtcggccgtcggcggggggtggggtgggtgcgagcgtgtgaagccgcggcggccttccgcggccgccgggtgcagggacgtggagctggagtacgacgacgcggtggcattggcgaagtcgatgtcggtgttgatcgcggcggcggcggcggccccggagcccaagacggcacggtgggggaggctcatcccatggaagatcaaggcgctgcggaaccgccccgccggcgatcggcgagacagcgtgagatga

SEQ ID NO: 25753 - DNA, 2226 bp, Zea mays
  Peptide Sequence Number=SeqID_69128
atgaacaagacaccggcactcaaggtgccattacaaatggaactccggttccacctctgcaggtacgaacaaccccacacgattggggggcctgtggagcaacaaaaggccgacgggtggctcatcgccgcccgctccaacaacgacgacttctgctctgaggggccgaacagcagcagcgatgacctcagggcggatgctgctgccatagggccctcgcccacttcctcactcgagaggcaaggacgagcagaaggccgtagagttggaggtcagtccgtgggcggcaccggctatctcgtcgacggagaaacctcttccggctgccgtggcggaaggcggcgccggaagcggctccaaagccgctcgggccagagagccgggcacgcggcagctgccagcgccacgaacggcgaacacccttccccccgatcactgagggaaggagcgggccgctgcccgcgcagagaccgaccccaactcggcgcactcccctccccagctctgatgatgaacatccttgaagctgagggaggggcagaggccgcagcccggcttgcttctccccacccaggggctggtggtcaccgtcttggggcaaaagaagccaaaccgccgcgcgcggtgcgcgcaactgcccagcggttacaagcattcctccactttcgcccagaccagtgggtgaaagggcggacagccatgcaggcagcatgcgaccgcgccaagtgggcgcaccccttcgactccaacacgcccagcacgggggcccaggcccacacgtcatgcaaccggcgcgccggttgctacatgcgagcaactgcaccgccactcacgccgctaccgcgcctcctcgactgcggaaccagtaccgcgactcgaggcaaccctgtgtatgacccaacagtgccagccaggcgcatcggtcacgggtcagtcagatgcaggagaaggagcgacggtcaatacggccaaaaatgggtcgataataatggcggtggcaggcgggcagaagcagcggtcacatcgtcagccaagctcacgtcccatccagggacacaagggaaccctctcaagtggacaggcggcacctttggcaggagaagcggacgacgcttcgccttcgccataatgaccgcgtcaaaaaaggctggcccctcggaggggttcaacagccgcctcagagcgctcgggctccgcgcccactactggtcagaggttcgaaggccggcccctcggaagggttcaacggccgcctcaggccacacgggctccgcgcccactactgatcagggggcgcggtccactcaagggacacaatctcgcctcgcccgagcccagcctcgggcaagggcagtcgaccccggaggattcacgtctcgcccaagggccccctcaggcaacggacacaccttcggcttgcccgaggcccagtcttcgccaagaagcaaccttggcccgatcgctacgccgaccgaccgtttcgcaggagcatttaatgcaaagggctcggactcgggctcacacccggaagacgacgaactccgcttcgcccgaccccagggctcggactcgggctcagccccggaagacgacgaacttcgcctcgcccgacccagggctcagactcgggctcagccccggaagacgacgaactccgcctcgcccgacccagggctcggactcgggcttagccccggaagacgacgaactccgcctcgcccgaccccagggctcggactcgggctcagccccggaagacgacgaactccgcctcgcccgacccagggctcggactcgggctcagccccggaagacgacgaactccgcctcgcccgacccagggctcggactcgggctcagccctggcttcagccgacggtctccacctcgcccgacccaggggctcggactcgacctcggcctcggatgacagactcgacctcgacctcggaggagcctccgcctcgcccaacccagggctcggaccgaccacgtcacaggaggggccatcattaccctacctggctctggctacggggaacaagaccagcgtcccatctggttcgccccggtaaacaagtaatgatggcgccccacatgctcatgacgacagcgactctcagcccccttacggaagcaaggagacgtcagcaaggactcgacagccccgacagctgtccttccgccaggctccagcgctcctccgacggccacgacaccacatga

SEQ ID NO: 25754 - DNA, 1576 bp, Zea mays
  Peptide Sequence Number=SeqID_69129
gcccacgcgtcgcgcaaccggcgcgccggatgctgcatgcaagcaactgtaccgcctgtgccaccaccgcgcctcctcgattgcggaaccaataccgcgactcgaggcgacccagcgcgcgacccagcagcgccagcctgacgcggcggccaacgcggccaaaagtgggccggcagtaatgacggtggcaggcgcacgggagcagcggtcacgtcgtcagccaagctcacgtcccatccgagggcagcaagagaaccccctctcacggcgtgaagacaacgcgcccgtgatccgttcctcgaacggctcgcgcacgcgcaacggccgccccgccagctactcgccccgttgcattaactccgcggctggacaggcggcgcttctggcaggagcagcaggcgacgcttcgccgaaacaaccgcgccaaaaaaggctccgagcctccttactgatcagaggttcgaagactggcccccccgaaggggtcaacagccgcctcagatcgcgtgggccctacacccactactggtcagagggctcggactcgggctcagccccagaagacgacgaactccgctccgcccgacccagggctcaggctcgggctcagccccagaagacgacgaactccgcttcgcccgaccccagggctcggactccgccctggcctctgccgaacaacctccgcctcgcccgacccaggagctcgggctcggcctcagccatggaagacagactcgaccccggcttcggaggagcctccacgtcgcctgacctagggcacaggcccgccacgtcaacaggaagcgccatcatcaccctaccccgagccgactcgggccgcagagaacaagaccgctcccttacggaagcagggggacgtcagcaaggacccaaccgctccgacagctgtccctccgccaggctcagttgctcctccgacagccacgacaccacaccagctgggtgccaagatctctccggctgccacattggcatggccttcttagagaaggttggccgcgcggggacgaggacggggcaggcgctctcttggggccgctcgcttccctcacccgcgtggacgcttgtaaccccctactgcaagcgcacccgacctgggcgcgggacgaacacgaaggccgcgggatttccacctctctcaagcccgtctccggccacctcgcttccccccttcgcgctcgcccacgcgctcgacccatctgggctggggcacgcggcacactcactcgtcggcctgagggaccccccggtctcgagacgccgacaggtacagtccgtgaatggctgcttcgaacttattgatggagccgcggcccatgatggcattgtaaggatataccatgtccacgatatcaaaggttatttgctcacttcgggcattgggtgctacaccgaaggagagaggcagctctattttgccgacggggaaggtgcccttgccgccgaagccatacaacgggttgtccgaaggcttaagcaggctgtggattatgcccatgcgatcgaaggcgtgaaggaagatgatgtccgcctgactgccgttgtcaactag

SEQ ID NO: 25755 - DNA, 369 bp, Zea mays
  Peptide Sequence Number=SeqID_69130
atgggttcagagaagtctggtggggaggacactgaggagcagggtgctgcgcatttagagaagactggtggaaatgatgtacatgcccaggaggcactcgcgttggcgtcgctcatcgacgacgaaaagaagcttggcgactgtcagttcgacctctataagcagtcctacgtggccgcatccgccgctgtgtacgacaggctccggcgtagccgccgcttggacacggtgcagagtggctgccccgcgctgtccatcgtcaaactgggaaactttatggtcgtcgccaatgtcgacgactcttggcttgttgtaggaaccgcatccgacgacatcgccatcacgtcgtccagctcaacgtccacctga

SEQ ID NO: 25756 - DNA, 750 bp, Zea mays
  Peptide Sequence Number=SeqID_69131
atggcacacatccacacatcatggtcgcaaggaaatcccaactcgagaggtgatcgtttcttcatcgaggcaatagagagtgtcgatgagtgcttcccatcagtgatgaaatcaacagctccgcataccgccacaacgagccgggaggagagccacgcggcggcggcggcggccgccacgcccgccaacgtcgtcccgctgggcgaggcgtccgtgcccaggttcgcgcacggcaccggcaacgtaatcatcatccgggccaccgtctcggcgtcctcgctcgcggtcgaccccgtcgcggccggctccaacgtcgagaggtacgagatctggcacggaagcacaaccaagagacatacagtgactctaccacaattcatgctaagggagactgagggggccttcgcgagtgggtggtggagaacaagcggggttgctgttggtggtgctgggccagcggtggctgttgcaaggcgagcgccatgccgagcgggcagtggcggccgttgcgggcgagcctcgatggttgagggcggcaattgcgaggaagcgaaagaggcaacgatagggtcaccgacgtaccttggcgacgtcgagggggttgacgggaatggaggacacgacggcggcgccggccgccaccagagcccgcttggtgaatccggcgaatcccctagccttactccatggctggccgaccacgttgagagcggaggcaggggaagggaccggaaggaggaggggcgctaa

SEQ ID NO: 25757 - DNA, 1686 bp, Zea mays
  Peptide Sequence Number=SeqID_69132
atgccatcctcttcttcttccgccgacgccacgccgccggccgccgcctcgtctgaggagacgttgagtgacgtgatggtggaggagttgcgcgccggcgactctgttgaatttggtgtgtcacggatgacgtcagcccgtattgaagatatgcagcggttgggctactttggcggcggagtcgctcgtgctccggggacggaggaagtccccgagccggagggcgagttggttgttttcgaggcgttcttcgtcgccggactccgcttgcctgcgcaccgggtcttcgaattaaatcaactgccgtacgacggctaccccggtcaagacgaagcggaccgccgtgggaagaaaccggcggtggagactggaggcgaccctgcgctggtggccgccgcctcctcgaaaaagagaaaattagtgatggacaaggatcgccaaggggcggcgcgaaaacgccaggcgactgtgagggttcacgaagctcagccgaaaaggcagcggggaacggcgaaggctgaggcctccggcggaggcaagccgccgctgccggcgaaggtgggcgcctctgcgcccggcaaggcgcgggaggtgacggtgggcgccggaggccccaagctgacgaaggtggctgacttcaccagccgcaccgcgtcgggggcccttacggcagctttatctgccgaggtcgagagacttcggacgcagcatgctgacgctgtccgtgagaagtcggcctccgacagcaagtgccgcaaactggcggagaaggtggccgccctggagaaggagaaggctgacctccgtcgccagctggcgggggagaggagggaggccaacgaagccgtcgccaaagagcaggctgctcaggcggaggccaggctggcgcgggcggaaggcaatatcgccaaggagctcgccggagagctgcagcggcggcttactgccctggagagccgcgcggagggggccgaggccgcggcgcgagcggaggccgagcggacgcgcacgcagctcatgactgcatatcgcgagctgggtgtgcggacgggtgacttcgaggtgccggagcgagaggccggacttcgctgtctggaatgggtgcaggaggaactgcaggagctccccactgtcttggcggggttgatgtcgttcacctccctggtcacctgcgaggcagcgatgaacgcgctctctcgcgaaggctgccggcactttgaggccctcgaccaggcagatgaggattttgggcgagatatctttgaggtcgaagaccccgtggtgaaggaatccgccggggccctctatgaccggatgtggggttcatatggttgtgaggtggtccgggcgcgggccgaagctgcgagggctcaggcggagcgcggcgagcgggtggacgacttcggggcgctgaacagcgcgctgcctgacccggagacgacccctgcggaggccgcgactggagtcgccccgggaccgaccccggagaccgcggaagatgcaccatgcgcccctgcacctgctgcggccggcgaagaccttcccccaaaggtggccgaaggcgcgcccgatgcccccgcagctgctgtgccgagcgctgaagatccagcggaggtgggggcgggggcagcggcggaggcctcggcggaggctcccgcagcggcagggccttcgcaggtggcatag

SEQ ID NO: 25758 - DNA, 210 bp, Zea mays
  Peptide Sequence Number=SeqID_69133
atgagtttcgtcaaaacgaacacgcttggttcaaagaggttggtaatgaaaacccctggtgggacaattgttcgtgtcaatgccatcttcacgatggtgtctgcctcttcattaccccgtctaggggacgtagttcagcttaaagccatcgaatttgtcttcaagtcgttgtacctcccgacggattcttcgagtgcacacttaatttga

SEQ ID NO: 25759 - DNA, 353 bp, Zea mays
  Peptide Sequence Number=SeqID_69134
actcgtctgttgattatctgaaccgcttcaccaagcatgagtcgccccgtgtcaaggtgacgagaccgatgccggagttgatcatccgaggcctcaggtcgggctggcgccctcgggagatggttggtgttggggcgaaggcaaagacgccacccttcgctcgaggccttcgctgcagccgctggtccgatagagacaaagcgggcagggacacccttcgcaggactcggcactttgacgaaggcctgcggcgacgtcctcccacggcgcgtcctcgttcagtcccaaggcccacgtgcgatctggcccattgtaacgggccccgcgtggccgcctctgtattacgggcctaa

SEQ ID NO: 25760 - DNA, 192 bp, Zea mays
  Peptide Sequence Number=SeqID_69135
atgacccccgccgcctatgttcgtggccagggtagctccgaccacctccgacgccgacccgcacacctacgtgaccgtcgtgaccttccggacgtcattgaccaccacaccggagctcttctgccgccgggaaacttagaaaaaccctacaaaaataaccccaaggtgaaaacacccccacccttgggatag

SEQ ID NO: 25761 - DNA, 495 bp, Zea mays
  Peptide Sequence Number=SeqID_69136
atggtgcagaggcttacccggtccatgtgcgccggcgggtttttgaactccggcgagcacgattgcgctattccggtgatgcgggtcctcggttcaagcttgagcaagcttcacggcctcaccaggaagctatctgagggcttggatcgaacggaggaggacgggaaaggggctggccacggtggttgctctcgggtggcactagcgggtcgcggggaggtcgccggagctaagggctggctcgggaaggtcaggcgagctgacgatccagctgcgaaggccagtgactgccaacggggtgggcgtaggcagaagttcctccaagctgtcctccaagatgactccacactccactcgaattctagggagatccaccggaatttcctcaactaccactgggtagacaagaacttgctgtggcagagggatgtagttggtgttgactcgggtggtttgaagagtgcgaaccatctacaagagaaattggcaacttag

SEQ ID NO: 25762 - DNA, 603 bp, Zea mays
  Peptide Sequence Number=SeqID_69137
atggcaggctttcatcattcgctcaggcttgggacagtgatcaggttcgggatcctagagttcatgtcagtcagcattgagtatgacatgatactcctcccacctatccctctcgagtgccccagcacctgtcgccgcccttctcatcgcaggaggcagagatggggcaactgtgaccgtgccactcatgggacctcgtgccctagcagagcccctgggatggccgatggcatagaatccctctcaagggacctagccaacaccagcattgcacccggagcgctaccagcgacacctgcaccaacttttctggaaccacctactctgttcttgtatgcatgcgatgaaatgctctccgagagctcggaaggttatagcactggtggggaaggctatgacccgacccgggaatgcctccacatcaactcgaagatccttgacagaggagatcacctcaatatgctacgagaaggtgaccagcctctaccacacaaagcagacgaggtcaagactcctcctgggacccgtgtggctcaccttgagcaactccgagagctacatgacaagatcaaggaggaacaacaatggctgcaacagctatga

SEQ ID NO: 25763 - DNA, 171 bp, Zea mays
  Peptide Sequence Number=SeqID_69138
atgcagtacaaggggtcaagcagtctcattagctgcgagaagcagacgattcgaatcgagtttttaaaccttgcaagacaaggcatccaccctggatccaagttcatagaccatcatagatcccgttatcaagatgaatacaatcaatgcctgacctcgcgcgagtgctag

SEQ ID NO: 25764 - DNA, 471 bp, Zea mays
  Peptide Sequence Number=SeqID_69139
atggctcgccaacatcaaatccgagtaggtagtcgcactaccacaaaaggcgtgtctgaccccgagggttccaagaaagcaacctggtgctttggttacgataagacaaccgagggcgtcacaagctcactcctccttgggaagggcccttcatcatccccaagttttgaaaaaaacacgtttcgtatcctcgccttagtcgtaatgcgaaaacccttaagaacaggggacatcccgagtaggaaagatagtcgagctgcaggaacaccaacgcctcagggatatggcgatgaccaggcctacacggtcggaggaggtccggtagggggtacagcagcggtcggcgatgggggaggcggaaccgccttgacctcgaagtggcgggctagcaaagtccctgacccctcgacggtgtcgttcaacctccgcatctcggcgttggcaagctcgggctcttcggggagaacatag

SEQ ID NO: 25765 - DNA, 816 bp, Zea mays
  Peptide Sequence Number=SeqID_69140
atgcatcgcgtccttccaccttccaagccccggatggggagcgcccgcgtcgctttcgtcttgctgtcattggaggagcgcaacttcgcaaagttggtacctttcagccatcgctcggcttcaaggattttcatcaggcagcccggctgcatcccctcgccgatggtcacccaagatggtgaccaccagtttgatggtggggagaagcaagccgggctgcgacctctgccccgccctcagcttcaaggatcttcatcatcctcgctggggaagaggtcaagctgggtcggagcgggcggcagcgagccacttgggattttgtcgtcccgcaggccctccaatgtggggggttgttcgtacctgcgggggtggaaccagagttccgtttgtaatggcaccttgagtgccggtgtctgttcattgtggctgtcggggcctgaacaccgaggaaaacctcggctgctctgcgatgagctggagccggaggcagcggtgtcagcatggacagagccggagtcggctcgaaaagaaaacttcgtcggcctaggagcagggggagatcctccgaccgtgtcgccgtccgaggctgggttggattccgccgaaggtggagtcgacgccgagggtgctgctgccccccctattgatgacatgttcgtcggtagcagaatcgtttatccgagcgagagttacttttcacggaaggtgatgagtgaggatcccactatcgaagtattcaaaaagcacgaaagatgttctggcagaaagactttttccgaggaaaattttgacgcagagggggttccccccttctag

SEQ ID NO: 25766 - DNA, 219 bp, Zea mays
  Peptide Sequence Number=SeqID_69141
atggtgaaacttcaagccgcgcagacccgaccacggttcgccgacggagtcctcgccgagacccagaccatgtctggcgcaccgtctactccacccgcggcgacttcgacgactgagttcggtggggaagatagaagagacttctgcgccgttggcccacatggcggtcaaggtgagaccgagcggctgagggggaatgggtcggctaacgcgggttag

SEQ ID NO: 25767 - DNA, 747 bp, Zea mays
  Peptide Sequence Number=SeqID_69142
atgcaggcggcatgcaactgcaccaaggggatgcacctttttgacttcgacgcgtccagcatggaggctcaggcccacacgtcatgtaaccggcacgccggttactacgtgcgagaaactgcaccgctgcttgcgccaataccgtgccttcttgactacggaaccggtgccgcgactcgaggcgaccctgcgcatggctcaacagtgccaaccgaacacatcggtcacggggcaggcgacacctttagcaggcgaagcgggcgacgcttcacctccgccatgatgaccgcgtcaaaaaaggtgcgccgcgtcgttcaatttcgtatccttttcctcttcccctttctctctcttgctacagggaccgggaaaggggatactccgaaagggatccttctccgcaaaggaagcgggccccgagccctcctactgatcagaggttcgaaggctggcccctcggaagggttcgacagccgcctcagagcactcgagctccgcgcccactactggtcagaggttcgaaggttggcccctcgaaagggttcgacagccgcctcaggccaatcgggctccgcgtccactactgatcaggggttcgaaggctggcccccgaaagggttcgacagccgcctcagaacacgcagagcaagggatgactctgggtacgtccgatacatggccgaggctcgggctacgctcccgaggtaccctaggacatttccgagaccagcaggagcgattctgtaa

SEQ ID NO: 25768 - DNA, 555 bp, Zea mays
  Peptide Sequence Number=SeqID_69143
atggcagaagctgaaggacatgctgatcaccagtttccaagggtttcagacgaagccaatcacagcttaggctttgttccagtgcacgcaagaccacgaagaatacctccaggcgtatgtccgaagggccacactatgagaacatgccaggtcaccattcagaagcaaaaggagattgccgaagcagagactttcgaagctcaaaagatgtttctaagggaatgcagagccaaaaattatgatctgaagctgcaaaaagtcgctcctaagggagcacagagattggacacgaagtcaatttccagcaatactttgttaaatgaaagtgtgctgaggcacgaagcaaacttcgagaaacgcaattatatcagactggctatagaagggacatctttctttatgaagcatgaaaagaagggaaggtgttttttcgccgaaggctcaaaaatgtttatcaacgacttcgtcgataatggagttagcaatgcttattacatccagtgcttccttcatgtccggatcagccaggaggttgaatggctccggcagcggtga

SEQ ID NO: 25769 - DNA, 414 bp, Zea mays
  Peptide Sequence Number=SeqID_69144
atggttgccccgcctcctcctccgtcggcagggaaggtgacgggacagactcggatgttgttcttccgccacgcggggaagatgtcgtcgattccgctgtcggcgggcgggctgacggccgccattatcgttgtcgcgcggcggaggaaggagtatcatgtcgtagctgccgtcgagggacatgaactcgagactcccgaaatggagcatcgtcctgggttggagaggttgctggagactacccatctggagcttgacgggaagctgttcgtcaacacgcagcagggccctacctggcgcgccaactgtcggtgtttcgaccccggggggtccctggaccgacgagtaaattgtcgctgcgtgtcccagccccagatgggtcggcgcgagacggagcacaagggggaacaataa

SEQ ID NO: 25770 - DNA, 219 bp, Zea mays
  Peptide Sequence Number=SeqID_69145
atggtgaaacttcaagccgcacagacccgaccacggttcgctgacggagtcctcgccgagacccagaccatgtctggcgcaccgtctactccacccgtggcgacttcgacgactgagttcggtggggaagatagaagagacttctgcgccgttggcccacatggcggtcaaggtgagaccgagcggctgagggggaatgggtcggctaacgcgggttag

SEQ ID NO: 25771 - DNA, 300 bp, Zea mays
  Peptide Sequence Number=SeqID_69146
atggccagggtagctccgaccacctccgacgctgacccgcacaccgacgtgaccgtcgtgacctcccggacgtcactgaccaccccgtcggagctcttctgccgccggcttaaggttaagaaaaatagaaaatgtgatttaaataatgaaccagaggactgtaaccttgctgacggagagtacgtcctcgtgccggagcaaggagctgctcaggaggtagccctggatccagcaccagagtctgcaccagaggacctgcctgccactgctttggaaggcaagccccgattttatgcataa

SEQ ID NO: 25772 - DNA, 468 bp, Zea mays
  Peptide Sequence Number=SeqID_69147
atggccactgacaggatcaagtaccacaatctcactcgaagtatccgtggcatagattacggcggcgaggcttaccggcggcagaagagctccgacggggtggtcagtgacgtccgggaggtcacgacggtcacgtcggtgtgcggaggccatgcgcgcaacgaattggaaaatggtgcagaggctacctggtccacgtgcgccggcgggttcttgaactccggcgagcacgattgcgctattccggtgatgcgggtcctcggttcaagcttgagcaagcttcacggcctcactaggaagctatctgagggcttggatcgaacggaggaggacgggaaaggggctggccacggtggttgctctcgggcggcactggcgggtcgcggggaggtcgccgaagctaagggctggctcaggatggttaggcgaggtacggaggaggcaacggggaaggcagccgagcactag

SEQ ID NO: 25773 - DNA, 423 bp, Zea mays
  Peptide Sequence Number=SeqID_69148
atgacaatgagaacgtcaacgaagaagccaacagtgttcaagcatgactacttcatggggtttgggcctgtcaccgaacattatacatcaatgttcgagacagggcacgtccccaacctgctggtgatggatgcaggggatagagggttcaaaactctatcagctcatgagttcctgacacctctatccaccgacactgcttcggtcagcgatgctgccaggcggactctgtggtctctcagccacacctaccggcagcagctgcatgacacgaagtacaggcatctttttctgtgtctaagtggagggagcctgaccagcatcgttccaggtggagctggagaagatcgcctcaacaccctagctggtgtagtggcaggtcttaacacagacctggatagtgctaccctggacctctctagg

SEQ ID NO: 25774 - DNA, 318 bp, Zea mays
  Peptide Sequence Number=SeqID_69149
atgaaattcaacaatcagaaattcactggggacagacaagtaaccaaaggtaatgcaagggatgttgtcattcaaaatcttgaaacttgtgggatgacaatgtcgcaaccaccagcgccaatttttaccatattgaaaggtaccgacattcaacaaaccacattgaaagctacccacagatacaataccatattcaacaccattcgtgaacattcaacaacgttcaacatcataaaaattcagtttttatcatcattcaccgtcattcaacaacaacatatgaagaacactaaaggtaaacagattgagaccaactaa

SEQ ID NO: 25775 - DNA, 513 bp, Zea mays
  Peptide Sequence Number=SeqID_69150
atgtcttctacttcgatagattctacccttatcctagtgctcgagtcgcaaaccagatccctcttattcgagctggataaacgtctccaggcgatcgatccaaatgggaatcccgtgtcaggttgctggaacagcgtgccgccgaatcggtcagatcaatgtctgatttctccactgctgtgcgtcgatgtggaggctcacctaacggctgcatacagcgagaccgacttgaagttgctccagatcgaggcggccaccaactctcggatggtggcgccggagtcatccgtgcgctctgtcgaggcttggcgcccgcgcgtggactcgacgatcgatgccctacgcttgtccctggactacgtcgccaccaaggtgtcaaagatggagatccagtggtcgcgtgatccacgcgccgatggctacaacaagccaggcgtgctcagagcacatgggtcggtgcccggacgaccacctgtcaccgcggcatacagtaccctgcgtggtaaccaatga

SEQ ID NO: 25776 - DNA, 287 bp, Zea mays
  Peptide Sequence Number=SeqID_69151
atggggagtcgatgtgtcctgttctcccccgatgacgaggctcaaagcgcgggaacacaaatgagatggtggaggagcataacatgttgcatatggcagacgtgtggcagaaggagcagcgccgccgccgtaaaccccgccgtcccgagctcgtttctcggccgccgtcggagctccgccgtgtccgttgccacggtgagcttcgccccgccgcggaggtccgccaccgtcgccccgggccaccgtcgcaccattgccgccgccgaggcgtccccgacccgcctgag

SEQ ID NO: 25777 - DNA, 399 bp, Zea mays
  Peptide Sequence Number=SeqID_69152
atgacgaaggactttgccatgacgacagtattgcccccatacgaggatattgttgctcgtagctcatcaggaactgctttggatctgaatgcctatcatacatggggagatgaggtggcttgtaggatggtggccacgggtaccctacaactctactgccaaaggagaagcatcatcgaatgcaaagttaccatggtgaaaatcgtcgtaccgttcatcttcattgactggattctcttgacgaagctccatgtgttggggcctttggtcttggtcatcctaagtgagatgacacatttcctcagctgcttcgttaatcttcctctgaaggtccctgatctcctagtccagttcctcctcatgaagtgttgggctagtggcctatcttctggctcctag

SEQ ID NO: 25778 - DNA, 201 bp, Zea mays
  Peptide Sequence Number=SeqID_69153
atggcccgacccgaccggaagcgtgtccgggtctgcccaggccgtctaccaagctgtgctaagccgcttatctggtccacgtccacggtgggcaacaccgtcgtaggtgtccgtggcgttgacaccgtcgtcctcggtgtcgagaagaagttcacccccaagctccaggactccaggttggtgtctcctccctcccactag

SEQ ID NO: 25779 - DNA, 162 bp, Zea mays
  Peptide Sequence Number=SeqID_69154
atggcgagagtagcgtgtacccaccgtgccaagaggctgaacggtggtgtatctgtgctctcggttggtaaagaatacagataccgaacttgtcaagtgatcaggtgcatctacgaggttgtccgagatccgttggacaaggacaactgtaggtgggcctaa

SEQ ID NO: 25780 - DNA, 864 bp, Zea mays
  Peptide Sequence Number=SeqID_69155
atgcggcgcggcggcggtcgccggttccccaagccctccttggcgccctccaccgcggccgaggccaccccggcgctggacgccagcgtcatccgcaacctcgactccgccttctcccgccgcgactccgacgccaacagcctctgcagcagccgtcccgcttctaccgtcggcgccatcctcaacttctccgaccgcgccacgcaggtcgccgcgctccgcgtcgtcaacacattcctcgcccccgccgtcacgctccgggggcctctgcccgccgcgcgcgacatccaggcggcgctccgcctcctcgtcgaccgtctccacttgccccgcaacgacgccacattcgatgatgacctcatccaggaccttcgccttctcggatgcccctacaaggtcacccgctccgcactcaaggcccccggcaccccgcactcgtggccggtactgctctccgtactccactggctcaccctcctctgccactcccaaggagacgacccggatgccccgagcggcccatccgacgatctcttgctctacatcacccagtcgtactcccacttcttgtcgggggacgacgccgccgtcgaaaccgtcgacgaggagtacgcctccaaagcccggatgaccggtgaggcgtacgttgcaacggctcgtgccctggagaaggaggctgaggaactggagacccaggatctattgaaacaagtggatgctcagccggtgaatgtgaaggatgtggatagaatgcgtagggagatgcaggctattgaagatgacattgccaacgccgagaaggggaaaacagcactggaggataagaaattgcctataggtacacctaagaacaaccaatgctaa

SEQ ID NO: 25781 - DNA, 321 bp, Zea mays
  Peptide Sequence Number=SeqID_69156
atgccgccgcgcacaaggaaaacggtgcgcaagtcaactggcccaatcggtgtgcctcggcatcaacttgcccctcgacatgaggatagtagcagcgggagcaatgatccaataggggatcttgaagcacgagtaaatcaacttcaaatggaattgcaacacaggaccaacatatgggttgcggatggagatagaataaatgaattaagaagcgacatccgccacttgcgggatcagcttgttgatcgggacttggcgctcgactgggcagttcagtcccgtttgctggcttgtgctaaagaggcaagggctcaagcctga

SEQ ID NO: 25782 - DNA, 288 bp, Zea mays
  Peptide Sequence Number=SeqID_69157
atggctgaaaggtaccaacttccacgaagttgtgttcctccaatgacaaggcggaagaactgcgagtgtcccccatccaggggctcagaagggaccgggaaaggggataccccgaaagggatccttctccgcgaaggaaacgggccccgagcccccctactgatcagaggttcgaaggctggcccctcggaggggttcaacagctgcctcagagcgctcgggctctgcgcccactactggtcagaggttcgaaggccggcccctcggaagggttcaacggccgcctga

SEQ ID NO: 25783 - DNA, 1890 bp, Zea mays
  Peptide Sequence Number=SeqID_69158
atggacgacctgaaggcgagcctggcgcggccgatacagctcgcggagcaggtgatcaagtgggcggacgaggcgcagacgtgccggcaggagtgccaggacctcaaggccaagctggagcgcctctccaccctgctccggcaggcggcgcgcgccgacctctacgagcgccccgcgcgccgcatcctcgaggacacggacaaggcgctcgacaaggccgccgcgctgctcgagcgctgctgcggccacggcttcgtccgccgcgtcttcaccatcatccccgcggggtcgttcaagaaggcgtcctacctgctcgacaactccctcggggacctcacctggatcctccgcgtctccaactacgccgcctccgacgaggacgacgaggacgaccacatcggcctgccccccatcgcgcagaacgagcccatcctcttcctcatctgggagcagatcgccgtgctgcagtacggcgggctcgaggcccgcgcggacgccgccgccagcgtcgtctccctcgcgcgcgacaacgaccgctacggcaggctcatcatcgaggaagacggagtcccaccgctgctgcggctcatcaaggagggccgcgccgacgcgcaggagagcgccgcgctagccatcgggctcctcggccgcgaccccgagtgcgtggacctcatgatcctcgccggggtctgcacctccttcgtcaagatcctcaaggacgcgcccatgaaggtgcaggggatggtggcgtgggcggtctccgagctctcagccaaccaccccaaatgccaggacgccttcctccagcacaacgtcatccggctcctcgtctcccacctcgccttcgagacggtgcaggagcactccaagtacgccgtcgcctccaagatgtccatccactccgtggtcatggacaaaaagagcaacgacagcacacatgacccctcgggaagcggggagcaagcggcggcggcgaaaccaaacgtgggcggtggcgggacaggagccagtagctcgagcctgactgttcccggtcccagcggcagacccgtcggcatggccgggacaaggctgcacaacgcgtccatttccgccacgagcacccgggggagggagtacgaggacccggagatcaaagcgtacctgaaagcgcacgccgcccgggcgctgggcacgctggccacgggcaaccccgccatctgcaagaacatcacggagtcgagggcgctgctctgcttctcgatcctcctcgagaaggccacgggcgacgtgcagtacaactccgcgatggcgctcgtggagatatgccgcgtcgcggagcagaacgccgagctccggcggtcggcgttcaagcccacctccccctcggcgcgcgccgtggtggaccagctcctccgcgtggtggagaaggccgactacgacgacctcctcgtcccctgcatcacgtgcctggggtgcctgtcgaggacgttccgggcgacggagacgagggtcatcgggccgctcgtcaggctcctcgacgagcgggagaccgacgtgagcctggaggccgcggcggcgctggccaagttcgcgtgcatggacaactacctgcacgtggaccactgcaagtcgatcatcggccacggcggcgccaagcacctggtgcagctcgtctacttcggcgagcaggtggtgcagaccgccgcggtcgtcctcgtctgctacctcgcgcacaacgtccccgacagcgaggagctcgcgcaggccgaggctttgatggtgctcgactgggcgtggaagcagggctacatgtcgcaggatccggtgatcgagagcttgctgcccgaggccaagattaggatggagctttaccagtccagaatagcgaaaggaggatactactattga

SEQ ID NO: 25784 - DNA, 183 bp, Zea mays
  Peptide Sequence Number=SeqID_69159
atgggccccggcacagctgcaaagcgatgtgaaagcagagtccagggacgagctatgcaggctcatcagcgacgccgacccgtcactgcctacctacgccaggacttcccgctattcctacactcagaagcggatcgtgtgaccgtcacgcacgggctggatgagatgactgtgtccgactag

SEQ ID NO: 25785 - DNA, 119 bp, Zea mays
  Peptide Sequence Number=SeqID_69160
agacattatggtttccaggtggctatgagatcgatggttctggttatgactatggttctggagaagatgaagctgtggaaggagacttccaggagttccaagactacgacgagttctag

SEQ ID NO: 25786 - DNA, 345 bp, Zea mays
  Peptide Sequence Number=SeqID_69161
atggcctctgcatcctctctcttctcctcagcacaccggacgctgtcgcagtccacggcgctgtccgccccccgacccccagggcttgttgtccctgtcggcatcctcgctcgctccgcccgtatgggtagacgacctccttgcactcacgctcgccgaggggcagggggactcgccggctccggcgagggctatgccatcgccgcccacctcgacgccggcgtcgcgctcctcgacacctgcaacgccatcgccgcacgcctccaccgccttcacaggctatcacacccggtttcagaaggcaaaccgaatgcgaaccatcatacgtctgagacgtccatatag

SEQ ID NO: 25787 - DNA, 960 bp, Zea mays
  Peptide Sequence Number=SeqID_69162
atggcatctcgggcgcacctgccgggctcgccggcctcgatcgccgtcctcatcctctccttcttccaagggtcggtatgcggcatcacgttcaccttcaccaaccgctgcggcgacacggtgtggccgggcctgctgtccggctcggggacgccgccgctggagaccacgggcttcgcgctcgcgccggggcagtcgcgctcgctgtacgcgccgcaggggtggtcgggccgcttctggggccgctccggctgcgccttcgacgcctccggcaaggggtcctgcgccacgggcgactgcggctccggcgaagtcgagtgccgcggcgcgggggcgtcgccgcccgccacgctcgccgagttcacgctcgacggcgacggcggcaaggacttctacgacgtcagcctcgtcgacggctacaacctgcccatgctcgtgcagcccgccgcggccggctgccccgacacggggtgccttgtcgacctcaacgagcggtgccccgacgagctccgcgccgacggcggccgcgcctgccgcagcgcctgcgaggcgttcggcagccccgagtattgctgcaacggcgcctacggcaaccccaacacctgccacccgtcccagtactcgcagctcttcaagtcggcgtgccccaagtcctacagctacgcctacgacgacgccacatccaccttcacatgcaaccacaccgattacaccatcaccttctgccccgaatcaactccatccagcgacagatccaaacattcgtctcggaggccaagccacgagcaactggaagattcagtgtggcttgcatccttgaaggcaagtggcgccagttctatgaaaataacgtcatggtggtcggcgcccactgtgttccgatctggattagcaattgcagtggcgaccttgcttggtgcacaaattgcaccggatcatcctgtggtcggcttgctatga

SEQ ID NO: 25788 - DNA, 492 bp, Zea mays
  Peptide Sequence Number=SeqID_69163
atgacagctgttgtactctttttcccttgggatacgggtcttccacatcttctcgcgcctaatctgctgacgggagggaagggagcggatctggtgatccgtggtgacgtagttctcaacaggaagaacaggagcacgaccgagtggcggcaaggttggtgtccatggcgtcgccacccgatgattgcacgcggacaccgtataccggcgtttcagtcccagcacacagaggtggagagaaggaaaaaaaaggtcatcacgggcgatagtctcatcgaaattccacggctgcagcagcgccttccgctgtggtgccacaccgacgtctccgacgacaggctcaagctgctcttggaggccttcgacgacctcgtcctgccgttcgggcgtcagcaaattaaagatttcaagtgtaatgggtggctcggcccactcggcacggacccactacggcacgatccgtttaaggcacagtccgttagacccgactag

SEQ ID NO: 25789 - DNA, 573 bp, Zea mays
  Peptide Sequence Number=SeqID_69164
atggaggaggaggtggcagtggcggtgtccccgactgggagtgtaagatggagcccgcacgctttggtgctacaaatctaccggcccactctatcgatggtaggttcccccaaagctagatggccagctatggagacctcgacgacgacggaggtgtcttgcgaggaacgtatcaaagtggaggacgttcccgccctccgatgccatgatgtgccggagttgtcgcttccttgttcggatgccgcgacgacctcctacatccttcgacctagcgacaagcggtcccatgaggtaggtcttttggtgggccttgttcctcacatcattgaaaatggctgtgtctgtttacaatatgcattacaatatgcagatggcattgtcttccttcttcaggccaacccgatttatgcaaggaatctgaaatttgttttggtcctttttgagcatatgtcaggcctcaaattaactttcgcaaaaaaaaaatctgcaagaaagaagctggaggaaagagcaaccatctcagaaaaatggctagtgatatcttcattcgagctcgggggtggtctccagtag

SEQ ID NO: 25790 - DNA, 534 bp, Zea mays
  Peptide Sequence Number=SeqID_69165
atgacgaactggtcattgttgtcggtcctcctctgtgtcacctccggcgccgagatgatgccacggaccacagtcccgacgactcttggttgggctaccatacgaagtgcacccaggctcatcagcgagggctcggactcgggcttagccccggaagacgacaaactccgcttcgcccgaccccagggctcggactcgggctcagccccggaagacgacgaactccgcttcgcccgaccccagggctcggactcgggctcagccccggaagacgacgaactccgcttcgcccgaccccagggctcggactcagccctggcctcagccgacggtctccgcctcgcccgacccaggggctcggactcgacctcggccttggaagacagactcgacctcgacctcggaggagcctccacctcgaccaacccaggactcggaccgaccacgtcacaggaggcgccatcattaccctaccccaagctgactcaggctacggggaacaagaccggcgtcccatctggctcgctccgctaa

SEQ ID NO: 25791 - DNA, 336 bp, Zea mays
  Peptide Sequence Number=SeqID_69166
atgggcgtgcctgacctctgcgcgcgctggcgcgcatttaatgtgtcgcaggagtatcatgtcgtagctgccgtcgagggacatgaactcaagactcccgaaacggagcaccgtcccgggctggaaaggttgctggagactgcccatctggagcttgacgagaagctgttcgtcaacacgcagcaggcccctacctggcgcgccaactgtcggcgtttcgaacccggggggtccctggaccgacgagtaaattgtcgccgcgtgccccagcccacatgggtcggtgcgagacggagtgcgaaggggggaagagaagctggagggagacaggcgtga

SEQ ID NO: 25792 - DNA, 792 bp, Zea mays
  Peptide Sequence Number=SeqID_69167
atgtcggcgtttcgagacaggggggtccctaagccgacgagtgagtgtgctgcgtgccccagcccagatgggtcgagcgcgtgggcgagcgcggaggggggagaggcgaggcggccggagccgagcgtgagagaggtggaagtcccgcggccttcgtgttcgtcccgcgcccaggcagggcgacgtggggtttcctccgaagccgaggttgagtcttgccttcagttgccgtggccgagcccgagccagggggtcgggcgaggcggaagtcgtccggccgaggccagggcggagtccgagccctggggtcgggcgaggcggagtttcgttgtcttccgggtcttagcccgagtccgagccctggggtcgggcggagcggagttcgccgtcttccgggtcttagcccgagtccgagccctggggtcgggcggagcggagttcgccgtcttccgggtcttagcccgagtccgagccctggggtcgggcggagcggagttcgccgtcttccgggtcttagcccgagtccgagccctggggtcgggcggagcggagttcgccgtcttccgggtcttagcccgagtccgagccctggggtcgggcggagcggagttcgccgtcttccgggtcttagcccgagtccgagccctggggtcgggcggagcggagttcgccgtggcgcctttggcaaggcctaattgcctgtcagactcactctgtcgagtggcactgcagtcggagtggcgcaggcggcgctgtccttctatcagactggccagtggagcggtggagtga

SEQ ID NO: 25793 - DNA, 528 bp, Zea mays
  Peptide Sequence Number=SeqID_69168
atggacttctatgacttatgcgacaagtttcatcaaggtgatgtttgcttaaaaagtatgaatggctccttcatcatcctagtgccaaagaaggacaatccacaaaaggaagctccgcctcgcccgaccctagggctcgggctcaacctcgacgctggacgacggactctgcctcacccgaccctagggcttggacacaacctcggcctcggaagacggtctctgcctcgcccgaccctagggctcgggctcaacctcgacgctgcacgacagactcctcctcgcccgaccccagggctcggacacagcctcggccttggaagatggtctccgcctcgcctgacccagggctcggactcaacctcgatctcggaagacggactccgcctcgcccgaccccaggggtcggactcagcctcgacctcggaagacggactcaacctcgacctcggaggagcctccgcctcgcccgacctagggctcggaccgaccacgtcacagggggggccatcattaccctacccctag

SEQ ID NO: 25794 - DNA, 1083 bp, Zea mays
  Peptide Sequence Number=SeqID_69169
atggaggcccgggcccacacgtcatgtaaccggcgtgccggttactacgtgcgagaaactgcaccgccactcgcgccagtaccgtgcctcctcgactgcggaaccggtgccgcgactcgaggcgaccctgcgcatgacccgacagtgccaaccgagcacattggtcacgggtcggtcagccgcgggagaaggcgcgacggtcgatacggccagaaatgggccgacaataatggcggtggcaggcgggcggaagcagcagtcaagtcgtcagcaagctcacgccccctcctgggacagcgagagaaccctctcccacggcgtgaagacgacgcgcccgtgttccgttcctcgaacggctcgcgcacgcacaacggctgccccgcgaaccactcgtcccgtcgcattaactctgcggcaggacaggcggcacctttggcaggcgaagcagggaccgggaaaggggacactccgaaagggatccttctccgcgaaggaagcgggccccgagcccccctactgatcagaggttcgaaggctggcccctcggaagagttcaacagccgcctcagagcactcgggctccgcgcccactactggctggcccccgaagggttcgacagccgccttagatcacgcagagtgagggatgaccctgggtacgttcgatacataaccaaggctcgggctacgctcccgagcctcgggcgccataggaagctccgcctcgcccgaccccagggctcgggctcaacctcgacgctggacgacggactccgcctcgcccgaccccagggctcggacacagcctcggcctcggaagacggtctccgcctcacccgaccccagggctcaggctcaacctcgacgctggacgatggactcctcctcgcccgaccccagggctcggacacagcctcggcctcggaagacggtctctgcctcgcccgacccagggctcggactcaacctcgacctcggaagacggactccacctcgcccgaccccaggggtcggactcagcctcgacctcggaagacggactcgacctcgacctcggaggagcctccgcctcgcccgacctag

SEQ ID NO: 25795 - DNA, 204 bp, Zea mays
  Peptide Sequence Number=SeqID_69170
atggcccggaacaccccccaagagcgcagcggcaaagaaattgggtggactaccgcggcggctcccgatggtgtcggcggctgggctaacggcgatagtcggtgggaacttctcatctggtcacccatcccaggtttctccaagttgagcacgcttaactttaagattccttcgaaccaggcttccaaactccgattccaataa

SEQ ID NO: 25796 - DNA, 537 bp, Zea mays
  Peptide Sequence Number=SeqID_69171
atggacaagggttgcactcaacccctttcaagtgatccaatgatcaacttgaataccacggctttcttccttatagtctttctcccgtttgcgagaaatctccacaagttggagcctctcgcccttacaataaagatcacaaagaaggggaaggagttcggcaagacgaccaagaataagaaagggctttttcctttacgcgggggtgattttgaaagacttctatcctttgctggcctgagagaagcctgtgactggaaatccactttttctggattggattccaaagcaaagataggcaactttcacttgaaagaaaggagcttcagaactattgtattccaccgtcctcttaactgcgcgcgggccgggcttagagcgcgtgaaactcatcactacctcctctccatcggttccgaagattctttcggcatcaatgtgcttttggaatcttcctatgaaacaaataacattcaggaactatttaggacagaacaggtcgtagatcagagaagtcgatctagagaagcttcttaa

SEQ ID NO: 25797 - DNA, 2301 bp, Zea mays
  Peptide Sequence Number=SeqID_69172
atgggaggacttggggtgtctgatagttttgctagagagttaatgaggacgtgtgcggccccgggggaaaggatgtcttcgcccgagctccgggagtcttcggctcggatgctgagggttaccgggggttgctggcctagaaatgttcctatcccctgcgcggctgaggaggactgttttacatctcgtatggttcatcagtggagagtttttccttacgggcgaaatatcggtgctgttgtgtgggcagtgatggacaaggatcgccaaggggcggcgcaaaaacgccaggcgacggtcaggattcacgaagctcggccgaaaaggcagcggggaactgcgaaggctgcggcctccggcggaggcaagccgccgctggcggcgaaggcgggcgcctctgcacctagcaaggcgccggaggcaacggcgggcgccggaggctccaagtcaacgaaggtggtgccgccggccagcggagtggcggaggcttcgaaggcggcccgagcgctgccgttggcgggcagacgtgttgccgacttcggcaccgatattactgtggacgactatcttggtgggccggacgagggccagcttgctatagttgcgcctggcgcggcgatcgcgacggccgccatagtgccgaaggcgaggggcgaggcgcttggtgccggaggcgaggtgtcggccctcgcgttggtcagggacgaggcgggcgtggcgacccgccggctgaagggagtgacggaggcgctgagtcaggcgacggaggcgctgagtcaggtggctgacttcaccagccgtactgcgtcgggggcccttacggcagctttgtctgccgaagtcgagagacttcggatgcaacatgcagacgctgtccgtgaaaaatcggcctccgacagcaagtgccgtaaactggcggacagggtggccaccctggagaaggagaaggctgacctccggcgccagctggcgggggagaggagggaggccaacgaagccatcgccaaagagcaggctgcgcaggcggaggccaagctggcgcgggcggaaggcaatattgccaaggagctcgccggacatctgcaggagcggcttactgccctggagagccgcgcgaagggggccgacgccgcgattcgagcggaggccgaacggacgcgcacacagcttatggctacatatcgcgagctgggtgcgcggaccggtgacttcgaggtgccggagcgagagcccgggcttcgctgtctggaatgggtgcaggaggagctgcaggagctccccactgtcttgggggggttaatgtcgttcacctccctggtcacctgcgagggggcgatgaacgcactctctcgcgaagggtgccggcactttgaggccttcgaccaggcagatgaagattttgggcaagatatctataaggtcgaagaccccgtggtgaaggaatccgccggggccctttatgatcgaatgtggggtctgtacggtcgtgaggtggtcagggagcgggtcgaggctgcgagggctcaggcggagcgtggcgagcgggtggacgacttcggggcactgaacagcgcgctgcctggcccggagccgacccctgcggaggccgcgaccggagtcgccctggaaccaaccccggagactacggaagacgcgccaggcgcccccacatctgctgcggccggcgaagacctgcccccaaaggtggccgaaggcgcgcctgatgcccccgcagctgctgtgtcgagcgctgaagattccgcggcggtggtggcggaagcagcggcggagccaacggcggaggctcccgcagcggcagggccttcgcaggttcaagattttgggcctgcgcacgcaaccgctactgttgagtttttggcggcttcgaccgcggaaggtgggaatgaatatggtgggtctgtatctgaattttttgattttactgactctgggagctcggttgagtggactgaggagtcgtcggaggaggacttggaatattttgcggccttggacgtggctgcgacggaggcttcgccacacgccgcggacgcgccagacgtgccaggccctagcaccgggcgccgacaacgaagggcggttgcaaagcgtagggttagtgcggaggaaggggctcggcttcgcgtgagtagggctggtcggcaggagctgttgtctttgccggccgccgcgggtgcaggggaaggggaactacgaagtctgtttgcgggtgaggagcttaggataatgttatttaattatagggagatgggaattattcctaaggtggagccgatgtag

SEQ ID NO: 25798 - DNA, 171 bp, Zea mays
  Peptide Sequence Number=SeqID_69173
atggggagtcatgatccccgggcaaaacgggaatcacggctcatgggtaaagtgtgcgacctctgcagagggttagaaactggttgcctttggtgcagtctatgctcaggtaaacaaggcgtcgaggcggatctccaggagttccaggacgtcgacgagttcgaggattag

SEQ ID NO: 25799 - DNA, 420 bp, Zea mays
  Peptide Sequence Number=SeqID_69174
atgacggtggcaggcggacgggagcagcggtcacgtcgtcagccaagctcacgtcccatccgggggcagcaagagaaccccctctcacggcgtgaagacaacgcgcccgtgatccgttcctcgaacggctcgcgcacgcacaacggccgccccgccaaccgctcgctccgtcgcattaactccgcggcaggacaggcggcgctcctgaggttcgaaggctggccccccgaagggtttcgacagccgcctcagatcgcgtgggccctacacccactactggtcagaggttcgaaggccggccccccgaagggttccacggccgcctcaggctactcgggctccgcgcccattactgatcaggggttcgaaggctggcccccgaagggttcacagccgcctcagacgccgagcgagggatga

SEQ ID NO: 25800 - DNA, 432 bp, Zea mays
  Peptide Sequence Number=SeqID_69175
atggaggggcgcgtaaccacggggcagtcgcacgctcctcctttgggttggtctttacgacatgcggggcttggcccccgtgtcataaggagtgcaaccccatgggggttggcatcctttcgccactattcgacttcaaggtttttcatcatgcagcccggctgtagtcccccgccggcggccacccatgaggatgaccaccagctttgtggtggggagaagcaagtcgggctgcggcttccctcctgccctcagcttcaaggatgttcatcatcctcgctggggcgggaggcgcgtcgagccagggttctgcctcccacgtgggccagtggcccacttctttctccagcattcgagggaggagaggggttcaccagccacgcgaaggaggcgaacttcggctacgcggggccggccaggtgcaggcgctga

SEQ ID NO: 25801 - DNA, 465 bp, Zea mays
  Peptide Sequence Number=SeqID_69176
atggattatgtcatgggccacaagcagcgggccttcgcctgcgcagggagcggagatcaaaacctgcacacgtgtcagcaccggacccctgcataccccgaggtccttcttgttccgggaccctgccggggttcggacctaccccggggctccggacctttacgctctcagccacagacccgacgccgtcgcacacgcaaaaatcgccgccgctgcgacttttaccggcggctaagcgcggttaaccgccggccaggagcggtttaccgcccacttcgccgctgccccccatcgtcgccgcagatcccctcaccgacgggttccatcgcaaaaccggcggtaaaccgcccacgaggagaggagacatgtcggatgaagatagagatagagaaagagatagagatagagtctggttgcacggagagaaggtgtgggggtcaaattaccaactggtcgagaaattga

SEQ ID NO: 25802 - DNA, 597 bp, Zea mays
  Peptide Sequence Number=SeqID_69177
atgggggatacccgtcgtcttttcgcctcatcgttggaggaacgcaactccgtgggagttggtacctttcagccatcgttcggcttcaaggattttcatcagccagcccggctgtaccccccccccccccccccccgccggcggtcacccgagacggtgaccaccagcacctgggtggggagaagcaagccgggctgcgatcttggtcccaccctcagcttcaaggatgttcatcatcctcgctggggtgggggccgggctgagccggagctctacctcccgcacgagttcgcgggtcaccctctcctgcggcgttcgagggagagggcgctcactgaccccgcgggcggcccggacttcgacaacgcggggctggtcgacggcgggcgtcgtcacccccagcgtgtcgagctcgtcggcttggctcccggcgggccctcctgccggagggcggctgccgcgccgtgtgcacgagaggaccgcccaagatgctgcgcgctgctagggcggcgttcgtgttctggggtggtcctgcctttgcaccgggatggcgccttcacgcggaggctggtgccccactcgtccgggaggatttga

SEQ ID NO: 25803 - DNA, 159 bp, Zea mays
  Peptide Sequence Number=SeqID_69178
atggcgcccaagaggaaggcctcgagttcgtctgtcgtggtgattcctccaatcgaccccaacagccagttgcctttcgcagaatattcaaccgttgaaagacagggcatacccggcttatctgtatcgaggcctagccgactcaactcgggttactaa

SEQ ID NO: 25804 - DNA, 636 bp, Zea mays
  Peptide Sequence Number=SeqID_69179
atgtcttcgcgcttccttatgcatcgtgtctttccaccttccaagcccccggatgggggatacccgccgtctttccgccttgttgttgggggaacgcaactccgcgggagttggtacctttcagccatcgttcggcttcaaggattttcatcagccagcccggctgcacccctccaccggtggtcacccgagacggtgaccaccagcccctgggtggggagaaacaagtcgggctgcgatcttggtcccaccctcagcttcaaggatgttcatcatcctcgctggggtggaggctgggctgagccggagctctacctcccgcgcgggttcgtgggtcggcctctccttcggcgttcgagggagagggcgctcactggccctgcgggcgggtcggacttcgacaacgcgtggctggtcgacggcgggcgtcgtcagcctcagcgcttcgggctcgtcggcttagcccccggtgccccctcctatcggaaggcggctgccgcgccgtgtgcacgggaggaccgcccaagatgtcgcgtgctgccagggcggcattcgtgttctggggtggtcctgcctttgcaccggtacggcgcctccacgcggaggtcggtgtcccactcgtctgggaggatctga

SEQ ID NO: 25805 - DNA, 456 bp, Zea mays
  Peptide Sequence Number=SeqID_69180
atgggcaagaacaacaagcgcaagcgtgagccaactcctccatcggaggattttggtgactcggagtactcagaggaggagttctcctctgagtctgaggggtctccagctcccatccccctacgtgagtcgtctgacgactcagacgactcccaggggctcgcggcggaggtctggacgtacatccgggccgtcgagcgctccgggctcgagggctcggatgagtcggagtactcctcggatgatgaggactcggacggtggcggcgaggacgaggacggcgacaacaacgacgacgacgaaggcggtggcggtggtgatggtgacgacagcggcagcagcggcagcaaggacgatgacggcggcggcggcaggggcggcagcggcggtggcggcagcagcaggggcagcaacaggggcggcagcggcggcggcagcaacagggccagtggctag

SEQ ID NO: 25806 - DNA, 609 bp, Zea mays
  Peptide Sequence Number=SeqID_69181
atggttcagatcgtcgagcaccacgacttcattcccgaggacttcccgatggaagaagaagctgcatcctccacaccacgggcctccagccgccctgcgcctggtgctgctgttgtgcgctctgcgcggcagcacactcctgtgcggacatccagagcgtcaagggctgcgcctggggccttgtctgcagccagggaattgctacgccaccctcctagctccatggcctcgccgggggccatgaagcagtggcgagacaatgtcgatcgtctgctcggcatggcgcgttctggctcagccaggcacaggcctcggtcatcctggcgtcaacatgaggcgtcggtgttagtgcgctcaccctcggtgagggccgcaccgactgaggacctgcaggcggagctcaacctcaggcgtgcaggagaggacgctccagtctctctggagaggcctgatgacctgcgggcagaacttaaccgtaggcatacaggcgaggatgcccgagtctctctagagagggcgcgtgagcgctggcagaacatcgagggtcgcaacctcgactacgacttcgctgcggtcgcaccacagactccaacgggcacccggatctag

SEQ ID NO: 25807 - DNA, 870 bp, Zea mays
  Peptide Sequence Number=SeqID_69182
atggctcgtcccagcctcgggcgactactctgggccagcgacagctcccgacccctccacgtggatggttccggggccgccacgtggccggagaagatgatatactccgaggaccccacgggcgcaaaccggacccttaggatggggtccggacccctccatgtggggtccgggccactcacggcagggtcccaggattctgggatagagaatgcccaggccttaatcaaggccaggcgggggtccagagccgacacgccgagccccgatgctgccacgtggcatggtgcacgtgacgtaagccaacgggcggagcctgacgtaaggcctccgggctacgcggcctctgcatttattgcggataaggcgcgccgcctgtccattccactggcaggcggcggcgaccagtccgttccgcaggcggcgtgcctgtccattccattggcagacgggcaggaccctctcccaggaaggaaggtggcgccgcgacgcgtgacggcagtgagctgggtgaagcactatttcgccgacgtgccgcaggaggccgtgcaggctcatttcaacaggagaatggttttttctgagtgctatgaccacaaggtttcagctgacagcattcgaactcagaagcatcatctgaaaaagataaaacataatgatgctatggagcctggaatgaggattcaccttcctgtttcagtggctgagagtgacataaagaagcgttatgagaccattccgactgccacactgcatcctaataaagatgagatcgagtacctgaggaggctagtcatctacagggtatttttctcctttgtaggttgtattgctaatgtcgatagccgatatatagactacattcaataa

SEQ ID NO: 25808 - DNA, 594 bp, Zea mays
  Peptide Sequence Number=SeqID_69183
atggcggcagcggggatcacggctggcccgtggggttgctcggctaggcgggtccaaggcggtcggggaggttcttggctcggcgctagcgcggctttccgaaggcggcgagttttgtgggctgggcagccggggctgtcaccggtgctgatcccgtggcaggtgttgctggcgaggttcgctttggtgaagcggtgtgttggcggtgtgggtgctactgctgttggcgccgaagaggatgtgcgggccagttccgcggcggcgcggccagtggctcgagctggcgcagggtggtggtggcggcagggtgcccagcggcagctggcttcggtggccgcatgtgccagagccatcggcggctacgcattggctctagctcgcgccggtgtgacgcacacgacaaggtgttgtccggttctgtgtgcccacccggagggggtggcggccgacgcagttttgcggctgctgcaacagccggcgcgtcggtgtccctctataggggttcatgcgggatgtcagggcggcggcgacggtggatcttggcctgacgttggtgctggagggcttcttgggcaaaaggatcggcgatggtga

SEQ ID NO: 25809 - DNA, 419 bp, Zea mays
  Peptide Sequence Number=SeqID_69184
atggaggcctacttggtaacccataaccaacgtagagccctgcggatccaagagcccgcttcatcgaacccagttcaacccatgggagctgaatgtaacaccctgaatttggggcgggtcccacctgtcggcgctcccgccttccgcgcacccgctccgttctctctctgttcgcccggccccacctgtcggcgcccgctttccccgcgcgcgctcgctccctcgctctctctctgctcgcgggcccggggtgtcagccccgtcttcctcgcagcgccgccgccactaaccatcgccgcccgagccgtttcctcgtcgccggtggagctccgccgcgcccttagccccgccgccaccgtcgacccgagtctccgtcgcgtccccgtcgccgccgaggagtccccggagcccgccttgag

SEQ ID NO: 25810 - DNA, 327 bp, Zea mays
  Peptide Sequence Number=SeqID_69185
atggggctgccgctgtcgccgtctccgtctccggctccggctctgcggacggcaccctccgcgactgtcttgctggctgcctgtcttgctccttgcgctggagagcggaggcagggagagattgtcttgctccttgcgctggagagtggagacagggagagagccagccgccggccgccgctggacagggacgagagagccgcagcccacagccgccgctggacagggatagctagggttgccaggtttcgtagtttgctaactgggtcgtgggctcgtggcccgtgggctgtgtcgctgttgcctagcgctcgacctggtgactga

SEQ ID NO: 25811 - DNA, 600 bp, Zea mays
  Peptide Sequence Number=SeqID_69186
atgcaggccggcaacttgtacacagggtaccagcctggtcctgagcccaacttggctgttgttttcaggatagcttcccttctaattagagacatacgcaaagagagtgagagtcgcaagcttgcgtggcataattggagctggaaagagtattctgaagagccgttcttggagccgcatatcccctaccagtaccaggccaccagcaggcaggcgctgcccgcgggccggaccatccgtgacctggagcagaggctagggttcctgcctaccgagccggacggtctatgcacagtggaccaaggttatctcgtgcatatgcatcccgggttcgtcagtgggcttagcgatggcttccccaagatcgcagggtcgagggctacacggggtatgtgggcacatcagctccagtatccgtttaatgcatgttgtattgaacttcttttcaaaactgtggagatcttcaaggtcgtcgccttcactgcagggctacaagagtatgcctcccttgtgctcgaccgcttagatccatacggggaggtgttcgtgcaccgcctctaccatggtgcttgcacgacgccggtgacgggtggctcctaa

SEQ ID NO: 25812 - DNA, 1410 bp, Zea mays
  Peptide Sequence Number=SeqID_69187
atgacggtggcaggcgggcaggagaagcggtcgcgtcatcagccaagctcacgtcccatccaggggcagcgagagaatctcctctcacggcatgaagacgacgcgcccgtgatccgttcctcgaacgactcgcgcacgcgcgacaaccgccccgccaacaactcaccccatcgcattaactccacggcgggacaggcggcacttcttgcaggagaagcgggcgacgcttcgccttcgccgaaccaggctccgagcctccttactgatcagaggttcgaaggctggccccccgaagggttcaacaaccgcctcagatcgcgtgggccctacacccactactggtcagaggttcgaaggccggccccccgaagggttccacggccgcctcaggctactcgggctccgcgcccattactgatcaggggttcgaaggctggcccccgaagggttcacagtcgcctcagacgccgagcgagggatgaccaggggtacgttcgatacatagccgaggcttgggctgcgctcccgaggctcgggggctgctctcgcaaacccggctccggccgaaccgttgacagcgtcaacataccagcccgagaacttgggccccgaccatacacccgggctacggccagttcgcatgagggaacaaccagaccagccgaagcattacgcgaggcattaagacctcggaggagtgaaaccactcctccgaggcctcgggggctacacccggcgggtgcgctcgcgcgcacccaccggaacaaaatgcaaccgagaaaggctggtccccttgcaaaaaagtgcgacgaaagcctcgaagcgagtgctaacactcccttcgaggctcgggggctactgtcggggaccataattaggggtaccctcaagactcctaattctcagctggcagtcaggccctgccaaaggctccacgggaaactccgctccgcccgacccagggctcggactcgggctaagtcccagaagacggcgaactccgctccgcccgacccagggctcggactcgggctaagtcccggaagacggcgaactccgctccgcccgacccagggctcggactcgggctcggccccagaagacgacgaactccgcttcgcccgaccccagggctcggactccgccctggcctctgccgaacgacctccgcctcgcccgacccaggggctcggactcggcctcggccacggaagacagactcgacctcggcttcgaaggagcctccacgtcgcccgacctcaggcgcgggccagccatgaggacgtcagcaaggactcgaccgctccgacagttgtccctccgccaggctccgctgctcctccgacggccacgacatcacaccagctgggtgtcaagatctctccggctgccacatcggcatgtacttag

SEQ ID NO: 25813 - DNA, 1305 bp, Zea mays
  Peptide Sequence Number=SeqID_69188
atggctactaattctctgtttcagaggacagtcatatggaaggtggttcagaatatgattccagggaagaaaaaggatcatggttctggaaaacatgcgccttctggtatcatgtggtccttcgctgctggctccaatttggcaacatctaccctcagtgctgaaaaggagtcgcggaaaaatctgaacaagttctacaaagaacttcgaactttgaaaactgttaacatggctggtcgtcagtttggagatgagggcctgttttttctagcagaaagcttagcctatgacaagagtgcagaagaggtggacttttctggcaatgggataacagctgtggggatagaagcctttgatggagttcttcagataaacacaactttgaaaactctcaatttatctggaaatgacatcggggatgaaggagctaagtgtctttcagatatattggttgaaaatgtgggtatccagaaactcctcctgaacagtatcaatattggggacgagggtgccaaggcactttcgaacatgctgaaaaagaataaatcaatacgtattctacagttcagcaataatgcaattgaatacagtgaaattcacttgcatggtaatgggattgggaatgagggaatacgtgagttgatgtctgcattatctgctcacaaagggaagatcacagttgtggatattggcaacaacaacattagcccggaaggtttacatcctgtagccgagttcctcaaaaggacaaagtccttacagtggttcagtctctacatgaacgatattagtgatgagggagctgaaaaggttgctgaggctctgaaagataacaaaacaatttctaccatagacttgggtggcaataacattcactccaaagctgttagtgcagtagcggaaactttgaaggataatgcagtgctgacaacactggatttgagctacaatccaattggatcagacggagtaaaggctttgtgcgatgtcctcaagttccatgggaagatccaaacccttaagctcggctggtgccagataggcatggaaggtgcagagtgtattgccgactgtctcaagtacaacacaacgttatcgacattggatctgcgggcaaacgggcttggaaacgatgacgacggagcattcgcattggcacaggcgctcaaggctaacgaggatctggcggtcacgtcattaaatctcgcaaacaacttcttcacgaaattcggacaggtcgctctttctgaggcgcgggaccatgtgtacgagatgaccgaacgggagatagacatttatttttag

SEQ ID NO: 25814 - DNA, 846 bp, Zea mays
  Peptide Sequence Number=SeqID_69189
atggctccgtgccaaaattacatacatgttcaggcctcgacagccataatgaacaaaaacactggcattcaaagtgccattacaaacggaactctggttccgtccccgcgggtacgaacaaccccacgaaatcggggaactcgcggagcgatcgcgggccgacgggcggcccgccgccgcccgatccggcaacagcggcaaccacccccgccccgggcggcgaagcagtttcggcagcggcttcggggcaggtgttacgacaggagggctctcacccgtagaggacgagaaccagccattcaggccgggagacggagacccagggctactggcggggttggcaatttcatcggtagagaagccatctccggctgccgacgcctcgaagcgcgtcggcaggtcttcgccctagtcagaaccgcccagagcgtgggcgccgccctcgcggtacgcagcacaaccgtcgtccggacggaaggcgtagtgctgcgccctagccgagtgatggcggcccacctatcccggcatggctggaggaagtctccgcgaaactggaggatgccattcttccccagacgccaggggaagaaaagggcagccgacccacgcgggggcagccccccgactcgcctcatcctccatcttggcctggatgacgaaaatcctcgaggccgagggaggggcagaggccgcagcccggctcgctttcccccaccatcaagctggaggtcaccatcttgggtgaccgccggtggaggggtgcagccgggctgcatgatgaaaatccttgaagccgaacgatggctgaaaggtaccaactcccacggagttgcgttcctccaatga

SEQ ID NO: 25815 - DNA, 1527 bp, Zea mays
  Peptide Sequence Number=SeqID_69190
atggccacgggcaccggccgtccgtggtgggcgccggcgccgcccgcggcggctcgctccgccccgctgttcccctccccgccgtcgtcgttcacggccgacccgccggcggagttcctctgcccgatctccggcacgctgatggcggaccccgtcgtcgcgccgccgggccagaccttcgagcgcgcctgcatccaggcctgcgccgcgctcgccttctccccgcccactgtcgccgttgacctctctgagtcccactcctgctcctccgccccgctcgtgctcatccccaacgttgcgctccgcaacgccatcctcaactggtgcgaccgcctcgccctgccacacccgtcaccgatgtcgccggacaccgcccacgacatcgtgcgccgcctcatgccgcaggaccggcagcggagctcgctggcgcagcgcccgcagccgcaggtgcagcagcagccgagctccaggcagcggggcgacgctctggaggaggagatcatggccgcgctcggcacggagggcgccacccccgcggagcaggcgtccgcgatggccttgctgcggcaggccacgcgggagaaccgggaggtacggaggcagctctgcacgccgcgcctcctcgccgcgctgcgccccatgctgctgtcggccgacgccgacgtccaggtcaacgcggccgcagcggtggtcaacctgtcgctggagcccgagaacaaggtgcggatcgtgcggtccggcgcggtgtcgccgctcgtggacgtgctccgcggcggccacacggaggcgcgcgaccacgccgcgggcgccatgtacagcctcgccgtggaagacgagaaccgcgccgccatcggcgtgctcggcgccatcccgccgctgctggacctgttcgcgggcgccgccgcccaccgcgcgcggcgcgaggccgggatggcgctctaccacatctccctctccgggatgaaccgccccaagatcgcgcgcgcgccgggcgctgtccggacgctgctggcagtggcagccgcggaggcgcggcgggaccgcgcgagcgacgccgacgccgccgcgctccggaggctggccgccatgatcctggccaacctcgcgggctgccccgacgggcgcgccgcgctgatggacggcggcgcggtggccgcggtcgtcaggctgatgcgctgcggctccgcggctcccgggagcacggaggaggaatactgcatatccacgctgtacgggatgagccggggcagcatgaggttccgcgggctcgcgcgcgccgcgggggtcgaggccgcgctgcagccggtggccgagggcggcggcggcgtgcggcgagacctggcgcggcgcacgctgcgggctatgcgcggcgaggatgacgaggcgccggccatggacagcgggctactcggacggcagtgggacgacggcagcgtcgtgtcggaggggctcgtgtccatccggcggccgccgccgcaccgtagcaatcacgccgggccgtccgggtcaaacacaacccagttctga

SEQ ID NO: 25816 - DNA, 297 bp, Zea mays
  Peptide Sequence Number=SeqID_69191
atgcagcggaacaactcgttcgggacgtcgtgggcggaccagtgggactacggcggcgacccgagcccgagggcgccgcgcgacggcggcgtgggggagaagaccaaggcggccgcggccaccggcatgaggaaggtgaaagagggcacgtcgcaggggttccagtggatcaaggacaagtgccagcggaagaacggcggcggcaacaagaagcagcagggctccgagacggagggcgataccttcatgaaaccaccacttttcgtgcctcgtgttggtataccttcagtaggctaa

SEQ ID NO: 25817 - DNA, 879 bp, Zea mays
  Peptide Sequence Number=SeqID_69192
atggcccaggaagcgatcaacctgacgcgcgcgctgaaaggcgacaataaaacccagggcaactggggcgaggtagtattgacgcgggtgctggaggcttccggtctgcgtgaagggtatgaatatgaaacccaggtcagcatcgaaaatgacgcccgctcgcggatgcagccggatgtcatcgtgcgcctgccgcagggaaaagatgtggtgatcgacgccaaaatgacgctggtcgcctatgaacgctattttaacgccgaagacgactacacccgcgaaagcgcgctacaggaacatatcgcgtcggtgcgtaaccatatccgtttgctgggacgcaaagattatcaacagctgccggggctgcgaactctggattacgtgctgatgtttattcccgttgaacccgctttttactggcgcttgaccgccagcccggagctgatcaccgaagcgttgaaaaacaacatcatgctggttagcccgactacgctgctggtggcgctgcgcactatcgccaacctgtggcgttatgagcatcaaagccgcaacgcccagcaaatcgccgatcgtgccagcaagctgtacgacaagatgcgtttgttcatcgatgacatgtccgcgattggtcaaagtctcgacaaagcgcaggataattatcggcaggcaatgaaaaaactctcttcagggcgcggaaatgtgctggcgcaggcagaagcgtttcgcggtttaggagtagaaattaaacgcgagattaatccggatttggctgaacaggcggtgagccaggatgaagagtatcgacttcggtcggttccggagcagccgaatgatgaagcttatcaacgcgatgatgaatataatcagcagtcgcgctag

SEQ ID NO: 25818 - DNA, 1713 bp, Zea mays
  Peptide Sequence Number=SeqID_69193
atgaaaggactcaataaaatcacctgctgcttgctggcagcactactcatgccttgtgcaggacacgctgacaacgaacaattcggcgcgaacttcaataacgccgatatccgccagttcgtggaaatagggagtcaccatcttggcaaaacgatcctgatcgacccttccgtactgggaaccatttccgtacgcagtgatgagttggtcacacaaattgtaccgcttgagaacgttcctgctcgggacctgacccccctgctcctcaaaatgatggatgcggtcatgctctgtaatgttgtgaataatcaccgctccaaggttcttattctgaccggtcgtgcctccaccattaataaactgattgaagtcataaagcgcgttgatgtcatcggcacagagaagcagcaaattattcatctggaatatgcgtcagcggaagatctcgccgagattcttaatcaattaatcagcgaaagccacggtaaaagccagatgccagccctcctctccgcgaagattgtggcggataagcgaaccaactctcttatcatcagtggaccggaaaaagcacgccagcgcatcacttcattactgaaaagccttgatgtcgaagagagcgaggaaggaaatacccgggtttattacctgaaatatgctaaagccacgaatctggtggaagtgctaaccggtgtttccgaaaagctgaaagatgaaaaagggaatgcgcgtaagccctcctcttctggcgcgatggataacgtcgccattaccgccgatgaacagactaactctctggtcattaccgctgaccagtccgtccaggaaaaactcgccacggtaattgcgcgtctggacattcgccgtgcacaggtgctggttgaggcaatcatcgttgaagttcaggatggaaatggactaaacctcggcgtgcaatgggcgaataaaaacgttggcgcacagcaatttaccaataccggattaccgatttttaacgctgcgcaaggtgtggctgattataaaaagaatggtgggatcaccagcgcgaatcctgcctgggatatgtttagcgcctacaatggtctggccgcaggcttcttcaatggcgactggggagtactgcttaagagcaggccagatgtgccggtgctatccgggtcacagaccacttcaggggataacgtctttaataccgtcgaacgcaaaacggtggggacaaaactcaaagttactccgcaggtcaatgaaggcgacgcggtgttgctcgaaatagagcaggaagtctccagcgttgactcttcctctaactcgacgctcggcccgacgtttaatacccgtactattcaaaacgccgtgctggtcaaaaccggtgaaacggtggtcctgggcggattgctggatgatttttctaaagagcaagtgtcaaaggttcctctgcttggcgatattcctttagtggggcaactcttccgctatacctccaccgagcgcgctaaacgcaacctgatggtatttatccgtccgacgattatccgtgacgatgatgtttatcgctcactgtcaaaagagaaatacacccgttaccgtcaggagcaacaacagcggatcgacgggaaatcaaaagcgctggttggctcggaagatttgccggtgctggatgaaaacacgttcacagtcacgcccctgcgccatcgtcacggtgaggcatcataa

SEQ ID NO: 25819 - DNA, 330 bp, Zea mays
  Peptide Sequence Number=SeqID_69194
atgcctgagccaaacttcatcagcctagtcccatttgcagcttctgcgaaaagaatgcgtgtgccggccctagccggtcctgatctgataggagtggatcttggagatttctccatggccgcggggaagcaacctacaacgggggtcgttgggaatgggaagagaacaggggcaccagagaggatagagcgctcgagaggatacctaggcagggaaggagacagggccgaggaccagggagaggagcgccgtcagataataccacagaggagctccagcgccgggagagaagagcgtcgggagaggagctccagcgccgatccgttctaa

SEQ ID NO: 25820 - DNA, 174 bp, Zea mays
  Peptide Sequence Number=SeqID_69195
atggctccccgcgtcgcctccgctctgctcttcgtcgtggccgtcctcgtggcctccgcggcggcgcaggagtccatggcgcccgcgtctgctccggcgccgggaccggtcgctggcgcggcctccgctccggcctccgctgtggccgtgattaatagacccatcagaaaataa

SEQ ID NO: 25821 - DNA, 631 bp, Zea mays
  Peptide Sequence Number=SeqID_69196
ctgagcttttcagctgggctgaacttcagctgaactcaacttcagctgtgaacctctttgaccatacaccagctgaacttgcctctgggcagttgagctgggtctgccagtcagactggcaaacaggtcgccaggagctgtcaggggcggttcaaccgccccccctgggcggttcaactggttttgatgttgatcctagggcaatagatcttgccatgagaatcgccgaaaggatgttcctcaaaatgaaggaagatgaggcgaagaacaaagttgaagaagaaaatgatcgatggagaccaaacgacgaatccacctcttcacaaggttcgtctttcaaatccacttctcatatgtgctttattgctaatgggagtgacagtgaaagcgaaagtgaggatgaggaggagcaagaaagtgatagtgaagatgaggatgatcttcaacaattcttcgctcagctaagcaagaaacatcggatgagcttgctcaaactcatgaaaagagcggaagaacaaaaagaaatgcttcataagcaagaagacttcctcatcagaaaaatcgaagacttagagaagttgaccaaagagcatgagaagctaaagtgctctcatgatgatttggtccaaag

SEQ ID NO: 25822 - DNA, 312 bp, Zea mays
  Peptide Sequence Number=SeqID_69197
atgggcgggcgcggggatggcactgtgagcatgggcccacatgccagagagagcaaaagagatgagacgacgtcggtgactgacagggggggtgaaccgaccaccgacgaggttctcaaggatcgagaaggcatggtagcatggccagagccaggcgaacatggtggcggggccaatttggttggtggcactctaggaggggctaaccatggcgaggtggcgggctccgcagcgcggtggtcaccggtagggagttggagggagcgatttaggggcaaagtgaggtggttagtgctcgaggtgacgcagtga

SEQ ID NO: 25823 - DNA, 1302 bp, Zea mays
  Peptide Sequence Number=SeqID_69198
atggcgtctgctttgctgacttggacggcgacgtggcaggcgtctgtcccatcgccgtcattgcctgctcgtgtctcgctccggccgtcatcgcgcgcagcatcggcatcgccagcatcgagcccacggcgtcttgcgctctcccttttttgcgcgctcccctcccaaccaccaccgtcgctcccactctaccaagctctcgctgcccgcctctcggtggtggtgttcgtctacgtcaagtacctccccgtgagcttccacatgttccggtgcgtggtgaggtacgggtacaaggacctgcacaagagggacgaggacttcgagaaggtgctgtttgactgcatcctcttcttcgtccgactggagagcatgatggagggctactccgactcggatgagttcagcgtgccggagcagacgcccggctctggtcgcgcggcgttcctgggcgtgggcgagcgcacctgtgcgactgtgtgctctaacggtgatctgagcttctcatcgcaggacttggtcgtgcccgccgctgtgcagtcgccccgagcgccgacggggctgccgttgctgcagtgctcggcgtcggcgaggcagggcactagcggcggaacggtgggcgacgagcttggaatgatgccgtcgaggaggcgtgccagatcggcatcgacatcatcgcccagccaggaggtagtaagaaggaagaggacgtcgtcgcgtgctgccacaagatcctttcttcctcattttcttcgccatttcgaaaccgcccgacgccgccacgccgtctcgccgccccgtgccggccccgcccggtcggcccacgctccacgccccgtgtcgtccctgccgccctccgccactgaccgcactctctgccacctcctccgcccccgatcgcgccctccaccgctcgtcatcatcgtcgacgtcctccagtcgggccctctgccgccctccgccattggtcgcgccctccgccatctcctccgccctggccgcgccctacgccgcccgtcatcgtcgccggcatcctccggccgggcgcccgcgcccttctcctccgccgtccgccgtccgccgtcgcccttctcctcgcgcttgtcgacgatctccgagccctcattggtgaatgagctcggtgccgtagatctgggcgccgaggtaggcgccgagatcaatggcgcctacctcggcgccaagatctatggcgccgaggagaactgcacatcaatgatattaagaaggagaaaaaagaggtccaaaatggaccaattacaagaaaacctcctcacgaaggccaag

SEQ ID NO: 25824 - DNA, 636 bp, Zea mays
  Peptide Sequence Number=SeqID_69199
atggtgacctccagcttgatggtgggggaaagcgagccgggctgcggcctcttcccctccctcagcctcaaggattttcatcaccaaggctggggaggggactgcaccgtgcctggctctcggatgcgagtggcttcggagccgctcgcggcgccggcgtctgccacgacagctggaagaggttctcccgccggcgagatagccaaggctggccacggaccgacctccaactctacggccttctgcccgtccttgcctcacaagtttgggcatgggcgggggcctcctggcagcagcatccgccctgaggtcagtgctgccgctgttcggccctccggagcagaagtcgtcgtcgtcgccgctgctggagcgggtgacggcgcgccgttcgtcggtcttctgttgctccacaggcccacccctatggagtggggttactcgcctgtcgattatctgaaccgcttcaccaagcataagtcgccctgtgtcaaggtgacgagtgagagtggggatccctggaccgcgtcgccgtccgaggctaggtcggacctcgctgaaggtgtcgccgatgccgagggtgctactgcccccttccagcgtcaagacccgagcctacaggatcagagtgtcttgtag

SEQ ID NO: 25825 - DNA, 418 bp, Zea mays
  Peptide Sequence Number=SeqID_69200
ggaccggggaggtgggctaccatggctagagccaggcgaacatggcggcgggggcaatttggctggtggcgctctaggagggactgaccacgaggaggtggcgagctccgcggtggtttggtcgccgatgaggccactgggcgtgacggggaaggcgaaagtggtgcctcgtgtccgtggagaggtgatgaaaggaggggaggaggggaggctggtgggctccgatgaggcgcacaacggcagcgataatggcggcacagtggtggcgatgggatgggtcagtgaagatggtggcgtgcgggacactgtccggtgcccaggtcaaggcaccaacgaactggccactcttgggttttctgagaggcgctccactataattcaccggactgttcggtgtgcaccggacagtgtccgttga

SEQ ID NO: 25826 - DNA, 1506 bp, Zea mays
  Peptide Sequence Number=SeqID_69201
atgacgactcaaggaggtttgcagccgacaagcaatgaagctaatctgtgcaccaacgacaatggtagccaacttggtacacggattgtggacgagattatggctgggaagaacgtcttctttgatcttcctgacaagttgactggtgagatatggaccttgaaattccattgcattggagcacaacctggaaaagaaattgtcacagtaaatattgataaagcttatgttgccttttacaacgtggtgtacataaaatcgaaacttggatattctgggagggacttcttgttttacaagaaacgatgcggcattgatcgatccaggctattggcacttgattacatccaccaagaagaggccatgctgtctgataacatggatgagagaaaaataagttttgtgctcacaaaagatccacccagtggtctagaggtaagcataactcccatcaagtgtccaaggcagcgaacaaatgttgatgaagaaactatagaagtgtcgattgatgcatataaggagtggcttgcaatactacaacatgataatccagaaacggtattgtatgaacgacaaagcaatgatgacctaatattatcagatgaagaaattcatggcagcagcaaacctactgctaattggccatctcatgctagacgtcatagaaaaagagatcctgatgttattggtatatatgtagataacgatggagtcttcaaaaaggaggggcatggtacccttaagggtatagcagtagccaccaagcgaatcaagaacggtgatcacaaacttaagattgaattttcatctaagcttggaggtcccgtaggaccaaacactcgcacttttgtggatgaaatcgtattgtttacaaagaaaaatgcaccactcattggagtgaaaaagtggaaagatatagagctcaatgttagatcttctatagcctctgacgtactgcgaaggtgggagtttccaagcaatgaggacgcgcatgaaaagatctggtctattgccaaggagagatacaaaggaaggcgatcaactttaagctcaacatacaaggcatacaatagttatgctgaaaggatgaaaaacaagcctaaagatgtagacatcgtcgagtggcattacatgatgttgtattttggatctgagacattccagaaaataagcagccggaactcggaaaaccgtcagaaacaaagaacgaagcatataatgggttctagaaccttttcccaaataagctttcaacaggagaaggcaactgagaaaattgttgagaaaatgtatcaaacagaaagatttgatctaacaagagaagaggaaaatgctattttccaaacaacattcaaggaaacaataggatgtaaggcaaacagacttcatggtcatgggtacctatcaagatatccaacaagaagtcaagtgatggaatcaaagttcctcgaacaagctcgtgccacagttgcaaccaaccaaaagaacattgaactcgaaagttag

SEQ ID NO: 25827 - DNA, 375 bp, Zea mays
  Peptide Sequence Number=SeqID_69202
atgcccccgcacccctcgtgttcgaagacatcgaagtctgccccctacccagcacgcccgtctcccgagccccctacccccacatgctcccgctgccaactagccataccccgccgaccatgcgtacgtcgagtagatccggagcggtggggttgggaagtgcccgaggtgagagcaggcgaggtgatcaggtccgcttcctccttctcttcctccgttggcttctacacgctccaggacgaggaggaggagggcgatgagggccgcgtcccggaggcatgggagcacacatacgccgccctaggccaggccatagatgaaggaaaatcagattgggatgcattgtttgagccatatccattttttgaatcataa

SEQ ID NO: 25828 - DNA, 426 bp, Zea mays
  Peptide Sequence Number=SeqID_69203
atgcatatatcttactcattgcattcattagattgcaatctcgctgatggagagtacgtgctcatccccgagcaaggagctgtccacgaggaagaccaggagcaagctcccgagactgccatcgaggatctccccgcagccccagcattcgaaggcaagccccgttatggtgggtacaagtgcggtcactgcacgacggcagccggggtcagtggagcattgtatgccaaggcggtacgcttcaggatatggttgatgacaaccgatcaagccaaggatggaagcaagaagagcttcgaggtaccgagtgcacgggagaaggtcaaggagaccacgaacccaaagacaagggtgaagaagaagacttgcaaagtcaaggttgatcgagttaagaagagttatggtgcatcaaggatcactacataa

SEQ ID NO: 25829 - DNA, 285 bp, Zea mays
  Peptide Sequence Number=SeqID_69204
atggctcaccagattgctcggtctacgcgtggccacgggcgaccgaagtccgacgaggacgatctcgggtctccggtgaagttctgccgggtccaagagcttggaaaggtccacgggctattggcgaagctaaccgagtggctggcgtggcttggaagtgactggagggagctggccaaggtggccgaggctcgggtggtgatggcgggcggtggcgcggcgtgcttgaggcgaagtccggtgaacttggctcgggcaggacttgagagcgcgcggggaggctag

SEQ ID NO: 25830 - DNA, 513 bp, Zea mays
  Peptide Sequence Number=SeqID_69205
atgcgtagccgcgatattcgcgccgacttcgcccttggcggtattaccgcgacgatggatgacctgcacgaaaaaggtctgatccgcaaactgctggatgtgcagagctttgacagccatgctgcgcaatcgctggcccgtaaccccaatcacatcgaaatcagcgccaaccagtacgctaactggggttcgaaaggcgcatcggttgatcgtctcgacgtggtggtactgagcgcgctggaaattgacacccagttcaacgttaacgtgctgaccggctctgacggcgtactgcgtggtgcttccggtggtcactgcgataccgcgattgcctctgcgctttccatcatcgtcgcgccgctggtacgcggtcgtattccgactctggtggataacgtactgacctgcatcaccccaggctccagtgtcgatattctggtcacagaccacggtatcgcagttaacccggcacgtccggaactggcagaacgtacccacccccaaaagcattaa

SEQ ID NO: 25831 - DNA, 240 bp, Zea mays
  Peptide Sequence Number=SeqID_69206
atgatgaaggcagtatatggcaaagttatgtctagtcagcacggatcatactacgactggaggaccccacctattgatcctcaggctctgtatgcaaatggtggaaaacctcatgaaaggtactcgatgttcaataatgtcatcaattcgagtgaggtggggattcggagggaggttcatcgagatctcctgcttgtagctcccgtcgctccacctcgggatccaatagaagttgagtga

SEQ ID NO: 25832 - DNA, 108 bp, Zea mays
  Peptide Sequence Number=SeqID_69207
atgaccagcatcaacgcgagattgaagggcttgattgtaagtttaattattgttcatgataagatcatattgttaattggaacaaagagcgaccacccgggaaaatag

SEQ ID NO: 25833 - DNA, 156 bp, Zea mays
  Peptide Sequence Number=SeqID_69208
atggccatgatgggttcaacatcggacaagatgtacctctgccagatttttaaggatccactattagtaagcatttttgcaaacagtcttgattcttggttaagccttaccttgactcccttaagccagcatatcattgagagtcttttcttttga

SEQ ID NO: 25834 - DNA, 516 bp, Zea mays
  Peptide Sequence Number=SeqID_69209
atggccgtcatcttcaagaacaagatcactctcagcctaggagctatgttctgcttcggaaccatatcgtgcatagcagacataaagggaactctgcaccacatagcagatccacccgagaagagaccctcctcgggaatcccgagagaagccgaagcaagtctgcgagccacgcccttgctcacagctcgggggaagatggcccctcgcaagctagggctcaagagccctcggaggatggagggccagtcagttggggggagattggagtcattgcccgtctccgacgatgaacctgcaaggggaggagcccccagtgtgatgcctggcgacggagaaacagacgccggaatgtgtggcggcatcatgaagctagggaacgggacccagcacaacctgtatcccaggacaaagcttcggaagtgggagaaacacctgatgaacgagtacaccgagaaagacgcaactcccgccgctgtgattgccaagaggctcaagagcgagagtgagaactaa

SEQ ID NO: 25835 - DNA, 180 bp, Zea mays
  Peptide Sequence Number=SeqID_69210
atggaggggatagaactagcgcctcattacataggaatagggaggttggcatcaagatatacggcgccaaggcggacaacagtagtgttggtagtttttgggatttttgcaggggcaattagctgtaatcactgtaaaaatcaggcacttgaaccttgcttgtggaaaggagggaagtag

SEQ ID NO: 25836 - DNA, 963 bp, Zea mays
  Peptide Sequence Number=SeqID_69211
atgcccgtgttcgtgacatggagttcactagagtcgagggtcatgggcgctctaggggtcctagggcgacatggatggctcgacaaagttagggggagtgtggagaacacgaaggcggggattaaatcagggcaggggcaccggagggtggtggctcgacgatggcgccacctatatccggtgaggaatcacgcgcaacagagagcaaggcagggaaaaggagagggtgggggaggtttgttacctcaagggggacctcaaggacctcttgactgcagcaggggcacgacggtggctcggatcgatgatggcggcaccgaggctgcgtggaggagggcgggtgctaaaggttcacacttagccaataaaaaaagacaaaatattaggttcaaccatagagcaaagggacaaccgaaggcacctctggcctggcgcaccggactgtccggtgtgccaccgtacatgtccggtgcaccagaggaccccgacttcaaactcgtcaccttcgggaaattccagaggcaactccgctataattcaccggactgtccggtgtacaccggacatgtccggtgctccaaggaagagcggcctccggaactcgccagcctcgggaattcctctcagctgctccgctataattcaccggactgtccggtgtacaccggactgtccggtgtaacagcggggcaacggctactacggcgccaacggctacctgcaggcgcaattaatgcgcgccagcgcgcacagaggtcagacacgcccatgctggcgcaccggacaatctacagtacatgtccggtgcaccaccggacatcgaggcgggcccagaagtcagaactccaacggtcagattccaacggcactggtgacatggctggggcaccggacatgtccggtgtgcaccggactgtctggtgcgccatcgaacagacaacctccaccaacggtcaagtttag

SEQ ID NO: 25837 - DNA, 237 bp, Zea mays
  Peptide Sequence Number=SeqID_69212
atgaaggctgtggcgcaccctggcatcatcgactcagatgagtcgaacgggagcgaggaggagagtttcgaggagttggagcaggacagcggtgatgacggcaagggcaacgacaacgacgacgatagcaacaaggacgacaacgacgacaactataatggtggtggtggtgactgcgccagcaagggcaagtgtagcaccgaccgcaacgctggtggcaaggcaccaccagcttaa

SEQ ID NO: 25838 - DNA, 252 bp, Zea mays
  Peptide Sequence Number=SeqID_69213
atggcgaggagatccggggaggagcgggcggcatggcggcgacaatggttcgggggcggctgcgggcgtgtggtcgggctggttcgggagcgactgcgggttctacgggtcgcgcagggtgagcgtgcgggtgacatcgttgatcgcgacttggtagaacgtgcggaagcacgtcgaaacacaagagagtttatacaggttcgggccgctagaatgcgtaataccttacgtcctgttgatgctcagtattga

SEQ ID NO: 25839 - DNA, 744 bp, Zea mays
  Peptide Sequence Number=SeqID_69214
atggcttgtttctggcctggtctcacatggcccaacccacggcccaactcggaagatgggtacaagagcagcatcagaaaaatgaggaagcagaaaagaaaagaatcagatcttattcccttctgtcgccgtcttccgtacgaaggcgcgattcagctcgccaacgctgaacggcggcggccctgcgccgatggaggccagcaatttatgtttcgtgtgcaggaaatgggggcgatagctaggctcagccgggacgtacacatggaggtggatgaagagctgcctgctgatcttaccggtggctcaaagcaggcagccaccacgacgcccttctacctcgccttagatcacacagcttccgccacgtcgtctccaccgccggcggaggcgccgccgctgtcgtgtgctgccaacagcgagaggggatccgaaataatcaagatctttggggatcctgacgtggtagatattgtgttcacctgtggtgctgatattttggctatgtgtgatgtgacttgtgattgctttgccaatgcaacctacatggagcgggaagggagaagaacctcaagttcattgcgcaggtcccagcagatttcgacagaggataacatagttgtggtattactaatgaacatagttgagattgcaacagtgattagagtcgactgccttgggtttgaagtgccagtgtgcgcagaactccagtgcatatctcaagatttccttttcctaaaaggttaa

SEQ ID NO: 25840 - DNA, 792 bp, Zea mays
  Peptide Sequence Number=SeqID_69215
atggagatactagaggagggagagtggggacactcctggcggccggcggcgtttgagggagagccgatggacagggtgaggctcgtggcgccgccgcgcgccaccaaaaaaattgatgctgccgccgccaatcgccatccgcagctgcgtgccctagtcggccggccacaaccgccgtcccagccgcgcgcccaagcaggccggcccccaacgccatcccagccgcgtggccagaagcaaggccccttcgtcgcctccgtccgccgcgctctcacctgcatccccatcccctccccatcctcctctgactcctccgacgactgctcctccggctcccgccgccatggccaccacgacgcccacgccaccaccgcctcctcctccacctccgtatccgacgccactgcccgcccgttgccaccagcccccgcctacgacgtcaacaagtccatgctccgctccttgtacgccgtgcagacgcccaagcggagccagcaactggagatcgaggtcgtggcggagaaaccgcgccgcctcatcatggccgacggcggtggcggaggcgatgccaagccagaggccgccctggcttctgaagggttcggcagaggggacaaggggccagaacgatgttgcagcattgatgatgaacatggagagctggcgaaggcttacgcgcccacgctgaggccgccgcgcctgctcatggacggggtcgtgcgcccgcgttgggtcgctgtggtcggtagggcccacgctggggctgccagggtcacgctcgagcgccgctag

SEQ ID NO: 25841 - DNA, 357 bp, Zea mays
  Peptide Sequence Number=SeqID_69216
atgaggctcacagcagctgagtccagcctcgggcgccacaggaagctccgcctcgcccgaccttgggcctcggcctcaggagaagtctgcgcctcgcccgaccccagggctcggcccccgcctcggcctcggaagatggactccgcctcgcccgaccccagggctcgggctcgacctcgacctcggaggacggtttccgcctcgcccgaccccagggctcgacctcggccccgacctcagaaggaatcgcgtcctcacccaaccccgacctcggcctcaggaggagtttccgcctcgcccgaccttgggctcggaccgaccacaccacaggggggatcatcattaccctacccctag

SEQ ID NO: 25842 - DNA, 210 bp, Zea mays
  Peptide Sequence Number=SeqID_69217
atgcagatggggctttgcttcgacgccgacgaggaattgacacccaatgggtactactccatgcccaacaccgatataatcttgctctacgcgctgcggcgaactctgttggctggattcgaggtcgcaataacggcaaaacccaagcgcagcgacggtggcaccggcgctctatttctctcagtccctccgcacgacgctaattggtga

SEQ ID NO: 25843 - DNA, 486 bp, Zea mays
  Peptide Sequence Number=SeqID_69218
atggaagaaaatagtgagacttttgtgctgcattcgaagcaagaaaggaaagacaaagtaaaacctatgcatattattgatgttcctggtcatgctaggctcaaacccaaacttgatgaagtcctgcctaaagctgctgcggttgtctttgttgttgatgctcaagatttcttgtctagcatgcaagctgctgtagaggctcggactcgggctaagccccggaagacggcgaactccgctccgcccgacccagggctcggacttgggctcagccccagaagacgacgaattccgctccgcccgacccagggctcagacttgggctcagccccagaagacgacgaactccacttcgcccgaccaactccgccctggcctcagccaacggcctccgcctcgcccgacctaggggctcggactcgacctcggccacggaagacggactcgacctcgacctcagagaagcccccacatcgcccaacctag

SEQ ID NO: 25844 - DNA, 381 bp, Zea mays
  Peptide Sequence Number=SeqID_69219
atgacgttaacagggttctcgcgcaagatggcaacagctctgttaatctggcctctcacgggcactgtgcggggggtatttatagggatgcctttacaaattaggcacgtaatgcgcagcggccacgcagggcccgttacaatgggccggatcacccgtggtcctccgagctggacgagtccgcacggtggggtgaccgccgtcgcaggccttcgtctgatgtcgtacggggcgaagggtgtccctgcccgttttgtctctgttggaccaacgactgcagtgaaggcctcgagcgaagggtggcgtctttgccttcgccccaacatttgccctccgagggatcagttcgacaaagtcatctggtgccgaagacgtcgctag

SEQ ID NO: 25845 - DNA, 294 bp, Zea mays
  Peptide Sequence Number=SeqID_69220
atggagttaccactagacgcgcagagcagcggaagacgtctcgatgtagacgaacgcgtcgagcagtgccgtgtagtcatcggcatccttcacgtcctcgcacggttcgtcctagtgctccagatgcagcacctccgaggtatccacacgtacagggaggaagcgtcgcgtaccgaactgctaggttcgcgacggcggcttggcaagggcgagaggcgttatggtgggcttctaacaccgaggcccatcattaaccctaaagcccagtctaatttcggatttgatccgaattag

SEQ ID NO: 25846 - DNA, 984 bp, Zea mays
  Peptide Sequence Number=SeqID_69221
atggacaaggatcgccagggagctgcacagaagcgccaggcggttgtcgggcttcatgaagccaggccgaagaggcagcgaggggctgcgaaggctgctgcccccggcggaggcaagccgccgctggcggcgaagtcggccgtccctgcgtctagcaaggcggcggaggctgcggctggcgccggtggttccaagtctgcgaagactgtgccgccgtccagcagggcgccggaggtcgcgaaggcggcccgagggttgccgtcgccgggcaagcgcgtcgccgacttcgccaccgatattagtgtggacgactatcttggtgggtcggacgaaggccaacttgttattgttgcgcctgccgcggcgaccatggcggctgtcgtagtgccgaaggcgaagggcggtgctcttagtgccggaggcgagatgccggcactcgctgctgtcaaggacgaggcgggcgctgtgttccccccgctgaaggagatgaagagcgctaagtcaggcggggggcttcgcagaacggagcgcgccgcgcagttggaggagcggctcaacgccctgcagagccgtgtggagaggaccgaggccgcggcgcgcgcggaggctgagcggacgtgcaaacagcttatggattcataccatgagctgggcgcgcggaccggtgacttcgaagtgccggaccgagagcccggacttcgctgcctggagtgggtgcaggaggagttgcaggcactccccactattgtggaggggtttatgtcgtatgcctccctggtcacctgcgagagggcgatgaacgcgctctctcgcgaagggtgccggcactttgaggtcttcgaccaagctgatgaggattttgagcgagatatctacaaggttgaagaccctatagtgaaggagtcccccggtgccatcttcgaccggatgtggggcccgcacggtcgatttttctctgagcgggccgagacggcgagggctcag

SEQ ID NO: 25847 - DNA, 1044 bp, Zea mays
  Peptide Sequence Number=SeqID_69222
atggcggcggaccagcagccgcagctgcaggaggagatgaacgacgctgccggcggcggcctcaggctgcctccagggttccgcttccacccgagcgacttcgagattgtcagcttctacctcaccaacaaggtgctcaacacgcgcttcacctgcaccgccatcacggaggccgacctaaacaagattgagccatgggacctccctagcaaggcgaagatgggcgagaaagagtggtacttcttctaccagaaggaccgcaagtacccgacggggctgagggcgaaccgggccaccgaggccggttactggaaggcgacgggcaaggacaaggaggtctacaacgccgcggaaggggtggcggtactggtcggcatgaagaagacgctcgtcttctacaggggcagggctcccaggggtgacaagacaaactgggtcatgcacgagtacaggctcgaaggcagcggcaggctccccgccggcctcgcgtccgcaaccggctcagccgccgccaacgccgcggcggccttgaaagcttctgcttataagaccactgggatcaagaagaccactgctgcaccggcgtaccaggtggccatggccggcgctgagatggatcagaatcagaacaacttcccgggcatccccttccccatgccgatgcaatttcccatgctgccagacttctccttggacccggtgcccccctactaccccaacgccgctggcgcggggatgtcgatgcttcctatggcagcaggtataggtggtggcgccggtgggttccagctcaacggcgccgccctgttcggcaatccgatggccgcgccgcagcccatgagcttctaccaccagatgggcgcggcggggacagcttgcgctggcggcttcgatgtttctgcgccggagagtaggccgtcctcgatggtgtcgcagaaggacgaccaggctaatggcgctgagatctcgtcgatgatgtccgtggccggcccagggcctgcgaccaccaccaccatagagatggatggcgtgtggaagtactga

SEQ ID NO: 25848 - DNA, 600 bp, Zea mays
  Peptide Sequence Number=SeqID_69223
atgggccattctatctcctcctttgattcgcctagactcgatgacaatccgcccccacctgtcaggtcatcttctaaccaaggaccaagccacgatatctcgctctggtctgttaccgagcagctcgtggggtttgatgctgctgaatcctcgccgcgcaacccactccctgctccccaaggctggcccctatttgctcgccgcgggacccgcgtgtccacacgccttcaagccctgtcgactgcgcctgcgtacaagcaccaccgacagagagagaagaaagtgagtggccaccgccatctggtgcttgcacagccgcttgcggtccgtgttgcgattcgagagcttcgtgagcacgcctgtgaggcaaatccatccccgatttggcaagaagcatcgtggtctggtggtaattcttcaccggagcctggtggcgacgcggaattcctttccctccgtggaccggctcgagcatcctcgcaaccaccgggggggtctgatcggacggttcgggatggatcaagcttcataaaatcagagacgtcggattccgatcctatggctgcccttgcgtaccggttcacaagaaggccgatttaa

SEQ ID NO: 25849 - DNA, 168 bp, Zea mays
  Peptide Sequence Number=SeqID_69224
atgggcgaggggaggtgggcgagcagggtgcggggctcaaaaggggcgcgggggctcggacgtggccggagaacgcgcgaacgtgggcgtgtccacggcggggagatcgtgggcaagagggttttcaattcaaattcaaatcaagtttcaaattcaaaccaaatctaa

SEQ ID NO: 25850 - DNA, 465 bp, Zea mays
  Peptide Sequence Number=SeqID_69225
atgccacggcgtagacgagatctggcagcagtggctccatcctccttgcactttcctctcggtggcgctgcagcgaggcgaaagaagctgcggcacaaggtagatgtcgagagggggccgcacgagttttatacccagggtagcggccaaagtccgactcagagccagccgcgagatccgcgatgttttgttgagccacccgcgagattcccggcattggcagcatggttagctctgaccgtcaagcgttctattaccgaagaaatcggggaagaagattccgacccaggggccccaccccccagagaaaagcgacgcgcgcgcaagggagcattggctgactcgcgggccccacccttcagtgggcgtcgcacaacgtgggtgaagtgggctgccactgggattcggatcccacctgtctgcgggtgccaggtgcgcaacggagaggggaatgggccgaaatga

SEQ ID NO: 25851 - DNA, 108 bp, Zea mays
  Peptide Sequence Number=SeqID_69226
atggcctgggacaaggaccacggtggtgtgcgcgacgggacgtcacttgtgctgtgggagtggtgtgagggagacaaccagcgctggaagactgttccctggtattag

SEQ ID NO: 25852 - DNA, 891 bp, Zea mays
  Peptide Sequence Number=SeqID_69227
atgaagctgtggaaggagacttccaggagttccaagactacgacgagttctagatggctcgacttagacacactgcacgaaagtccgtcatccccttcttaccctcccgccttgctgagcgtccgcttcgccgtcccgtggccgcaggagatagagtctgtgaggagctgctctcctgtgcttcccctggaggcgccccctgcaccaccactgggcgccccagcctctggagtagccgctggaggagatctagatgacggaggtggtgacgacagctcgagccacgacaccgacttccctgctgaccaggagctggaaggatgggttgctcgacccatcactcgtgacgctgctcgcgggtgtcacttccacgacgcgctcgacaccctgctacgtcaggcacttaaccgacgtacttggtccatcgagtatcactgtgtgggtgcggaggcctgctcagagcactattccatctctgagcgggactcagctgaggcggccatgcaagatgccgcatggcgtgcgctttcgcactactgctcggttctcggtggggtagctgacggtctcgacctgaagtattacccccgccgtccatctggcagcacaggaggcgtgattgtttcacctgctggtgaggacaatcctaggttgagcagcacagtcaacctagccaccgtgctaaacacggagctggaccatgcactagacgagctgagtagggctcgtgctgagatcgccctgctgcgggctgagcgcgcggaacgtcgtcacctggatgatggttcccccgctcccgttgggactcagcacccgtaccgctcacctcggcgtggacaccagtcttatggcaatcccgactgcaagaccaagataaatctagaaccatag

SEQ ID NO: 25853 - DNA, 267 bp, Zea mays
  Peptide Sequence Number=SeqID_69228
atgactctcaccaaggaaaatgacaaacaacaagcgtcatgtcaggttgagcgacgtgtctgctacaagtgtggtgagaagggtcatctactcaagagacaactgatcaagccaaggatggaggcaagaagagcttcgaggtaccaagtgcacgggagaaggtcaaagaggctgaggaacccaaagccaagggtgaagaagaaggcttgcaaagtcaagggtgatcgagttgagaacagctacggcacatcaaggatcactacataa

SEQ ID NO: 25854 - DNA, 429 bp, Zea mays
  Peptide Sequence Number=SeqID_69229
atggcccacggcagaaatctgttttccggtgagaaattcaccgagcaccagggtcttcccagtccagccaataccgcagatcgcttccccgaaggtctacaaatggcccgaactcgctctcgcctccggaacaccgccacaaccaccgatgctcgacggcggagcacccccaacgccttcggttccgcacgacgagcattcctggagatgatgcttcgagttgatagagttggcgtattatatagggcaaaggccaccaagatcggtgggatggttgcaacagtctccgagttcgccgggagatctggccatggcacgcgcgcggcaaaggcggccaggataaaagatatctttaaagcatttataggtttgggtaaaaagagtagggtcctagtggttactttaggatcagataaatatagtgtttag

SEQ ID NO: 25855 - DNA, 510 bp, Zea mays
  Peptide Sequence Number=SeqID_69230
atggagtcatggggcaacaacggtggcacagggacgcgacagacgatggtggcggagctccggctgtgcgagaatcactccggtgagcgcgggccggctgaaccaaggagggaaggggcacatcgaagggtgtcccaagcagctgatagtgaggcggagctcaccgtggcactggacggggcgcgaacgcgacggtggccgcacaacaggcggtggtcggtggcgggcggtggcggggctctctgcacacatgggcagagcgagagagagggcgagcgagcctggcagagggcgcaaatgggtgaggggctcaaaaggggcatgggggctcaaaaggggcgcgggggctcggacgtggccaaagaacgcgcggacgtgggcgcgtccacggcggggagatcgtgggcgagagaggtattccttgtcgctgcgcgagaacttgcaccgcgacacgtcgccactgcaccgacccaccatagccccgctagccctactccaccatcaccctag

SEQ ID NO: 25856 - DNA, 744 bp, Zea mays
  Peptide Sequence Number=SeqID_69231
atggcctcggccacccggccccggctcggccgccccccgccacggcccggccgtcccggcccctgctcggccgcccccgaccggctcggccgcctctcgcgcccgccctggcgttccccaccccggatcggcagcccccgccccggcccggccgtcctcgccccggctcggccgcccacgctccggccccggcccaaccgccccgcgcctggcctcggccgcccctgccccgccgtgccccggctcggccgccgcccccccggctcaaccgaccgccccgtgccccggcccgaccgccccgtgccccggctcggccgaccctggcccgaccgcccccgtgccccggcccgaccgccccgtgccccagctcggccgaccccggcccgaccgcccccgtgccccggctcggccgcccccgctctcggcctcggtcgtgcccccgcccgtgcgccgtgcttgcccgctcgccccgccgtgccttgcttgcgtcggccctcggcgtggcctcgagctcggcccagcgtgccttcggcgcgcggcctcgagctcggccagcgcacggccccgacgcgtgcgcgactcgttcgcggcacgttaagtgtggttttgcgcgtgcgcgtgctcgcgcagcgttctggagtagttcgtcgtgctcgcgacgcgacgcgtagcgccctattgcgctcgcgacacgatcgtctaccccctagccccgtctacccccccgtatcctatatgcgctaa

SEQ ID NO: 25857 - DNA, 207 bp, Zea mays
  Peptide Sequence Number=SeqID_69232
atggcgttgtacgggtacaccatgtcgatgatgtcgaacatgactgatgaagctgaggtgcccgatctttcggcgagtagagataattccgatttgtcggaagatgacccttgcgatccgactacgacgagcaagcccgaggcgccaatgcaatcgctgaaccaactccctgtggttaccgaccttgctgatgcgagatcggcctga

SEQ ID NO: 25858 - DNA, 573 bp, Zea mays
  Peptide Sequence Number=SeqID_69233
atggctaaaaattttggcagcaaaacagtgcaaatagcaatgaatgttgtggtaacttcacacctactcgtctgtttatatagtactgcagcatttgagaacaagtccccaacagggcttgtgagaatcgccaactctgacaggtactgctttaatgaagcgaaggctgccgcctgctctggtccccatgcgaagtcttttgcaccgtggagtgttttgaggaaagggaggcttcgctctgcggatttggagatgaatctgttgagggcgaccaatctgccggcgaagtcgtgcgtcccgcatgttcgcaaacgtttcagtgaggtcagccagatggtcctccttgcttctgctggcgacgacgatgtcgtccacatacgtaaatatgtttctgctgacttggctctcgagcaccgttttggtgagtcgagagaatgtggacccggcgttcttaagtccctccggcattctgatgaagcaatacgtgctgaagggtgttatgaaactggtgctggccttgtcttcctctttcatatatatttgatggtagccggagaaacaatcaaggagtga

SEQ ID NO: 25859 - DNA, 375 bp, Zea mays
  Peptide Sequence Number=SeqID_69234
atgagtgcaaatgtctgcaaatgcaaggatgacttctgccttcatacctctaaggatatgaagccgcatcgtacccctcctcgggcaacgtacgatgctaaaaatgtaccgggaataggatgcaaaccaaacggtagcaaccaccactgtatttacttgcctttaccggaagttcgggcaaatcccaagtacgatccggaagcccaccaccttggattctccccctttccttcctcccttcttccctccaccaaaacgattgaagactcgcaccacgacgacgatgatccgagcggcaaggattggcaccttgggaggaggggattgagagggggggcggctagggtttggtggctgcaagaattgagagagtag

SEQ ID NO: 25860 - DNA, 522 bp, Zea mays
  Peptide Sequence Number=SeqID_69235
atggcacccaagagagctagctcgaaggcagccccatccgttgacgatgctgcgaaggcagcgttgctggctgagaaaaagggcaaggcccttgtcgacaccacccaccaagaagcctgtgaagacgacgcactcagcaagaggcagcgcaatgaacaactcacacccgaaggtagcctccgcacctgcagctccggaggacaaccacaacctcccccaggcttcgctccaccggagggtgcgaacgccaccgaggacggcgaagtcattggcatttcagtagaggaacaactacagctacgtgccttgcgcatcaagaaccacaacctcgagaagcaaaaagaaatcctcgaggccaagcgccaacgtgcgtctgcgcaagccaaggtgcgccagatgatacgcgatgaagagcaaaaggctcaggagcttgagcaagagatcgcgcttgtaatacccaaaaatgtagacaaggagaatatagttgatctccctattttatgtgccatatattcatcataa

SEQ ID NO: 25861 - DNA, 198 bp, Zea mays
  Peptide Sequence Number=SeqID_69236
atggcccaggtcctgcccgacacgcgcgtaagtgcaacatcgcatggagaccccagcgaactcaagggggaaatttctcagttcgccagggtgccactggtgacccgaattgactcgtggagcaacgccgacgacgagcacctccgtttgtctgcggcggcgagtcttccgctgtcttggatggcgcaggcggcgtag

SEQ ID NO: 25862 - DNA, 174 bp, Zea mays
  Peptide Sequence Number=SeqID_69237
atggagagtcatgatctccgtgcagaaagggaatcacggcttgtgggtggttatgagattgatggtttcggttatgactatggtgctggttgtcagcattgcaaccactgctcaggcgaagatgaagccgtggaaggagacttccaggagttccaagattacgacgagttctag

SEQ ID NO: 25863 - DNA, 255 bp, Zea mays
  Peptide Sequence Number=SeqID_69238
atgagtttgcggtatgaccgtatttatacgcctagtgcgttgaaaattgaaagaccccgcttgtcagtgaatgttgctattctagcaaagggaaggtatcttcggactcaagtcggaatcacagcagaccagaataatacgaagattgatacagcgccgaaggtgaacagtaccctcgtactgttcacgctgatttggcattcgcttttgcgtcacgcttgtactttcatctccttcaagttgaagttacaatag

SEQ ID NO: 25864 - DNA, 123 bp, Zea mays
  Peptide Sequence Number=SeqID_69239
atggggaagcctgtcccatcactcctcatgctcctcctcggccgaggtataaccttcataaccttcgtccggaatccattatatcctgagggaaataatgcttcgaaggacgaagaactataa

SEQ ID NO: 25865 - DNA, 411 bp, Zea mays
  Peptide Sequence Number=SeqID_69240
atgaggttggagttcgtaggggtccttggcagggcctgggcgagcacgtcgtcgcgcagggacgtggggactcagtcaatggcgaggcagagctggagcgaaggccaccgcggcctggggagggaagcgtggagggttgggagcgacgtccggcgtggtgagcacagggaggcaaggagaccggcgagcagagagatgaggctgatagccggtatggcgccaaggcatggctatgacggcataggtgatgatagagctggagtgcccgatctttcggtgagtggagataattccgatttggtggaagtagaccctcacgatccgactacgacgagtgaacccgaagcgccaatgcaatcgctgaaccaacttccaatggttaccgaccttgctgatgcgagatcggcctga

SEQ ID NO: 25866 - DNA, 336 bp, Zea mays
  Peptide Sequence Number=SeqID_69241
atggaccgggtaagtctcagtgtcgttctcaaattccttccgcaaaccgtctctacatcacctggtcaagcctcccgcgctaatgactatagtgccgtgagcaagccggattcctcgccgccgacgagctcgctcgcctgtgcacgtagactggcctactccgaccatctcagaagacgatccgcacatcggcttgaccgacaagacctccactacaccctcaaccacttcaccggagtaatctcaccgccggcagagaacttaggaaatttgtatcttgagaaatattcaatcaaatttagtcaaaccagttttactggattcaaaatattatga

SEQ ID NO: 25867 - DNA, 285 bp, Zea mays
  Peptide Sequence Number=SeqID_69242
atggcatggagacttacccggtccacgttcgtcggtgagcggaaggagtctggcgagggtgattcagggtctccggtgaggctctgccgggtccgaggacttggggagcttcacgggtttcaggcgaaactaaccgagcagctggcgcagcctgggagtggctggagtgagctggccgcggtggccgaggctcgggtggcttggcgggaggtggcgcggcatgttcaaggcaaagtccgggtccgaatcccaatgccatcttcaggtatgaggaagaggggttag

SEQ ID NO: 25868 - DNA, 507 bp, Zea mays
  Peptide Sequence Number=SeqID_69243
atggcggtcaggcgagggattcctgcactggagcttcctataactgtagcgggttttctgaagctagtggaactttgtaaaggcctcgtagtattaccctgcctcgcctcctcggtagaggtgtatgggcttcatgaccccttggcagatgggaacttctccatcggggtcgtggtcacgacgctgtccaggctccccaacctcatggtgctcacgctgtcctggctcgggctctggggcccgctaccgggcaagctcggccgcctcgcgtcgttggagatcgtcaacatgagcggcaactacctcttcggtgaggtcccgcggggggtgtcgcgcctcgccggtctccagacgttgtacactatgttgcgaggaatcttgaattggctgaatggtgactttagctcccatattatgatcggtcctgaccagattgaagctctgtatcagtatgccaaatttcagtttgagtgtggtaactactcaggagcagctagagtgatgtag

SEQ ID NO: 25869 - DNA, 204 bp, Zea mays
  Peptide Sequence Number=SeqID_69244
atgcctcgttcacggattcgactagtcctacacgacacgagaatcaacccaaagcagataagggtgttcttacttgatgcgacagagctggtgatgccgcccacgactttccctcagcagcaaggaggggatgccagggctttccctcgtgttgataaggaggtcaacatcatcttcggaggccacagctcccaagaaaactag

SEQ ID NO: 25870 - DNA, 537 bp, Zea mays
  Peptide Sequence Number=SeqID_69245
atgcagtacaatggatcaagcagtctcattagctgcgagaagcagacgattcgaatcgagtttttatccttgcaagtgaccgcacttgtacccaccataaccggaatgggagaccacgtctcaagtcgcgtgaggggtaaagtctgcgggcaggcagatcctctggtgcaggctctggtgctggatccagggctacctcctgagcagctccttgctctgtcacgaggactgaatcagaaaatggcgcagagacttacctggtccacgtgcgccggcggggttctgaactccagcgagcacgattgcgctttttcgatggcgggggtcctcggtttaagccttggcaagctttacggcctcctagggaagctacctaggggcttggatcaagcgaaggaggacagggaatggttcggccatggtggttgtcctcgggcggctctggcaggtcgcagagaggtcaccggagctatgggcgagctccagggagtttggcgcggggcaaaggatgcaacggggaagacagccgggctctag

SEQ ID NO: 25871 - DNA, 1599 bp, Zea mays
  Peptide Sequence Number=SeqID_69246
atggacaaggatcgccaagcggcggcgcggaaacgccaggcgaccgtgagggttcatgaagcccggccgaaaaggcagcggggagcatcgaaggctgaggcctccggcggaggcaagccgccattgccggcgaaggcgggtgcctccgcgcctggcaaggcgccggaggcgacggtgggcgccggaggccccaagctgtcgaaggtggtgccgtccgccagcggagtggcggaggctgcgaaggcggcccgatcgctaccgccgcccggcaaacgcgttgccgacttcggcactgagattgatgtggaggattatcttggggggttggacgagggcccgctcgctctagttgtgcctggcgcggcggtcgcgacggctgcgccagcgccgaaggcgggggtagagacccttggcgctggaggcgaggtgactgccctcgcgttggtcagagacgaggcggacgcggcgacccgccggctgaaaggagcaatggaggcgctgagtcaggtggctgacttcaccagccgtactgcgtcgggggcccttacggcgacgttgtctgccgaggtcgagagacttcggacgcaacacgcggacgctgtccgtgagaagtcggcctccgacagcaagtgccgcaagctggcggagaaggtggccgcccttgagaaggagaaggcagacctccggcgccagctgatggaggagagaagggaggccaacgaagccatcgccaaggagcagtctgcgcaggcggaggccaggctggcgcgggcggagggcaatgtcgccaaggagctcgccggggagctgcagcggcggcttgctgccttcgagagccgcgcggagggggccgaggccgcggcgcgagcggaggccgaacggacgcgctcgcagctcatgacttcatatcgcgagctgggtgtgcggacgagcgacttcgaggtgccggagcgagaggccggacttcactgtctggagtgggtgcaggaggaactgcaggagctccccactgtcttggcggggttgatgtcgttcacctccctggtcacctgcgaggcagcgatgaacgcgctctctcgcgaaggctgccggcactttgaggccctcgaccaggtggatgaagattttgggcgagatatctttgaggtcgaagaccccgtggtgaaggagtccggcggggccctctatgaccggatgtggggttcatacggtcgagaggtggtccgggcgcgggccgaggctgcaagggctcaggcggagcgcggcgagcgggtggacgattttggggcgctgaacagcgcgccgcctgagccggagaccacccctgcggaggccgccactggagtcgccccggttcaagattttgggcctgcgcacgcaaccgctactactggttttttggcggcttcgaccgcggaaggtggaaatgaatgtggtgggtctgtttctgagttttttgattttactgactctgggagctcggctgaatggaccgaggagtcgtcggaggaggacttggactattttgcggccctggacgaggctgcggcggaggctgcgctacatgctgcggacgcgcccaggcgtgcccggtcctag

SEQ ID NO: 25872 - DNA, 669 bp, Zea mays
  Peptide Sequence Number=SeqID_69247
atggccgtgggtagagatgtcaatggggacccgatacccgccaacccgtggggaattcccctattagggtacgggtatgggacaaaaattgtacccatgggtatggatatgggacaaaatctctacccattggatagggaaaatgaatcagatgttcgggaacaattactcacaatagaggagaagcactcagcacacaacgcttgccgctcagatgtaatgacaggggtagatttgggcaatggcgcggcgccagtgcaggtcgcacgcgtcattgctacagggacgctagagacgaactggtggaggtggaggccagactggcggtggcggatgcctgagtcagagcccgcccggccgtctcggaggttgctgccttgtgctcttgctgaattcgtagagcctgaaggtgtggagagcgatagaagactgaatggaggcagccgcaccgccggcaacataggaaacgcagccgcgcagggatggggacccattgaggacccgaaacccgaatggggatgggtatgggataagttttgcacccatgatgggtatgaggatggggatggatcaaacatgatggggatggatataggatgctataacccgatgcggaattccccattgacatctctagccgtgggcaataaacgtatcattaacagttaa

SEQ ID NO: 25873 - DNA, 72 bp, Zea mays
  Peptide Sequence Number=SeqID_69248
atggggaagcctgtcccatcactcctcatgctcctcctctgccgaggatttagaaatcattatgctaagtga

SEQ ID NO: 25874 - DNA, 1014 bp, Zea mays
  Peptide Sequence Number=SeqID_69249
atggagaaggatcgtcaagatgcggcgtggaagcgtcgggcggtcactagggtcgggggccctttccgcgaggcgaagaaggcgaggggaggcgcgaagtctgccgcccctggcagtagcaaaccaccgccggctgcgaagccggccgtccccgggcctagcaagtcttcagcgagtgcgagggctgttgcttctagcgtgggcaagcccgccctcggccgagcccacgaaggagcgaaggccaccgtcgctggtcttaaacaagatcatggtgcaaggtcggatgcggggcagctggctgttgtcccgactccggtggcggctacttcgccaacggtggctgttgggacgaagggtgcttcgcaggacccgtggtccaacttctgcacgagcgacgagatttcatcggccgccaccgctaaagatgtggcgggctctgtgtcccaacagctgaggcatgcatcgcagcagctgaagcatgcggccgccttcgccgaccatgttgcgtcggggtgccctgacttcggagtttgctgccgaaatcgagcgcctccgggcatagcatacggatgctgttcgggagaagtcggctgcggaaaacaaaagccgcaggctgacggagaggctgcgcaagccgaggccaagcttgcgtgggcgaaggctagtctcgcccgccaacgcgccgaggagctggaggagaggctcaacggcttgcgcaaccgcctggacaaaaccgaggcctcgacacgcgcggaggttgagcggacgcatacgcagttcgtggatgcgtaccaggggctgggtgcgcggaccgtcaccttcgaagcgcccggccaagaggtggtcctccgcttccttgggtggctattggaggagctggaggggtgcgggcacttcgaggtcttcgaccagtcggacgaaggcttcgagcgcaaaatcttccaggtcgaggacccggtgctgaagcggtcggccggggcgctcttcgataggatgtggggccctcacggatga

SEQ ID NO: 25875 - DNA, 360 bp, Zea mays
  Peptide Sequence Number=SeqID_69250
atggatgagtacatccgggctgacaatgacttccgccaaagaagggaggaagcatacaggttctctgagatgaccagggcttcggaggaagaatccacccgaggcacatcagatcaattcacaacactcagagtgatgacagagaaagtcaactgcagaggccgcagtattcttcacaagcttcggagcagcagcaaagctctttctggtcgccagctccaagaggcagaggcgccaggggcttcggaggaagatatggggatcagcccaggaagatctactgcttattttgtggtgaagacaagggccacaatacaagaacgtgtcaaattaccatccaaaagcagaaagagatcgtag

SEQ ID NO: 25876 - DNA, 411 bp, Zea mays
  Peptide Sequence Number=SeqID_69251
atggttcggggtgcccatggtatcgttgccgctatacatggagcaacacctgaacacattcgcgctggtggctggcatgggcgtcgctatggcgatggacgtggacaggaggaagggacactttatgggccacttgattctgctgcatcgatgaaaatggtagcagaggcgcggttgggtttgctaatcgctattctgatgctgattccaggactaccaaagatggacagagagcaaaatttgtccaggatcgatgaggcaaaggggatcattgataagatgaaggttaagttcccagataaatttgagggatggaaggaggtgaaggaagtgggcgagctaaggggcgcgcgagaggacgccaggttgctgctcaaggccacctcctgccatcccatcctggtatggtag

SEQ ID NO: 25877 - DNA, 369 bp, Zea mays
  Peptide Sequence Number=SeqID_69252
atgacccggttggagcagagcaggtccctcgccgtcgcgcacctggaacatgtgatgtctgtgccgcccaagcctgatctcgcgctcttcctcctcgtccatggtcggcttgatggagtcatagttcgcgctatgcagaatgaggttgtagcggcagcgcggttgttgaatgggcggtttcgtcacgcggtagtagggagagctggaggaggaggtatgggaatgggaaacgtgacacagaggtgtgggaatgggaaacagagaagaggccacggttgtgggacccacctgttagacgattgtacgaccagagacatgggaatgggaatggtagaaccaggaatggcagcctaccccttaccgtcttaa

SEQ ID NO: 25878 - DNA, 327 bp, Zea mays
  Peptide Sequence Number=SeqID_69253
atggaggtagagtcggttgatggagtagcaggcggtgttaatcgcctccgcccaaaaccgatccggtgtcttggaagacaactagatcgctcccacttcttcctcttgcctcctctgtgcttggatctatgtttccccacccccaatgctgatccttctcgcctcgatgtccaagagctccgatatgtcgtccaccgagccccgatgccaaaggatttggcgggcgtagcagggtgtcgttcccacgggcatccctggatcaggattgtggaagtgagtgccatggggcaggagctagacgtgaaggtgccattgctgcatgatgag

SEQ ID NO: 25879 - DNA, 771 bp, Zea mays
  Peptide Sequence Number=SeqID_69254
atggagcctggcggagggacagctgtcggagttgttgagtccttgctgacatcctcttgcttccgtaagggggctgagagccgccgtcgtcacagagtatgcagggcgccatcatcgcctatctggcggagcgagccagatgggacgccggtcttgttccccgtggcccgagtcagctcagggttgggcgacgtggaagctcctccgaagccgaggtcgagtctgtcttccgtggccgaggttgagtccgagcccccgggtcgggcgaggcggaggtcgccggctgatgccggggcggagtccgagccctggggtcgggcgaagcggagttcgtcgtcttctggggctgagcccaagtccgagccatgggtcgggcgaggcggagatcgtcgtcttctgggacttagcctgagtccgagccctgggtcgggcggagttcgccgtcttccgggacttagcccgagtccgagccttgggtcgggcggagttcgccgtcttccgggacttagcccgagtccgagccctgggtcgggcggagttcgccgtcttccgggacttagcccgagtccgagccctgggtcgggtggagttcgccgtcttccgggacttagcccgagtccgagccctgggtcgggcgaagcggagcttcctatggtgccttcgaccgggcctgactgcctgtcagcctcactctgtcgagtggcaccgcagtcggagcggcgcaggcggcgctgtctttctgtcaggccggtcagtggagcggcgaagtga

SEQ ID NO: 25880 - DNA, 1017 bp, Zea mays
  Peptide Sequence Number=SeqID_69255
atgggggctgggacccacacgtcatacgagctgatccgaagcacgaagaaggcgaactgccgcatgcgagacataaaccgatggtcgaaagggtggactgccatgcgacaggcatccaactgcactgcaattgtgcgccccttcggctccgtccacatccggtggaccagcgcaaaggaagcgggcccgcatgtcatgacccaacagtgccagttaaaggtgacggccatgggccggtcagccgcgggggaccgggaaaggggacattatggaatggatccttcttggcggaggaagcgggccctgagccctcctactgatcaggggttcgaaggctggcccctcggaagggtttcgacagccgccccagagcactcggacttcaagcccatcactgatcaggggttcgaaggctggcccctcggaagggaaaacagcgtcgctcgctccgctccgactaccgtgtcagccaccccggcaacgactgacaacaagtcacgatcaacaaccgagttcagcctcgggtgcaacaggaagctccgcctcgcccgacctcatgctccggcctcgggaggaggtctccgcctcgcccgacctcaggctccggcctcgggaggaggtctccgcctcgcccgacccccggactcggcctcgaccccggtctcgggaggaatcgcgtcctcgcccgaccctggcctcggcctcaagagaagtctccgcctcgaccgaccctgggctcggactgaccgcgctaataggggatgcatcatttccctattcctagcctgctcaggctacaaggaacaagaccgacgtcccatctggcttaccccggcgacgggactcaggcgctcctccggcggccacgccatcacatgtacagggcccaagctctcccccaacggccacgttggcataggtcggcgagcgaagggtggcgtgttcgccttcaccccaacatttgccctccaaggggccagctcgactaagttagctggtgccgaagactgccgttag

SEQ ID NO: 25881 - DNA, 231 bp, Zea mays
  Peptide Sequence Number=SeqID_69256
atgacgtatttcttcagcggcctcatcaatcttcttctaaaaatcggcgaggcgaagcatcttttcctttttcctctggacctgttgatgaatggcttcgaggtccctgatttcttggtccaactcctcctcctgagtgcatcccctagccctgaagacttcttcggcggcatgacgaaggtcacagcttgccgaaggtggtcaaatgagttcaccggagctgggcgctaa

SEQ ID NO: 25882 - DNA, 507 bp, Zea mays
  Peptide Sequence Number=SeqID_69257
atggggcaggccttccgaaagctgtttgatgccttcttcggcaacaaggagatgcgggtggtgatgcttgggttggatgcagctgggaaaaccaccatactctataagcttcacattggtgaagttctctccactgtccctaccataggtttcaatgttgagaaggttcaatacaagaatgtagtgttcaccgtgtgggatgttggtggccaggagaagctcaggcccctgtggaggcactacttcaacaacactgatgctctgatttacgtggttgattcactggatagagagagaatcgggagagccagggcggagtttcaggctataatcaatgacccttttatgcttaacagtgtgttattggtgtttgctaacaagcaagacatgggcacctgtgctctaaaaggcgatggcctgtatgaagggttggactggctagcgactactctggacgaaatgcgtgcctctggacggttaacctcagcatcatcatcggcatcctga

SEQ ID NO: 25883 - DNA, 1833 bp, Zea mays
  Peptide Sequence Number=SeqID_69258
atgtctccgcctccccctggcggctccaatggccgccgccaccagcagcagcggcaggaggcggtttcgtccatggaatccggcggcggcgcgtcgggggcggcgaccaagcgcttcacctggaagggcccggtaatcgtcctaggtaaggagtctgatcccgatccgtggccttcgattccctccgtcttcgagctgctggagagcatcgcgttctcgggcgtggctctcaacctggtggtgtacctggccacggtgctgcacgggagcaccgccttcaacgccgcccacgtcgacacctggaacggcaccaccttcatcgtccctgtcatcggcgccttcctcgccgacagctactggggcaagtacaggaccatcctcgcctccatcgtcttctacctcgtgggcctggtgctcctcaccgtgtccgccgcgatcccgtcgctgcggcctgccacggcgtgccagatgggggagtcgtgcgcgccggcgaccaagacgcagttctccgtcttcttcgccgcgctctacctcacctccatcggcacgggaggggtcaagtccgcgctgctccccttcggcgccgagcagtacgacgacgacgcgggccggccggagcggaagcaggcctttttcagctggttcttcgccgccatcaacctgggcatcttcgtcgccggcacgctcgtgtcgtggctggagcagaacgtgtcgtgggcgctcggcttcggcatcggcacggcctgcctgttcgtggccgcgctcgccttcgcggcgggtacgccctgctacagggtgcagatgccgacgggcagcccactcaaggacatcatcagggtgttcgtcgccgccttcaggaagcgcgacgtcaggatggaacgggacgagggcgcggcggtgctgctgcacgaagacgaagccgaagacgaagacgaagacggcgatagcgctggacagcagcagcgactggcgcgcaccaagggtctgcggtgccttgacaaggccgcggcgatcatcgtcatggacggagacaaggagcgggagagcgaatggtctctgtgcacggtgagcgaggtggagggcgtcaagatcctggtgcggatgcttcccatctggatgacgtgcgtgctgtacgcggcgtcgctggggcagatgaccaccaccttcatccagcaggggatggccatggacacgcggctgggcggccggttcaaggtgcccgtggcatcgttggtgtccgtggaggtggtgttcatgctcctgtgggtggcgctgcacgacgccgccatcatcccggcggcccggcggctgacggggcgccccggtgggctgacgcagctgcagcgcatgggcgtggggcggttcctggtggtgctggccctggggacggccgcgcttgtcgagaggcgccggctccgcgccatccacggcgggagcggcccgatgagcatcgtgtggcaggtgccgcagttcgtgctggtggcgggctccgacgttttctgcggcatcgcgcagctggagttcttctacggggaggcccccgccgcgatgcgcagcatctgctcggccttctccttcctggcgctgtcgctggggttctacgtcaactcgctggtggtgacgctggtggcggccgtgacgaagcggcccgggtggctggcgacggacctcgacaccggccacctggactactacttctggctctggaccatcatcagcgtcgccaacctgctgctctacatggtgctcgccgcccggtacacgcccaagcaggtcgccgctgccgtggtggagccgatgcgtcccagcaacagtggcggcagcgacgaatga

SEQ ID NO: 25884 - DNA, 171 bp, Zea mays
  Peptide Sequence Number=SeqID_69259
atggacggtcatgactccaggcaaaatgtgcaaccatttgaaaggaatgttcggaacaagccgtacaaagttgatgcaggaagatatacgcagtgcagtctcttgaacggtcaccggaagaagaatagcagcacgcgtcgcccggggaagaagacgaagaaccggatgtag

SEQ ID NO: 25885 - DNA, 258 bp, Zea mays
  Peptide Sequence Number=SeqID_69260
atgggccgaactgcatatgagccctccctcgcgctgaggggaacaaagccttgtggtcttcgtggcctcggtcgcccgatccttgaagtcatcgaggggtctttgtctcggcttaccaaagtgaagaggggcacttgggccttcgcacggacgacgtccgcggcctggccggcgggacctgctggtgcggccttcggcctgtggaatgttgaggaattcaaaccgtgggcattcgataaaaaggatctacctatatga

SEQ ID NO: 25886 - DNA, 702 bp, Zea mays
  Peptide Sequence Number=SeqID_69261
atggtgacctccagcttgatggtgggggaaagcgagccgggctgcggcctctgcccctccctcagcctcaaggattttcatcaccagggctggggaggggactgcaccgtgcctggcttccggacgcgagtggcttcggagccgctcgcggcgccggcgtccgccacggcagctggaagaggttcttccgccggcgagatagccagggccggccacggaccgacctccaactctacggccttctgcccgtccttgcctcacgagtttgggcgtgggcgggggcctcctggcagtagcatccgccctgaggtcagtgctgccgctgttcggccccccggagcagaagtcgtcgtcgtcgctgctgctggagcgggtgacggcgcgccgttcatcggtcttctgttgctccgcaggcccgcccctatcgagtggggttgttcgtacctgcggagggggaaccggagttccgtttgtaatggcactttgaatgccagtgtttttgttcatcgtggctgtcgaggcctgaacatgaccgacgctggagttgatcagccgaggcctcgggtcgggctggcgcccttggaagatggtcggccgaggccccaggggtcggacctcgtcgaaggcgtcgtcgatgccgagggtgctactgcccccgtccggcgtcaagacccgagcctgcaggatcagagtgtcttgtag

SEQ ID NO: 25887 - DNA, 384 bp, Zea mays
  Peptide Sequence Number=SeqID_69262
atggctcaccggagagcttggtccacgcgcacaggcaggcgaccgaagtctggtgaagtcgatttcgggcttccggtgaagttctgccgggtccgagggcttggaaagcttcacgggccactggcggacctagccgaagcactggcgcgacttgggggtggctggagtgggctggccacggtggccgaggctctggcggcagtggcgggcggaaaagagctcgtcggagctaaggaggggtggttggccggtgatggtgagcgcgggggtaaaagatatggagcccgaaaatccggtctgtctccctgctcaaacccgaggcaaatccagggttttgtcgtgtctagggctcgcgtcccaatgccatcttctggcacacgatag

SEQ ID NO: 25888 - DNA, 204 bp, Zea mays
  Peptide Sequence Number=SeqID_69263
atgagtctatcatccaaggaatcgactagcctgttatcggtcatgtctcatatggaggctttgagggctgaacctgttgctgaaggtgagatgccagcatccagtgtgcgccttgtgtccaagctgaagcgacggctgctgttcaaggtgaacttgaccagctcaggaagaaatgtgaagtcaagtggtgatgctgtgaactga

SEQ ID NO: 25889 - DNA, 249 bp, Zea mays
  Peptide Sequence Number=SeqID_69264
atgacggaaatgcactgtcccacactgacgggcttgcacgagagggctttccccgcattttatgggagatgtaccttcgatcctgagagaagcttcggccttgaaaatagttttttagtgtttccgaagatgtctgaaggtaagaagatccctgctgatacgaagctgagtctcgacgatgataagaacttgggattccttatagcgatggcggagactatacggagaaatcaccaaggagattcttga

SEQ ID NO: 25890 - DNA, 204 bp, Zea mays
  Peptide Sequence Number=SeqID_69265
atggcgatggcttccacagggcgaggtgaagcagccagctccgcccgccacccccacccctccccaaaactcacgcggccgaccacctccgacggaggcaagttcgatttagcagaaatgcttgaggatgctgacaaaacatatctccactcacctagaattgtcgttcaaacgacaacccgtatgttcaactctacaacttaa

SEQ ID NO: 25891 - DNA, 534 bp, Zea mays
  Peptide Sequence Number=SeqID_69266
atggcgaactggtcatggctgttggtcctcctctgcgtcacctctggcgctgtgatgacgccacagtccttgatatacttcaccaacttggggagtggtgagggccgccacggtcgaaatcgaactcggctgcaacgtagaccttcggtcgggacggggaactttcaccaagcttcacagatcacgaacattgctttgcctgggggattacgctccgagccatcgggaattgctcgccggagcaaatcctccgtggcggaaaggcccctgccacagaccaccttctctgcgtcgccatatcaggtgaggcccccctcatctagtccgtgtaatcgccctcttcgtgtagcattagttggttttgatttcggtcgcagtgaggccggggcgttcacgctagcgatggtttacgtcgtggactgctggggcgccggccgtagcaccgtcgggggaagcatgaaagctgtggatcttcagatcttgatgggagggtcaggattagatgacgatatcctttctttcaataacatctga

SEQ ID NO: 25892 - DNA, 606 bp, Zea mays
  Peptide Sequence Number=SeqID_69267
atgtcgcgtccccgtccgaccgccgtctcagcctcccaggcggccaggcccccaactccaggctcaagcgcgaccacgaccggagcagcccctgcgcggctgcgcccctgcgcccttgcgcaagcgcgttcccacgggtattccccatttacatctgtcaggagaggattttttcccatcacagtggggagaactttcctcgtctccatcccaaacgaaggaatttctcgcagaccatctctagctgcagctgcagcagccagccagacgtgtggcgaccagttaccatgggccacaacagatggcacacatatcatatgcacggctgcaacctgtcgctggctcgctgttgctccggcccttctggcgcctggttgtcacgagcaacctgccaggcagccggcggcttgctccagtgacccgttccaggcggcggcccttgagaagtttgagatgacaagcagccagccatcactctcatcattccggcgccccactcaggcagacgagacgcacaaggctggcacgtctcaagggctcaagtcttctgcaaaaacagaggctggactgaagatatcattaaacatggatgcatacagtccgtag

SEQ ID NO: 25893 - DNA, 1353 bp, Zea mays
  Peptide Sequence Number=SeqID_69268
atggggggctcggagcccggttccttcgcggagaaggatccctttcgggcaactggcgcgccggttgctcgacgcgtgggcctgggttccaagctggcgtgtcagaagtcggagaagcgcgtccatctggcgcggttgcatgccgcctgcatggctgcccgccccttctgcccgttggtctgggcgaaaatggggggtcgcctcgtcgggtcttcccatcttccaagcccccggatggggggtatccgccgcctttccgcctcctcgttggaggaacgcaactccatgggagttggtacctttcagccatcgttcggcttcaaggattttcatcacgcagcctggccacaccccgccaccggcggtcacccaagatggccaagatggaagatgaggcgagtcggggggctgcctccgcgtgggtcggctgcccctttcttccccctgcgcctgggggtgaagggcgtccttgagccccacggagacttcctccagccatgccaggatatgcagggtgctaggggccctgggtccccgtctccctgcctgaatggctggttctcgtcctcagcgggggggagcccttctgccgtgacacctcccccaaagctgctgcctaagccgcttcgccgtctggggcaggggtggtggtcgtcgcggttggaacgggcggcagcgagccgcccatcgttcttcagttactccgcaggccttccccttcggaggggggttgttcgtacctgcggaggagggaaccggagttccgttggttgtggcatctccactaagtctcgcctgtttgattatctgaaccgctttaccaagcatgagttgccccgtgtcaaggtgacgggtgagccgacgccaaagtcggtcagtcgaggcctcggatcgggctggcgcccttggaagccgattgaccgaggccccaggggtaaccggttgagccgcctgctcgggccggattcccggaggagcccgtggaccgcggcgccgcccgaggctgggtcgggctttgctgaagacgtcgtcgatgccgagggtgctacggctcccttcggcgtgaagacccgagcctgcaggatcagatcatcttgtagcgtgtgctttctgcggccgccgaggccagaagaacacaccctcgctgcgcttgcgaagctgcgtcttttttcctcctgtttcgagcatctggactctgttggtaacagggatgtttgtgtgagcgagagttgcttctcgcggaagggacgagtgaggtatccgtatcccagaggcgtgggaatccctcggctcggtcgaccttgccgcttacgcgtactttcacccgtccatgaggccctgtccccgacttag

SEQ ID NO: 25894 - DNA, 315 bp, Zea mays
  Peptide Sequence Number=SeqID_69269
atggcatgcgaagcgaccgatacgtgtgggccgagcgaccacggctgtggaggctatagtacggtccgcgggacgtggcgtgctgaggcaaaagaacggacctggttagtccacattggaaggagaagggagcaaagggatatggcggataggtttggcgaaaacttacaggctaggggcggaggggagaatgagctcggaactcgaaagggatggagagtcgccttcttcgacatggcggccatggccggcgcgatggccgggacaaagcgtttgaggcgatgcagcttggcggagacggacgccggcgtctga

SEQ ID NO: 25895 - DNA, 453 bp, Zea mays
  Peptide Sequence Number=SeqID_69270
atgggcaagagtaacaaacgcaagcgcgagtcgactcctccatcggaggacttcggcgactcggaatactcggaggaggagttctcctctgagtccgaggggtctccggctcccgtctctcccccggcgtcgtctgacgattcagacgactcccaggggattgtcgtggaggtctggacttatatccgggccatcgagcgctccaggctcgagggctcggatgagtcggagtactcctcagacgaggaggactcttcggactcgtccgaggagtgcggtggcggcgatggcggagacgacgacgacgacggaggcgacggtgacgatggcgatgatggcggtgacggcggcagcaggggcggcaacggcggcagcaagggcggcaacggcggcagcagcaggggcagcaatggcggcggcagcagcaagggcagcaacaaggccagtggctag

SEQ ID NO: 25896 - DNA, 459 bp, Zea mays
  Peptide Sequence Number=SeqID_69271
atggcgctggcttggctcgggcgcggcgctgggcatgcgggggcgcgcgcgagcgtgccctggcgcgggcaggaagcatcgaacacgtggagagatcgcaaacatgcgaatcttgccatgaatccggcgcagacctcttcctggcacctagggctatctcacatgtgtggtaccttcgggggtcgagatccgagagacctctcctcaggcgtggttgatcatggcccggagcgggtaagtgctttggaacgtcttcgtcctggctcctcattcgtatgtcccgaccgcgacttttctttcctcctcagcaagcgaagccatggcctgaccgatctagctccccggaaagcccttaagacggcgtcggcttccgcagccggtgctgtaacaccccaggtgttactcagggtgtccacccagggctacaccatttttgaactactatcacatgtgggttag

SEQ ID NO: 25897 - DNA, 633 bp, Zea mays
  Peptide Sequence Number=SeqID_69272
atggcccgcgcccgcgcctataaagccctcccaggctttgactgcagtcttccgcgcaccctcaaacctcaccggagtttagctcgccgccgtttgcccgtgcgcagcgtgtccgcggccgcccaatctttctgtcaccgtagaccggcaaatagaaccattcccaactctgtccagccctcggagaagaccgtgcacacctccgtgaagcttcccgagcgaggaatcggagtttgcttcgccggagaggccagtccacgctcgccggagctctcaaccccgccggagtacgtggaccgggtaatccactcaaccatccttcgattccttgtgcacacggtccctacgttaccccgtgaagctcaccgtgcccttggattgaaccagttcgccgtggtttggccgattaaggaaaatagaaaaaggggtataaataatgaaccagagagtacccctatttttgttaggatacttattcaagactgtaaccttgctgacggagagtacatcctcgtgccggagcaaggagctgctcaggaggtagccccggatccagcacccgagcctgcaccagaggacgtgtctgccactgctttggaaggcaagccccggttttctacgaaaacctattaa

SEQ ID NO: 25898 - DNA, 324 bp, Zea mays
  Peptide Sequence Number=SeqID_69273
atggctttcaccgtggcggctcctccggcgatcatcggacatgcactccgtgattcaccacgatgcgggctaacgcttaagcacgtggcgtgccctggtgacagatcaatggcggcgaaggttatccgatcgaccgatgagcaagggaggtacgacaagcttagccacggcagaaccacggtgatggcacggtggccgccgattaaccggggcttgccacctccccgctttaacgccacatcgcaaaagtcctttaccgtggccgccgacgacccatcccgagccgcggtggcatccttatcgccggcgaggccttttctgtaa

SEQ ID NO: 25899 - DNA, 342 bp, Zea mays
  Peptide Sequence Number=SeqID_69274
atggctatttggcttgctttggccacggtgaccgcgcaccccgggaacaattcaagggtgttcccgatgatctacttcggcttagcgctaacgcttaagcacgtggcgcgccctggtgacagatcaacggcggcgaaggttatccagtcgaccgatgagcaagggaggtacgacgagcttagccacgacagaaccacggtgatggcacggtggccgccgattaaccggggcttgccacctccacgctttaacgccacgtcgcaaaagtcttttaccgtggccgtcgacgacccatcccgagccgaggtggcatccttatcgccggtgaggccttttctgtaa

SEQ ID NO: 25900 - DNA, 456 bp, Zea mays
  Peptide Sequence Number=SeqID_69275
atggtgcagaggctcacctggtccacgtgctccggcggggttccgaactccggtgagcacgattgcgctattccggtggcgggggtcctcggttcaagctcgggcaagcttcactgcctcctaggggagctatctaagggcttggatcgagcggaagagggcaggaaaggggttggccacagtggttgccctcgggcggctctggcgggtcgcggggaggtcgccggagctatgggcgagctcagggaagtttggcgcggcgcgcgggggttcgcgtgcgggcgtgctctgagcgtgcccccgcgtgtcagccctcgtcgaacacgtgggggtttgcttctgccagggttcaacggccgatttaaccaccttagcgtgcagatcttggcaaaaccccgtggatctttgggcgccattttgtcaattgggccaaaaggttttgagtttgggatcaag

SEQ ID NO: 25901 - DNA, 180 bp, Zea mays
  Peptide Sequence Number=SeqID_69276
atgggtttgaaaaccttgagtacgaagccgtctaaggaaaaagactctcaaggatatactggctttatgggaatcaagattatccatcttcatgttggtccatcaatatcatctcgtggagaagcttacgcacagcgacatcttgtggtcgactcagctttggttctccgcatcacgtga

SEQ ID NO: 25902 - DNA, 603 bp, Zea mays
  Peptide Sequence Number=SeqID_69277
atggagattgaggccgagaagagggaacgctgcgagctgagggagagaggggagcggctgggcgcagtgagaaacagagggagtggtcgcatcttccatgggcgagcaggggaacaacccagacaggcagctgccagtgaccagccgcagagctgctcgcctgctgccccgctcccgcccgagtgcgctgccgctactgcgcagtcggccgcccgcccgccccagcatcccgacgccgccgtcggcccccactccccttatcgttcctcctgtcgcacgccgctcatgcaaggcgacggcttcaccgcagatagcggcgtacagatcctttcgtgccctggtccctggggttccgcaacacgccggcacagccaagcaccaggcggtggcgcttctcgtgcaatcggacagcggcacatgtccatcttcctcaacgaccaacagatcaacgccgaccagcagatcaatgctgcccctcagaccctcagcagtatatccaccggatacccgatacccgacgggtacccggtgggcatgggtacgggtccatttttttacccgattggcttggtgaagagcaaccttgaggcttgtgtcttttaa

SEQ ID NO: 25903 - DNA, 401 bp, Zea mays
  Peptide Sequence Number=SeqID_69278
taaccgcggcggaagaaagggcggaggggcttaccggcggcgagattgttccggcgaagtggtcgaggacgaaggggaggtctcggggatcacaacgggaggttcacgggatgccagagaagatatgagcgcaagaaatttgcggaagactcactggatagctcggtccacgcgcgacggtggaagaccgaagtccggtgaggtcgatctcgggcctccggtgaagtccggccgggtccgagggcttggcaagcttcacgggctactggcggagctagccgaagcactggctcgacttgagggtggctggagtgggctggccacggtggccgaagctctggcggcaatggcgggtggatttgagctcgccggagctaagggaaagtggctggccggtgagg

SEQ ID NO: 25904 - DNA, 426 bp, Zea mays
  Peptide Sequence Number=SeqID_69279
atggttcagtggattacccggtccacgcactccggcggggttgtgaactccggcgaccgtggactggcctctccggcgaagcaggcttcgattcctcgctcggggagcttcactgaggtgtgctcagtcgtctccgggggtcggacggggttgggaaaggctgggctggccggtctacggcggcaggggctgggtggccgcggacacgccgcgaacgggcaaacgacgggcccgtttggcacagctccagctcctgattctaagcgaggatctggaggagccgtgccaaacgggagaatcaggaggatcagctcctcacgagaatcaggatctggagctaaagaagcaggagctggagctttgccaaacgggcccttagatcggatggctttgggcgcgtaccggttcgctgtaaggcagagctaa

SEQ ID NO: 25905 - DNA, 546 bp, Zea mays
  Peptide Sequence Number=SeqID_69280
atggagcagtgtgtagcccgtttggatgttgccatgtttaatgccatccttcatgaatcagcaagtgagataccaacagaccctatatctgacccaattgttgacccaaaagtcctaccaattccagctggtgatctaagctttgggtcacgcgcgcagctgaataactctactgttcatggtgcttgtagggatgatgtatgtctatggcttactgagctccaaccaactatggaaggagcgttagctaggacagcaactataccagtcttctacacacagttgaggtgtcaacagctttgctcagcagaatggaggatcattgtcactagcagcaagacctcaagcccaggcagagcaaagaaggatgatgcactttccaacctatgtagcacgttgggacaactcaagaaaatggcagtggatatggacatagaaattgacaggcaaaacaaagtgctggttcctttcagcgacgacgtcgatgaactgaattttagactgaaaggcgtgaatcagtgtggacgccagttgctgggcaagtga

SEQ ID NO: 25906 - DNA, 669 bp, Zea mays
  Peptide Sequence Number=SeqID_69281
atgccccactcctccccacacgcaaaagtcgtcctgctcgccccgtgctgtgttcgcatctgcgatgaccgtttagccgaccactacttctccactgctgctcgccgtctcctcaaccaccgctgcgccacacaatcctcccgcggcgtgtctgactcaagtcaggatgtctcacaggagcagaagcagaagcccgaaccgaatccaaccgagtcatctcaacgactccgccagtttccaattgcccccttttttaggcgttcaagttccttcgagatggcgacaagtagaggagagctcgccgacaaccttaagatcttcaagactgacaacttcgatctcgacgtctacgtgcagtccaagtgccagactatgaacgagaagactccacaagtgcatggcatattcaattcatcaagtgaggcagattacatttgcacaaactctggagggcctgctggtctagagtcaaacaagggtaggaaagggggagctagagacaggagacccaaaagtacttcacagatgaatgtgacattttccacaagaacgagctgtagatctaatttgattcttccgttcctcctgtggtgggatcaatcagatacgaaatggccaaggactactgacgatgatgacgacatggccaccatcgccgccctcaggtag

SEQ ID NO: 25907 - DNA, 396 bp, Zea mays
  Peptide Sequence Number=SeqID_69282
atgggctttgctccgataccagctgtgacagaacctcccaagtcattaggcccacctactgttgtccttgtccatcgaacctcggacaaccctgcaggtgcacctgatcacttgacaagttcggtcagtgacgaagtcttcatatctgagaagttacggcgatatgaattgattaatacccagctggggatctccgatcacacgacatatgtagcacttaacccttgcatatgtcaactcaccaccagggtttttaagaccagatcaggttcacgccaactgagagcacagatacaccaccgtctagcctcttgccacgaagggtacacgctacttattctggtattagtctgcccgaggcaaagcttacccatgatgaggcatgtgaccagttaa

SEQ ID NO: 25908 - DNA, 525 bp, Zea mays
  Peptide Sequence Number=SeqID_69283
atggagttgctgctcgcctgcaggggacgcgctggagatatggcgaccagggggagctcgcggccatggaagatccctgcgcacatacaagaacagagagaagaaacggtgggggaaaaaatggaggacgccgctgcagggatgccgagcgccgggagcatagggccagccatgggagagaggggagctcgcaggggaaatcgccatggctgctggccttgcttcctgcgcgtggctgctgcgcgtgggacaaggagcagggggcggctggagatacgccggcgccatggacgccagggaggagcttcagcgccgaggaagaaggagcaggggcgccagcttgctgctcgccatggaggggagcacggtggagagggcagctcgctggtggctgttgctgccgtgaagcagggaggaagaagctggcggctggaaatttttgaggggtgggaatggaaaattgccaagggcaaggggagaggggttcatatttatagaggagctctagggttatggtttccttag

SEQ ID NO: 25909 - DNA, 555 bp, Zea mays
  Peptide Sequence Number=SeqID_69284
atgtcggccgctagttcttggcgcccaaggtcgtggatccctccctgctcgaccctgcttctgccccaagcacctccggcggtcctgctcatcatgctaccactagaaaacgccactgggacatcgtgcaggctcgagtttgtgtaccacatgttcagcaaaatgtgtgaacctgttatcgaccccgccatgtcttcacgtcgcttctgtcggtcagattttgtctctcccccggcgtcgtctgacgattcagacgactcccaagggcttgccgcggaggtctggacttatatccgggtcgtcgagcgctccgggctcgagggctcggatgagtcggagtactcctcggatgaggaggactcgtccgaggagggcggtggcggcgatggcggagacgacgacgacaacgacgaaggcgacggtgacaatggcgacgatgacggcgacggcggcagcaggggcagcaacggcggcagcaagggcggcatcggcggcagcagcaggggcagcaacggcggcggcaacagcaagggcagcaacaaggccagtggctag

SEQ ID NO: 25910 - DNA, 765 bp, Zea mays
  Peptide Sequence Number=SeqID_69285
atggagccgagctccttctctgcagcagccgctgcacctttccccttttcgccactatggtgcgcagccccgtctcttcccctcaacgcagcagatcggacagctcctctgctcctccattcatcgccgtcaaatatttttggggctcaattcgacgcgctgtccatctgtgttgcctcgctgcgcacccgcgcgctgtgccgtgccatcccgcttttgcagccatcgttggtgcacgcgcagcgccgcaccgcactgctgcatgtcccgttgcgcgcgtgccaggcgttcggcgaaatgtctaggtggggtgctgcgcagcgaaccgcacgccgtggtgcccatcggaagaggaaccccgtgttttgcgtggagaagaaggcaagcagctcgacgctcctcgatgtccgtagcgatgcacaaatcagaatcgccatcgtcgtcacaaacaccgaatgggtttgtttatgtgtttcagggaaagcagatatgggtccgatggccgcggtggaaaaatctcaccgccgacgacctatccgcgccacgattggtgccggagttgagatgttcgggcggcaagcatcttcccccgaagatctttttcctccggataggaccgccgcggtggaaggcactaaccccggctgccacgcggtcattcctccttccggccgtgtccgatcaccggcgccgctctcctctgttcggccacgccatcacggatttgacggtcttccggccatggttgaacgtggcaagctctag

SEQ ID NO: 25911 - DNA, 132 bp, Zea mays
  Peptide Sequence Number=SeqID_69286
atgtccatatcagcgataaccctaagacagtccggagcgaagttacaagttagtcaaaaccaacttgttgaactacttttgacattgagcaagtcctctcagtaccatcgagattacaaggtcaaggattaa

SEQ ID NO: 25912 - DNA, 1965 bp, Zea mays
  Peptide Sequence Number=SeqID_69287
atggaagtcgtggagttggttccctgcgcccgcaataagtggggcaactggtgggatttctggttttatgtttccgaaggcacagtcgaagaccacccaggactccccgtggctgtcatgtgctcccattattatgtggcgtacccgcaatttgaggtggcagaggatgatgaagacaaaggagcccttcggtgcgctgcccgcatgagtagcgggcgcgatttagttgaggaatttatcaggtatggggtatggcccttggcacacggctgggcgctgggcgaagtatgccctcgcgagatgccctccaggggcggacagcgggtgcgaagtccagccttcgcgttggatctgcatggccgggatccctccacatttgtgcgtgaagcagaagacggtgcagcaaggatcgtggggcgctatgtgccgaagacagagggtctgcggagctgggatatccgtgggtccaacgatagattgaatcgggtcttcgaattgaactgcttgccatacggtggttatcccggggaagacaccgccgaccgccgtgggatgaaaccgatgggcgtgaccgaggaagggccttcgcaggaggctgccccggccactaagaagagaaaattaggtactgtagtggggggagtggggatctctgatagttttgttgtggatttgatggggacgtgcgcagccctcgggggaaggatgtcttcgcccgagctccgggagtcttcggcgcgaatgctggaggttaccgggggtcgatggcccaagaatgttccgatcccccgcgcggctggcgaagacctctttacgtcccatatggcacgcgacttgaagcaagccgatgccagctgcgaaaccggccgcccccaggcatggcaaggcgccggcgagtacgaagcttgccgccactggcgggagcaagccacccccaggctcgggcgaggggcaactggctgttgtcccgcctccggtggtgaccacttcgccaacggcgatggtgggggcgaagggtgcctcacgggacccgtggcgaccgacttcgccgatcttgtcgcgtcgggtgccctaactatggacgttgctgccgaggtcgaacgtctccgggcgcagcatgtggatgctgtgcgggagaagtcggctgcggaaagcaagaaccgcaggctgagggagaaggtggccgccatggaggccgagaagacggatctccagtgccagctggtggaggagaggagggaggcaaacaaggccatcgctgatgctcaggctgcgcaggccgaacctaaagtggcgcgcgcggagggcagtctcgcctgccaacgcaccgaggagctggaggcgaggttcaacgccctgcgcggcctcgtggacaaggccgagtcctcgacacgtgcggaggtcgagcggacgcacgtgcagtttgtggacgcgtaccgcgagctcggtgcacggactgctgacttcgaggtgcctggccaagaagtgggccttcgcttcctcgaatggttgcaggaggagctgttggtgctcccgaccattgtgacgggcttcatgtccttcgcctccctcgtcacctgcgagggggccatgaatgctttgtcccgcgaggggtgcaggcattacgaggtcttcgaccaagcagatgagaactttgaacatcaaatcttcaaggtcgaagaccctgtggtgaagagtcgatgggggcactttttgataggatgtgggatggctcatgccgaagacgtcgaggaccttgttggtctggacggcgcgctgctcgaggccgcagcggtggatccggtgccgccgttggatgccggtgaaggcacctcggcgatccctacatccgttgtggccagcgaagaccccgcaccggcccctgcgccgacgggcgaagccgccccgaaggtggtggccgagccggcagccgaagaccccgcagccgcggtcgggccttcgcag

SEQ ID NO: 25913 - DNA, 580 bp, Zea mays
  Peptide Sequence Number=SeqID_69288
atgggcgtgcccggaccccccctgtgcagggtccggaccactcacagcaaggtcccgggattctgggacaaagaattcccaggccttgctcaaggtcaggcgggggtccggagccgacacgtgtccggaccataccgcgtacgcttccgctccccgctcaggcggagacccgatgctgctacgtggccgactgtccgtgacataagccaacgggcggagcctgacgtaaggtttctgggccgagcgtcctctgcatttattgcggataagacgcgtcgcctgactggcgatgtgccgccttggcatttaatgtaccatgtccactccactggcatggatgtgccgcctcggcatttaatgtgccctgtccactccgctggcaggcagcgaccagaccattccgcaggcggcgtgcctgtctattccgttggcaggcagtacacccgtgctgcagagtgcactatgctcatcatcactctgcgggtgcattctaccatccagtcggagaatttcctctccgacaattatgttaatgggaacatggagaaccatccgggaaaacagtgctaccacaagggtg

SEQ ID NO: 25914 - DNA, 474 bp, Zea mays
  Peptide Sequence Number=SeqID_69289
atgggcaagaacaacaagcgcaagcgtgagccgactcctccatcggaggacttcggcgactcggaatactcggaggaggagttctcctccgagtccgaggggtctccggctcccgtctctcccccggcgtcgtctgatgattcagacgactctcatgggattgtcgcggaagtctggacgtacatccgggccgtcgagcgctccgggctcgagggcttggatgagtcggagttctcctcggaagaggaggactcggacggcggcgagggcgaggacgacgacgacgacgatgacggcgacgacgacgacggtggcgacggcgatggcgacggcagcgacgggggcagcggcggcggcgacgggagcaagggcagcaccagaggcggcagcagcacgggcagcaccagaggcggcagcagcaaaggcagcaccaggggcggcggcggtggcagcagtagcaaggccagtggttaa

SEQ ID NO: 25915 - DNA, 549 bp, Zea mays
  Peptide Sequence Number=SeqID_69290
atggtcaccattgaaggcgacgtcgaggccattaaagccaaagagatgctagtgaagctcacgcgaaagatggagctacagctcagctcgctttccacccccgaaaggtcgctgcgcaacaccgtttcgtccaaatgctggaggaagaagcgtcgcccccacggacatctcacagaggtaggcaaagatggctgcctgaaggatgaagcggggcgtgaagtgctgaggttggaggccgagctcctccagcagcagcacgtagaaagacgagatcggcaacgccaacccgtaggggaggttggagacgaagagcacgaactccccggcggcgagatcgccaaggggagaggcgccgacacggatcgttccggcgcaccccatccaagcaggttgcgcaccaagttaagtgccacctcggactggaagcacttgggagggtctagcaaggccatggcggctacgacggtagaagagtgcggagagcttgaaggcaaaagggtgcagcgagtgaatagagtgactgtcgcactcgggggaacccctttttaa

SEQ ID NO: 25916 - DNA, 213 bp, Zea mays
  Peptide Sequence Number=SeqID_69291
atggagaggatagcttctacctgcaagcgtgctgaccgaggaccctttaactggtcacatgcctcgtcatggcatacccttgagagtcttttccttagtcgggtgaggaagcgacaaatttttgttgcttttgctctaaggtggtgccaaatgaggaaaaacaagactgaagtgcgggaggactcggtcctccacttaggatcttttgcttaa

SEQ ID NO: 25917 - DNA, 510 bp, Zea mays
  Peptide Sequence Number=SeqID_69292
atggccctcggtgaggccgtggagcttggagggtggcgcagcaactccctggccacagacaacaaccctggagcagccctcgacggagtccgggatgtctgcgcagttggcacattaaatgccgaggcggcacatccctgccagtggagtggacagggtacattaaatgccgaggcggcacatcgccagtcaggcgtcggccacgtggcagcattgggtctccgcctgagcggggagcggaagcattcccgggaccttgctgtgagtggtccggaccctgcacaggggggtccggggcctgtcctaggggggtccagcactttcccatgggggtccggacccactgttgatatcctggagtatatcgtctttgctggccacgtggcgacccgggagccatccacgtggtggggtcgggcgctgtttaccacgcgactagaggtggtcatatgggcaccgcgccttcacactgtagtcaggggtacccctgttttagggtaccgacaataa

SEQ ID NO: 25918 - DNA, 450 bp, Zea mays
  Peptide Sequence Number=SeqID_69293
atgcaggtggcatgcaaccgcgccaagtgggcgcgcccctccgacttccaacgcacccagcatgggagcccacgcccacgcgtcatgcaaccggcgcgccggtcgctacgtgcaagcaactgcaccgccactcgcaccactaccacgcctcctcgactgtggaaccagtaccgcgactcgaggcgaccctgcgtacgacccagcagtgccagcctggcgcgacgggaccgggaaaggggataccccgaaaagggtccttctccgcgaaggaaacatgctccgagcctccctactgatcagaggttcaaaggctggccccttggaagggttcaacagccgcctcagagcgcatgggctccacacccactactggtcagaggttcgaaggccggcccctcggaagggttcaacggccgcctcaggccactcggactccgcgcccactactga

SEQ ID NO: 25919 - DNA, 1035 bp, Zea mays
  Peptide Sequence Number=SeqID_69294
atggcgcctgaggttatctccttccctctactcgccgtggagttctacgcgtgcctgccccctggtggttgctcccacgcgcgcccctgctccaattctcacccggagtcatcgtcgtggttagtcgtggtcacaatctcgccttgctgccatagccgcacctactgccgcgtccggcctgctcccttgtgcacgctctacttcctcgccgagctcgtacctgcacgccgagatcgcgtgcagctttcccagctcgtcgttcttccctgcgcgcgcaagttctctgttgggcgcgcgcgaagctctctgttcgccatcaaatcgcctgttcgctgtccgcatcgacgaaattacctcgccgtgcgctctggcatcggctgctgccgaccccgccataaagttcacgagcgctccttgctcggctcatttcaccatgggcaatttttccacgcctcaaatccgtactgcttgccccgtgtgcgctcgcttttcgtccatcgggttttgcgcgtgctcgcgtttatcgtcgagtcgtcaaacccgtcatccccagctcgatccccacttcgccagctcgctccagacacaatctcgtcgccgttccgtgcgtcgtcaagtaatcccaagaatcaggtgaagacgaagctagcagcgcgatattccccaagccctcgacaattgtctggatctgaaaatcactaccgatctcacggattcgagttggctattgaaacgggctcggactccggctcagccccggaagacgacgaactccgcttcgcccgaccccagggctcggactctgctctggcctcagccgacggtctccgcctcgcccgacccaagggctcggactcgacctcgacctcggaggagcctccacatcgcccaacccagggcacggaccaaccacgtcaacaggaggcgccatcattacccaaccccaagctgactcaggctacggggaacaagaccggcgtcccatctggctcgctccgccagacaagtaatgatggcgccccgcacgctctatga

SEQ ID NO: 25920 - DNA, 318 bp, Zea mays
  Peptide Sequence Number=SeqID_69295
atgacttgtgacgcttcgtctctcttctccgccacgacactcgtgatgatggcactcatattgctcatcggcgacggcaacactacgtgccacgccgtgcgatatcttgctcatgccccgccccccgtcgctcctttcgccgtcccgaacattcctgtcgtgccaaagccgccgatcgtgcccatggccaccctttcactaatgctcgccataccgacaatttccatggtgggcgtcgtgccacagatctatgtggtgctgaacatcgccgcgctgccccctatgacggttgtagtacccccatcatgccaaaagtga

SEQ ID NO: 25921 - DNA, 556 bp, Zea mays
  Peptide Sequence Number=SeqID_69296
taaccgcggcagaagaaagggcggaggggcttaccggcggcgagatggctccagtgaagtggtcgaggacgcaggggaggtctcggggttcacaatggatgccagagaagatatgggtgcaaggaattggacggagactcaccggttagctctgtccacgcgcgccagcgaaagaccgaagtccggtgaggtcgatctcgggcttccggtgaagtccggcctggtccgagggcttggcaagcttcacgggccactggcggagctagccgaagcactagctcgacttgggggtagctggagtgggctggccacggtggccgaagctctggcggcaatggcgggcggaaatgagctcgctggagctaaggagaggggcctggccggtgaagggagttgtagcgtcaccaaggtgtcagtgtcagaatgcctggtcccgaggtcaaactgcgccaaaactgtgtcaaatgaatttggtttgagttcaaacttttccaggacgtgttcaagggaatttggcacaactttgatatttggatcttctagttttgagttttga

SEQ ID NO: 25922 - DNA, 369 bp, Zea mays
  Peptide Sequence Number=SeqID_69297
atgaccaccaacaaggtgctgcttcaaccttctaacacctgcatgaacgattttgccacaaactctgcgctgcagaggaggggcgacgactctgcagaggaggggcggcggctctgcagcagggggagaccggcggctctctgcagcaggggagaccgacggctatctgccgcagagaaggggcggcggctgctgcagcagagaaggggcgacggaggggcaatagctgctagagaggagggctggcggcttcaggatgacctctttgttggtgattactgctacaagctgaaggggatgtccgactccttggctgacatgggcacgtcggggccatcattcgacgccccccttcctatccttccttaa

SEQ ID NO: 25923 - DNA, 936 bp, Zea mays
  Peptide Sequence Number=SeqID_69298
atggctgaagccgtggagagcggcgggcgggcgctcctggtctcggagttgggccgcgtgcaggacctggtgagccagctcgagctgcagctgcgcgcgcccgcggacgcggactccgtcgacctctgccgctgcctcgtgcaacagatcgtcgcgctcaccgaccgctccatcggcatgctccactcgtcaccggacctcgccccctcgccgctgaccgccacggggagcccgataagcagtgacgccgcctccgaccaccaccccttccgccccgccggcgccagccccaagaagcgcaaggccacggcgcgctggaccagccagcaggtgcgcgtcagcgccgacgacggccacagctggcgcaagcacccgcgggcctactaccgctgcacgcaccgcaactcgcagaactgcctggccaccaagccaggtgcagcgcgccgacgaccaccccgcgctcttcgacgtcgtctaccacggcgagcacacctgcagggcccgccgccgccggcggcgggtcccaagagggcgcagcagcacaacccgcacgcgcaggccgcgctgcagggcctcgccgcgcggctcacggtggccaccaccaccacggacaacgccgccgggctcccgccgatgacgcccgagagctgccccgtgcggggcgcctcgtccccgtggtccctcgcgtcgcccgtcggctccgacttcaacggctgcctgcaccagggcatctcgccttgcccggtgcccgggtacagggactggacctcggacgtggacctccaggaggtggtgtcatcggcgttcgccgccgtctcgtcggttgcgccccttccggtgcctgacgacgaattcatgcctctcgaatgcgtcgaatacgtattcgaccagaacttcgacattgacaccgcaatgccaagcctctactatccatga

SEQ ID NO: 25924 - DNA, 180 bp, Zea mays
  Peptide Sequence Number=SeqID_69299
atggacgttgctgatgttgtcgcattcggtggtgcaacggccaggggtactacctcgctgatgagcccggattgtggcgtcatcttggcgccggaggtgacacagaggaggatcgacaacagtgaccagttcgtcatcctcgccaccgtcagggtagcttttgtgccggtctgcctttaa

SEQ ID NO: 25925 - DNA, 372 bp, Zea mays
  Peptide Sequence Number=SeqID_69300
atggcgtcgtcgtcggatgcggtgtccagaacaacccgagagtcgtcgacgttggcgacaaccatgaggcccccctgcttaacgatggacagcgcggtgcagctgctctggaccgcgtccaaacggcggcttcgcgggagcttgtcgtacacagcggcacatgcgaccacaaaaattagcggagaagaggaagaagacgaaacgttggtgcggtgtgatgctccactcggcaggaggcgacgcggctggcgtcctggcaaaccggcggcgaagcgattcggtggacatcggcgattgacaaagcaggcaaaggagcgccgggttgaaaaagataatgaggctaacgagtgggtcctacatggcattgaatga

SEQ ID NO: 25926 - DNA, 894 bp, Zea mays
  Peptide Sequence Number=SeqID_69301
atgcttacccatcccacgtcgcatcggcctccttgcacgccctcctgttccaccggggaccgtcagcagtcgcttcccaaggtcctcgacgtgcccaacctgaagaagctatgcgggaggttcgtctccaccacgccctgccctaggcgcttcgacctccgcctccacatccgctgcgagcacgaggctggcaagacagagtcgtcgtcgagctcaccgcacacgaccacctctatgacgcctacggttggtcacaggccgatccggaccagtggcctgccgtcgtgcagttgcgctaatgcgtgtcatgcaattgcgccaacaccatgcccagttgaatgttcgacacctatcgatctgccggacgtgtgcctcctattctcgaatttgtttttgcagtgcacatccgtcgcgcgttgtagggagtcggctcctcgaaattctggtgtgctcattcgtcacaattctgagatgtttcatatcgctgcattttttggtctaaccaggtggagcaaacgatgggacggtttcgttgtgcaggcctcgattgcaagaacttgtaactgcatctatgcactgctgcagcagcagcatagggatattgagtttatggagtgggtgtttttgacgatagagctgcctgacgccaagggtgtgaagcagaacttaaagcctaaaggccaattcaacttgttagctaagggcacagatgactcaccctacgagtttaatcttgagttgtttgatgttatctatttaatacatgttgaatgtagcatttcaggttttgattgtattggccttcctatttgcaggagagcaaagaagttgtctcaagaaccatatgctaacagatcaagaaagctgagaacggttggtggtcaaggctcctga

SEQ ID NO: 25927 - DNA, 534 bp, Zea mays
  Peptide Sequence Number=SeqID_69302
atggcgagagcaagctcgaccaggagttgcgggaactgccgatcgcgagatggtgttatagcgtgtgttcctgtgcagagggatgtgcgcgctgggtgcctgggtcaaggcgtcgtgggcaggtggacgaggaagaagcggggcagggccaagatcgtggcgttgacttccctcctccatgcgcggatgtgggcaggggcggtttgggtatgcgcggcgactacgcaggcgcatcgacggttggggaagggcgcagctgggcgcggcgcgctggcggcggcgactgggcagatgcacgctagggttgtgggggtgcgaggtgggccgtggggtgggctgcgcgaggaaatggccgcgcgcgttgggccgaggaaggggagctgggccgcgggaggggagaaggcgcgagcccaagaaagaaaaaaagggaaggaagaagggagggccgccgagcaggccggctgggctggcgcggcggctgggccgccgagagagatgggggaaaggatggctgggggaggggttagcggctaa

SEQ ID NO: 25928 - DNA, 792 bp, Zea mays
  Peptide Sequence Number=SeqID_69303
atgccagccagagatgcccccgcaccaccacagggcatcccggctgctggaggagaccccgacggagatggagacgacgacgacgcggtaggcagttcgagccacggcacggagcgctcggagaagccagagccggacgggtggatcgctagacccatcactcgtgacgctgctcgtgggtgtcacttccacgacgctcttgataccctattgcgtcgggcctttgaccgacacacttggtctgtcgagtaccgttgtgtagtctaccagcatcgtcgcgggttatacccggaccagtgggaggctacttgcttggtgcgccgtccggacgatgatctccagggtgcagaggccttctcggagcactattctatcactgagagggatactgccgaggcagccatgcaagatgcagcacgacgggcactttctcagtattgctcgttgttcagtggggtagctgatggccttgacctgaagtactaccctcgccgttcgaccagtagtgctggaggtgtgattgtctcgaaagtcggtgagggcaatcccaggctgagcagtatggtcaacctggccgccatgctcaacacagagttggaccacgcccttgacgagttgggcaaggttcgggctgaggttgtggaattgcgtgctaaatgcgcggcacgccactatcttgatggtggttctcccacccctgtcgggattcaacaccattactgttcaccttcccgtggtcacttcgactatggtaccccagactgcaggacccagatagatttagatccatag

SEQ ID NO: 25929 - DNA, 78 bp, Zea mays
  Peptide Sequence Number=SeqID_69304
atggggattggttgtctacgggataaaaatttgaataaggattatggtgtggtaccgtactctaggatgattggttga

SEQ ID NO: 25930 - DNA, 396 bp, Zea mays
  Peptide Sequence Number=SeqID_69305
atggaggttgctccatctcgacctgggaaggggaagatgcagggagtcgggcgtccgaccatggacgaggagaacgccgagctagaggacagaggagcgtcggtgtccaaagaagctgagggcgagggtcggactccatggaggggcgcttgctgctgtatgccatggggagctccttgctgctgcttgggcgccatgggaaaacaggaaggaggagcgagctcacggggaagatggagggaggagctgctgctgctccatgcgcccaaggacagagaggagtggaagtggcgtgtgggggaaaggaaggagaggggtgggctgctatttattgagctggagctctggacatgtcaggtggcagtgagcagtggcaggtcctacaatgtttattaa

SEQ ID NO: 25931 - DNA, 717 bp, Zea mays
  Peptide Sequence Number=SeqID_69306
atggcggccgacagcctgcccaccggcggtggaatcgacgacgtcttccccgcgtggtggaagaacaaccttcgagctcaccccgacctcttccccgccgacggagggggaggcggggcaaccaaggccatgcaggaggcagcgcctcgtcggctgtcgagcgagtcgatagcgccagcaccccaacagggggcgcaccgggcatcgacctcgcgcttgagacgaagacgagcgccgtctccccgcaacacgccgattccgggcaaacggacgacgccagcgcgcttgcgaaaggcttgctggacgtcaccctcgtacctgagacgacggtgcagtcagtcccgacgtgacttcatcaccgcccgtcgaccaagagactgtaatcttgctgacggagagtacatcctcgtgccggagcaaggagctgctcaggaggtagccccagatccagcacccgagcctgcaccagaggacctgcctgccactgctttggaaggcaagccccgcagattgccctcctcacgcgacctgagacgaggtctcccattccggttatggtgggtacaagtgcggtcactgcacgacggccagtcggggtcagtgaggcattgttctctggaggagatggttgctgggattacttggccgaccaccctgccaccgggttggactgtcgagtgggaccctgcctcggctgaggaggagcatgaggagtga

SEQ ID NO: 25932 - DNA, 483 bp, Zea mays
  Peptide Sequence Number=SeqID_69307
atgcaggattctttgcagcagcagcttcttcaggactgggctaagaaccgggcattcatgactcttatgcttcagcacacctgtgtgtcgattcccacagttcagttagcaccgcctccacctcttcaggctcctgttgtgccagcgattcagctaggaccccctcttcctacagttggtccttcttcctctccactccgggcggtcaccctggttttcacatcaccggtcttcagctccgtctgccctcagccgccagtgccaccagcttctgctgttaccactactgctgtggcggtgtctatgagcacttcagatctggcagctcctgtagcgcagcctcagtccgagtcagtatcagctccagcttctacagcagatcctggatttgagactgactctgacccccagcttgcgttcgctctactgccacgaccacgaccggatgtgcccccgccacctcctccctcttctgctgtgtag

SEQ ID NO: 25933 - DNA, 504 bp, Zea mays
  Peptide Sequence Number=SeqID_69308
atgaggtacagggaggctgccactcatatccagctctggctccttggtgccctggtctctcactcagattttgatgttgtggatttctttatttgtaagattgaggacaccgtactggatggtttgcatgctcgtcgacagctgccttatgctcactatttgtgtcacatttttgctcagctgattcggcctccacagttccagggcacacttgaggcttcacgcctcctctttgggtcctactgtccagcgtgtgaggatcctgtgccagcacctgctccagtatttgacactcaggctgaggatactgctcttcatcagtttgaagctcaggacgcagcagttgacgatgatgatgatgatgattttgggattccacctccgcctccgcctcctatgcctccacgctctcatgatcatgaggctgggagttccagtggtgctgcccctcctgccattgaccctgctcttgcggcgattctccagactctcactcaacagtag

SEQ ID NO: 25934 - DNA, 639 bp, Zea mays
  Peptide Sequence Number=SeqID_69309
atgaatagtgacatcctctcgctcaaaacggaatctcatccaatggtgatcagggtcgatccatacagtagcgtagaaaactcggacccattcctcaacatatccgccgctggtagtcaaaagagtgagaagtccaggcagataggagagaaaagcgggaaggtccaaaagccggtgcactcgcagagcaatctgtgcaaacatctgggccctgaagaaggactcctgaatcctggtgctgaagagatcgactgcagcagggtccctctgagccggtacccaggtctccacgggtacgtgtctgaaccgacgtacccgtacagctgtagcacgctgaagatcaaatacctgggatccgcagcaagtggtcgtacctcagtctcatcgcgctcccagaagcgagcaggtgggataggaggagcggaagtgggagcgggaggaggagcagtggaagctggtgtagtggaggtggtggatggcgcagcaggggtgacaggagcaggcaaagtgggtggtggagtggaagcagtggtgggagtggaggagcgaggccgggaggcgaggcgacggactcggcgaagaaaatggaatttgggcactcggctcggagacgatcgctcgaaacagggaattgagtga

SEQ ID NO: 25935 - DNA, 462 bp, Zea mays
  Peptide Sequence Number=SeqID_69310
atggagggaggtgctcaccgagaggaggaggcagaggagcctacgcagaagagggtcatgggagcacgacgccgtcgatcaccgccggccgccgccgcccccttgcctcccttcccagccgccgctcccacctctccctgtgccagccgccaggcttcttccttccctctcccctgctctctctgctgctcgccctccatccaggccgcccgcgcgaggacccgcctggcatccggccagcgccccgactgcctcaacgcccttgaagccgacccggacgcccaagcccggccccgcgcagccactcgagcggacagcgccaaggtccagcgtcacgaccccgaccgcgcaccaggcagcgccaagcgcgacaccgagcccctgcgccaagcacccgaaaccgatcggctggacccgagccaccaagaaccgaagcgcccgcgaccgttcttctgctcgcat

SEQ ID NO: 25936 - DNA, 495 bp, Zea mays
  Peptide Sequence Number=SeqID_69311
atggagaccgtcctggtgaaggccgtgcgcccggtggccgtggcgctgctggcaacggcctatgcagggggcacaggggcagcagcgccggccgggggcacagggggtgcgctgctgggggcaacgctggtggacggcccgacgaggctgggcgccccatgcccagcacgcggctgtggtgaccgcggggcagcgcttggtggcgagcgagggggcgcaggaggagcgctcgacggaaggtggagtggtgtggaggtggaaaaaaggggtggaggaggtgagggttttggtggggagccgattaacaaggtatgtggcagtgtggagtgcctcaacccagtagatcggaggaagactcgcctgaaacaagaccaacaggctgtttcggtctggggcaccggactgtccggtggtgcaccggacagtgtccgatgcgccaggctgcctcgacctgaagacgctgctctcgggaatttgccgacgacgtacggctaa

SEQ ID NO: 25937 - DNA, 732 bp, Zea mays
  Peptide Sequence Number=SeqID_69312
atggcggcgcaacaacctcgagccctcactgtccaccaccacacccgccgccacctcgtcctcatcgtgctcaccgtggctgccaccgcagcagcaagagcggctagcgcgcaccacacagcagcacccgcaccgagggcggccgagagtccatcgccggcggtggcatccttcgtccgcgcccgctgcgccgccacgctgtacccggctctctgctacgactgcctcctcccgtacgcctccgaggtgcaggaaaacccagcccgcctcgcgcgcgtcgccgccgacgtcgcggcggcgcgcctccacgcgctctgcgcccgcgtcaaggacatcctccggcacggcgcccctgaacctaatgagggcggcggcggcgggcggcctagcgaggccgccgcgctgcgcgactgcgcgagcacgatctccggcgcagcggacctcgcgaggcagtcgtcggccgagctcaccaagctggagatggacctggacgccgccgcctcgtccgcggccggcggcgggacgagcgacaggaggaaagccaggtgggaggtgtccaacgcgaagacgtggctcagcgcggcggtgaccaacgaagggacgtgcgccgacggattagcggaagctggcgccgcggactcgcccgccgggaaggaggttgccgccggcgtggcggccgtacagcagtgcacgagcaacgccctcgcgctcgtcaatggcattccgctctga

SEQ ID NO: 25938 - DNA, 214 bp, Zea mays
  Peptide Sequence Number=SeqID_69313
atggcgcctagggccgggcttggccgctgtcagtctcactctgtcgagtggcacagcagtcagagcggcgcaggcggcactgtccttttgtcagaccggtcagtggagcggcgaagtgactgcggtcacttcggctctgtcgactggagggcgtgcgccaggataaagctttgtgctgatgggggttaccagctgagatttaggagccttgagg

SEQ ID NO: 25939 - DNA, 357 bp, Zea mays
  Peptide Sequence Number=SeqID_69314
atggaggaggtcgtcacagagctccaggccaagctgagtgccttcaacgaaatcctggaggagcagcgggtccagcagacagcggttgtggagaggatccaaaaatgggagcgggagctggaggacaaggccagcagcattgccctggccgaggagaacctcaaggagaaggatgcttccctagataagcgagcgacgaatctcgcctggcgggagaaggacctcgccttcagggaggaaatgtttgaaaggtgggacaagttgctagccgagcatgagctcgaggtggagaaggagaaaaagctggaagagcgggtctgccaattccaggcggcgcaggcagcaccggacccctag

SEQ ID NO: 25940 - DNA, 714 bp, Zea mays
  Peptide Sequence Number=SeqID_69315
atggctcccagcgcccccgccgcggccccccaccccttagacaagggcaagggggttgctggcagttcctccgcaccaggtggcaccgcgccgacgggtcattcatctcagacccccccagaagcgtcagaggactgctggtggggccgaggaggccggctcccaagcccagggcacgcagaggcgcgtaagtcctccaccaccaccaccatcgggtccgccgccaccacaaccaccaccaccatcggttgtcagggcttcctccccctctgctcccaaggccgcgcctcccccgcctccggctgctgccaccgagatagcgccaccgggcccccaggctccagctgggggtccggcagcagcggcgccaatgtcaagcggcgccacagcggcggagggggtcccaactgcaccgacggctaccacagcctcaatgacggtgatgtcgttgagtacaccatcgacagcggcgaagggggccccaactacgcccgccctgccatcgagggcgacgcggggggcgcgtccagctccatcctgccgcccactccggaggagacggaggtgatttttgggcggcggctccagtccggcgccgagccagaagcggcgccagttcccctcccctgggtgttgtctcgtgcccatcaggcccttcatgagactgaggtggcgatcctgcgggagtgggaggcgcttgaggccgaacactag

SEQ ID NO: 25941 - DNA, 1167 bp, Zea mays
  Peptide Sequence Number=SeqID_69316
atgaacaaaacaccggcattcaaggtgccattacaaacggaactccggttccgtccccgcgggacggacgcggccaccggaaggctctcgttcgcgtccccgctcaagggacatgaaccagacatcaaagtcaaagagccggaggccggccccaacagttcgccttccccggcatggctggaggacgcctcctccgcagagctgggggatggtttccaccaccagaagctggaagaggaggtggccagccgacccatgcgggagttggagccccggctcgcctcgctcttcgccccagcaaggattgtgaccaccggcgaaggggtgcagtcgggctgcatgatgaaaatccttgaagccgaacgatggctgaaaggtaccaacttccacgaagttgcgttcctccaacgacaaggcggaaggattgcgggtgtcccccatccgggggctcggaagccgtcgtgggctgagtcttctccaacacgctccaaggtcctccccctacggcacgggggctgggtcccacgcgtcatgcaaactggcctagggcagaagaagccaaaccaccgcgtgcggtgcatgcaaccgcccagcggttacaagcattcctccacttttcgcctagaccagcgggtgaaagggcgggcagccatgcaggcggcatgcaaccgcgccaagtgggcgcacccctccgacttccaacgcacccagcgtgggggcccaggcccacgcgtcatgcaaccggcgcgccggttgctacgtgcgagcaactgcaccgccactcgcaccactaccacgcctcctcgactgcggaaccagtatcgcgactcgaggcaaccctgcgtacgacccagcagtgccagccaggcgcgacgggacagcgagagaaacctctctcacggcgtgaagaaggcgcgcccgtgttccattcctcgaacggctcgcgcgcgcaacggccgcctcgcgaaccactcgccccgtcgcattaactccgcggcaggacaggcggcgcctctggcagccgcctcagagcgcgtgggctccacacccactactggtcagaggttcgaaggccggcccctcggaagggttcacagccgcctcagacatagagcgagggatgaccctgggtaccaaggctcgggctatgctcccgaggtccggtag

SEQ ID NO: 25942 - DNA, 1392 bp, Zea mays
  Peptide Sequence Number=SeqID_69317
atgacatatgctgttatccagggtaacttgaatttgatcacacaagcattggaagcagttgggcgtaagatggaagttctacctgacccttctacagttcatttccatctacctggtgatctctctgtccttgtgcatcgaaagtatgaagacttcatcaatgaactgatcagcaaattccctcacgagaaagaagggataattaagttctatggcacatgctggaagatcttcaattcactaaattcgttggagctgaagtctctagaggagcccctttatctttttggtcaatttttccagaagcctttggaatgcttaactctagcttattatttgccacagaatgctggggatattgctcgcaagttcataaaagatcaggagctactctccttcatagatgctgagtgttttattgtgagcacagtcaatgccttgcaaacacccatgataaatgcaagcatggtcttgtgcgataggcactttgggggaattaattatccagttggtggcgttggtggtatcgcattatccctggcagatggccttgttgaaaagggcagcgaaatccgttacaaggcgaatgtaaccaatgttgttcttgaaaatggaaaggctgttggggtgaggttgtcaaatgggaaggagttctttgctaaaacggtgatatcaaatgccactagatgggacacatttggaaaactcttgaaagaaaaagaacttccagaagaggagaaaaactttcaaaagaattatgtcaaggcaccatcattcctttcaattcatatgggtgtcaaagcatcagttcttcctgctggtactgactgccaccattttgtacttgaggataattggaataatttggaaaaaccctatggaagcatatttttaagtattcctacagttcttgatccatcattagctcccgaaggacaccatatacttcatatatttactactgcaggcatagaagcctgggagggtatttctaggaaggaatatgaagagaaaaaagagatggtggccaacgagattataagaaggcttgaaaagaagttgtttcctggtcttcaagattcaatagtcctcaaagaggtaggctcaccaaagactcaccggagatttcttgctcgaaatgatggtacatatggaccaatgccgcggggtaaacccaagggcttacttgctatgcctttcaatactacttcaatagatggcctttactgtgttggtgacagctgttttcccggacaaggtgtaatagctgtagcattctcagggatcatgtgcgctcaccgagtcgctgcagatattggactagagcaaaaatctccggctctagatgctggtcttcttgggctactcagatggttgagaacacttgcatag

SEQ ID NO: 25943 - DNA, 828 bp, Zea mays
  Peptide Sequence Number=SeqID_69318
atggatgctccttcctcgtcggccgccatgcccgccagcgggtctggtccccatcagcatacatctgctgggagtgctaccggcgatctgccaacagctattgcggccccatcagtgttggcgccaagcccatcatcggcagcggccgagggggttccagctggatctgcccccaacgcgcaggatgacgctggtgccgaggtggcgtcatcgagcccccaggattcgcctgtcaccgtcgaggcaacactctcgagttcccaagtttcagccgggggttcggaagcggcggtgccgccagcagctgttgcagaccctccaacggcgataccaccggatgcaccaccggaggtaggcgtgggggacgcgtccagctctgtcccccagccaactccggagggtcttgaggttattcttgggcgcccactccggtctggtgtcgagcctggagcaacgctgactcctctccctcaggtgctgattcacgctcaccaggccctccaggaaaccgaggcggctatccgacgagagtggaaggcgctcgagaccgagcaccagcgccttggcgactggtgctcccaactggagagcgacattgctcgtgttgagggaaacctcaaggcaaaggaagcctccctggcgaaacgaacaactgacctcgcttggcaagaggaggacctcgccttcagggaggagatgtgggcaaggcggaacaagttactggatgagcttgagctcgaggtcgaggagaaagtgaagtgtctggaagggaaggtgcgggcgctggaggggcaggtccgccagttccaggcggtacaggcgacgtag

SEQ ID NO: 25944 - DNA, 750 bp, Zea mays
  Peptide Sequence Number=SeqID_69319
atggcggccggcggggagggaacacctacggacgccgaggaagaggaggcactggctggcaaagccgggcccacgcgtcagtcgctgctccctccccttcgtaacgaagccgcgagatcctcgccgcgcggaccgcgcctacctcgcgcggggagctctccggggacctcggagttgcgcaacgaccgcgctcctacacgttttaatgaccgtgtttccgtcaccccgacacccttgaccgcctcccgttctctagaactcaaaagcgccaccgccgtggtagaactcagtccgccgcgcgccaagtgtcgctcgccgtcgatttgccctccgctgagcgtgcgggttcacctccgtgatcccttgaagccggcgcaaggatctcccgggcttgtcttcgtccctggagcactgaattgctcgtcggtgtcgaactggaccagggagccgcgccatcacgtcgttggactcgtcctcgcgacgaaaggctggtatgaccgatctggcgagttcgcctccctctcccctttccctcggtgtagtttcgctcggtttaggttggtaggccaccgattcgccgactccggcgagggcgccaccgcggtctatgccgcgccaccgctctgtcgcgccaggggtagaagatggactaggcgccgttcatctgttgcacgacggccgcgattagaagttggataccggttcggtgggacctggtccgtgccacacgatcttgatccaacacgctag

SEQ ID NO: 25945 - DNA, 444 bp, Zea mays
  Peptide Sequence Number=SeqID_69320
atggcggtcagacgggggattcttgcaagtgatgttattacttttgttctactatttaattgggttggtatttacttatacttagtaattgctaataaaattttgaccaactttaaaagcaatgctcagcttcaaccatttccgttgatctatcttaaccaagacaccaatacgaagaagatcaacctcatcaaggaaaggataagagtcaacgtcaaggaagccacacttgctaatgaagagaaacttttgggagcattaaaactaattgaaaacaaaaagttaaaaaaaaactttctatatcccttccttgcaaatcttgaggacgagattatttttaggggggtaggatttgtaacactcaaaaatgtaataaagagaatagagataatctcaatagtttgtggcctctactattcattacatgtgatcaatcctagttga

SEQ ID NO: 25946 - DNA, 1236 bp, Zea mays
  Peptide Sequence Number=SeqID_69321
atggccgacctccacttctcccttggcaggcgctgccctcctctggtccgagctcgagcaggtgagctcgccccatggcctcggctcctagcctccaggctcggctacgaggacaccacgctcgccctcaccctccgcctcccgggctccgactccggccgttcctcctcgctcgccgcgccctccgctgcgccgtcacccaaggcgcgggtggtggggtggccgccggtgaggtcgtaccgcaagaacgcgctcgccgactccagcaaggccaaccgcgcagccaatttcgtgaaggtggtcgtctcccgccgctcctcggcctctgctcctcccgcgcccggttcccatcgccgctctcttccccagcgcgtcttcttccccagccgcgccgtgccgagctgcttcttgcgcacgcgccgtgccgagctcgcccccgacctctgctcttccctggcgcgtcgcgttcttccctgcacttgcccatggcggccgagctcccagcctgcgcgccctccggttctctgtgtcgcgcgctgctccagctcccacggcgcgcagcctccctctcggctcaccggatctcccagcgccgcgcccagcttctttctccctcagctcccgcggttctctctccatctccctccgttctctgttgcgtgcccagcagaactcccctgcgcgcccggattctctccttccctactcgaatttggtcaggcccgtgcagctccctggcgccctgcttcctctgttctctccctggacgcgcacagcgttccgtcgaactcctgcgccgtgccctgctcaggttccatggccgcaccaaattccctgcgcgcgctggcctacaactcgactgcacacctccctacttgtcatggccaccgtgccctgctccctgatttctgctcgccgcgcgcgctcatctctctgttcgcctctgcgcacaactctcctcgggagggggccaggggggaactggcgactggcgaggccctaggttgttttactttacttgcatcactagcggtcataaaacaatcacgaatcactgttgacaaagggccatatgacaaaatggttgagaatgaatgtgtcatgggttttccgggtattgccttgttttcgcccatcttgatgggacttcgtggagttccatttcgctacctagtgaaggtcttcgcaggggagaaagagggacaacgtggcgacacaagggaagaggagaaatag

SEQ ID NO: 25947 - DNA, 639 bp, Zea mays
  Peptide Sequence Number=SeqID_69322
atggccacctcgaataccaccgtgctctaccggaggtcaccgcctatgaccctaggcatgacggagcctgggggagagcctatggtggggtgcctccgcagactcactttgaatggtgagctacaaggggctcgaaggtggatctgcgacgaggggctcaagggtagacgttacaatgagaacatgtattctactggggtggagttcgtcctccttcttctaggcctcatagcccctatggtgttgtctgctgggtcgtgcgcagccatacccctggtatggcgtatgcctggtacgacaaattgctctgtcccttatggcgtatgggtcactatagagacctcgatactgaggtccctacgactggagttgtatggtcccactggtcagcggggatacgtatccgacgtcgttcttgatagagacccattggtactgcttccatggtctagacatggcttggtgatgatatgtcccatcgtgttgtcgtggcttaagagtattgggtcgactcttccctttagtagaggtgttcgcctgagagatgattgtcgtcttgttgggttgcttggcaggcatgttggttggcagccccgcctcactaggttgttcggcaggcaggtttgggaggcattttga

SEQ ID NO: 25948 - DNA, 873 bp, Zea mays
  Peptide Sequence Number=SeqID_69323
atggacgccactggcatcagagggggagggaaggcaaaaaacggagtgaccagacgcaaggttggcgagcccagcaagaagtcggcgtggagcaatatgatcaaagcagttcagggcctagttgcacagtgtgaagatttaaaattgaagtgctatgaagagatggataagaggaagaaactttataatattgttcaagagacaaaaggcctgaatgcaaatggcggaacaactaaaaagacatttaagtttgatagagtattcacgacgaatgatgatcaaggaataggaaagacttttaccatggaagtgaatgagagtaatagtggtgttaactatagaactctggaagaactgttcaatattgcagaggagaggaaaggaagtgtcacatatgccttatctgttagtgttcttgagattgttcttgtcaccctaaaaaggttcccgttctactttcgggcaggtgaattgcaaagaaatggtctgtccgcaactggtgctctcgggcgactccatcaccgagcagcccttcgcccggtggctgcggtgccgaactggctgacacctactcgcagttgcattacaagttttactgactatgaatttacagtgtacctacacttagttggaaaacttcaaccacactgcaacaaggtttataaaaggtttgctatgaggaaaaacaaatttatgggctcaaacaaaaaccaagccaagaaaacagatatcaactgtgataccacactcaaaagcttgtttggtgggagggacaaggttgggatgctggagatctccaagcttttgagccctgacttcccgaagatctccaagcttccctggtccatggagccagggatgtctctttggtaa

SEQ ID NO: 25949 - DNA, 471 bp, Zea mays
  Peptide Sequence Number=SeqID_69324
atggacgccactggcatcggagggggagggaaggcaaaaaacggagcgaccagacgcaaggttggcgagcccagcaagaagtcggcgtggagcaatatgatcaaagcagttcagggcctagttgcacagtgtgaagatttaaaattgaagtgctatgaagagatggataagaggaagaaactttataatattgttcaagtgacaaaaggtatctattatcctgaatttatcaggtttttttgtcgatgccgacccttaagcaaagatgaggtgtcatcaggcctgaatgcaaatggcggaacaactaaaaagacatttaagtttgataaagtattcacgacgaatgatgatcaagatatcctggatatagaagcagccaaaaatagtgtcagattctggttcccacacccgtgtcctggtaccactattcgtgcctatgttgggctcctatatccatgtgagcgagcatga

SEQ ID NO: 25950 - DNA, 387 bp, Zea mays
  Peptide Sequence Number=SeqID_69325
atgaggggaattgtcttgtctcttgggaatgcgttcaacggccctttcattttggtggtcttggcattatcaacctggagcggtttagttgggctcttcgtgctcgttggttgcggctgcaaaagacagatgctgctagaccccgggaaggtctccccattagggtacctccaattgcgcaagctttatgcaaggttgctgttgttacccatgtgggcaatggggaatcaaccaaattctggacagatcgctggatacaaggtaaaactgctgcagaatgggcacctaacctgcttcaattggtccccaaaagagctagacggcagcgatctgtgtcccaaggtctacaaaacagaaaatgggtctctgacattcaaggggctctga

SEQ ID NO: 25951 - DNA, 399 bp, Zea mays
  Peptide Sequence Number=SeqID_69326
atggcggccagttccctctcgtccccggcggccagccggacgccgaacctgaaatcggccgtggctccgtcaccttctccatccactcgccgggcgccagcagatgcggcgtcggcgtcgatcacggcggagtcgaaggcacggttcgaggcttacaaccggctgcaggcagcggccgtggcgttcggcgagaagcttcccatcccggagatagtagtgattggaggccagtcggatgggaagagctccctcctagaggcgctccttggcttccgcttcaacgtccgcgaggtcgagatgggcacccgccgtcctctcgtcctccagatggtccacgaccccactgccctcgagcccagatgccgattccagggactaaaaatattcagaacatattaa

SEQ ID NO: 25952 - DNA, 363 bp, Zea mays
  Peptide Sequence Number=SeqID_69327
atggcaaggcgaggtaacgttgccgcggggtggggaatgatcaaggtggacgagagtcgagaaaggacgtcatggctggggtggccaagacggtggttccaagtggaggcagaggcagtggtgacgtgggtggagggtgtggcaacacgtgatgtgggagtggttgtcagtggtgaagcgacgaaccaagagaaggttctatatgatgttgtggacaacaaggatgttgttgaggtgacaggcagagtcgacccattaccgacaatgatggaagaaggtaaagtggggctgtggggatggggtgaagaaacagtaccagggtcaggagtggtgtggtacgaggcgccgcagtcagcaacctag

SEQ ID NO: 25953 - DNA, 2352 bp, Zea mays
  Peptide Sequence Number=SeqID_69328
atggcaagcggcaacggcacaatgaccttaccgtggatgcgtgccgcgatttcgtgcgcgacaggtgcacccgctcccgacctcgagtgcagatacgcgcaccctcacaactccgtttccatcgacctggacaataaggtgactgcgtgtgcggattctctgaggaacaattgcttccgggggatgacatgccgttactaccatccgcctccacatatccaggagtatgaaccgatttctccatttttggttgaggaggattccgaggagtatgggagcccgatggtggtggctacggccatcgcggacctcatcaagcagcgcactgaatcacacctccggaagatccaggctgctgtctcatccaagcccatcgtcatgagggctgagtacgcccactgccccaacctcacaatcatcgacaccccaggcttcgtgcttaaggctaagagaggcgagccagagagcacaccggatgagatacggtcgatggtgaagtcactcgcgacccctccccaccgcctcgttctgttcctccagcagagcagcgttgagtggtgctcgtcgatctggctcgacacgcttaaggagatcgatcccactttcaggcgcaccatgatagtcatctccaagtttgacaaccgcctcaaggaattcacggagaggtgggaggttgatgccttcttgagtgcgagtggataccttggggataacatccacccgttcttcgtggctcttccaaaggaccgtggaacaatttccaatgaggagttccgcaggcagatctgtcatgttgatattgatgtactacgtcacttgcgagataatgtaaaaggggggttcaatgaagagaaatatggatcacacattgggttcagctgcctgaggaagtacctcgaatctgaacttcagaagaggtacaaagaagcagctccagctaccctggcattgttagagcagaggtgcactgatgtctcaatggacctaacgagattagattccaaactacaagcaacgtctgatgtctctcagctccggagatcggcaatgcttcatgcagcttctatttgcacacacttgcatgcattacttgatggatctgctgatccagatccagaaatatgggggaagactacggaggaggaacaaatgcatagtgctattggcagctggcctggcattaatacgcctgtaaaacctgccaactccagccttaagctgtatggtggtgcagcttttgagagagtaatgcatgaatttcgctgtgcaacatattcaatggaatgccctcaagtgtcaagggagaaggttgcgaacatactacttgcccatgctggaagaggtggaagcagtaggttgactgaggcagcagctgagatagctcgggcggctgcaagatcatggcttgctcctcttattgatactgcatgtgaccggcttgcatttgtcctacaaagtctgtttgaccttgctatggagcgtaaccgcgataaggattcacaacatcatcagaatgttgaagatatggatagttatgttggctttcttgctgctctccggtgctcatattataagtttgtcaaagaattgtccaagcaatgcaagcagatagtgcgtcatcaccttgattcagttacgagcccttactcccatatttgctatgacaacgactttttgagtgatgttggatccgtagcaaaccccatgagtaggtttagtcactttactggagttacatcctttgatctagcagacagtggatcagcactagaggaagctcaggagaacttgcctccaagagatcagcagcattcgacaccgcctactagtaaagggaatgagtcaaaggaggttctcagagaaagccagctaacagtacctgagacgccttctcctgatctgccatctgatatacatggtggtaggaagaaagaaaatgggatcccaaatgacggtggcccaaggaaaagacatgcaaggatggcagcgtatacaaacagaaatcaccataacagtatgattgttggagatgacatgggctcaaagtcagggtcatcatactccaccatatgcgcaatatctgctcaatattttgccaagatgcgagaagtcctgattgaaagaaatgtcccctctgcattgaactctggattcttaacaccatgccgtgaaaggttatttctggcactcggctttgagctattcgctgtgagtgatgacaagttcatggacatgtttgtcgcgcctggggcagttgatgctattcagaacgagcgcaattctcttctcaaacgtcagaagattttgctgtcctgtctgcatgagtttaagaacatatcccgggctctgtag

SEQ ID NO: 25954 - DNA, 465 bp, Zea mays
  Peptide Sequence Number=SeqID_69329
atggacgagttccaagaagcggacattctgtggcccgatacggaggacgagctggcgcctttcgcgcccatggacacggaggagctgtgcgaggccgccggctccgtgtccagcgtcgcgccggtgttcgggcgccgtttcgaggtgtttttcctctccggcgctggcccgtcgtcgttatcggccgacggggacgacggcgaggagtggcaggaggcggacgtgctgtggccagagccagacacggcggacgagcggcgggggagcgggggctcggtgtggccattttctggctcttcttccttcagcggcagggcaggccggcgcgtgaagcctgccgccgccacacgcgatgggtggacgacggggccggccgcgtcgtctcccatcaacataccggctaacattgcccctcgcgcgccgccgcgttgtcagtttaggacggtgatgaaccgccgttcgtag

SEQ ID NO: 25955 - DNA, 487 bp, Zea mays
  Peptide Sequence Number=SeqID_69330
atggcatgcggggcggtggccaacatcgtcaaatcctcgctcggccccgttggtctcgacaaggccataaaacaaaagcagcaatcgttgtcccttgaagcacatgattatgcgaatgcaattcctgatttaagcaatatgatcaaagcagttcagggcctagttgcacagtgtgaagatttaaaattgaagtgctatgaagagatggataagaggaagaaactttataatattgttcaagagacaaaaggcctgaatgcaaatggcggaacaactaaaaagacatttaagtttgatagagtattcacgacgaatgatgatcaagttgcacagtgtgaagatttaaaattgaagtgctatgaagagatggataagaggaagaaactttataatattgttcaagagacaaaaggcctgaatgcaaatggcggaacaactaaaaagacatttaagtttgatagagtattcacgacgaatgatgatcaag

SEQ ID NO: 25956 - DNA, 435 bp, Zea mays
  Peptide Sequence Number=SeqID_69331
atggaggtaggatgtgaggggtggggtggatgggagtggaataacgaattagtggtgggggtagtgtggaaggaggccccggagtcaaccacccaatcggtggtggttcggggaggtggaggtggcgaagtcacgaagtatagggttccagactggatcgaaggacacgaacatgccccggatgagctggccgtcgtggaggaggacgcgcacagttgcgagagcggcgggcgaggtaaagctcatggcgaccggtgtaggagggtcgtgtcactgctgggccggggcacggtcacccggtgcagggaggcgcggactggacagccgggcgcgaaacagcaggagcgcgggtcctcccgccaggagctcctggacgacacggtggcgacgtgcgcgagcaggaagggcgcagctggcggtgggggcggcgcctga

SEQ ID NO: 25957 - DNA, 384 bp, Zea mays
  Peptide Sequence Number=SeqID_69332
atggggtcgggcgtcgggcgcgggtgcggccccggatgcgaggcggcctggcgctgggcggcgtcggggtcgacgcctgggctgctcggctccctggcgcgagtgcggccggggtcgagacctggcggcggccgtccaaggcgcgcctgggcggggatccggcggagtgcgcggacggcggctcggccgcagcctgggcaggtcgcggggcagagagcggcgccgggcgcggctgctgctcctggcggcgcgtcgggccgcgagcttggggacgggcggctcggcggtggcgaaggagaggtgccgtcggttggagccggcggctgggagagagcagggtgggaaagacctaatctgataccatattggagtgtaaaaccctaa

SEQ ID NO: 25958 - DNA, 1251 bp, Zea mays
  Peptide Sequence Number=SeqID_69333
atgccgttcatcatcacttgtccgttttcctctgacgacaccccgagcccgaagaggcgactcgttcccctccctctggcgatctgtctcctctgctccccgtgcgtcgagccgtcgaggcttggaggtctcatggtacccgatcccccctccccgctgcagagaaacaagcagccggcaaagcagatgagcaagtcctcctcgcatcggccgagcaagtcatcgacaccatcccacgctccgggacggttaactctgagtctgaccagccccttcgcgtcgccgctgcttctcttacttacggccgccgccgccgccgctgtgttcctctactccctgaccgccgcccgctcgtacggggcccgcggggaggctcctccgctctcctccccgacggtggagaccatggagagagcgcgcgccatctgggagctacccgccgcggggccggccagggcggtcctcttcgtcgcccacggctgccgctgccgcccggagaacttctggccgccgtccccgcgctgcccggggtgcgtcggcctgccagaggacgtcgccatcacggaccgcgcgctgcggaggcggttcgcggtgctggccgtcgcgagcgccggggagtgctggtcgccggggaaggaggtcgacgtcgccaagcgggtgatccggtcctgggccgccaagaacgggctcgaaggcctgccggtagtcgccctcggcgcttcgtccggcgggtacttcgtgtccaggctggcggccaagatgagcctcgccgccgtcgtgattatgatcgccgagggcgcgttcggcagctcagctggcgcgcttccggcggtttaccctcccgcgatgttcatccacatgccgaaagataagcggagggcagtgctggtggataagaattccaagatgctgatgaagaatggcgttgaggtgaaggagctccagagcctcgagctccctttgacgcctactctgctttccgagaggatacctgggctggaccgcgggctatcagaaaggatctggacagtgttcagggaagaagctttcgttgatgacaaaggatacatgaaagaggatggccgggaaacgccatggaaggatgcattggtcaagaggggcctctgggaagaggtgtctgcgttggctgatcacatccaggaagagctaaatcttgcttatggataccacgagatgacgagcttacacgctgatgagatgtttgattgggttgacaagcacttgagatga

SEQ ID NO: 25959 - DNA, 453 bp, Zea mays
  Peptide Sequence Number=SeqID_69334
atggaagagttccaggaagccgacatgctgtggccggacgttgcccttgcccacaaccacggctaccaccgcccggccgactcctcccacggccgctgccgccagcacctcacagatcagccgcaacaaccacgtccaggcgccgcggtcgtccacccactacagtcctcgcctgtgcgcatcccctcgatgccgccgatggggccgcgcccgacgagcaggggttcgtggacgcgcagctacaaggaggaggaggacgacgacgacgatggcgcagaagaagtgggggtcgtgccgccgcacgtcctggcggcgaggcggtgcggggaggagcggagagtggcctcgtcggtgtgcgtgggccacggccgcacgctcaagggccgtgacctccgagccgtccgcaacgccgtgctccacatgaccggattcctcagcagctccgacaagtag

SEQ ID NO: 25960 - DNA, 291 bp, Zea mays
  Peptide Sequence Number=SeqID_69335
atggcgctggtcgcgcacctcagggcttgctacccctgcgccgaggcccaggggcggatttacgaccggggctgcctgggctgcagccccggtcgcggcccagtaacgggagagcgatttcgtgcccagctctgcctcgtgcccattactcagccccgcacgactgcgcctaacctaaaccagccgccagccgtggaggataggaggagatccagccgcccaccaggccgccagccgtggaggacaggaagagacccaggtggatggacagtggtggatctatgggtttaa

SEQ ID NO: 25961 - DNA, 420 bp, Zea mays
  Peptide Sequence Number=SeqID_69336
atgggcaagagtaacaaacgcaagcgtgagccgactcctccgtcggaggatttcggtgactcggaatactcggaggaggagttctcctccgagtccgagggatctccgactgtcgtctctcccccggcgtcgtctgatgattcagacgactcccaggggattgccgcggagggctcagatgagtctgagttctcctcggacgaggaggactcggacggcggcgaggacgaggatgacgacgacgacgacgacgacgatggtggcgacgacgacggtgacggcagcaacggcggcgggggcagcggcggcaagggcagcaccagaggcggcagcagcacgggcagcaccagaggcggcagcagcaaaggcagcaccaggggcggcggcggcaagggcagcagcagcaaggccagtggctaa

SEQ ID NO: 25962 - DNA, 1116 bp, Zea mays
  Peptide Sequence Number=SeqID_69337
atgccggggaaggcgaactgttgctgcccagctaggatgcaacattctgtcctctgtcctcgctttcgtggcgaggacgggagcgaggacctgtcggtgcgctttggagcggcccgcgctcgctggtgcggcgttggtggacaggcagatgccgtcgttggtgctgacgtggtggcagctggagaaagcttcttcgccgtcgaggccgtcagcgccgcctacggaccgacctccggctctttggctttaatgtctggttcgcgtcccttgagtggggacgcgaacgagagccttctggtggctgcgtccgtcctgggaccatggctgctgctgcagaggtcgctggcgagtcgcccggagcttgtcaccccgcaggctctccagtgtggaggttgttcatacccgcgggggtggaaccggagttccatttgtaatggcaccttgagtgccggtgtctgttcattgtggctgtcgaggcctgaacatccgaagccggaggcagcggtgttagcatggaccgaggcagagttggctcgaaaagaagacttcgtcggccggagcctggccggaccgtccactggtgggaccgacgccggagtcgagttgccgaggccacgagccgggctggggtcctcggaggacagctggctgaggcttcggggcggccggccgagccgtctgctcaggccggattcctggagaagaccctggcggcaatggcccgggcgcggtgctgacgtcgtccttcggagtggagatcctccgaccgcgttgccgtccgaggctcggtcggacttcgccgaaggtggagttgacgccgagggtgctgctgctccccttccgtcgacgtctgagcctgcaggatcggttcatcttgtagtgtgcgattctgctatcgatatagtcgagaaggcacgaaaaatcgtttcggcagaagagtttttgagcgtgaagacttgttcggtccgtggaattgcttatccgagcgtgagttacttatcgcagaaggtgatgagtgaggtatccgtatcccggaggcgtaggagtccctcagctcggtcagccttggctgcttacgtgtactccgtcgttttcaggatcccactttcgaagtag

SEQ ID NO: 25963 - DNA, 627 bp, Zea mays
  Peptide Sequence Number=SeqID_69338
atgggggatacccgccgtcttttcgcctcatcgttggaggaacgcaactccgtgggagttggtacctttcagccatcgttcggcttcaaagattttcatcagccagcccggctcttcaaggatgttcatcatcctcgctggtgtgggggccgggctgagccggcgctctacctctcgcgcgggttcgtgggtcaccctctcccgcggcgttcgagggagagggcgctcactggccctgcaggcggcccggacttcgacaacgcggggctggtcgacggcaggcgtcgtcacctccagcgtgtcgggctcgtcggcttggctcccggcggccccttctgccggagggcggctgccgcgccagcgggcggccgcgagtcgctcgtcagtcttctgttgctccgcaggccctcccccatagagtgggattactcgcctgttgattatctgaaccgcttcaccaagcatgagtcgccccgtgtcaaggtgacgagtgagagtggggatccctggaccgcgtcgccgtccgaggctaggtcggacctcgttgaaggtgtcgtcgatgccgagggtgctactgcccccttccagcgtcaagacccgagcctgcaggatcagagtgtcttgtag

SEQ ID NO: 25964 - DNA, 357 bp, Zea mays
  Peptide Sequence Number=SeqID_69339
atggggagattgaaagggaaatgtgcccttgggccatttctaagtattttggtgattgagtgccaacgcaagtgcttttgtgttgatctatgcaatgtggtgtacaaagtgcaaatcatgtcaaaagtgctggaaacaagaaaaatcgaattggaaatgagatggctttgttcagccaaagtctgctcagtctgggagcaccggactgtccggtggtgcaccggacagtgtccggtgctccaggctggctcgagcgaactggctgctctcgggaattcaccggcgacgtacggctataattcaccggactgtccggtgtgcaccggactgtccggtgtgcaccggactgtccggtga

SEQ ID NO: 25965 - DNA, 459 bp, Zea mays
  Peptide Sequence Number=SeqID_69340
atgactgacacagggttgattctgggagaaccttcttcttatcttctcttcactatcttcttttcactgaccctttctttctctttgttcttcccactggaggattctatcaaagagtattaccatcacacagaggaggaaaccaaagactatgaaccatgtacaacagtcttcaacccaagaatcaccaagcattgtgatcttaggggcgagggagtggaaaatggagttgcttgcgatttggcagaggggattgtatcaggtgccacgtggcaacaggtgcgatggaggggggacggtgttgctggtgataatggcggtgggtgtgctgcaaagggggcgtgggcggcgcttattccaggcttcaagggtaagcttcatggtatcttcttaggtaagggctctagccaaagtgaagaaaaacttcactacccaatgcatgcagaggactgggcataa

SEQ ID NO: 25966 - DNA, 504 bp, Zea mays
  Peptide Sequence Number=SeqID_69341
atggcgcctgcctggctgatgtggatagtgaggtggcgggggtcggcgccatggatcttggcgccgacccctggcgtcggctgcacacgtgtcagggggatggacaattttatgagtttatatcttggaggcaatgtggaagaagatccctatgaaaatgccaagttcgttgacatgcgacacgtgcctgtactatttgttggtagaccctccttgagtgatgtgtttacaaaggctaaacaaaagctaggttaccatgaagatgatgacactacggttgacggagtgcttaacattggtcatccaccaaatgtcataagacgattcatcccaattgattctcaaatggattgggataattatgttacttgggctacgaagacccagttgcaactcatggaggttgtggtgcggtcggttgtagtagaccgtcctcctgaagactatgatcgtgctgtggatgatgtgccaactgtgcctgatgctcaatctggccccaattga

SEQ ID NO: 25967 - DNA, 321 bp, Zea mays
  Peptide Sequence Number=SeqID_69342
atggagggcaccaaggatgaagggcccggtggtcgatggggcgccggaacggggcgtcgggcgaccggcggctcattgccgcaaagaagcaatccagcagagcagatgggcggcggctcgcatgtggcgtggcggctggacttcgcgtgccaggcttccagcaaaagaaaatgtggcatgttcggtctaatgggccagatgggccaagattgttatttgcggaagttaggaacaaagtctgaagcgaatttaggtccaaatactcagcattcatcccaaaaaccttggagaccttacctgcccaacagaaaatggatgtag

SEQ ID NO: 25968 - DNA, 399 bp, Zea mays
  Peptide Sequence Number=SeqID_69343
atggtaagcttgccaagtgacattgacaaattaaaccgggcatccagaaaaagcgctgtcagactccaggagattggaccaaggatgactatgcgcctagttaaagttgaagctgggctatgttcaggagatgtcttatacccatggcctgtggaaaaggaagtggtgggaaagaaaggaacagaaactggggaagtagaagggcaagaagacgattctgaggccacagatgagtccgaggatgagatgaatttggctgaaaagctgagcgttttgcagtgcgcagcaacttttggtggccagaagctgccagaagccgaaacaaacatggccatgatgtcctacacaactacaaaggctttgtttggttacgctggtactgatagtgggttggcatga

SEQ ID NO: 25969 - DNA, 954 bp, Zea mays
  Peptide Sequence Number=SeqID_69344
atggggcgcatggcgtcgcttctactcgccgtcgccctcgcgctgttgctcccgacgtcgttctgcgccgccgagccgatcaagaccacgcccacgctctggagctttcacctaccgcttcccgacggcgttatcggcgctgagagcctcgccttcgaccgccgcggccagggcccctacgccggcgtctccgatggccgcgtcctcaagtggggcggcagcgccctcggctggaccacgttcgcccacagcgcaaactatcggaagatccctctgtgcacagcgtccgtggtgccgtcggagcagacggagagcatgtgcggccgcccccttgggctgcagttctttgccatgaccggtgatctctacatcgccgacgcgtacatggggctcatgaaggtcgggcccaacggcggcgaggcacaggccaccggcgacgtgtacttcaccgacagcagcgccatctacccgcgcaggttcaacacggagatcatgatgaacgccgacgcgacggggcggctgctcaagtacgacgcgcggacgaagcgagtcaccgtgctcaaggccgacctgccgtaccccaacggcgtggcggtcagcaacgacaggactcatgttgtggtggcgcacaccgttccgtgccaggcgttcagatactggctcaaaggccccaaggccggccagtacgagctcctcgccgacctgcctggctaccctgataacgtgaggcgcgacgccaggggcggctattgggtagcgctcaaccaggagaaagcgcgcctcgacgccacggcgcctccagcaaagcatctagttggtgtccggctcgccgtagacggtgcggcggtggaggagctgacggcggcgaaaggcgtgacactgagcgacgtcgccgagaaggacggccagctctggctcggatctatagaattggactacgtgggcttagtttag

SEQ ID NO: 25970 - DNA, 183 bp, Zea mays
  Peptide Sequence Number=SeqID_69345
atgggcacgcaaatacacatgagccctgccgcaagccgcgagattagcgtagagggagagattgccaccgcaagcaacctccacgcacatcgctgggccgtagagatctcgtctgtggcagtgggtgatgcggaggaactcggcgatggagtgaatttcacgtcggaggaccatcgccgctga

SEQ ID NO: 25971 - DNA, 2496 bp, Zea mays
  Peptide Sequence Number=SeqID_69346
atgccgaaaaaggtcgccatgcggcgaggtaagcccgcccccgaccaagggaagaggcggcgccacgggccgcggctgtccaaggtgatgcttcgggagctcgacgcgatggggcctggccctgcccgcggctccgatggtgaggaggacgggtccgacgcggttgccgaggacgtgtacgagtacgaggaaggggtgcccgaggaggaggccggcaagaacggccgctatgacaccgtcgccaagtacgagtacaacttcgacagcgacgcctccgatgcggatgaggatgtgccttcggaggaaggcgaggatatggacgaagatgacaatgacgacggtgatgatgaggagaagcagataagaatacttcaggagacgaccggaatgcccagagaagccttcgatggaaagaagaggaaacagccatcggagctgcacctgcagcatggcgatggagatggtcctgtcacaattcatgatctcttggacaatgtccaggggaaacctggttatagcaagatccgtaagaggctgcagcagcaggagaaaaaaccgatggtcgtgctagccccacttccaaaagtagagagggacaagatcgagcgcagcgtgacgtttcagaaatccaagaatgagctaacaaagtgggaaggaatcgtgaagagtaacagggaagctcctgtactatactttgaaaatgataccaacttgggtgtgaacactgttgcggcaattgctagcgaatttaaaccaaggactgagtttgagaagaagattgctgagattacgcaaagcactgaaataatagaagcacacaagaacgatggtgccaaaatcctggaacttaacaagattgatgcagaagatgtgagagaacaccaaaaccgtcttgctaagatgcgcagccttctattccgtcatgaaatgaaagcaaagcgtatgaagaagatcaagtccaggacatatcatcggatgttgaagaaggacaaattgaaggcagcatcagcagatttcgaggcagatcctgaagctgtcacagatcatgctaggaaacaagaatttaaacgggcagaggaaaggatgacattaaagcacaagaatacatcacaatgggcaaagcgcatcctcaagcgtggattgtctgttcaagatgaaggcacccgagctgccattgcagcacagctccaacaaaatactcttctgactagaaaaatgaattccatgaaggatgattctagtagtgaagaaagttcagatgatgatgacgacgagagtgactcagaagcaaaaatcttaaacagagggaaagaaaagattcttaaagctcttgaagaagacaatgagataccgaattctggagttttttcgttgcctttcatggagcgtgctatgaaaaagcgcgaggaagcaacttatgaggaagcacgacaggctcttgaagaatacgatgattccttgaagaaattagaggacaataacactgaacaaaacgaagacaaagttaaggtgtcaggtaaaagaacgtttgggcctaccaaaaatacgcacgaagagttagtgaagaggaaaaaattacaagatactgaaaacagcagtgatagcgagtatgattctgagccagcccagcctttgagcaataatgaagtaactatgaaacatgatgatacccaatttgggagtgcactactggatgatgaaccacagaatgatatatacagagtcaagagcgacaaaggaaaggaccacagcaatgccaatgacattaccaataaatccaaaataccggttccttctattgtagacccacagcctaagcaacaggatcacaattccgattcagattctgaggaagagatggttgaaggcaacttgaccatccctgacagaaaggagagctatgaacttccatcgcaagctgatctcatacgtcaggcttttgctggtgatgatgttgaagctgaatttgagaaagacaaaatggatgttttaaatgaggagaatcctgaacctgaaaagcctgctcttgttcctggctggggccagtggacagacatccaacagaaaaaaggacttccctcatggatgataaaagaacatgaagttgctaaaagaaatagagaagaagccttgaagaggaggaaagactcgaagcttaagcatgtcattatttctgaacatgtagataagaagactgaaaagtatttggtaaggaaactgcctttcccttacacttcgaaagatgtgtatgagcagagcattcgaatgcctattgggcctgatttcaacccagcgatatcagtttctgctctcaatcgacctgcgattgttaagaagcctggtgttatcattaaaccaatacaatacgaggaggttaatccccatgagaagctcgatgaaccaaaacgtgtcattcagagagcaaccccaaaccggaatgcaaagaaagcctttgccaaacaaggaaaaagcgtaacttcacaaaagagaaagtga

SEQ ID NO: 25972 - DNA, 129 bp, Zea mays
  Peptide Sequence Number=SeqID_69347
atgtacatagggctctggctcctctctgccggacaggattatcataaaacaagagtagtcaccctagttggagcaccagacaagttatccctggatttacaacataagcggcaaaggaaagaaaactaa

SEQ ID NO: 25973 - DNA, 249 bp, Zea mays
  Peptide Sequence Number=SeqID_69348
atgaacgccgtcgcgccagcgccccccctcccctgccccacgagttctgctgaagggccttacaggagcaccagagaacaacttttctctattgggcagatgttgcgcattagaaagggtcctttgaagggctacctctgtcgagtagttaggatatttcggaatgatgtgactgttaagctagactctctactaaaaattgttacagtacaagctgatcttctttcagtcccagctaatagggggtaa

SEQ ID NO: 25974 - DNA, 1185 bp, Zea mays
  Peptide Sequence Number=SeqID_69349
atggagaggaagggagggtgctgcctcgccccgaggtacgccgccaccgcggccgcgcagcaggcaggcgcggcctggcagatggggaggatcatgctcaagttccgcccgattgctcctaagccggcggccatggcgcccgcgccggcaccggctccggtgacgggaccggccgtgagtgccgggaaagggaagcgaaaggccgcgtgcggaggcggcgggaggaggggccggaagcccaagaaggcggccaaagttgcgatggtgactgcagcgcctgcggcgacggcggcggcgcaagatgtgggcgactgccggaagcactgcgacaaggagaagtcgtcttcgtcgccgtcctcgtcctcgtcggggacgtcatccgtggactcgtcgccgccaccccggccgcagcagcgccagctcgcaacgctgccgctcatgcccgagacggcggcggataaggccgttgcttgtccagcgatacctgagacgcgtctccactatcggcggataaggccgtgccgctcatgcccgaaacttcttgttgactgggcagtcaatttgggcttccatcttgttcagctccttccaatcaacgatacttcagttcatgggatgaggtgggattcttatccgtacagctccctctctgtgtttgctttgcatcccttgtacctgagggtacaagcactttcagatgcaattcctgtgttaaggtatacctttgttatgctttcaaatttattcattgaagaaattcagcaggcaaagaagcatttggataaaaaggatgtcgactacgaggcagcattgtccacaaaattgtcgattgctagaaaaatattcaatttagaaaaggaaaaggtgctaaactccagttctttccagcagttcttatctgaaaacgagcttgacaaacttatttctgaaggtactttacaccatgatgttatacgttttcattactatgttcagtaccatctatatatacaattatctgaggcagcaacatatgcaagaaagaaaaatgttatcctgaaaggtgatttacctattgatgttgataggaatagtgtcgatacttgggtatacccaaccttgtttcgcatgaataccactactggagcgcctcttgattattttgacaagaatggacaaaattggggttttcctacatataactga

SEQ ID NO: 25975 - DNA, 342 bp, Zea mays
  Peptide Sequence Number=SeqID_69350
atgggcgtgcctgacttctgcgcacttctgacgcgcattgaatgcgcctgcagcttacaggttgctcacaatatcattgcatcgaagtgtcatttggaggaacgtcgacagaacacatttacacagcagatgataggttgctcacagtatcatttgcattcaacagtcatttggagggatgtcgacagcattaaatacatcgaccaaaccaaaacgcaggaatgcgcattcggcgttcactttgactaccaacattattggcggcaaaaaaaagactccattgaaaatgcacataagtttatcaccccaaaaaagcagctggcaatcagcttgtctaagtaa

SEQ ID NO: 25976 - DNA, 972 bp, Zea mays
  Peptide Sequence Number=SeqID_69351
atgtcctcttcctcccttaagcgtcgggtcttcccgtcttgcaagcccccggatggggggcagcctggttgctcccttccgccggtggccacccaagacggtgacctccagctcctggatggggagagacagaccaggctgtggtcccgccctcagcgtcggcttctggtggtggcaatcgtcctcccgcgctgcgacggagtcgtcctccagtcatgccggggaaggcgaactgttgctgtccagctaggatgcaacattccgtcttccccctcgcattcggggcgaggacggcagcgaggatctaccggagcgcttgggggcggcccgctctttggctttgatggcttgttcgcatcccttgagtgggaccgcgaacaagagccttccggtgactgcgttcacctggggccatggctgccgctgcagaggtcgttgccccgcaggcccgaggtcgcttcggggccgacgccaaagtcgatcagtcgaggcctcgggtcgggctggcgcccttggaagccggttgaccgaggccccaggggtaaccggttgagccgcctgctcgggccggattcccggaggagcccctggaccgcggcgccgcccgaggctgggtcgggctttgctgaagacgtcgtcgatgccgagggtgctacggctcccttcggtgtgaagacccgagcctgcaggatcagatcatcttgtagcgtgtgctttctacggccgccgaggccagaagaaaacgccctcgccgcgcttgtgaagctgcgtcttttttcctcctgtttcaagcatctggactctgttggtaacagggatgatccgctttccgaagtggccaagaagcacgaaagaaatcctgctaaaaaaagatcctttttcgaggaaaaattcgacgcagagggggtctccccccttttagcccccgagggagggtcgggctttgccgaggctaggccgacccttccttga

SEQ ID NO: 25977 - DNA, 297 bp, Zea mays
  Peptide Sequence Number=SeqID_69352
atggggaagcctggcccatcactcctcatccttctcctctgccgagtgaccgtacttgtacccaccataaccggaatgggagaccacgtctcaggtcgcgtgagggataaagtctgcgggcaggttcactcaggtatccgcacgttaatccttatttcaagtttgtctcgtagaccacgcatccccatggatccatgtccaccgaccatcatcattgtattatcaaggtggatacaatcaatccctgacctcgcgcgagtgctagaaaaatcactcgacttctaccgagatccctaa

SEQ ID NO: 25978 - DNA, 192 bp, Zea mays
  Peptide Sequence Number=SeqID_69353
atgtcggacgaccttgttgttcctgtccactttgaagttggccaagaactatgctttcgcctcctggatcatccgctccttgtgctcctcgaactggagctgctcgtcagccggcaaggggcggcggaagatcgccggcggcgcctggatctcgctcccgggagggaccccgtcggggaggagagatcctag

SEQ ID NO: 25979 - DNA, 663 bp, Zea mays
  Peptide Sequence Number=SeqID_69354
atggaccacattacacactggaacacattgcaacctcaaaaactgaccccctatcccccgtcattcctacctttctttgcgactgttggctttcagatggatcgactccccccagtaccacctgctgatacactgatagctggaccctgcccgtcagcccttcatctcgcagactcagctcggccagcatctggcgcgccaggttttgtgtctctgtcacatgggtcccatcgggtcagcttcaccctcctcaacggccgccgatttctccgctgccgacccagtccgcagatcccgcgcgaccacgcccaggtagattcctccgcccgccctcagatcttccccatgggcatcctcgcgaggctatatatctatccgtcgtggcatccccttcacccatcctttggtgcctgcacctgtacctcgtgccccgtcgctggcgcagggagctttggaacccgctgcaagccgtactcacctccatatcgaatcaaccatgattcttggccgcgggagaaagccggggaactctgggtgctcgtgcactgtgggggacagatatcccccggatccactagaaggatagaagttctcacgaaaggcccaaagaccccatactttgtaaggtcatcccctcgtgggcctgggaggaacgaccagtga

SEQ ID NO: 25980 - DNA, 438 bp, Zea mays
  Peptide Sequence Number=SeqID_69355
atgaacaaaaacagaaacttgcagaatggaattgggattcagatgggtcagattcaagcgatagaaatcaaggagaccgcggaagaaaggagaaatgggcaggccaagtccgcggataagaaaaggaacgtaaatgacgaattcgtgggtatcttctgtcggaacagtgaccccacggcaaatccgccacgagcagagctccttcggaggaagaaccccgatggaaacgagatgaagaaggtcggattcagagacaacagacatatggttacctgcgaagggcaactgactgttgggatcgatggggggaatgattgcgacggacgaactcgaagctttccgcttgggcgtcatctcaacctcgctagcgagcggagcggaagcgatattgcaggaaaggagagaaagcctggatgcaaaaagctaagcaaaaactag

SEQ ID NO: 25981 - DNA, 450 bp, Zea mays
  Peptide Sequence Number=SeqID_69356
atgggcaagagcaagagaggtggcagctcttcgcatcactcgggcgacaagcgcaagcgcgagccgactcctccctcggaggacttcggcaactcggaatactcgaaagaggagttctcctccgagttcgagggctctccaggtcctacctctcccccggcgtcgtctgatgattcagacgactcccaggggatcgctgcggaggtatggacctacattcgggccatcgagcgtgccgagctcgagggctcggatgagtcggagtactcctcggacaaggagaattcctccgactcgtccgaggagggcagcggcggcgacggtggtgacggcgacgacgacggaggcgacggtgacaacggcggtggcagcggcaggggcggtgacgacagcggcaagggtggcagcggcggcggcagcagcaagggcagcaacaaggccagtggctag

SEQ ID NO: 25982 - DNA, 1076 bp, Zea mays
  Peptide Sequence Number=SeqID_69357
atgggcgccgcggcgcggtcggcattggcgtccgccggccgtgcggcgaacgaggccgtgagcttcgtggtgttcctgctgctggacgcgctggaggcgctgctgtgcgtggcgtacagggtggcggactacgtggcggagggcgcgtggcggccctgctactgcgcgcgcccgtccccggcgtcgtcgtcgggccccgcaggtgggaagatcgtcgtgtcggagcggggaggctccaaggtggtcagcatgctgtccgccaccaggctgcacctcgaggacatctccgacacgctgtacgcgcgccgccgctccgtgctcgcggtcgcgggggcggcgttttcctccccgcggcgcgcggcggcgggggtcaccgtgcactccgcccccatcgtgcagatgatgctgcggggcaaggccggcggagacggcagcaacaagtacccgtcgccgcgctggtccgactgccactgcgccaactgcaacccggcggacacgggccgcctcttcgtgcacgtcgaggcgccaccagctggcgacggcggcgtggcgacggaggaggacgtgctgttcatccacggcttcatctcgtcgtcggggttctggacccagacggtgctcccgcacgtgagccccgaggcgcggtcccggcggcggctgttcgccgtggacctcctggggttcggccgcagccccaagccggcggactcgctgtacacgctgcgggagcacgtggagatgatcgagcggtccgtgatcgagcgccacggggtcaagtccttccacatcgtggcgcactcgctgggctccatcctcgcgctcgcgctcgccgtcaggtaccccgccgcggtcaagtccctcacgctcgtcgcgccgccgtacttcccggtgccgcgcggggaggtcggcacgcagtacgtgctgcggacggtggcgccgcggcgggtgtggccggccatcgcgttcggcgcctccgtggcctgctggtacgagcacctcagccgcaccgtcagcatcgtgctctgcaagcaccaccgcctctgggagctcgccttccgcgtcttcaccctctacag

SEQ ID NO: 25983 - DNA, 5448 bp, Zea mays
  Peptide Sequence Number=SeqID_69358
atggatgataccttagctaccataaggatgaaattgaagaagcggaagaaaggcaaggatagtaatgattttgatgcagtggctgaatgtggacccgaggttccggcattggttcaacaggaaggtgaacgggctgttgttgatataggtgatggtgttgctgatgagaagagcaatttgaatgtcgtgaaactggagggtagtgatgtttctgggaattgtgcacagggtttggatgatttggggttgaaagactccttggcagtgctgtttacaagacctggtcggaagtcacggcaggtctcagaggaggcagaaggcatggaagtttcttgtccgcatgatgaggatggtcttaacaagggatctggtttggctccagacacagcttccaagggcattaaaaggagaaggcgacgcacaaaggaagagatgaagaatgcttctgtgcaggatcagaaagcctcattgcctcggaaagcaaagacaaatggtagcaagtctactaaactctataaggtcggtgctggtcctgggcaagctttgggaggattgtcttctgtttctcctcaactggaaaagtctgggaaagagaatgctgtagatgatggatcattttaccaatcattaggtgaagtgcttctacaagatgtggaagccagcaaagtactgaaggatggatcaattacctctttcaatggggtcactgatcactttgaaatctcagcttgggcaagcaatcaccctgggctggaatctcgttcaggaaatcttgatgaaaaaacacctcgcacagcagaacatacgaccaatcttggtgtttctgatgcacacacacgttcccaaacgctagggaaggaaagcagtgatgatgttgattgttctcaaggcaagtcaccaacatcaaccataaaaaggaaaattggtctaaaaccaaaacaggttcctgggaaatctgttcgacgaaaagaggaagtattatctgttgacgctgataataaaccaactgatacaacagaaattattgaagcaagtactactccggttattgaggaaaatttggatcagctgcctgttatggcccccaaggattcttgttcttcacatgacattgttggaaatagtcctatgtgtctaggtgcagacatggcagcacctgtgaaatatgtggatatagttgatgttgcaacaccattggattatgaagacaaggagaacacatcaaaggtgaaacgtgttacacgaggttccaaaaaacgcaaacatggtgacatggcatatgagggtgatgttgactgggaaactctaatgcaagagcaggggctgttctcaaacccctcagcaggttttccagatcagtcaataaaaacaaaaaataaaattaaaacttcagaagtttatgagggtggaggtgatactggtgttgctgcagtacgtgctggcctaaaggcaaagactattacaccgattgagaagataaagttcaaggaggttttgaagcgaaagggtggccttcaggagtacctagagtgcagaaatatgatactaagtcgctggagcaaggatgtcaagcatttattggatcttgcagactgtggtgtttcagacgttccgttgaaagatgagttgccacatcaagcacttactcgtgctgtgtttttattcttagaccaatatggctacataaatgctggaattgcatcagataaggtggcgaaggggcacaatgacactccatatgaggttattgaagtaccaaagctaaatgaatcacatcaaatggaatcagtcaacattcaaaatagcgttgtatctgtatcacaaaagaatgaggattttgagcatggaacgagcactgaatgctgcagaactttgctgcctcacttgatgtctgaagaacatccaatggaaaaaaatattctagacgtgtcaactgaagttaggaatgcatcactgccatccagcaatttggatatccaatttacatcatatatgaatagttctgttggaaaagttgaggcccctcatcaacaagaagcacttgaaattgaaaatagtggaaacaactgtcaaagtgacagggctgagtttgctgtgcatggcaaaagaataatcattgtcggagcgggccctgctggtttaactgctgctcgccatttgcaacggcaaggttttttggtcactgttcttgaggcacgagaaaggattggtggccgtgtttatacggatcgcacatcactttcagttcctgtagatttgggtgctagcattattacaggggtggaggctgatatagctactgaaagacgggctgatccatcctctttgatctgttatcagcttggtcttgaacttactacgttgaatagtgcttgccctctgtatgatgtagtaactggtgacaaggttcctgattctctggatgaagatttagaagctgaatacaatggccttcttgatgagatggcactgctttttgcgcataatggtgacagtgcaatcggtttatccctggaggatggactggagtatgctcttaggaagcatcgcgcaactcaacctatggattctgtggaccaggatggccacttgagatttatgacaaattctagagctgtagacatttccgtaagtgcttcaataggaaaggagatagatcattgtggaaagaatgataagatagatgtcctcagccctctcgagagaagggttatgaactggcactttgcacatttagagtatggttgtgctgcaacgctgaaatctgtatcccttccatactggaaccaggacgatgtatacggaggattcggaggtgctcattgcatgatcaaaggtggctatgacactgttctacggagccttgctaaaggacttgatattaggttaaatcatgttgtcactgaagtactgtatggatctgaggagttaggtgatagctgtaaggatgggaaatatgtcaaggtttccacttcaactggaagtgaatttactggagatgctgtgttgataactatccctcttggttgcttgaaagcagataccatcaatttttcaccttcgttgccagactggaaagtatcttctataaaccggcttggatttggtgttctaaacaagatagtattggagttccctgaggtattttgggatgataatgtggattactttggtgcaactgcagaagaaacagatttaagaggacaatgctttatgttttggaatctcagaaagacagctggggctccagttctgatagctctacttgttgggaaggctgctatagatggacaaagcatcagttctggtgatcatgttaacaatgctatggtggttctccgaaagctttttaagaatgcttctgtaccagatccagttgcatctgttgtgacaaattggggacttgatccctttagtagaggtgcttactcttatgttgcagttggagcatcagggcgagattatgatattcttggaaggccagttgacaattgcttattctttgcgggtgaagcaacatgcaaagagcatccagatactgttggtggtgccattttgagtggtttgcgagaagctgttcgcatcgttgacttactgaacactggcagtgactatattgccgaggtagaaacgctacagacataccaaatgcagacagacagtgaaagaaatgaagtcaaggacatgtcaaatagacttgaagcatgtgaactttcgactgctctaagtaagaactcatctgatgcaatgtatccaattgttagcaaggaatctttgctgcaagaaatgttcttcagtgcaaagacaacatcagggcgcctacatttggctaaggagttattgaagcttcctacagatgttcttaaatcatttgctgggtgtaaagaaggactaagtacgctaaacttttggatacttgattcacttgggaaaaatgctactcaactactgcggcactgtgtgcgtttgcttgtgcttgtttccactgatctggtagctgtacgtttatcaggaattgggaagactgtaaaggaaaaggtttgtgtgcacacaagccgagatattcgtgctatagctcggcagttggtcagtgtgtggattgaagtttttcgtagagaaaaggatagcaacggcggactcaaattgctgcgtcgaatgccatcaattgaatcgagtaagaccaagagtaaggatctgcaatcaggaaagcctaccttacgtgtgccaaatggaactttggacaacaataaagtagtgtcccagcgccagcgtacaagattcgcaagtagtcaatcaccaccaaagataaacaagaagtatgataacaaggaaatgaaattggaaactgtgacagctgctatgtctgatggcaagttgctttcccaaaagcaacaacatggtattgaatctaaggtggaggaatgtggcattcctatgtctgaggaagaagctgctgcattcgctgctgctgaggctgctcgagctgctgctatagcagctgcacagagttggccttttatattatcacaatttcattacctgccactgcggatatggaaattttatgctagtttagtcgttattaagaaggtagtcctagttgagttggttgaggggtgggtattttttgctagtcttgtcgcatactacatggcatatgcatctgtagaggcagagataagtgtgcctcgtgagcttccaaagataccgtcgttccaatcttttgtgatgcgtgatcaccatttggacgaatctgatgcaagaaaaagaacattgaaggatgattttgggagacttgagtgcatatcagaaaatgattccaagaatggcgaagttaaggatttgcctgaaaacaccaagtacgctgatggtgatagcttgaaaatgtctcatgataattttactcagcagagccactcaaatgagacagcttgcctagcaaacgctcaggatcattcaacagatactgttgttgtagacggtcggtttacaagggcatgggtggatactgatacaatctgcattgatggtgtcaaggatcctctagccattgagaggtggcaggcacaggcgatggaggctgataaagaattctacagtcggatacgcatacctgatgaagatgattcaagtagtcagaagcacacatgccgtagttctgcttcacagggtgccgatagcaaacctgcatctgagcggcaatcaagaggtgtggagcatataaaacagggtctcgtgaactttatagcctcgctgctgatgccattatatagaggaaaaaagatcgaccgagaggggtacaaaacaatcatgcgcaaatctgttaacaagatcattgatacatgctcagaaggagagaaatcaatgactactcttgagtttcttgatgataaaaggaaaattaaggcgtgctttgcacaattcttaaacggcaggttcctagcctag

SEQ ID NO: 25984 - DNA, 442 bp, Zea mays
  Peptide Sequence Number=SeqID_69359
ggtacggacgtacctgatggacggcttcttctgccacacgcacatcgcgtcgtggcacaccctccacaacatcatctgcggcagcgcgggcaagatcgacgggtggctcgaggtggtcagggaccagctcgcctgcgacgtcaccgtctaccacggcagcgacgacgagctcctccccgtgcagtgcagccacgcggtcaaggccaaggtcccgcgcgcccaggtcagggtcatcgacggcaaggaccacgtcaccatcgtcgtcggacgccagaaggacctggccagggagctggaggagatatgggacaggagacgtgagctcaagcctgctcattcaatacaagcactcgccattttaggtgttccatcaatcctccccgtgcccaccccaccactcaggcaagtgccggaccaaagccctgggcaggcggccgtctag

SEQ ID NO: 25985 - DNA, 399 bp, Zea mays
  Peptide Sequence Number=SeqID_69360
atgaatgcgcttgttgggagtttggtcagccaagatttcgtgggagagatagaagtgaatgagagagagagtgtgagggggtatataaaggatcccccaaaagctggcagccattgggagaaaaggagtaaaaactggttgaatcgattttcagactggttgaaccggtttctaccagggagatcctggttcacagacctactcagccggaaactcgaccggtttcaaaaccggttgagtagaggaaaaatccggttgaaccggttttccaaaaagatctgcagtgacttttctgacagctctgactgtcagacagatgatgccatatggatgctgaatgatggatgcaataaagctattggagctgcatggtactatgatatatggttgaaattttga

SEQ ID NO: 25986 - DNA, 423 bp, Zea mays
  Peptide Sequence Number=SeqID_69361
atgggcaagaacaacaagcgcaagcgtgagccgactcctccatcggaggagtttggtgactcggaatactcggaggaggagttctcctccgagtccgaggggtctccggctcccgtctctcccccggtgtcgtccgatgactcggacgactcccaggggatagccgcggaggtctggacgtacatccgggccatcgagcgcgccgggctcgaaggctcggatgagtcggagtgctcctcggatgaggaggactcggacgacggcgacgagggtgaagacgacgacgacgacgacgacgacgacggtggcggcagtggcagtggcaggggcggcggcgacggcagcagggacaacaccaagggcggcagcagcaggggcagcaccaagggcggcggcggcggcaggggcagggccagtggctag

SEQ ID NO: 25987 - DNA, 468 bp, Zea mays
  Peptide Sequence Number=SeqID_69362
atgcggaatcgtcagcaacagtgccgatggatgtcgagttggcggcaccaccgcctcctccacccattgcagcagcagttcgtcgttgttccccaaccccgcgcggagacggtggtcgttggaaccatctatgcccgtcgcggacaaccccctcgcgccatcaacgcttcgcgcaagcgcatcatcttcaccggccacctccccggtaggttgacctcaactccctcctacggtgaagagagcctaatggccctcagaccgtcctatggtggttgctgccatgttggccagtgggggaagaggggagacgatgtcggggatcctcgacgggcatgggcgcgtcttggccccgatgtgctggcaatcgacatggcccgacgtcgatggcctcgacacgcgtgcaaatcggcgcgacgctcctccctagggatggcaacgggcacattttacccgcgtgcccgcgggtaa

SEQ ID NO: 25988 - DNA, 639 bp, Zea mays
  Peptide Sequence Number=SeqID_69363
atgccgaaagatggcctcgccggcgccggcgcggtgtgggaaaaacgttgggccacatcggacggccggcggcgctgcacggtctggtgctccgcccgcgaccgcgaccgcgccgcacggaccaacgcaaagcggaagcctctcataccagacccgccgtgctctagaagtccacaactcctgtgctctacgggcttcggcttctcagcgaatgcgaggcgtctggctccgcgctgtccgcggccgcgaggcgtcgctggttgcgttcgcgcgtggcggcggaagggacagcgccgcctgcgccgcaccgactgctgtgccactcgacagagtgaggctgacaggcagtcaggcccagcctcaggcaccataggaagctccgcttcgcccgacctagggctcggacttgggctcagccccagaagacggcgaactccgctccgccctacccagggctcggacttgggctcagccccggaagacgacgaactccgctccacccgacccagggctcggactcgggctaagccccggaagacggcgaactccgctccgcccgacccagggctcggactcgggctaagccccggaagacggcgaactccgctccgcccgacccagggctcggactcgggctaa

SEQ ID NO: 25989 - DNA, 885 bp, Zea mays
  Peptide Sequence Number=SeqID_69364
atggagcgtgggacttttaattgcgttgctgaagttcttattgagaggttattaaggtttaccaatttgttggtaggaggaggtgttccagagcacagaagggcccttgagctaagccaacttttaggagtcaatatttctccaacacaggttgtgcatggacattctccttacagagagctggtgaagcgttttgaagatgaccttattgttgctgttggaaaaggagagcctgcagtagtgatgtccgcgtacggatttagaaaagttctgtccatagatgaatatgcatcatattataaagatattgacccccttgctcctttcaagacttggaaagttgggcaaacagacagtcacatgtctgcaaaagtgcacccatcatatgatgtttattcagagcgagttaaaggagtatttgttgtcagcgatcctgtcgattggggaagagatctacaggtactctgtgacatcttgtctactcatggacttcctgggactgaaaaaggtgatcaacctcctttgtattttgcagctgatgatcttgaataccaggcagcatttccttctgagcggcttgggatgggcgccttcaggatagctttggaaagcatcttcaatgaaataaatgatcatccactgaagtatacatcttatgggaaacctaatccatttgtgttcaagaatgcagcaaacatacttgaaaaacttgttatgagtatgtatcctaattcacagacaccaatggaaggaaaagattatcagttttcaactatttacatggttggagataatcctaaagtggatatcaatggagctatgaaggttgttgatactgttgaagatgccatcaactatattctggagaaggaacgtatacagtga

SEQ ID NO: 25990 - DNA, 2040 bp, Zea mays
  Peptide Sequence Number=SeqID_69365
tcccactcactcaaacctctccgtcctcctcctcctccgggccgggctgcaacctgcgacgctggcgccggtcggcacgaggtgttccacgagtcgctgcgccccccaccggccaccacggcgcgtgccgggagcagcgcagcggcggcggccataatgggcgccgccgccgcggccttcgactccgagtgcaagagggacgcttatggattcacggtgcggccgcagcatctgcagcgtttccgcgagtacgccaagatttacaaggaagaggaggaggagagggcgcacagatggagggacttcttggacaggttggctgagtcagcgaatgtgcccaccacacccagtgtttctccatatgcagctaccgacgatggtgcctcaggtgcaggacaaacacaagggaataacggcatcggaatacattgtgatgatgaagaagtgggatctgagaacgcagaagataacaacaaatttgaaagcccgaaggaagctgatgcaagtggcgaatcaagggaaccaaatggtaagccaggagatctgaaagatgtaactaagttggacaaagtgcaagaggagactggtagcagctctacgcaagcaatcaaagacttagagggcttgatggaagcaagcggggactttgaagaactaagagatttgaatggaatcccagaagaattggaagaagagaataatggcaacttggaaaagctggtagaactcttcttggataaggggttgttggatgaactgaagcccataaaagttgagtcccagtggcgggtgcgtgcagcgcttagcatcattgacaaaatgatgagctctcgggtagtgaagggtggtaatggtgcaaacgatattcatcgaaaggatggaccacagcttacttctattgaagaggaaggaatgactgcagaagtgagtcacgacggatatccagctgaggttgaggagtcttgtgttgcagagaaggtggaacttggacaggagacaactgatgattctacaggtactgctttggatagagacaatgatgggtcgtattttctttggagggaggagcttgagagcttggttcgtggaggtgttagtgctcggaggattactgggtactacaacaatttgcttgatgacaggactgcgatattggatgaaaaggatcccgtggacccagtggtcaatgaacagagaagtgcaccgagaaaagctacacagcctgagaagtggaaaggacagatagaaaaggatttgccacgaacatttccaggacaccctgcattagatgaggatgggaggaatgctttgaggcggttattaaccgcatatgcaaggcataatccatcagttgggtattgccaggccatgaacttttttgctgggttatttttgttattcatgcctgaagaaaatgcattttgggctttagtaggggttattgatgattattttgatggatactacactgaagaaatgattgaatcacaggttgaccaactcgtccttgaggaggttgtacgagaaaggttccctaaattggggcctgcacttgtgaccacaaaagatgccggagatgcaattacactactgcaatctcttgctgggtctacttttgacagcagccagcttgtattgacagcttgtatgggctttcaatcagttggagaaatgggattgcaagagttaaggaaaaaacacaggccagaaattttaactgcaatggaagaaagatcgaaagaccgtggctcctggaaagataagaaggggttagcaaccaaactttacagctttaaacatgatccttcattcgtgtgctcaccagttaagtccaaggaggggctagatggttcaaaggtgaatggagagactgggccagcaaatcttaagacctaccttagtactagttctatactggatactgatttggatcagggtgttgatcttcaagatcaggtgtcatggctaaagattgaactatgcaagctgctcgaggagaaaagatcagctgatctcaggtttgggctatatttttcttga

SEQ ID NO: 25991 - DNA, 258 bp, Zea mays
  Peptide Sequence Number=SeqID_69366
atgggcaagaacaacaagcgcaagcgtgagccgactcctccatcggaggagtttggtgactcggaatactcggaggaggagttctcctccgagcccgaggggtctccggctcccgtctctcccccggcgtcgtccgacctcgcactgccatcaaaactcaagcactggtcgatttcgtatcagagtggacagaacagcaagtgccggataatccagaaaccgcagaagtatggcgaatgtatttcgatggctcgctga

SEQ ID NO: 25992 - DNA, 897 bp, Zea mays
  Peptide Sequence Number=SeqID_69367
atggctgaaaggtaccaactcccacggagttgcgttcctccaacgacaaggcggaaggactgcgggcatcccccatccgggggctcggaaggtggaaagacacgatgcataagggagcgcgaagacatggtcgcctttcaagggggtcaccctccttttaaaggcgactctccctacttgtgtccccagccgtcatgggctgagtcttctccaacacgctccaaggtcctccccctacggcgcgggggctgggtcccacgcgtcacgcaagttggcccagggcagaagaagccaaaccgccgcgcgcggtgcaggcaaccgtccagcggttacaagcgtcccccacttttgcccagaccagcgggtgaaagggcgggcagccatgcaggcggcatgcaaccgcgccaagtgggcgcacctctccaacttccaacgcgcccagcatggaagcccacgcccacgcgtcatgcaaccgtcgcgccggtcgctacgtgcaagcaactgcaccgccactcgcgccaccaccgtgcctcctcgattgcggaatcagtaccgcgactcgaggcgacccagcacgcgacccagcagcgccagcctggcgcgacgggactgggaaagggggataccccgaaaaggatccttctccgtgaaggaaacaggctccgagcctccctactgatcagaggttcgaaggctggcccctcggaggggtttaacagccgcctcagagcgcgtgggctccacacccactactggtcagaggttcgaagtccggcccctcggaagggttcaacggccgcctcaggccactcgggctccgcgcccactactgatcaggggttcgaaggctggccctcgaagggttcacagccgcctcagacacagagcgagggatga

SEQ ID NO: 25993 - DNA, 447 bp, Zea mays
  Peptide Sequence Number=SeqID_69368
atggcagctctcagcccccttatggaagcaagaggacgtcagcaaggactcgacagccccgacagctgtccttccgccaggcttcagcgctcctccgacggccacgacaccacacgaaccgggtgccaaaacctctccggctgccacgatggcatcgagctgcagcgtggtcgggacgttgagaacccgaacatcaccggggacgacacgctcacggacgaagtgcaggtcgatcaccatgtgcttgtagacgagggtggcacgctggaggggactgtgaagctcctggagaagctggcgcagctaggaggcctctgccacgccgttggccacagcgcggtactcggcctctgcgatggagcgagagatgacgggtcgtcgcttggcggcccaggagacaaggttggcgcccaggaacacggtacaaccggaagtggaccggcgtga

SEQ ID NO: 25994 - DNA, 750 bp, Zea mays
  Peptide Sequence Number=SeqID_69369
atgggcaggggggcggtggccaagggggaagagaagcggggggggggggggggggggcggctgcacatgcgggggggggccaccgatgctgagtttcttgcagtgaaactttattttcttcgatatgcttatgatccaccaagtgacctcaaagatccgtcttccactttcagcccttgcgcaagcggtgagagccaagaaggtgctgatactactcaaaatatgaatgataccgataaaaacaacagcgaaagggaagagagtgatttagctctggagaaggagagtgctacattcacctcacagaagcagcacctggaagaattatctgacgcaaaggaaacatttattggaggtcctgaggcagaggccaaatccaacagcacaaaggattctgacaatccaattgctaaggtggggagcagtatagcatctgacaagatgagagatgggtgcaatgctaatgccattccgtgtcctgctacttcaaatcatacaactgaacccagctccgtagcttcccaggaagccagtccagcaagtacaaaagacacagctatccctgaacaagttgaaaggccaagttctgaggaattactagctgatgtttcacttccacaagggaaggtagagccgaagaagactgaacctgcacctgctgcctcgtctaatatccaacagcatgggtgcaaacaagctggaaatggcaacactggtacttcattcaaccttatacattatttttcttga

SEQ ID NO: 25995 - DNA, 357 bp, Zea mays
  Peptide Sequence Number=SeqID_69370
atgggagccagaacatctggagcagctggtggaggaccttatggggagttggatctctttggagcccctccttccatgaacctcatgccatcaagaactcgtgctcaagatgggacaagaacttcccgcggtggggaggaaactctaaacctgccgcctatacctcccacgttagctaaggctatcgctgccttagttaatgcccctgctgataacacatgtttcctgcttgaaatggctgggaatcagtttcatcagcaaggaggcaaaggtcatggagcaaaaattcggattgattcggtgtaccgagacccagaagcccatgttcgctgcccatcaattgagaggtcctgctag

SEQ ID NO: 25996 - DNA, 129 bp, Zea mays
  Peptide Sequence Number=SeqID_69371
atggccgagccccctggtgcaggcgcccctttcccatcagatccatggcgcgatgttcctcttccccatccatggcgcctaggacaagccgcgagctctctgctcccatctctgttccccagcgcctag

SEQ ID NO: 25997 - DNA, 705 bp, Zea mays
  Peptide Sequence Number=SeqID_69372
atgactctggtgacaatgatgaagacgacgaagaagaagaagatgatgaggaaaacatcaacgagaaagccaatgaagaacagcaggaccactatgtggggttatggcttgtcactgaacattacacctcgatattcgagacagggcacttccctaacctgctgtaggatgttctgcatgcattgggaacctacatctgacccttgtatgagacaagttgattgtaggagcctcctcgggcttgctactacatcactcgatagagggtttaggactctgtcagctcatgagtctctgacgccgctatccacctacgttgctttggtcagcgatgctgctaggagaactctgtggtcccttagccacacctatcggcagcagctgcacaacatgaagtacatgcatcttcctctacgtatttgtggagaaagccagaccagcattgttccaggtggagctagagaagatcgcctcaacaccctagctggtgtggtggtaggtcttaacaccgacctggatagtgctacccaagacctctctagagtacacttggagctggaggatgcacatgcaatgatcgtagccctggaatctcagcttgatggaaggaatccccctgaagttcaagtccctgccatggcgttatcctctccccgcaagaggatccactatggagaaccaagatccatcaccaggctgctttag

SEQ ID NO: 25998 - DNA, 426 bp, Zea mays
  Peptide Sequence Number=SeqID_69373
atggggctaaccaccaacccgagcgaccgagagaagggggacaaaaattgcgccaccgccgtcattcgtgatatgagagcatcgatggggcctcggcagatgtttccaaggatcacggggatacaaggaggctatcccttccaccaattcgggaaacggatgattgaggctctggtgatttctcgccgtggcaccaacatcgtcatggaatcgccctcactgtggtctggcaaacgtgctgcaaggttcacgctggttggtgtgggattgggacatcagtgcgtgcagatcggccaactgcggcgggtcgcgccgccacgtgggaatgccgcgccgctggcctgcgcgctggaggtgggagaggacccgattgacgttgatttcaactgtgtggctgagatcagactgttgcataccgattcgtag

SEQ ID NO: 25999 - DNA, 180 bp, Zea mays
  Peptide Sequence Number=SeqID_69374
atgggtttgaaaaccctgagacggagtgaagtcaaaggaaaagactctcaaggatatgctggcctttgggaattaagcctttctggtattggtccgaccaaggcaaagcttacccgtgacgaagcatgtggccaattaaaaggtcctcgatcatcaagccctcatcggttcggtccttaa

SEQ ID NO: 26000 - DNA, 504 bp, Zea mays
  Peptide Sequence Number=SeqID_69375
atgcccccctgcggtttccatggcgcccagcagatgcagccatggccgagccccctggtgcaggcgcccctttcccatcagatccatggcgcgatgttcctcttccccatccatggcgtgtcctccccttctctccatggccggcgccccaagctccagccgctccttctccttagcgcacctcgccagcagaaaatccccaagtgcaggcgcccaggacaagccgcgagctctctgctcccatctctgttccccagcgcccaggcgagcagtgtgccgtcgacctcgcgcagcagccacgacggcagttcgcgcagccacatggattccctccgcgtcgcgccctcggcgtgctcgacgtatcgcagcaacagcgacgccctccgctgcgccgcacgtgacagatcgggccacccaacgtcaatctgcacagtccccgtcgcgatgccgtctatccgtggtgagctccttgctgtcccgcgcttctcttgctcgatgaaatga

SEQ ID NO: 26001 - DNA, 729 bp, Zea mays
  Peptide Sequence Number=SeqID_69376
atgccccctgcaccaccacaaggcatctcggctgctagaggagaccctgacggagacgacgatgacgccggtggcagttcgagccatgacacggagctctcggaggagccaaagctggagccggagggatggatcgctagacccatcactcgtgacaccactcgtgggtgtcacttccacgacgctttcgacaccttgctgtgtcgggccttcgaccgacacacttggtctatcgagtaccattgtgtagtctaccagcatcgtcgcgggttatacccagaccagtgggaggctacttgtttggtgtgctgttcgaatgatgatctccggggtgcagaggccttctcagagcactattctattactgagagggatactgccgaggcagccatgcaagatgcagcacgacagacactttctcagtattgctcgttgttcagcagggtagctgatggcttcgacctgaagtactaccctcgtcgtttgacctgtagtgctggaggtgtgattgtctcgctagttggtgagggcaatcccaggttgaacagcatggtcatcttggccgatgtggtcaacacagagctagaccacgcccttgacgagttgggcaagatgtctaagaacaggggcagaagtgcaaggcgtgctcagctagaaaagcaggcacccgaggaagatgcagcccaacagcagcagttgccaccaccacccccgatgacagttgagtag

SEQ ID NO: 26002 - DNA, 408 bp, Zea mays
  Peptide Sequence Number=SeqID_69377
atggcacacactaagactacccagcgcaagtcaactagacctcatggtgtgcctcgacatcagctggtctctaggcatgaagccagcagcagtggaagcaacgaccctattggggagttggaggactatgaagccaaagctctagctcatgtagcagaacttagcgcatccctcgagaatctgcaagtgtactgcaacaccttgcatgaagaaatgcatgtattgtatgatcggctgcgaccaaatgtgccacctgatgtggcagcaatgggagctggaccatctggaacaacaaatggaggatctgataggggaattgacctttttggagcccctccttccatgaatctggcagatgaacggtctcctgaagcaggcagcggaacaactaaggatgaagaagaatag

SEQ ID NO: 26003 - DNA, 276 bp, Zea mays
  Peptide Sequence Number=SeqID_69378
atgaagggtccctgcaccccaacatgttgtacccttctctatgcttctttcttctgcctcttgttatctagtttagaagttgaatcgcctgtgatcgagagcactagcttcataaccgaaggttggttgctttgtagagccatcgtcacagttgtggaagtgacttcaccggaggtgggcgccaatgttggtcacttgttctcaaatgctacagatcaagaacaaggtgtttttgccttgaggaccttcggtgaagaagaagacccccaacactag

SEQ ID NO: 26004 - DNA, 558 bp, Zea mays
  Peptide Sequence Number=SeqID_69379
atggcggcgcaaggggcaggaagggcggtttcctcttctctggctaagtctctcgagttgcgaaaacctaagagggaggcaagaagcggagcaaagaaccgtcgccagaccctctcccgggtatataaagaccaaggcgagaccggttccaacgtaccgcccggaccggacgcgggattcaaaaacgcgaagcgaaacagccgtccctcgaacggctcgcgcacacgcaacggccgccccgccaaccactcgccccgtctcattaactccgcggcgggacaggcggcgcttctggtaggagaagcagggcgacacttcgccttcgccgtaataaccgcgccaaaaaagggaccgggaaagggggataccccgaaaaggatccttccccgtgaaggaaccaggctccgagcctccctactgatcagaggttcgaaggctggccccccgaagggttcgacggccgcctcagatcgcgtgggccctacacccactactggtcagaggttcgaaggccggccccccgaagggttccacggccgccttccacggccgccttag

SEQ ID NO: 26005 - DNA, 348 bp, Zea mays
  Peptide Sequence Number=SeqID_69380
atggaagaagggagtgctgacgaggtggccccgcgcgacagtggcccagagagcgtgcggtctggaggttatcctccacaaattacaagttgggtattacacgaaataatgaagaaaagtgaaaaagatattcatgacgctcgagaagcagcgaaaaaagctgaggaagctgcagaacgcgagagacagatagctgaactacctcctccaccggagccatttgaccccctggccgacccagaaaccaagaaagcaatagagatcatcaatatggccgaatctattgttgacaaagttgttaacaagttattaaatgaagttgcggagaaggtcttgaaagaggactaa

SEQ ID NO: 26006 - DNA, 390 bp, Zea mays
  Peptide Sequence Number=SeqID_69381
atgatggaaaatttcggcagcaaaacagtgcaaatagcaatgaatgctgtggtaacttcacaactacttgtcagtttatatagtgctgcagtggaccgcaaggatcaaacagtaactctgcaaggtgggaccgacacgcgctcggaaatcggatcgtttctccgcaacgagctcagggaaggtgttttttggaccttcggcttcccgaagctgaagaggcttttttcacgggtcaagctcgttacgaagaacgatctagcaccgcgaaaggggctactgttggggtcgtgcttcggtgcgccgaaggtctcacacgaagaagcagcttcggctgaagtcgtctccaagagatggccggaggtccctttttatggagcttcggcgttttaa

SEQ ID NO: 26007 - DNA, 396 bp, Zea mays
  Peptide Sequence Number=SeqID_69382
atgtgccctgatggtagcgtcaagattcctaggaggaaggggtcgggctttttgggttctgaccctcccctcatcgctgtcaaggacgaagttaaggttcccgaagcgaatcgctgccttaaggatccgatcagcgtcgtggctggccatctagagactagaaagtttatcgagaacgcgcaagccccctacatagcgtgccaactgtcgatgtttcgatcctccgcgccgataaatggtgtgctcggtgggcgcaagatttatactggttcgggcagaacgtccctacatccggtctttggtggctcatgctaccagcacctctgttgcccgatgctcgtagtaggggttataagtgggcgagaaagggaagaaagtcttccaagtctcttatga

SEQ ID NO: 26008 - DNA, 369 bp, Zea mays
  Peptide Sequence Number=SeqID_69383
atggcgcttcccgttgacgtggctggcctgcgccctaggctgggcgatgtggaggctcctccgaagccgaggtcgagtctgtcttccatggccgaggccgagtccgagcccctgggtcgggcgaggcggaggtcgtcggcagaggccagggcggagtccgagccctggggtcgggcggagcgaagttcgtcgtcttctggggctgagccccgagttcgagccctgggtcgggcggagcagagttcgccgtctttcggcccgagtccgagccctgggtcgggcggagcggagttcgccgtcttccgggacttagcccgagtccgagccctgggtcgggccgagcggagttcgctgtcttccgggacttag

SEQ ID NO: 26009 - DNA, 405 bp, Zea mays
  Peptide Sequence Number=SeqID_69384
atgccggggaaggcgaactgttgctgcccggctaggatgcaacattccgccctcttccttgcattcacggtgaggacggcagcgaggatctgccggtgcgctttggagcgacccgcgtttgctgactcgcctgttgattatctgaaccgcttcaccaagcatgagtcgccccatgtcaaggtgacgagtgagccgaggcctcgggtcgggctggcgcccttggaagatggttggccgaggccccaggggcgtgatgatgacgtcatcctccagagcggagatcctcagaccgcgtcgccgtccgaggctaggtcggatctcgccgaaggtgtcgtcgatgccgagggtgctgctgcccccttccagcgccaagacccgagcctgcaggatcagagtgtcttgtag

SEQ ID NO: 26010 - DNA, 909 bp, Zea mays
  Peptide Sequence Number=SeqID_69385
atggtgacctccagcttgatggtgggggaaagcaagccgggctgcggcctctgcccctccctcagcctcaaggattttcatcaccagggctggggaggagaggaagggcggccgtcgtccgtggcgccggcagctgcaccgtgcctggctctcggacgcgagtggcttcggagccgctcgcagcgccggcgtctgccacggcagctggaagaggttcttccgccggcgctgatagccaaggccggccacgggctgacctccaactctacggccttctgcccgtccttgcctcacgagtttgggcatgggcgggggcctcctagcagcagcatccgccctgaggtcagtgctgccgctgttcggccccccggagcagaagttgtcgtcgccgccgctgctggagcgggtgacggcgcgccgttcgtcagtcttccgttgctccacaggcccacccctatcgagtggggctactcgtctgttgattatctgaaccgcttcaccaagcatgagtcgccccgtgtcaaggtgacgagtgaggagtccctcggctcggtcggccttgctgtccgaggctcctctagcatagttaaagggacccctcggctgctcttcgacgagccgaggccaggggtagcgatatcagtgtcgggctggcgcccttgggagatggtcggccgaggccccaggggtaaccggccgagccgcctgctcgggccggattcccggagaagtccctggcagcgattgcccgggcgtggtgatgacgtcgtccttcggagcggagatcctcggaccgcgtcgtcgtccgaggctaggtcgggcctcgccgaaggtgtcgtcgatgccgagggtgttgctgcccccttccagcgtcaagacccgagcctgcagggtcagagtgtcttgtag

SEQ ID NO: 26011 - DNA, 393 bp, Zea mays
  Peptide Sequence Number=SeqID_69386
atgaacaattttaattcaagtttcatggttaaacaaaggtcaaaaattaaagcgggcatcaatagcgaagcaaccgggaaggagctcaccgtggatgacgtgcacaggagcatcgtccatgacacagggcggcccgcggcggcgttatgtcgacgacgagcaattgcgccaaatccgaagcttccccatggatgccgatgctttgtatatcttctactcaacctagtgattccccagagccacaaatccagccccgaagacgcccctttcaacgagattatgcgcggcgcggtcaggggatcctccttgagcgagttcccagctcgtggtgctttccgtgatgaagatgacgaggggaaaggggcagggcgcttcaggatttatatctgctag

SEQ ID NO: 26012 - DNA, 555 bp, Zea mays
  Peptide Sequence Number=SeqID_69387
atgccggctaagatccaccgcggctccgagcggaacttcatccccctcccccaagacaccaccacctcggcacgagcagtccagcgcgacaggagggcccagcgcgcccgcctggcagaggcgctgaggctgaagatggatcaggtgctggttccgctcgtcgaatattccaataatttgctctattcgaaatactcaagaagagaaatccaaggatgcttagaattctttggttttctggtcatagtaggtcctgtaggtgcttttaaacagggggagcaagatgatgatgagttccaggatctgcatgaaagttatagaaaaggagctacaaaacagaatttgttatgttcaagttcaacttggttcatccttgtggctacctcacaaatcgatgatggtacacttttaatcttgtttgttggcacttacgtattcataaagagttggagaaataaaaacaagaatattgccttagtgacagtacttggtattgtcccaaatcagaaagttgagcccggtcaaaagcagaaaagaaatgatcccagaagttga

SEQ ID NO: 26013 - DNA, 741 bp, Zea mays
  Peptide Sequence Number=SeqID_69388
atgcactcggcaaagagggagcctttgccgagtgtctgtgagtacactcgcttctgggcggcttctggccgccagaagctgaagctgaaaccaaacgcccagcttctcgcgcggcttctgggcgaagcgcttggcactgacaccgccgccctgcctccgtcgcgaaggttccgccgcgaagcgaacggagcgccgtcggtccgcaccgaacgcatcgccgccggtgtacgcagactttcgtatcaagtcgaggtcaaggtgttcggatccaagttcaactgggattctagggtttattccatagattgccaatctgagtatctttatgattgtagttgcaaccctatttttgtagagtatctcaatggatcagactccatagccgacaaggcaattggaaggatgcaagagattgcggacaagatattttccgtagctcgtcaaacaatccgtccaggacacgggttgtcctcatttgaggctaccaaattacgtgtagcattggaggacattgcttgcatgcttgagcaagactctctggtgttgcaagagaatttggacaacgtgaacaacgtaaacaaccctgctgacagcagctatgaaccgtcagctttgtcctcaccacccccagctgacgagttccttagtccggattgggactttgctgaccactttgcaaacttctggggtcttgaatatgactcagaccatatgccatcatttagtgacaatgaagtttaa

SEQ ID NO: 26014 - DNA, 342 bp, Zea mays
  Peptide Sequence Number=SeqID_69389
atggcgaacaccctcaacactgagggcgggattgggatcacagcccggacaggcggcgcttctggcaggagaagcgggcgacgcttcgccttcgccgaaataaccgcgccaaaaaagggaccgggaaagggggataccccgaaaaggatccttccccgtgaaggaaccaggctccgagcctccttactgatcagaggttcgaaggctggcaccccgaagggttcaacagccgcctcagatcgcgtgggccctacacccactactggtcagaggttcgaaggccggccccccgaagggttccacggccgcctcaggctacccgggctccgcgcccattactga

SEQ ID NO: 26015 - DNA, 354 bp, Zea mays
  Peptide Sequence Number=SeqID_69390
atgaacaaaaacaccggcattcgaagtgccattacaaacggaactccggttcccccctccgcaggcggcgcttctggcaggagcagcgggcgacgcttcgcctttgccgaaataaccgcgccaaaaaagggaccgggaaagggggataccccgaaagggatccttccccgtgaaggaaccaggctccgagcctccgtactgatcagaggttcgaaggctggccccccgaagggttcaacagccgcctcagatcgcgtgggccctacacccactactggtcagaggttcgaaggccggccccccgaagggttccacggccgcctcaggctactcgggctccgcgcccattactga

SEQ ID NO: 26016 - DNA, 599 bp, Zea mays
  Peptide Sequence Number=SeqID_69391
atgatgaccgtgtcaaaaaaggggttcgaaggttggcccctcggaagggttcgacagccggcccagagcactcgggctctgcgcccactactgatcaggggttcgaaggctggcccctcggaagggttcgacagccgccccagagcacgcagagcgagggatgactctgggagcgattttgtaacggaatcccaccagagggaggcatcgagccctcagaccctatcgaacgggtccgggtccagcaaatcacttgcaggcttcgttgtgaagcaaccttggccaaatcgcctcaccaaccgaccatatcgcaggcgcactcaatgcgaggatcgcctgacaccttatcctgacacgcgtgcctcaatcggcaaggtcgaacctcaggcgcaacaagaagctccacctcgcccgaccttaggcctcggcctcggaaggaggtctccgcctcgcccgaccccagggctcggcctcaacctcggcctcggaaggtggtctccgcctcgcccgaccctagtgctcggcctcaacctcggcctcggaaggtggtctccgcctcacccgaccccagggctcggcctcaacctcagcctcgggag

SEQ ID NO: 26017 - DNA, 801 bp, Zea mays
  Peptide Sequence Number=SeqID_69392
atggcgcttcctgttgacgtggccggcctgcgccctaggttgggcgacgtggaggctcctccgaagccgaggtcgagtctgtcttccatggccgaggccgagtccgagcccctgggtcgggcgaggcggaggtcgtcggcagaggccagggcggtgtccgagccctggggtcgggcgaagcggagttcgtcgtcttctggggctgagcccgagcccgagcccgagcccgagccctggggtcaggcgaagcggagttcgtcgtcttctggggctgagcccgagcctgagccctggggtcgggcgaagcggagttcgtcgtcttccggcggagttcgccgtcttccggggctgagcccgagtccgagccctgtgtcgggcggagcggagttcgccgtcttccgggtcttagcccgagtccaagccctaggtcgggcagagcggagttcgtcgtcttccggggctgagcccgagtccgagccctgggtctggcggagcggagttcgtcgtcttccgggtcttagcccgagtccgagccttgggtcgggcggagcggagttcgtcgtcttccggggtcttagcccgagtccgagccctgggtcgggcgaagcttcctatggcgcctttggcagggcctggcttcctgtcagtatcactctgtcaagtggcactgcagtcgaagtggcgcaggcggcgctgtccttcggtcagaccggtcagtggagcggcgaagtgacggcggtcacttcggctctgccggagggcgcgcgtcaggataaaggtgtcaggccacctttgcgttaa

SEQ ID NO: 26018 - DNA, 165 bp, Zea mays
  Peptide Sequence Number=SeqID_69393
atgacaggaccggttgaaccgcccccttacaaccctggtgacctgattgccagtctgactggtagactgcagctgaagaagctcaactcagctgaagtcaagttcagctcgaaagctcagctgcagttgaagaagttcagctgcttttcagcaagaacactctag

SEQ ID NO: 26019 - DNA, 276 bp, Zea mays
  Peptide Sequence Number=SeqID_69394
atgaatggtggaagggagatagcagacgaagctatcagacaaaatgaagaagaaactcaccgagcttcaggggaagcgaggagagttgcagaagctgcagagcgggagaggcgtatagtggaactttctcctcctctggggccgtatgaccctaaggctggtccatccttgaagggcgctcttgatgtgattaggatagccaatgaagctgttgacgaagctgtgaatagactattgaacgaagctgcacaaaaaattctgaaagaggatgaatag

SEQ ID NO: 26020 - DNA, 738 bp, Zea mays
  Peptide Sequence Number=SeqID_69395
atgaacaaaagaccggcattcaaggtgccattacaaaaggaactccggttccacctccgcaggtacgaacaaccccacacgagtggggggcctgcggagaaacagaaggccgacgaacggctcaccgtcgcccgctccagcagcagcgacaacgacccccgctacgggtggccgaactacagcagcgatggcctcagggcgaacgccgctgcaaccttgccctcgcccacgccgacgctcgaggggcaaggacaagggccgtcagcccaccggcagatccccactcggatcctcccggacgagcggagcaccgacctccgcgcggaggcgccgtaccggtgcaaaggcaggaccgccccagaacacgaacgccgccctggcagcgcgcgacgtcttgggcggtcctcccgtgcgcacggtgcgacaaccgcccttgcggcaggagggggcgccgggagccaagccggcgagcccaacgcgctgaagctgacgacgcccgccgtcgaccagccccgcgttgtcgaagatcgcccctctcgcagggccagcgagcgccctctccctcggacgctgaaggagaggctggcccacgaacccgcgcgggaggtagagctccggctcagcccggcctctgccccagcgaggatgatgaacatccttgaagctgagggcgggactaagatcgcagcccggcttgcttctccccacccgggggctggtggtcaccgtcttgggtga

SEQ ID NO: 26021 - DNA, 1767 bp, Zea mays
  Peptide Sequence Number=SeqID_69396
atgccgtcctcttcttcttccgccgacaccacaccgccggccgccgcctcgtctgaggagacgttgagtagcttgatggtggaggagttgcgcgccggcgactctgttgattttggtgtgtcacggatgacatcagcccgtgttgaagatatgcagcggttgggctactttggcggcggagttgctcgtgctccggggacggaggaagtccccgagccggaggtgatggacaaggatcgccaaggggcggcgcaaaaacgccaggcggctgtcaggctgcatgaagctaggccgaagcggcagcggggggctgcgaaggctacggcccccggcggaggcaagccgccgctggcggcgaaggcgggcgcctctgcacctagcaaggcgccggaggcaacggcgggcgccggaggctccaagtcaacgaaggtggtgccgccggccagcggagtggcggacgcttcgaaggcggcccgagcgttgccgttgtcgggcaaacgtgttgccgacttcggcaccgatattactgtggacgactatcttggtgggccggacgagggccagcttgctatagttgcgcctggcgcggcgatcgcgacggccgccatagtgccgaaggcgaggggcgaggcgcttggcactggaggcgaggtgtcggccctcgcgttggtcagggacgaggcgggcgtggcgacccgccggctgaagggagtgacggaggcgctgagtcaggcgacggaggcgctgagtcaggtggctgacttcaccagccgtactgcgtcgggggcccttacggcagctttgtctgccgaagtcgagagacttcggacgcaacatgctgacgctgtccgtgagaaatcggcctccgacagcaagtgccgtaagctggcggacagggtggccgccctggagaaggagaaggctgacctccggcgccagctggcgggggagaggagggaggccaacgaagccatcgccaaagagcaggctgcgcaggcggaggccaagctggcgcgggcggaaggcaatattgccaaggagctcgccggacatctgcaggagcggcttactgccctggagagccgcgcgaagggggccgaggccgcgatgcgtgcggaggccgaacgaacgcgcacgcagcttatggatacatatcgtgagctgggtgcgtggaccggaggagctgcaggaactccccgctgtcgtggggggtttatgtcgtacgcctccctggtcacctgcgagggggcggtgaacgcactctcccgcgaagggtgccggcacttcgaggtcttcgaccaggcagatgaagattttgaacgagatgtctataaggtcgaagaccccgtcgtgaaggaatccgccggggccctctatgaccggatgtggggtccgcacggtcgtgaggtggtcagggagcgggccgagcttgcgagggctcaggcggcgcgtggcgagcgggtggacgacttcggggcgttgaacagcgcgctgccagacccggagccgacccctgcggaggctgtgaccggggccgccctggagccaaccccggagaccgcagcgattgcgacggctgcccccgcatccgctgcggccggcgaagacctgcccccaaaggtggccgaaggcgcccctgatgcccccgcagcagctgcgccgagtgttgaagatcccgcggcggaggcggtggaaacaacggcggaagtggcggcggagccaacggcggaggctcccgcagcgtcagggccttcgcaggtggcgtag

SEQ ID NO: 26022 - DNA, 1372 bp, Zea mays
  Peptide Sequence Number=SeqID_69397
cgcgtgggctgcagccagtccttcactgctcgcgcctccgtccgccgctcccccaatccacctctccttcggcgctgtcccctaccgccataccaacgccccacacctagccagagacgatgatggtggggctcggctctatggcgggctatgggatccattcgatgctcaaggagggccattgatacctctccgggctcgaggaggctgcactcaagaacatcgacgcctgcctcgactgggaaattggaatggaggacatcaggtcgactacctcaccgcgacactgcccgactgtcaccacgacactcttactggccaactaggcactagcggctcccggctggtcgagtcgccgaggggcgagccggcgctcgacgacgatgctggctctggctggctagtcggtgatcttgccctcatcgattttattaaggaaattccttgtgaaccaagggtagaagtcgtgcttattgatgatgcctttgttgaaaggaagtcgatggaatgtttatttcagccgaatgcatatttaggtgacgaggtgtttattccgataaacatccaagagacgcactggtatcttgtcgtgatcaatgcaagaaatatggagatacaaattaaaggactccaaagacaaattgatatgatatctcaacttaaggagttaaaagaccacaggtggccagacctccaagttgcttctcggacgctcaaagaaatagaaatgacatatgcaaagcagacagataggtataagcacatgtcatataagaggttcacagaagcgattatctcaaagaaatataagattgcctacaacaagaaacgttatgtatgggcgaaggatatttttaagtgggaacatacaattcggaatggtgttccaattgacttaagaggaggactccaagtcaaactcgtcaccttcgggaaaatccagaggcgctccgctataattcaccggactgtccggtgtacaccggacagtgtccggtgctccaaggaagagcggctctggaactcgccagcctcgggaatttgctccgctataatgcaccagacatgtccggtgtacaccggactgtccggtgagccagcggagcaacggctacttcgcgccaacggtcacctgcaggcgcatttaatgcgcgccagaagcgcgcagaagtcaggcacgcgggagacggtgcaccggacaatctacagttcttgtccggtgtacaccggacagccaggcgggcccagaagtcagaagctccaacggtcgaaaccgaacgacctggtgacgtggctggcgcaccggacatctccggtgtgcaccggactgtccggtgcaccatacgacagtcagccaccaccaaacggctag

SEQ ID NO: 26023 - DNA, 477 bp, Zea mays
  Peptide Sequence Number=SeqID_69398
atgggcgcaatacaggtcaaggctccgtccactcaagggacacgatctcgcctcgcccgagcccagcctcaggtaggaacagtagacccaggtggattcacgcctcgcccgagggcctcctcaagcaacgggcgcaccttcgactcgcccgaggcccaactcgggcaggcttcgcggagaagcaaccttggccagatcgcctcgccatccaaccgtatcgcaggagcattcaatgcaaggatcgcctgggtgaggctgacagcagccgaatccagccctaggcgccataggaagctccgcctcgcccgaccccagggctcggattcaacctcgaccccggaagatggtctctgcctcgcccgaccccagggctcggactcaacctcgaccccggaagacggtctccgcctcgcccgaccccagggctcggactcaacctcgaccccggaagacggtctccgcctcgcccgaccctag

SEQ ID NO: 26024 - DNA, 1020 bp, Zea mays
  Peptide Sequence Number=SeqID_69399
atggatggcagcaaccacccccgcgggggcaagccctccgtctcgcagctcctgcaaggcctccaaaaggggctggagattcttctgtctctcacgcggggccccatagcgccagttgctaccggcggcagtcaccactcgttgagaaaacgatgggagcctcccatcgtcgttccggaggtaaaaccatcagcgctgccaccccttgttcgaagacacaaggatgacggggatgtactgttgcgcacatgcctacctcaactggaggatgcagccaccggcccacaccgccatgcagactctcttttcccccgtcgtcgaggcaaaaggctccgcagagaagagatgggtccacagatcccagtgggggtcaatccccaaaaatccttcgcaaaccgctgcgaagatggctgcttgcgcgatagagttggggttgagattgtgcagctccaccccatagaaatgcagaatcgcccgcatgaaacggcttgctggcactccgaacccccgctcatggaaagagacgaaactcagcacataccccgacggcggggacggggcggccccgctcggagggaccatccacttcggctgcgggtcaccggagaggggacgaagcaagccattagcaacaagggcctccagatcgtccaccgtgacggtggagaaaggccacgggtcgcgcggcggaacgacggttacccggtcgaccatcaccaagcgaagggggtggcggcggagtggacaagggacctggaaaggggatactccaaaagggatccttctctacgaaggaaccgcctcagaacacgtagagcaagggatgactctgggtacgtccgatacatggccaaggctcgggctacgctcccgagaggctcgggggctgctctcacaaacccggctccggccaaactgttgacagcgtcaacatatcagcctgagaactcgaaacctgactatgcacccgggctacgaccagttcgcatgagggaacaaccagaccggccgaggcattaa

SEQ ID NO: 26025 - DNA, 444 bp, Zea mays
  Peptide Sequence Number=SeqID_69400
atgggcaagaacaacaagcgcaagcgtgagccaactcctccatcggaggattttggtgactcggagtactcagaggaggagttctcctctaagtctgaggggtctccggctcccatccccctgcgtgagtcgtctgacgactcagacgactcccaggggctcgcggcggaggtctggacgtacatccgggctgtcgagcgctccgggctcgagggctcggatgagtcggagtactcctcggatgaggaggactgggacggtggcggcgaggacgaggacgacgacgacgacgacgacgacgaaggcggtggcggcggtgacggtgacggcagcggcaggggcggcagcagcggcagcaaggacggtgacggcggcggcagcaggggcggcagcggcagcaacaggggtggcagcggcggcggcagcaacagggccagtggctag

SEQ ID NO: 26026 - DNA, 72 bp, Zea mays
  Peptide Sequence Number=SeqID_69401
atggaggaggacgacctgctgggagaagacctggtcgactatgaggcttctccagaacgcccagaaaattag

SEQ ID NO: 26027 - DNA, 756 bp, Zea mays
  Peptide Sequence Number=SeqID_69402
atggacttggacatgctgaattctcacccggaggcgcagctggagctgatgaacgcaatgctccagctggagcagctcgccgggttccctctccatgaccacggcggggccataatgatggcggtgccttcgactcccccgtcgccgccgccgccgccgggcatgcagcagcaagcagctactcaccaccaccatctctcttcggtgcctcgtcacatgtccgcgggcgccaccgccaacaacaacggccgtgccggcgtgtacgacgaccaccagtacccccggcaggtcagagtcacagccgcgtcgtcgtcgtcgtgctcgtgcaacgacggcggcagcagcggagagatcagcgccaccgccgctgccgccgtcgggtcatcgtcgtcgtcgtcggcgatgcgggagatggtcttccgcgtggcggcgctgcagccggtgaacatcgagccggagatggtgcggcccccgaagcggcgcaacgcgcgcatctccaccgacccgcagagcgtggcggcgcgggtgcggcgggagcgcatcagcgagcgcatccgcgtcctgcagcgcctcgtcccgggcggcaccaagatggacaccgcgtccatgctggacgaggccatccactacgtcaagttcctcaagacgcaggtgcagtccctcgagcgcgccgccgcggccgacgcccgccgcccggtaccagacaacggtggcgccgcgccctactcatccgcccgcatcaacggccagtggtag

SEQ ID NO: 26028 - DNA, 405 bp, Zea mays
  Peptide Sequence Number=SeqID_69403
atggccggcgctgtgcgcgcacagccgctgaccggggcggcgagcatgaggacgacggcgagcgcccgaagtggggcgaactgggcctcgctttccgacggcgaggcaattccggtgtgccaccgcttctggcgccggccattgccatgtgccggcgttagggctgatgatatgcatcggcagttgttgctgtgtccgactgcggcctgcccggcccgtatcctatccgttcggagaaacagttttataacactatttggtgcagttggaaaaagatggtacgaaattatcgttgacaacagcctaataagaggacaaattttagaaccgatagcgtctcttgctcttctgcttgaagataagctaactaccggtgctgtgtatacatcaaccgtggatatatag

SEQ ID NO: 26029 - DNA, 468 bp, Zea mays
  Peptide Sequence Number=SeqID_69404
atgaaaacagggaagtgcaggggtctagccataaaactatctcagactcagaacgtccctgctgcggacagcgggttgattactgtgaagtacaggggctcttatgcaaagtgtcgcggccgaagggagatgaaccagtacgccctaatagccacacgatccccgatcagcggccgagaggagcccaagccgaaggaggtgggggcccgcgtccaagcggaagaggatggcatgcataggagcttcgactgcacgcccatgaggcccgctacaggtgacgaggagagggggagaagtgccccgcggtcttatccccagacgtggaaggcttcgctcccagcttccccggccgcaccgcacggggctgttgcaagttgcaacgactcgccgcgaaaggaggaagaccaaactgaccgatgggggccacacgacggcgtcacgaggaaggagagcgcggcagcggtatag

SEQ ID NO: 26030 - DNA, 570 bp, Zea mays
  Peptide Sequence Number=SeqID_69405
atgggcacaatacaggtcaaggctccgtccactcaagggacacgatctcgcctcgcccgagcccagcctcgggcaggaacagtagacttaggtggattcacgcctcgcccgagggcctcctcaagcaacgggcgcaccttcgactcgcccgaggcccagctcgggcaggcttcccggagaagcaaccttggccagatcgcctcgccaaccgaccgtatcgcaggagcattcaatgcaaggatcgcctgttaccttatcctgacacgcgttcctcagttaacagggccgaaccccaggcgccataggaagctccgcctcgcccgaccccagggctcggactcaacctcgaccccggaagacggtctccgcctcacccgaccccagggctcggactcaacctcgaccccggaagatggctacggggaacaagaccggcgtcccatctggctcgccctgggacccctcggggtcgaaacgccgacagttggcgccccaggtaggggcctgctgcgtgttgacgaacagcttcccgtcaagctccagatgggtagtctccagcaacctctctag

SEQ ID NO: 26031 - DNA, 582 bp, Zea mays
  Peptide Sequence Number=SeqID_69406
atggcgccccgcgtgccctgtgacgacggcggctctcagctcccttacggaagcagggggacatcagcaaagactcgaccgctccgacagctgtccctccgccaggctccgttgctcctccgacagccacgacatcacaccagcaggcactctgctacaccccccattgtacacctggatcctctccttatgactataaaaggaaggaccagggccttcttagagaaggttggccgcgcgggaccgaggacgggacaggcgctctcttggggccgctcgcttccctcacccgcgtggacgcttgtaacccccctactgcaagcgcacccaacctgggcgcgggacgaacacgaaggccgcgggatttccacctctctcacgcccgtctccggccacctcgcctttccccccttcgcgctcgcccatgcgctcgacccatctgggctggggcacgcggcacactcactcgtcggcttagggaccccccggtctcgaaaccgccgacaggtcctaatcatatctagtccccagcacgcgaaggggccaagtcactggtatggtctgcagttgctgtgctggtag

SEQ ID NO: 26032 - DNA, 300 bp, Zea mays
  Peptide Sequence Number=SeqID_69407
atggaccgcgggttgatactcaacttctgcggggtctcttatgcaaaacgctatcgcgaaggggtactgtgctctgtgggtcgttggataaaaactctatggtgccgattagattctcgctaccctgaaccggtacgcgatatctgccctcggatccgtgatgcatggctcagatttaattacgtagacaacgatttgggcccctcgatcctgatcggacggtccaaggcattcccacccaatcggcacccgaaacctaatctaagccgtccatcttgcatcaatgattggactaactag

SEQ ID NO: 26033 - DNA, 882 bp, Zea mays
  Peptide Sequence Number=SeqID_69408
atgaacgggctcgccaaggacgtgccgacggtgaacgggatgcacgaggagcccacgaccgcacatcccagattgctcatgccgcccactgtgcatctgaaaatattttttgaattgatactaaagagcctcacttgtatgcattctcattcaagaacggttactgagatcttcaacttttcccaagatgatttgttaactgaagacatgatgatacttgacacacatggtgaagttttcatttggattggtcagtatgtggaatcaaaagagaaacagaaggcatttgacataggccaggcctgtcatcggtgggatgcaagtgctgggagggaggacgtggagacactggcgcaatgccagtggatgattgcgtgcggggagtggccaccgctggccgtggcctatgaccatgtggaagggtccaccatggaggccggtgggatgcaggtgcttgttgatcagatgatggcagctaccgagtcatcaagatttcacgtgtcattaaagaaggatgatgtgcacataagaaggctcatcataaatcaggtgttgccaccgtctgcgtccttatgtagattctgtgctgcaaaatggaggaagttggagcacaagatgttggacaatttcttctctgtgctgtcatgtgttatctccgtgcccttctacacgggattcctccctctcctgttctggagtggacacgacaggctggctaggcagatgaccctcctcatggctttctgtgactaccttggcaactctgtcaagatatttgttacactatgtcctgacatacggagaacatggcagtcttacagttgctgcgggtttatctctagctctcttaccccaaatttgctgcgggttttccagcagtga

SEQ ID NO: 26034 - DNA, 837 bp, Zea mays
  Peptide Sequence Number=SeqID_69409
atgtctccagcccgtctcgccgccgtcgccgctgcggtgctcctcgctgccgccctcctgcgcgtcgtgccgggcgccagaggccaggaggagacggagcacgaggaggagttcagctacgtgccaggcgacgagcacgggccggagcactggggcagcatcaaggcggagtgggcggcctgcggcgcgggccgcatgcagtcccccatcgacctctcccacgagcgcgtatcgctggtgcgatccctcggctacctctcccactcctaccgccccgccgaggcctccatcgtcaaccgcggccacgacatcatggtgaggttcgagggcgacgccgggagcctggtgatcaacggcacggcctactacctgaggcagctgcactggcactcgcccaccgagcacaccgtcgacggccgccggtacgacatggagctgcacctggtgcacgagagcgccgagaacaaggccgcggtgatcgccgtcctgtacgagatcggcggccacgacgacgcgctgctccgccagctggagcccgccatcaggcgcgtcgcggacgtgcgggaccgggagatgcgcgtgggcgtcgtggacccccggcgcgcgcgcggccgcgccagcgtctactaccgctacgtcggctcgctcaccgcgccgccctgcaccgagggcgtcatctggaccatcgtcaagagggttcgcagcgtgtccaagcaccagctggagcttctcagggaagctgtgcacgacgacatggagaacaacgcgaggccgcttcaggaggcgaaccacagagacgtcagcatgttccgacccaagcccaacaagcagtattag

SEQ ID NO: 26035 - DNA, 1120 bp, Zea mays
  Peptide Sequence Number=SeqID_69410
cgtcattcacgccgtactcgacgaccaggagcccgacgacaagaaggcgcaggcgccgccccgggcgctgctccgccgggcccaccacaggctccgcccatgcccaacccagtccttgctcctcctcctcttcctcccgcccctcgcgctcgccgcgctgctcctgcgcgggggcgacggcggccgccacctggccctcctggcagccgcggcggggttggcgcttgcggccgacgccgccgccgccgccgcgcgattccgcggagccaggccgcgcggcccggcctacgtgcagtggttcatcggcgagggcgacggcgaggagcagcagcagcgggacaacgtccgcgcggaggtgcgggagggcgtcgagttctacagcaacggggaccggtacgagggggagttccgcgggggtcgctgcagcggcagcggcgtgtacagcttcttcgggaagggcaagtacgagggcgagtgggcggacggcaagtacgacgggcacggcgtcgagagctgggcgcgcggtagccggtaccgcggccagtaccggcagggccagcgccacggctacggcgtgtaccggttccacagcggcgactgctacgccggcgagtgggccggcggccagagccacggcgtcggcgcccagacctgttccgacggcagcacgtacgccggcgagttcaagtgcggcgtgaagcacggcctcggctgctaccatttcaggaatggcgaccggtacgcaggtgagtacttcgcggacaagatccacggcttcggcgtgtacagcttcgccaacgggcacagctacgagggctcatggcacgaagggaagaagcaggggctgggcacgtacgcgttccggaacggggacgaacgggcgggggagtgggactctggagtcctgaagaagtcgctgcctctgtcagacccagctgtccagcgcgccctacaggctgctcggagggctgcggacggcgccttccacctcccgagagtagaggagcaggtgaacggggccgtcatggctgccaaccgaggggccacggccgcccgtgtcgccgcgatcaaggcagtgcagaatagggtcgatggcaagttctgcttcatcgacgtgtga

SEQ ID NO: 26036 - DNA, 468 bp, Zea mays
  Peptide Sequence Number=SeqID_69411
atgggcaagaacaacaagcgcaagcgtgagccgactcctccatcggaggattttggtgactcggagtactcagaggaggagttctcctctgagtctgaggggtctccggctcccatccccctgcgtgagtcgtctgacgactcagacgactcccaggggctcgcggcggaggtctggacttacatccgggccgtcgagcgctccgggctcgagggctcggatgagtcggagtactcctcggatgaggaggactcgtccgaggaggacggtggcggcgacagcgaggatgacgacgacgacgacgaaggcggtggcgacggtgatggtgacggcagcggcaggggtggcagcagcggcggcaaggatggcgacggcggcagtagcaggggcggcagcggcggcggcgacagcaataggggcagcaacaggggcggcagcggcagaggcagcaacagggccagtggctag

SEQ ID NO: 26037 - DNA, 378 bp, Zea mays
  Peptide Sequence Number=SeqID_69412
atggacggcccagagggcatcttccccctggtcatgagcgagggcgacgcacagagagttgacatggccacggtgcgcggcggagttgcggcggcggcgaagttcggcgacaaattccgggcgctcggatcgatccctgggcatgattctttcacgcacacgatcgacgaacgtggacgaacacccacgacccaataccagccaccaatcatcggtgcaggcgcgaggcggaggcgcgatggtgagccacaccgacgacgaatcgctgatgacctagctcctcccgcgccaatggatctcgacgaatgcctcctccacaccctggtctacttccatggccaagttctatgggctgtgtttgctctcagccgcgattag

SEQ ID NO: 26038 - DNA, 717 bp, Zea mays
  Peptide Sequence Number=SeqID_69413
atggggaccctccttggcgggctctttgccgagtgtccgagggggcactcggcaaaggttgaatctttgccgagtgctactgggcagactctcggcaaaagtcgatggttctacctccacaaagacgacaggcggctgccggtgttcacgcatcgcgtcgtcctcggagcggaggagcgatggagtgctctctctactgctctggcctctgctggacgcctggactgctacagtgcagtgctgctctactgcgagtctgcgacggccgacgctgacgggcgaccggcggctccggctcggcgggcggcggctccggcctccgggctccaggctccagccgctctaggcgagcaggagcaggcgagcctgctcctgggcgctgggcgggcagacggggacggccggacgggcggtggcgcggtgccgtggtggccgccggtgccgctgtgcgtccgtgcgcgcgcgggcgccctggcggctgctgcctgcttctccttagaccgccgactccgcctcgacgagattacacccgaggcctccgtggaaagctcccggatggccttggtcgccctctccaccgtcgaacttcttcgacgggtgaggggaacggtggggaaggggcttcggggcttccggaccgtccgacccccggtcctagaggacgcggcggccagggaggtacattggctggcggtcgaggagaagaagcgaaagtag

SEQ ID NO: 26039 - DNA, 1509 bp, Zea mays
  Peptide Sequence Number=SeqID_69414
atggggagcggggccccggttcttataccccgagcggtgcgcaatagtcgggagggccgttacaacggcggcgcgacgaccgcggaaccgaagaggcagcggggggctgcgaaggctgcggcccccggcggaggctggacgccactagcggcaaagtcgggcgtccctgcatctagcaaggcgccggaggtaacggcaggcgccggaggctcgaaatcggcgaaggcggtgtcgccgtccagcggagtggcggaggtcgcgaaggcggcccgagcgttgccgttgtcgggcaaacgtgtcaccgacttcgccaccgacattagtgtggacgactatctcggtgggtcgggcgaaggccaacttgctatggttgtgcccgccgcggcgaccacgacggctgccgcagtgccgaaggcgaagggcggggctcttagcgccggaggcgaggtgtcggccctcgcggttgtcatggatgaggcgggcgctgcgtcccgctggctgaaggaggtgacggaggcgctaagtcaggtggctgacttcgccagccgcactgcgtcgggggccctcacggcggccgtggctgccgaagtcgagagacttcggacacaacatgctgacgccgtccgtgagaaatcggccgccgacagcaagtgtcgcaagctggcggacaaggtggccacactggagggagagaaggctgccctccggcgccagctggcgggggaaaggagggagaccaacgaggctcttgccaaggcgcaggctgcgcagacggaggccaacctggcacgggcggagggcaatcttgccagggagcgcgccgagcagctgcaggagcggctcaccgccctggagagccgcgtggagagggccgaggccgcgtcacgcgcggaggcggagcggacgcgccaactgcttgaggagttgcaggcactccccactgtcgtggaggggtttatggcatatgcctccctggtcacctgcgagggggcgatgaatgcgctctcccgggaagggtgccggcacttcgaggtcttcgaccaagtcgaagaagattttgagcaagatatctttaaggttgaggaccccgtagtgaaggaatccgccggagctatcttcgaccggctgtggggtccacatggtcgcgaggtggtcagagagcgggacgagacggcgagggctcaggcggcgcgtggcgagagggtcgacgacttcggggcgttgaacagcatgctgtctgacccggagccgaccccggcggaggcagtgcctgggttcgccctggagccgaccccggagactgcgggagacgcgtcgggtgcccccgcgtctgctgcggccggcgaagacctgcccccagaggtcgccgaaggcgcacctgatgcctccgcagctgccgcgccgagtgctgaagatcccgcagcggtggcggcggagataacaccggaagcaacggcggagccaacggcggaggcgcccgcaatgtcagggccgtcgcaggtggcgtag

SEQ ID NO: 26040 - DNA, 2937 bp, Zea mays
  Peptide Sequence Number=SeqID_69415
atgtctgctgctcaggtggtttctcaagaacaaatttttttaacaaaaaaagcctttcttttttcttactctcttggaaagaagttagacaagcttaatgttgcatctgataagactgtacaacagattcgtgtgccaaatgtgtccttgctactcaaggagaggctctccatcctactaggactgtacaacagattcgtgtgccaaatgtgtccttgctactcaaggaggtcatatggaacaagtaggtgctgcttgttttatcttgaaatgggctctcatgatggcgaggatgaagagttgccacccccccctccggtgccaccagatgtgattcccattaaagctgaagatgctgtgggtgaatcaccagcaaaccatatattaaagccaaagagattactgatggacaggcctggtataggaagaaaagggcagccgacccagctctattcaaatcactttaaagtcgctgtgaagagtacagaagacgtcttctttcactactatgtaaacctgaagtatgaggatgatcgacccgttgatggtaaagggatcggcagaaaggtgattgataaactgcagcagacatatcgtgcagagctttctaacaaggactttgcatatgatggagaaaagagcctgtttacagttggtggtcttccacaaaaaaagaatgagttcaccgttgtcttggaggacgtatctactggaaagactgctgccaatgggagccctggaggtaatgacagtcctggaggtggtgataggaagagagtgaggaggccataccagacgaaaactttcaaagtggagataaattttgcagcagaggttcctatgagtgctattggtcaagtcattagaggcgaagaatctgagaactccctggaggcgcttcgtgttcttgatatcatactgaggcagcattccgcagaacaaggctgccttttggttaagcaatcatttttctacaacaacccttcatgctttgttgacttgggtggtggtgtgatgggttgtcgtggatttcattcaagcttccgtggcacacagagtggactttccctcaatgttgatgtctcaacaacaatgatcgtgaaacctggccctgttattgattttcttctttctaaccagaatgttaatgatcctagcagaattgattggcaaaaggccaagcgtgctctcaagggcttgaggattagaaccactcctgcaaattcagaattcaagatttttggtctcagcgagaggatctgcaaagaacaaacgtttccgctgaggcagagaaatggtagcaacggagattgtgataccattgaaataactgtctatgactactatgcaaagaaaggaatcgatctaaagtattctggtgatttcccctgtataaatacagggaaggcaaagcgcccaacatattttccaatcgagctatgctcgcttgttccgcttcaaagatacaccaaagctttgtctacgctacaaaggtcatcccttgtggagaagtctagacagaagcctgaagaaaggatgaccgttctaaatgatgcactgcaacgcagtaactacgattctgaccccatgttgagggcatgtggtgtttcagttgctccaaaatttacccaagttgaaggaaggatccttcaagccccaaagctgaaagccggcaatggtgatgatatcttttcacgaaatggacggtggaatttcactaataggcaaatggaggaaccttttgatgtgtttgaagagagtccctctatgaggcgtgcacctgtgtcaagaagggtggatgatatgtttgggcagataaaatcaaaacttcctggagctcctaggttcctcttgtgccttctccctgagaggaaaaattgtgaaatctatggtccttggaagagaaagtgcctggccgagtttggtattgtcacacagtgtctagctccattaagagtcaatgatccgtacctgcttaatttgctgatgaagatcaatgcaaagcttggtggtctgaactcgttgctgcaagttgaagcatcttcgtcaataccacatgtgtcgcaagtacccaccatcatcttaggtatggatgtttcacatggtcatccaggacaagatagaccttcggttgcagcggtggttagttctcgtcaatggcctcttatctctagatatagagcatcagtgcacacccaatctgccagactagaaatgatgtcctcgttgtttaagccgcggggtactgatgatgatggcctcatccgggaatcactgatcgacttctacactagctctggaaagcgaaaaccagaacacataattattttcagggatggagtcagtgaaagtcagtttacccaggtcatcaacattgagctggatcagatcatcgaggcatgtaagtttctggatgagaagtggtcacccaagttcactgtgattgttgctcaaaagaaccaccacaccaagttctttcagacggcatcaccagacaatgttcttcctggaactgtggtggatagtaaagtttgccatcctaagaacttcgacttctacatgtgtgcacatgctgggatgattggaacaacaaggccgacccactatcatgttctgcacgacgagataggtttcagtgccgacgagatgcaggagtttgttcattcgctctcttacgtgtaccagaggagcacgacagccatctcagtgggtaggccgcttgaatctaaagccatcttgtgcagcacagggacagcagttgctccagtgtgctacgcccacctcgctgcagcccaggtgagcacgttcctgagattggaggagatgtcagacgcgtcctccagccagggaggagggcatacctcggctggcagtgctcctgtgccggagctgcctcgcctgcatgacaaagtcaggagctccatgttcttctgctag

SEQ ID NO: 26041 - DNA, 141 bp, Zea mays
  Peptide Sequence Number=SeqID_69416
atggccgtgatgggtgcaacatcgaaaaagatgtacctctgccaggtgaagaagcagcaaatttttgttgcttttgttccaaggtggtgcccaaagaagaaaatcaagactgagtcctcgggaggaagtgtcctcctttaa

SEQ ID NO: 26042 - DNA, 1014 bp, Zea mays
  Peptide Sequence Number=SeqID_69417
atgcaggactcctctattttggaccagactagaggaagactgttctttggacctgaatttattcaagaggcagaagaacaagtccgtataattcgggagaatttgaggaagtgtctccgtgtccctgaggaacagttaccattggaagagcttagtgttcagggcgatttgacttacacggacccacctgcggaagcaggcgccgacgactggggcccagtcgtcagtggccattcttgcgcgcgctcgcgacacaaccacctgggtcatcgccgcatgacccgcgctgccgctgcgttactgccgctgccagtgggtccgccctgtcagccggactccttcaacagaaccgtcgtcttccccgctgaccagctctacctctcgcgcgcgcttggcctgctgctcccgcgtcctggtctctcggtctccgtgggtcccgcagttcggcctctgcacgcgctcagcccatttcatctcctccacctacgctcggatgccaaacggaacctgcgcggaatctgtgcggctcaaacggcttggccgagatctgcggagcttctgttggcatcacctcccgttaacaaacttgggccctcgctggcacataaattcgtcagccactgcataccttggacgcgccaatcagggaacctcctcatcgccaaattgagtcaccgccgtagtaggggtagaacggatggccgccgcggtggatcctcgccgacatcgctggttcgccttcgggggtgtgccgggggacttcgccgggtcgtggggagcgcgctggtgggaggtagtggagcaatggttgaccagggccattgcgattcgtcgccggaactgtgtaaatcgtcgagctcgtgcgccgccgcagacagcttgggcgcatactattcctcggagtttggagcattgatcgctggtttggccatcgtcggctatggcctccgccgggtgggggcggcgccattgctcggcatggtccagtggatggcgtggctcggccaccgttag

SEQ ID NO: 26043 - DNA, 438 bp, Zea mays
  Peptide Sequence Number=SeqID_69418
atggccgccgcggtggatcctcgccgacatcgctggttcgccttcgggggtgtgccgggggacttcgccgggtcatggggagcgcgctggtgggaggtagtggatcaatggttgaccggggccattgcgattcgtcgccggaactgtgtaaatcgccgagctcgtgcgctgccgcagacagcttgggcgcatactattcctcgcttcgttctaataggagtttggagcattgatcgctggtttggccatcgtcggctatggcctccgccgggtgggggcggcgccattgctcggcatggtccagtggatggcgtggctcggccaccgttagattttgatccagcgtctagggttagatcggattggcggtgggatattgaccgtagatccgcgaagcaacggtttagattagatcacgtatacccttcgtccacatag

SEQ ID NO: 26044 - DNA, 1521 bp, Zea mays
  Peptide Sequence Number=SeqID_69419
atgcctttccatggcagaagggtggtgcggagtcccgccttcgcgctgaatctacaaaaccgcgatccggccgcctttgtgcgtgaggcggaggatggggcggtgcggctcgttggacgttacgtgccaaggacagagggccagcgcagctgggatatccacgggtcgaatgaccgtttgaacagggtttttgaattaaatcaattgccatatgacggctaccctggtcaagacgatgtggaccgccgtgggaagaagccggcggtggagactggagacaaccctgcgccggcggccgccccatcctctaaaaagagaaaattaggtactgctatgggaggacttggggtttctgatggttttactagagagttgatgaggacgtgcgcggccccggggggaaggatgtcttcgcctgagctccgggagtcttcggctcggatgctgagggttaccgggggttgctggcctaggaatgttcctatcccccgcgcggctggcgatgacttttttacatctcgcatggttcgtgaatggagggtttttccttacgggcagaatattggtgctgttgtgtcagcagtgatggacaaggatcgccagggggctgcacaaaagcgccaggcggctgtcaggctcgttgaagctaggccgaagaggcagcggggggctgcgaaggctgcggcccccggcggaggcaggccgccgctggtggcgaagtcgggcgtccctgcatctagcaaggcgccggaggcaacggcaggcgccggaggctccaaatcggtgaaggcggtgccgccgcccagcggagtggcggaggtcgcaaaggcggcccgagcgttgccgttgtcgggcaaacgtgtcgccgacttcgccaccgatattagtgtggatgactatctcggtgggtcgggcgaaggccaacttgctatggttgcgcctgccgcggcgaccacgacggctgccgcagtgccgaaggcgaagggcggggctctaagcgctggaggcgaggtgtcggccctcgcggttgtcagggatgaggcgggcgctgcgtcccgccggctgaaggaggtgacggaggcgctaagtcaggtggctgacttcgctagccgcacagcgtcgggggccctcacggcagctgtggctgccgaagtcgagagacttcggacacaacacgctgacgccgtccgtgaaaaatcggccgccgacagcaagtgtcacaagctggcggacagggtggccacgctggagggagagaaggctgacctcgggcgccagttggcggggggagaggagggagaccaacgaggccctcgtcaaggcgcaggctgcgcaggcaagaggctaatctggcacggggcggagggcattcttggccagggagcgcgccgagcagctacagaagcggctcaccgccctgaagagccgcgtgaagagggccgagccatgtcacgcgcggaggcagagcggacgcgccagctgcttatagatacataccgtggctgggcgcgggaaccgtga

SEQ ID NO: 26045 - DNA, 1125 bp, Zea mays
  Peptide Sequence Number=SeqID_69420
aaaccggtgattttgaaagtgccggaaccgagagacccggactttgctgccctggagtggggtgcaggaggagttgcaaggcactccccactgtcggggaggggtttatggcatatgcctcccctggtcacctgcgaggggggtgatgaacgcgctctccccgcgaaggggtgccggcacttcgaggtcttcgaccaagacgatgaagattttgagcgagatatctttaaggttgaggaccccgtagtgaaggaatccgccggagccatctacgaccggatgtggggtccgcacggtcgcgaggtggtcagggagcgggccgagacggcgagggctcaggcggcgcgtggcgagagggtggacgacttcggggcgttgaacagcgctctgcctgacccggagccgaccccggtggaggccgtgtctggggtcgccctggagccgaccccggagactgcggaaggcgcaccggatgcccccgcatccgccgtggccggcgaagacctgcccccagaggtcgccgaaggcgcgcctgatgcccccgcggctgctgtgctgagtgctgaagatcccgcagcggtggcggcggaaacaacagcgaaagcgacggcggagccaacgacggaggctcccgcaacgtcagggccttcgcaggttcaagattttgggcctgcgcacgcaaccgctactactaaatttttggcagcttcgaccgcggaagatggtaatgaatgtggtggatctgcaactgagttttttgattttgctgactctgggagctcggttgaatggactgaggagtcgtcgtcggaggatttggactactttgcggccttggacgtggctgcggcggaggctttgccgcacaccgcggacgcaggagatgtgccaggttctagcaccgggcgacgacgacgaagggcggttgcgaagcgtagagttagtggggcggagggggctcggcttcgtgtgagtagggctggccggcaggaactgttgtctttgccggccgccgtgagtaccggtgaaggggaactgcgaagtctttttgtgggtgaggagcttaggataatgttatttaattatagggagatgggaattattcctaaggttgagccgatgtag

SEQ ID NO: 26046 - DNA, 159 bp, Zea mays
  Peptide Sequence Number=SeqID_69421
atgaaggacgtgcctggctcagttgtgcagcagctgaagcacgtcaaagacgaggtgctaaagcggtccactagggcgctttacgacaaaatgtggggccatcacggccgcgacactgtccaggagaggtctaatcgggcgctggaccccggtgcgtga

SEQ ID NO: 26047 - DNA, 774 bp, Zea mays
  Peptide Sequence Number=SeqID_69422
atgatgagggtcatggacaagctcaaagggaagaagcgcgtagaccatggtgactcctcgaggtcacggtcgactaggggttcaggtggtggggatacatcctctatgttgttccagggctccacagtgtcaaggcaacggttagagcagctccttggttgcatggaggagcaggggcacgagatggcaggccatagtgcacctgggcaagagcgtgaggtggtaggccatagtgcacctgggaaagagcatgaggtggcaggccaccttgcacttgagcaggagcgtgaggcgataggctcaagtggacctatgctagagcaggaccacaatgcacttgagcaagagctcaaggcggtagaccacaatgcacctaggcaggaggacaagctggcaggccaaggttcactgatgcgtgatgatgatgactattgggaggactatgatggagaggccgatggagaggccgatgccgaggttgttacaacacaggcaacgaacttcaggaacaacctccaccctttaaccacatgctactggatgcttctagaggggctcgagggtgtgacacttttccgcaagaaaccgcgctgcggtgccgcctctgtccgtcgctatgatctccccaacccaacacccccgccgaccgccgccgctgccgtcgcggtgttcgatccaagcctgggcaccaccaccattttcgatcacatgttgtttgttgtttcatacctaccgcgcccgtatcagcagcagcacgagagatccactcgatga

SEQ ID NO: 26048 - DNA, 324 bp, Zea mays
  Peptide Sequence Number=SeqID_69423
atgtgcagaagacagttggagtatgagcagaagcccaagaatgtattgatcctgctcactctcaagttccttgtcgccctctcagtctccaaggtagtaatgaatgttagtttaaatagagcttggaatccagggatagtctcccgagtacacgaagttgctaaatttcttaactcagaactacaagacaatgcaggttacaatgaagctggtagccttactatgttaagagcaagactgagatattacttgcaaaatcctttgtcctgcagtcacagagactccaagaaacatcagtcgcatggtgcaaaaccagaggcatga

SEQ ID NO: 26049 - DNA, 456 bp, Zea mays
  Peptide Sequence Number=SeqID_69424
atgacccgtgcgcttctgctccctgctcaggcggagacccgacgctaccacgtggactgcgatgtgccgtctcagcatttaatgtgtcgtgtccactcccctggtaggcggcatccaggccatcctgcagacggcgtgcctatccagtccattgtcaaacagtacgcccgtgctgcgagcatgatggtgcaaatcgtggagcaccgcgccgagactttagtggatttcctggtggaggaggaagatgcctcttccacgccacaggttcccaaccgcccagtgccgggcactgctgctgtgcacgctgcacggcaacatgcaactgcgcagacatcccggactccgtcgagggcggctccgggggcattgtctgtggccagggagttgctgcaacaccctccaagctccacggcctcaccgggggccatgaagcagtggcaggatgacgtcgactaa

SEQ ID NO: 26050 - DNA, 627 bp, Zea mays
  Peptide Sequence Number=SeqID_69425
atgcaggaaggcaacgcgaactacatggaggggggtctcaccttcgattatgccgcatggagcctggcccacgagtgcttgcggacgggactgagcccaacgcggtggccggccacagtcaagtccagcgctgaatggcgaaactccctggacccatgtcgtggtcctgaggtcgatgcgtacgctggccctatgacggcggcaatttctcgctaccagccatgggggtgctcggcgacggggctcaccagggcacggctagatggggtagatgctcgagaggatagcgacgcccgaccttattcccgcgagggcaccgcaacggtccgagaaagggggggtctccatgcgtgcccgggacaatcggctggatctcccaagagttcggcgaagtatgttacgagctcggggaagcggacgaccaggcaatggggtccaccgtcagtgcctacgcggccagatgtgaacactactggcacaagggtcccaccgcgaagtcactgcgtgctggggatcaggagcgttgaggctgggttgcgggccccgcctggcagccgcagagagggggaggcgccggggttcgacacacagctcaactccttccagccctgcaccttctacgcctag

SEQ ID NO: 26051 - DNA, 240 bp, Zea mays
  Peptide Sequence Number=SeqID_69426
atgggtccagggagtttcgccattcagcgctggactcgactgtggcctgtattgggcgatgccgggctccgggctactgggattgctcgccggagtctctgcgctgccgtagatccgctctcctccgtgggcgagctcgcaacctcctccacagccgacgagcaagccactgtggatactgaggttcaacaaatagagatagctgagcaggagctcattgaaggcaagttgtgcccttga

SEQ ID NO: 26052 - DNA, 657 bp, Zea mays
  Peptide Sequence Number=SeqID_69427
atggatacgaggtggagaagttcagtttcagaaatgatggacatatggttacctgcgaaaggcaactggctgttggggtcgattggaggaatcaccacagcagacgagctcgcggtcttcctcttgggtgccatctcaattctaccagcgagcagagcgggaggtgaatggcggagaggattcggaagcgggaaagcaagaactagggcacggaaagcaaaggcggctaaaagtgcagctcttatgggatattctcgagccagataccgtttcaaaaagtgcccagtcatcaccgggcggttatttccaaaaccccagcatgccacgtggaaacccggcagttgtctccagaacaccggtgcgccacctcatcactcggccatcgtcctcaaagtggctcgcgcagcctgctatcactcggcgtcgcctccaaaacgccgatttcgtgttcagtcgctcggcattacctctaaaatgccgacgtcgccttccagtcggtcggcgttgcctccaaaacaccgacttcgtgttcagtcgctcggcattacctctaaaatgccgacgtcaccttccagtcggtcggtgttgcctccaagacgccgatttcgtgttcagtcgcttggcattacctctaaaaatgccgacgtcgctttctaa

SEQ ID NO: 26053 - DNA, 402 bp, Zea mays
  Peptide Sequence Number=SeqID_69428
atgggcaagaacaacaagcgcaagcgcgagccaactcctccatcggagtactcagaggaggagttctcctctgagtccgaggggtctccggctcccatgcccctgcgtgagtcgtctgacgactcccaggggcttgcggtggaggtctggacgtacatccgggccgtcgagcgctccgggctcgagggctcggatgagtcggagtactcctcggatgaggaggactcggacggcggcggcgaggacgaggacgacgacgacgacgacgacgacgacgacgacgacgatagcgacggtggcggtagcggcagcggcaggggcagcggcggcggcaacaaggacggcgacggcggcggcagcaggggcagcaaccgtggcggcagcagcagggccagtggctag

SEQ ID NO: 26054 - DNA, 255 bp, Zea mays
  Peptide Sequence Number=SeqID_69429
atggcgaggcactccgtccccacacacatcaactgtccccatcgattccctggcaacagaaaggggctcactgccttggcgtacaatgcctctgatgtagctgaggtgcccgatctttcggtgagtagagataattccgatttggcggaagatgacccttgtgatccgactacgacgagcaagcccgaggcgccaatgcaatcgctgaaccaactccctgtggttaccgaccttactgatgcgagatcggcctga

SEQ ID NO: 26055 - DNA, 399 bp, Zea mays
  Peptide Sequence Number=SeqID_69430
atgctcccagagccaggaatcgaactctacctcaccggagacaccggatcaacgtcgccggacttcaccagatcgtcggcgtacgtagaccgagctccacggccagaacacacgccgccgataagcccgaccacctgcgcacgtggcccgaccaattccggccatcaccgacaacgagctatacctcgacgtgactgcaaggacttcccggagctaacctcgcccttcgtcggacctccctcgccgccggaaaaatactgtaatctcgctgacggggagtacatcctcattccggagcaaggagttgctaaggaggtagtccaggagccagcaccagagtctgccatcgaggatctgcctgccttagctttggaaggcaagccccggttttatgcatga

SEQ ID NO: 26056 - DNA, 192 bp, Zea mays
  Peptide Sequence Number=SeqID_69431
atggttacgcctgggcagcgttattgtgagagtgaaagtggacgtgctgctactcccctcattcccaacatgtatcaagacgagtgccctagtggccagggtgtcacgctccacaagatcgtgacagccataggaggtggtgtatcggttgctaaggcgcagcgtctttggaaggctgtagtcgggccgtga

SEQ ID NO: 26057 - DNA, 246 bp, Zea mays
  Peptide Sequence Number=SeqID_69432
atgttggatagataccaagacgatagggatgacaattctacccgcgggcacagatatccgtgggtttcgtacccgatgggcatggatacggctgaggtgcccgatctttcggcgagtagagataattccgatttgtcggaagatgacccttgcgatccgactacgacgagcaagcccgaggcgccaatgcaatcgctgaaccaactccctgtggttaccgaccttgctgatgcgagatcggcctga

SEQ ID NO: 26058 - DNA, 360 bp, Zea mays
  Peptide Sequence Number=SeqID_69433
atgaacaaggagtgcaccgagggctcggagatgggcacggcggcgcactcggcgctcgggcttggcggcgctcgggctcggggacggggacggcggcgcttggcctcggggacggggacagaggcgctcgggctcggagatggagacggcgacgctcgggctcggagatggagccggcgacgctcgggctcggagatggggacggggacggcggagttgggctcgaggacggcgcggcgtggcgggcgcccagctcggagacggtggcgcttgggctcgggctcggcgacggcgtggcgggcgctcacggctcggagacggggacgggaacggcggctcagtatcagcctggcggcgtag

SEQ ID NO: 26059 - DNA, 294 bp, Zea mays
  Peptide Sequence Number=SeqID_69434
atggcgaagcctagccacgctactcctcctggtcctctcctgtggaagcagcaacccactcgaccgtctatcccggtggcagggatgaaggccaagtcacaccatcaaccaaatcaaggaggtacctgcaaaaattatgccacaagcaaggctgggtatactaatactcagctagacttacccgggctcaccgccttggcatacaatgctccactgaccccggccgccgccgtgcagtggccgcacttgtacccaccatatctagaatgggagaccaagtctcaagacaagtga

SEQ ID NO: 26060 - DNA, 1626 bp, Zea mays
  Peptide Sequence Number=SeqID_69435
atgacgtgcagacgctgtgcagatcgacgacgtgaggcccgttctggcgagcccgacgcagcgaagggcgtcgctgttgctactgctcgagcagggacgcagaccgacggaggagcacgtgaggaggagctcggcatgtgctccagcccagtgccgagggatggcagcggccagacttgctggagaagaaggtcgacgcggggagaacttggactgcaggaacagcagggggaggaggtcgacggctactggatgagggagacaaggggctcgcggcttgtccttggtgcctgcacttggagattttctgctggcgaggtgcgccagggagaaggagcaactggagcttggggcgccgaccatgaagagaaggggaggagctgctactcgccaggaggaacgacggctgtgcatccgtcgcgaggggttgggctaggggatcctgcgctggtgatgaagtggtggccggacaccgcatgggggaggagctcgtcgcatgtgaaggctggcggccatggctactgccgagcgccatggagtggaggagagatgctattggcgcagagaacggctaccagctattggccaggggcaggcagtggcagactggcgctgtcggctggagaagaagacagggagatggcagtgacaattatcaggacactgacgcaggaaacggagcgaattaacatgaatcaacaagaagctcctataggagttggagagtttctacgagattttggtgttccagtggtcctgtggcgactacttcaagaagttggatataccgaagcacccaagtaccagtggtcacgcactgttcttagaggacaaccatggtatgaggtagtagtgcgtattccagagcgtgctagaaaaccatcttggccatattggatgttccatgctgaaggaatgactccttgggagggtgctcaggtagctgccttagaggtgctaacaaccatttgttaccagaaaagggaagaaatacaagccacatctatgaggttgttccctgcagttgccttaagtgacccattggtgtatcatcaccaggcccgattaatggaaagcattcctattgggcaggattctgttgaatcggcatctgctcgagttttgatggccgtgctagagttgcaacttactcgagggcacagtcgtcaaaagtggcagcagttgtacactgggagttatgcagcatttaagatgatggaaatggccaagaatagttcttgtacccaagcacaagaacgacttgaggaaacgagggttcaagcggaacaggttattggattagagcatcaggtgacagaacttcagatgcaacaccaagctgatcagaatcgcattaaggagcttgagcatcagctaactaatgctcattctaaattaaaaattttgagtcagcaacaagaagaaatttgtctgtatgctgttgctattagagaagaccttaaggaaaccatgagcttcataagccatcaggatcaggcgatcaaagaattaaatcgtgctcatcccatggaatttcaagtagcacaacggcttgtcaaccatctgcagcaagcagtgcataggctcaatgctgcctttgatcctactcctgtatcggtggactaa

SEQ ID NO: 26061 - DNA, 822 bp, Zea mays
  Peptide Sequence Number=SeqID_69436
atggacgacataggctccgtccccttcgccgacgccgggctcctcgacgggttctacggcggtagccatggacatggtggtgactacgggctgcttgctagccagctgggagcgggagcgggagcgtcgtcgacgtcgcctgccatcttggacggcagcgtgccgctggtcgacgccgcggcctccgcggaggaggcgacgaggaggaagggagaccacctccaggacgacaaggcggcgatggcgctcaagagccacagcgaggcggagcggcgccggagggagaggatcaacgcgcacctcgccacgctccggaccatggtgccctgctccgacaagatggacaaggccgcggtgttggctgaggtgataacccacgtgaagaagctcaagtccaccgcggcgcacatccgagaccgctgcgccgccgtcccggccgacgcggacgacgtcgtcgtcgagctggtccatggcggcgcggcgccgccgtcggccggaggcggcgtcctcgtcagggcgacgctcagctgcgacgacggcgcagacgtgttcgcggacgtcaggcacgcgctgcggccgctgcggctcagcgtcgtcggctccgaggtcaccacgctgggcggccgcgtccgcttcaccttcctcatcacatcgtcgacgtgcggcgacgtgggcgccgtcgtcgtcgactcggtgcgccaggcgctccagtccgtcctcgacagggccaactctgcgctggagttcgcgccgagggcgtcgcttctcaacaagcgcaggagggtgtccacgttcgagtcctccagctcctcttctgcttga

SEQ ID NO: 26062 - DNA, 198 bp, Zea mays
  Peptide Sequence Number=SeqID_69437
atgaactctgtaccagacggcatcgtgcagctcatcttgtcgatgcttcacaacgcccacgacatggccgcctacgcctacatcaccggcgctagcgagactgtcgagatggcggggtccatcacatgcctcagggagctagtcatctactaccctgtcggcgtttcgagacaggggggtccccaagccgacgagtga

SEQ ID NO: 26063 - DNA, 2286 bp, Zea mays
  Peptide Sequence Number=SeqID_69438
atgaaagaccaagacaatgcggacgcgtcgtcggcgtcggcgtcagccgacggaacggaagaagcgggcctttgtttcgggagggcggcccgcgtgctgctgggcaaatctaccccgctcgctcgggctcgggccgccccacccacccaccccaccacgcctcctcgagcttcatcatcattccttgcttcctccctgccctcctccctcttccgcttccgcttcccgagatccccatccggccacccccatcctctgaccgcacctccatgccgcactagctcgcccgcccactctccacccagcacccgccgcgcagcgagatccagcgccgcccgctccccgcaggtgctcggcggaatgtcccaccgcccgccggcgccaatgccggacaccctctcggacgccttcgccgccgcggtgctcctctcctccaccgacaagccggacacgctgcccccggggaggctctcgcccgtctccccgctcccgcactcctccaagcacgggcaccaccacccgaccccgagctcctcctcgggctcctccggctccgtctcccgggccccgctcgcgcccgcctccggcctcgcctcgcgccggagccactccggcgagatcccgctcccttccgaggcgcccccgcgccaccgccgcacaggctccggcccactcatcttcacatccggcgcgtgctccagctccgccacctcgccgctcaccaacgcgctccccgcgggcaacatctgtccctccggccgcctcgccaaaccgctcccgtccccctgccccgtcgcgaccccgccgccccgcgcctcccgccacgacgtgctcggctccgggaccgccaactacggccacgggagcatcgcgcgccatgtcgggccgccgaccccgaggaggaagggctgcttcgagggggccctcaggctctacgaccgcgccctcgccctctgccccgacaatgctgcgtgccggggcaaccgcgccgccgctctcattggcctcgaccgcctcggcgaagccgtcaaggagtgtgaggaggcgctacggattgatccgtcctacggccgcgcgcaccaccgcctcgcgtcgctgcatataaggctaggacacattgaggatgctctgaagcacttgtcacttgcaaccccacagcctgacctcctagaattgcacaaattgcaaacagtggagaagcacttggggagatgtctggatgcgcgaaaggctggggactggaagagtgtgctaagggaaagtgatgcagctattgcggctggagctgactcctcggctctgctcttggctgctagagcagaagcccttctccgtctcaatttacttgatgaggctgatcttgcaatctctagtgcctccaaattggattatacatcttcatgctcctcagacaccaaattttgtgggtttcttgccaacgcctacctgttttatgtacatgcccaaattgacatgtcatcaggaaggtttgaccatgcggtctcctccatagataaggctaggataatagatccaggaaacactgaagtggtaaacatgcataacaaagtgaaatctgtggccagagcacgttctctagggaacgagctcttcaattctggaaaattttcagaagcttgcgttgcttatggtgaagggctcaagcaacaccctatgaacaaagttctgtactgtaatagggcagcttgtaggttcaagcttgagcagtgggagaagtcaattgaagactgtaatgaagctctcaagattcaatccaattataccaaggctttgctcaggcgggcagcatcctacggcaagatggaaagatgggttgaatctgtgaaggattatgagattctcagaaaagaacttccaggtgacgcggaggttgctgaggcctatttccacgcccaggttgctctcaagtcatctcgtggtgaggaggtatccaacatgaaatttggaggagaggttgaaacaattataggaatggaacagttccagatggccacatctttgccaggtgtttcagtcatccatttcatgacgccttccaatcagcagtgctgcaaggtttccccattcgtgaacacactgtgcgccagatacccatctgttaatttcctcaaggtcgatgtgaacgagagccctgctgtcgcacgcgccgaaaacgtgaggacaattccaacgttcaaaatctacaaaaatggtattagagtcaaagagatgatttgccccagccaacagctgctggaatattcagtgaggcattttgggatttag

SEQ ID NO: 26064 - DNA, 825 bp, Zea mays
  Peptide Sequence Number=SeqID_69439
atgggggcgctcgtgctgtccaccgccgaccccctcgccaaggcacggcgcacccacgccgccttctcccggtgggccgccgggctccccatcggccaggcgacggcccccgaccaccccgccaggcccgataagcccctcgtggtgacgcagaaggagattaccacgcacaaggagatgggggtgccgctcaacgcgtacatgctgcacaacctggcgcacgtcgagctcaacgccatcgacctcgcatgggacaccgtcgtgcggttcgcgccgctcagggatacgctgggggacggcttcttcgcggatttcgcgcgtgtggccgatgacgagagccgacattttcgctggtactcgcagcggctaggggagcttgggttcagttatggtgatatgcctgttcacaatcttctgtggagggagtgtgcaaagtcctcaagtgacgtttctgcacgattggcagtgattcctttggtccagaaccttgataggaagccagaggtctcgatgctggaccaagacattgtggcaagagtagcagaggaagagcttgcacatgtttctgtaggtttgtattggtttctcaaagtatgccaaatgatgggtcgtgaaccaggcgatactttcaaagacttgataaaggaatacagtgttgtactgaagggtccatttaactatccggctcgtgatgaagctggtataccccgagaatggtatgacgagaagttcaaacaagaagcagcacaaaaactttcagaggtccatgatagattagcttgtattgttgagatggagaaagagagtgcaagtttgaatgactaa

SEQ ID NO: 26065 - DNA, 145 bp, Zea mays
  Peptide Sequence Number=SeqID_69440
atggaactggatccggccgctgaggatgatgcggaggaataccgacttgaggcacataacgaggagcaggatgcaagggcctttctcggcatcggcaacgatgatgctcctgttgctggtactggtgaaagtcgcctagaggggg

SEQ ID NO: 26066 - DNA, 360 bp, Zea mays
  Peptide Sequence Number=SeqID_69441
atgaccaactctttggtgatgaccaactctcggatgataaccaactcttggatgaccaactccgccgaccaactctatgaggtgcaccggatgaccaactctccaatgatgaccaactctccgatgatgaccaactcttggatgatgaccaactctctagtgatgaccaactctccaatgatgaccaactctccgatgaagaccaacgttccgatgaccaactccgacgaccaactctctgccaatcaacttcgtccgaccagttctccattgagcaactcggcgaggcagagatctaagtccagcactactgatccacgtcacctacgactggacgtgtcaccatcaagccacgtctag

SEQ ID NO: 26067 - DNA, 1344 bp, Zea mays
  Peptide Sequence Number=SeqID_69442
atgtccacagtgacgacggcttctagtccacccacgtacgcttataaatggcagcgtctcttcgctgaacgctgcaaccaagcacggataggagtttcaggcattccgggcgtcacgcatctgatcagaaatgctaagggcggtggcgttcgccgtcttcctcctctctccgccactcggcaccacggctgttcgcagagctacaacgcgatctacagcttcggcgactccatcgccgacaccggcaacctctgcacgggctccggcggctgcccgtcgtggctcaccaccgggcagccaccctacggcaacacccacttcggccaccccaccggccggtgcaccgacggccgggtcatcctcgactttctagctgatcactttggcctgccgcttctcccgccgtctaaggcgatcggcgccggggacgtcaggaagggcgcgaacatggccatcattggcgccaccaccatggacctggagttcttcaataagcacggcctcggcagcagcatctggaacaatgggcccctgggcacccagatccagtggttccagcagctcatgccctccatctgcggcgccgattgccagagctacttcaacagctccctgttcgtcgtgggcgagttcgggggcaacgactacaacgcgccgctcttcggcggcaaggccatggccgaggtcaggagctacgtgcccgagatcgtggaccggatcgcaagcggcgtggagacgctgatcgggctgggcgcggtggacgtggtggtgccccggggtgctgccgatcgggtgcttcccgctgtacctgacgctgtacccgggctcgagcaaggacggcgactacgacgaggccggctgcctcaggagctacaacaacctctccagctaccacaacgagctgctgaggcaggcggtgtccgggctgcagagcaagcacggcggcggcgtccggctcatgtacgccgacttctacgcgcaggtcgcggacatggtccggtcgccggagagctacggtacgtacgcacgcacgcacggacacgggtggaggtcggtgacagcaagctgatcgatgatggatccattgattgggcttgtgtgtcgtctgtgatggagcatgcagggctgcaatacgggctgagagtgtgctgcggcgccggcgggcagggctcctacaactactacaacaaggcgcggtgcgggatggccgggtcgagcgcgtgcggcgacccggagaagtacctggtgtgggacggcatccatctcacggaagccgcctaccgttccatcgcggatgggtggctcaaggggacctactgcagccccggcatcctgcgtcgttga

SEQ ID NO: 26068 - DNA, 396 bp, Zea mays
  Peptide Sequence Number=SeqID_69443
atgagacgacctcacgccgccgccgccgctaccgctctcgctgccctcctcctcctcgtcctgtgcctcgccgccgcgttgacccgccacggcagcggaatctgccagcaggcggggaggacgccgacgaggaagatgctgctggccatgacaataagcttcgacgacgacgacgctgccgcctcgccctcgccatccggtcaccaccgccatcctcaccaccatcaccaacaccaacaccaccaccaccaccacgcgggcaggcggcgatggaaccggcggcaggggaccattccaccaccgtcagacgatgctggcgaggcccaggcggtcgacccgcgctacggcgtgcagaagcggctggttccttcgggccccaaccccttgcatcactga

SEQ ID NO: 26069 - DNA, 1164 bp, Zea mays
  Peptide Sequence Number=SeqID_69444
atggcgaggcggcgagccgcgctggcggcgctgctagtgctgctgctgctggcggcgtgcacggcggcggcggccgccgtgaccgtgtcgcggaagcagcggcagcggcaccaccccggcggggcgtcggcgtcggcggcgcggtcctgcgaccccttcgcggcggcaggcgcgtgggtggaggacgggtcgtacccgctctacgactcggcgcgctgccccttcatccgcgacgagttcgcgtgcgcgcgcttcggccgccccgacacggcgtacctccggtaccggtgggcggttggacgcgccgtgcgcgcaccccgctttcgacgggggccgcgctgttcgggatgtgggcgcggcaagacggccatgttcgtcggcgactcgctggcgctcaaccagtacgagtcgctgctctgcatgctccacgccgccgcgggccccgccgcgcggaccaccctgtcgccgccgtccgggaagatcgacccctcctccaccgtccgcttcgaggactacaacgtgaccgtcgtgtactacctgacgcactacctggtggacctcgtgacggagccgcacaccggccggcgcgtcctcaagctggacgccatcgaccaggcccgcgactggctcgccgccgacgtgctcgtcttcgactcctggcactggtggccgcgcaccggcgccacgcagccctgggactacatccaggtgggcgacacggtggtgaaggacatggaccgcacgcaggccttcgccaaggcgctgcacacctgggccaggtgggtcgacgccaaccttgtccagaccgacaccaaggtcttcttccaggggatctcgccttcccactacaggggccaggactggggcgcgtcgccgaagaagacgtgcatgggggagacgcggccgctcaacgccacggggccctacccgggcggcccgatcccgcagcaggcgatcctgcgcggcgtgctggcggccatggccaagcccgtctacctgctcgacttcacctacctctcgcagctgcgcaaggacgcgcaccccaccaagtacgacggcggcatcttcggcggcgactgcacgcactggtgcgtcgccggcctccccgacacctggaacgtcctcttctacgccgcgctcaccgccgggcaggggcacaactga

SEQ ID NO: 26070 - DNA, 2262 bp, Zea mays
  Peptide Sequence Number=SeqID_69445
atgccgccccataagattgagactgggcatcaagatgtggtccatgatattgccatggattactacgggaagcgcctagctacagcctcctctgataacacaataaagatcattggcgtaagtggaacctcacaccagcagcttgcaaccttgagtggacaccagggcccagtatggcaagtcgcatgggctcatcccaagtttggttccatgcttgcatcctgcagctacgacggccgggtgatcatctggaaggaaggaagcaagcctgatgaatgggcactagcacacacctttgctgagcacaagtcctccgtgaactccattgcatgggcgcctcatgagctgggtctatgcttggcttgtggttcatcagacgggaacatttcagtcttcgctgctcgttctgatggagcgcaggatcttctggccagtttgagtatgttcagaaactcgctttctggtggctgcgacaacacggttaaggtgtggaagctcaacaatgggagttggcggatggactgtttccctgccctacagatgcacaaggactgggtgagagatgtcgcgtgggccccaaacctgggccttccaaagtccaccatcgccagcgcctctcaggacggaacggtcgtcatctggacagcagcaaaagaaggtgagcagtgggacggccgggtgctgtatgatttcagaacccccgtttggaggctgtcgtggtcactgactgggaacatactggcggtttccgacggcaacaacaatgtgaccctgtggaaggaagctgtggatggcgaatggcagcaagccacctaccttaaccaccgtgctgcaccacctccactcccccgtcactccggcgagcgagcaggagcagaccgatggcgtctcccgctgccgtcaagaaggtacgcactcgtctctggcttccttgtccgtaccggcactacaccgccctcgcacggaggactactgcgcgttgatgtgccgtgccgcaccgtacccgcgcaggtgctggtgccgatcgcggcgggctcggagcccgcggaggcgttcgtccccatcgccgtcctccgccgcgcgggcgccgacgtcaccgtggcggccgccggagccggaaccggcctgcgcgtccacgctatgtacggggtcaccgtcgtcgcggacgccagcgtcgccgactgcgccgacgcctcctacgacctcgtcgtcctccccgtaagaacccgccgccagccagagacactagcgcgacctatgacgctcaacgacgcacagggcggcgtccccggcgcggacaacctgggcggctgcgcggcgctggagggcatcgtgaggcgccacgcgctcgggggcgggctctgcgccgcccatctgcgccgcgccgccgctggcgctggcgcgctggggcctgctcgacggcgtcaaggtgacgacgtagcaacggctcacccggagttcgtggacaagttcccggcagaggtggccggcgtggacgcgaacgtggtggtcgacggcagggtcgtgacggggcgtggccccgcggcggccatggagttcgctctcgctctcgtggaccagctctacggcaagggcaaggtcgacgagatcgccaaacccatgatggtcaggtacgaaccagggtacgccttcgaggaactgaacccggttcagtggcggtgcagcggcacgcccagggtcctgataccagtggccaacggcagcgaggagatggaggtgctcgtgaccgtcgacgtgctgcgccgggccaaggcggacgtcgtggtcgcgtcggccgaggaggtcgtcgtcgcgcgccacggcaccaggatcgtcgccgacgcgctgctgcaggacgccgccggccagcagttcgacctcatcgtcgtaccggcaagtggtcgccagctgctatgctcctcgggtggcatgccgggcgtgaagacgacgctggcagacaaggtggagctcatggcgctgctgaaggagcatgcggcggcgggcagggcgtacggcgccattggcgccgccacggcgcaggtgctggagccgcacggcctcatcgggggcagcatgaaggcgacgacgtgcgcgtccagggcggaccggcccagcgagtgcgggagcagggtggtggtggacgggaacctggccacgagcgggagcaccgggacggccatggagttcgcgctggccgtcgtggagaagctgctcggccccgaggcggcgcgggaggtggcggaagccctgctcttcgtctga

SEQ ID NO: 26071 - DNA, 480 bp, Zea mays
  Peptide Sequence Number=SeqID_69446
atgggcaagagcaagaagggtggtagttcttcgcatcactccagtgataagcggaagcgtgagccgactcctccctcgaaggacttcggcgactcgaagtacttggaggaggagttctcctctgagtccgagggctcaccggtccattcctctcccccggcgtcgtctgatgactcagacgactcccaggggatcaccgcagaggtgtggacctacatccgggctgtcgagcacgccgggctcgagggctcggatgagtcggagtactcctcggacgaggagaactcctcggactcgtccgaggagggcggcggcggcgatggcggtgatggagacgatgacggaggcgatggtgacggtggcaaaggcgatggcaagggcggtggcggcgacggcaaaggtggcagcggcgacggcggcgctggcagcaagggcagcagcaggggcagcaacaagggcagcagcaaggccagtggctag

SEQ ID NO: 26072 - DNA, 609 bp, Zea mays
  Peptide Sequence Number=SeqID_69447
atggaaataccctcactcggcggctggactgtgattctgaaagtgttttctcgcgtgttccgagtgacaggggtgctcctctatttaacctctcgcagagggaagctgaaggagaaaggtctcgccgagtcaggccaagagtcggagacaaactctcttcctcttccaaagatagaaggtgatgatcgtgcccaatctcgtgctcttttcataatgtattcttatcatttttggatgctgagaaaatggatactattccatggaaaagatgaagctctaagattgattagttggaataacagtgatccccatttgtctaatgttttagccaatggtgaacacatcaaaaggatatacaaggacgcggagcacgcggatatcgccgacatcaacacgctcacagacgaagtggaggtctatctccatgcacttcgtgcactggtgctgcacgggattggtggagaggtagatcgcgctgatgttgtctcagtagactgggctgacacatgtgagacgggtgtgaagcttctgaagcagctgtcggagctaggatgcctcggtcacgccattggccacaacgcgttgaccgttttttcacgtgtcaaatga

SEQ ID NO: 26073 - DNA, 240 bp, Zea mays
  Peptide Sequence Number=SeqID_69448
atggcccaatggcacattttcctttcactagggcagcagggctccaacgatgttgcgattgggaagcagctgcccgcgcaggaaaggcagggatttgggttttgggaggagcagatggcggcaattttttgcgctgcgcgacctgctgttttcggcggcggagaaatagggaggctagatgaggaacggttggatagtaggaatatggaagagattataccgttgaaactggcactttaa

SEQ ID NO: 26074 - DNA, 189 bp, Zea mays
  Peptide Sequence Number=SeqID_69449
atggatttaaagagtctgtacaaaaaagaaattgatcttcagattgagcttgagaatgagcagcaagaaaaaagagaacatcgacaagagttggataacttgaagatggaatcagaaacttcaagagtaaaacattctgaggacatcacaagaaatgtatgccctccttcgccagttcctgagctttaa

SEQ ID NO: 26075 - DNA, 471 bp, Zea mays
  Peptide Sequence Number=SeqID_69450
atgggccgcaggaagagaaagacgggcgaccgtcatggaagggtcaagccatcagtggagctggaaggaagcgaagatccggatcagattcagatgggggatctagagatcgtgtgcggcggtgacggcgatccgctgatgcaagaaacagaacatctcgacccgacgaggatcgtcggcgatgagttggatgaaggccaggtccgatctgcctaccttgtggcatgccactgggattggtccaggaattccatgccctacgccgtgtacaagatgggcgtcgccacttcctttccttcgcgggtgaagcggaagcgcctgcaccgagttacctgtctggctaccgttgctggcggtatgaccttcacgtccctgcgctggactcttcatcctaagaaggtcgaattgtttccaaaggaggcacatttaaacctgagaacatatcagacagagaacctttcatccctgtag

SEQ ID NO: 26076 - DNA, 876 bp, Zea mays
  Peptide Sequence Number=SeqID_69451
atgcagttcttaccctttcgttgtgttactcaggtggagcatcttcaaacaagaacaaccgggtacggttcctcaaatcctctgtttggtggagcatcttcaaacaagaacaaccggatctttttcttccttcatgccattccagggatgcttctagctctggtactcttttttgataacaggaagttcaaggatgtgaattttccaccagctatgtctcccccaaaacgggtatggtattggcttggtagctgcactagatgctgggatcttgtcttagtctcctcaacagccttactgtacctggtgatgtccatgtcaactgggctagccaacatgagtttgaaacataacagcattctcactgggcttctgtccttcatgatggacgatgcactgacaactggaagcatcaagacatcagatgcagaaaagaggcgtttagcaaaagcttcccttgcctacaattgtgagagcaaaaactgtccgcacttcaggaaacttttcccagagtatgttgagaagtacaatcaacagctacaattggagaacactgctgcagagccggtgcctcaggagaatcctgcacctgctccatcccctgctgcccagcaagccccgaccgtggccaatagggcacaaccactggcggaggcgcgccgtgacaagaaccagaagaaggcggtgcccttctggatggtgctgagtgcaaagacaaacctgaacgtcgagcaggttttcttttctatagcaagggatatcaaacagagactttcagagactgattccaagcctgaggatcgaactatcaagatcaaggctgaaggggaagctgatgcagcagaggcgcagaaatcagcttgctgcgactcttga

SEQ ID NO: 26077 - DNA, 498 bp, Zea mays
  Peptide Sequence Number=SeqID_69452
atgtgcctggacctgtacaaggaatatggcaccacaatggctggccttaaggcattaggctacgaatttgacaacgatgagttccatgcaactgttcatgatgatatgcttgaaaaaatggtcacggagaccattttttatcaacctaaaacctggttaccgcaggtgttcacaaattctgacaaagctcacgcggaggaagctctatgcagacttggtttacagggttgcttcgatggtgtgatctgctttgagacactgaatccctgcaatggtccgagcgcgttcggcatgctgttcccagatgaaacgttccccgacttggctgatctgaatgaatccgatgggttcagacccatatcacccatcctctgcaagtctgcaagccctccgttgaagccatttcctgtgaagaagcaaactattgtgagggatcacagcgacacttgtcgaacaatgaggagaccattccaccttcagaatctcatgctgttttag

SEQ ID NO: 26078 - DNA, 1227 bp, Zea mays
  Peptide Sequence Number=SeqID_69453
atggaaggtctgttgccaaatcccgcggatggaaggtggcggatgggaggtggcacgcaccttccatccccgcggtgcgcaccttcatcctccgcgaccgcccgcggatctccaaagcagcacggcgcacgtgttgagggcgtggggaggaggtgcgcggccgccatcaacgctctcctacccatctggtccgcgatcctcgctcaccttccatcgacgacgccgcatcgacctcggcaacctctgcccacctacaagaacaaccggtttggttggtgcaaggtgattcttcactgtgacggcaacgccaacagcgagctgggagttgatatgcttgtgtgtattggtggtttgtattggggtataaagtttatatgcattctaccggttttgatggaaccggtcgtattgaaccgtgaaagagccgcaacggaccgcctaaaaaggatgcctatgttgttcgacgactaccgtgatgaagatttttatgggctaccgcggaaatacagtattgtcgctcgggtagaagttaaattcccgattgaaccacgttttcgtgacagacaacatttcgttttatctgacatcaatggagccaagatcgaggccataacatatatgtatgagacagtcaaacatttcgataatttgctccatgaaaagcatgtttacaagatgcataatgtaaaattcagccttcatccgggtgaatttaattttcgtcatctaaatggttccatggaattgtatcttgaccaacaaactatcgtggagccatacacggttccaattcaaatggcgccattcccaaaacaaatacttttgaaccttgctgatgttgccgagttgccaaacaggactttagtcgacattatggctattgtagtccactttgatacaattcatcgcacaatgtggggccctttcagaaagattgttataatggatgctaggggatatttacatatcattaaagtttggggtgacctactaaacaaaaatgcactccgctgggtgttggctaaggaggattatggcataataattggtactatgtttagacggttcagaagacaagagtgcctcgagtcttcggatcataccgcaatacacttcaatctgttccatcacaacacccatcattttggaccaattcaaaaagctttggtggcgcggaacaaccgtcagtttgttgttacatttcttgaagaacaaaggcgtagatag

SEQ ID NO: 26079 - DNA, 585 bp, Zea mays
  Peptide Sequence Number=SeqID_69454
atgggatctacagtcaggggctcttatgcgattgtgctgggccaaaggagtatcggacgaccaggggatctttacactaaagggggtctttacaataaagtggacgaccagggcattggacaaccaagggatcgcgacttcccattcatttctgccgatgagacgaggcagggtagcactacaagggctttacaaagttccattagcttcagaaaactcgctacggtttctgtgaagggaaatataggaatctctcgtccgaaatgccatcgcagcatgatcgacccgagaacctccctattccacagctcctctaccgcccttgcccttttggaaaacggcaggggctcttatgcaattgtgccgggccaaaggggtatcggacgactaggggatctttacactaaagtggacgacgacgggtccttccctgtgctggcgacggcgaggttcagaggattaggcggctggcaccaggcgtggattgcggcgggatttagatgcgcgtcggggctcagtcttatacccagggccaatgccaaccacccgaccaagatccatggagatccccagggcagaatttag

SEQ ID NO: 26080 - DNA, 276 bp, Zea mays
  Peptide Sequence Number=SeqID_69455
atggcgacgcacaaaggtgaacgccgagtcgccaatagaaaagtgccggtgcaggcaggggatctacgagctctagggccatggcaccacctacgagaagctagagaagtcggtcaggagtaccccaacaagaggaagctaccgttcctggccctagaaagcagcttcaagatcgttatcgacagcttcggcaagggtgcatatttcaatataagggttgtacgggatggacgttgccccaattgcaatgtttggagcaactttgagcagtcatag

SEQ ID NO: 26081 - DNA, 615 bp, Zea mays
  Peptide Sequence Number=SeqID_69456
atggagggtaggggcatgagcataataaaggatggagctaaagcaatgattgtaaccgacaagggagagaatgcaaccaaggtcaggataggtaaaacaccattctcaaatcgagatggaaaagatgatatttcaaaaggtaggcataagataacatcatggaaagatctagagattacaaaggtgcaagataagcatcatggtaaagatcaagggatgacaagggttaaggtgataacagacaaacataaccaaggatgtattttagacaaaatttgtgaggcatcaaagaaggggaagcaatcaatggtgaaaggggaagcgatcaagggagagataggaaactcgccgctcttaaattgggtcaaaagaaaggggaggcttttaaaggataagttcaaggataggagattggagattttagataacagacataatgtaatcaccaaggtaagatcgagggatgagaaaggtaagcataaaaaagatgagagtatgagagatttcaaggagatgagcataccaataccaagggacaagaaattgccgaaagatagcgacttaacaacagaagaggaaagggtctcaaaagacaggaagatcagggacatataa

SEQ ID NO: 26082 - DNA, 922 bp, Zea mays
  Peptide Sequence Number=SeqID_69457
atggttcgcatctggttttccttccaaaaccgggatcacctattcaccccctctaggtgctctcagtcccaccaaggcatcgatcctgcaggtttttgttcaagccaatcaacacctgtgcttgtcatccaatggcacagcaccacctcccgcagatcgtcgcttagccacgtcaccgatctgcgcggtgcctccatacccaatcctgcccgctccacgaccctcccacggatcgaatcccttggcttctccgaattcccctcctatataaatgcatgcccctcactcctcaatccccatcacacaaaatccccaaatcactcgaacattcgcttcatcaatagctccttcccctccgatgtcgaagcaaccatatcgggccgaggcaagggaggcaaggtgggcaagggcggcgccaagcgccatagaaaggtgctcagcgacaacatccaaggaatcaccaagcctgcgatccggaggatggcgaggaggggcgatgtgaagcgctgctacctaactcctcagcctcgagaattttcagagccggcgcgctataattcacaggactgtacggtgtacaccggacagtgtccggtgctccaagaggacgcggctctggaacttggcagcctcgggaaactgcaacggctgctccgctataattcaccggacatgtccggtgtacaccggactgtccggtgtaacagcggggcaacggctatttcggcgccaacggctacatgcagcgcatttattgcgcgccagcgcgcgcagaagtcaggcgtgcccatactggcgcaccggacactctacagtacatgtccggtgcgccaccggacatccaggcgggccctgaagtcagaactccaacggtcggaacccaacggctttggtgacgtggctggcgcaccggacatgtccg

SEQ ID NO: 26083 - DNA, 123 bp, Zea mays
  Peptide Sequence Number=SeqID_69458
atggttggtttacaggtggtgatgaggatgatggtttttgattatgattatggtaatggtaaagaagaaggcgtcgaggcggatcttcgggagttccacgacttcggcgagttcgaggattag

SEQ ID NO: 26084 - DNA, 924 bp, Zea mays
  Peptide Sequence Number=SeqID_69459
atggcgccccgcatactctgtgacgacggcggctctcagcccccttatggaagcaagaggacctcccccggcccagctgtcctcgcgcgcgccgcagccgcgcccacccctgcgtccacagccccgctcgcgctcccaccgcgccaccagcccagccgacctgccccacccgcagcccagcgcccctcccccaaccctagcacacgcagcacgcaagccgccccctgcacagtcgccacgcccagcatgctctcagccgccgacgcaccccacgtcgcccacgtcttcccccaaccgcccatgtcgctcccacttccctgccacgcgcgcaagaagccgcccagtccagtgcacgtcgagttcctctgcggatcgagctttcctctaatggcgtcgttgctccacccttggcctgctccgtgggcacgaccgactttcttctcccctgagcaggcgtggccatatctagcccctgtccgcgtgccggcgagcttccccagcgtggcccgcgtagcgcggccagctcggcgccccggcatgtggcgcggccaatcctggcctgcccgtggtggccagggtgagcccaccccctccgttgctggcatgccctcccctatgcggcggactgtcaagccctttgtgcacgatttcgttctccctgcgaaggctggttcctgtgtgtcgattgaagaagagcacaggaaatcccaccatccggatcttctgtggttgcgccctctgcgactcctgattgcgatatgttttcgagcttcaagggatcgaagatcaagcttcgacgaccaagtgattaagctctctgagttctatgaggttgaagaacctgagcatctgtttggtgaaggcaagtgttctatgacccattatgtcccattcacttataattcactgtcccgcattacttaa

SEQ ID NO: 26085 - DNA, 450 bp, Zea mays
  Peptide Sequence Number=SeqID_69460
atgggacaccggtcttgttccctgcggcccgagtcagctcagggtagggtgatgatggcgcctcctgttgacgtggctggcctgcgccctaggttgggcgatgcggaggctcctccgaagccgaggtcgagtctgtcttccatggccgaggccgagtccgagcccctgggtcgggcgaggcggaggtcgtcggcagaggccagggcggagtccgagccctggggtcgggcgaagcggagttcgtcgtcttctggggctgagcccgagtccgagcccctgggtcgggcgaggcggaggtcgtcggaagaggccagggcggagtccgagccctggggtcgggcgaagcggagttcgtcgtcttctggggctgagcccgagtccgagccctgggtcgggcggagcgaaatacttcctcttctgggtttgatcccgttaaccgaccacggttag

SEQ ID NO: 26086 - DNA, 887 bp, Zea mays
  Peptide Sequence Number=SeqID_69461
atcgcaatcgggagtcgcagagggcacaaccacagaagatccggatggtgggatttcatgtgctcttcttcaatcgacacacaggaaccagccttcgtagggagaacgaaatcgcgcacaaagggctcgacagtccgctgcgcaggggagggcatgccagcaatggagggggtgggctcaccctggccaccatgggcaggccaggcttggccgcgccacatgccggggcactgagctggccgtgcaacgcgggccgcgctggggaagctcgcaggcgcgcggacaggggctggatatggccatgcctgctcctgcaggggccacgcgcagggctccctgcactagctggccgcgccattgcgctggcaggccatgccaccgcgtgcacaggggctccttcttccacggacgggacaaagaatagagggagaggaggccggctagcagggatctcgcaggggccatgggggagggggtgctggtgctctagaccgggggctgttcacggccaagccgtaggggcgctcctagccaccagtagaggaggcgcgacgcaggggccaattcggactggaggcacgcgcaagggagctagccgcgcgcaggcctctcttgtcgcgatttggacagcgaggtcttggcaggactgggctcgggcgcgcgcccccaagggcctcccggccgtgacgccgtgtggggccgtgcgacggagggaaggggagccgcacaggaaggggttgggagcgggtcggctaacaggggaaaataaagtcagtcgcgcccagggagcaggccaagggcggagcaacggcgccattagaggaaagctcgatccacagaggaacttgacgtgcactggactgggcggcttcttgcgcgcgtggtag

SEQ ID NO: 26087 - DNA, 300 bp, Zea mays
  Peptide Sequence Number=SeqID_69462
atggcgagctcaccggtgctcgtcgtctcccccatcctcctccctcccccgagcgcctataaaagggcccgctcgagccccgtcttcgccacacaactccagccatccccactgccctcctccccgagctattcaagcaagcgctgtcgtgctccctgccttgctccgctatggccgaagctccgccacacgctcgcgatcactagacaccactttgcctcccctgtcgtggccggaaacctcaccggcggcttcgccgccgcgggcacccgccaccgcgccgtggaccgaccgccatag

SEQ ID NO: 26088 - DNA, 189 bp, Zea mays
  Peptide Sequence Number=SeqID_69463
atggggagctcggccgaaggggcgacctgggactgggagacgtcatgggaggacgcgcgccacgggagcttggccggacgcggcgaggaagaagacgagggcgcagagaggagcgagggcaagcagggcattcgggcgctgcagcagggaggaaaacagagcttgcggctaaatcacacatatttttga

SEQ ID NO: 26089 - DNA, 354 bp, Zea mays
  Peptide Sequence Number=SeqID_69464
atggcgccctgctctgtttactgcttgtcgcgcgcttggaatacttgctggcgctcagccccaccgtgcacagatgtggttccgtcgtcaagccaccgtctcgaccttgttgtgcatgccgctgtgctgtctctgtcgatctgctcgccgtggcatggtcatggaacttccttggcgccgtgcgcgtcagatcgttgggtcgcgtcctgctcggttcttgtgccgttgatttggagctccggcgcgggctcttctctggtgctcgtcggcctcgccattgttgtcgtgatcgcgagtcctgttgtctccctgcgtcgatctctgcctgtgctcgagccatgccactggcagtag

SEQ ID NO: 26090 - DNA, 651 bp, Zea mays
  Peptide Sequence Number=SeqID_69465
atgaaggggagctgggaggagggcagcgctagcggctgcatctcgaagaagaatagggcggcgacggcacatggaggaagaaggtgtggcggcgccaccgactgcagcgtggcccagcgtgcgacagtgcccgtgggagacgacggcgtgcggttctcgttggcgaagggcgtcgccgcgggagggagagagcgcggtgggtgtcggcgcggcgaggaagaggatgaggtggcggtgcagccaggacactatggcacaattcttatactgttctttctatacaaatttgggcaaagtggaaacagatacagcatggtgagcaggaccagttgggcacatgccccatcgactgcgggtgcatcagaggaggcgccgcagtttttactcactaaacttcccaggcttgctctcctcagtcctcactcctctcctacaactccactgtatctgatacgtggcaagcaaggatcgggttcgctggagtcaggacaagccgtcaggatggcgagcctgacagagcaggtcaagaaggacgagctgctgcggactgcagttggatttggactgcagctgtgccagcaaatatgcggcgcttccatttgcttcaacgaactccaacctgtaacaaagaaggcgctggcatatctttag

SEQ ID NO: 26091 - DNA, 1323 bp, Zea mays
  Peptide Sequence Number=SeqID_69466
atggggctggccggccggcacctcagccgcaacaaggtgctcttcttctccggcgcgctcttcatctcgcttgctgtcgggatccacctatccccgtaccccccttccctttccctgccccacctcgcctcctttttactcctcccccaccctggctccgcgtccgcttcctccgggtcttcctgcgtccagttcctgcaccgcgtctcgtggtctgacgccgccggagccgccgacaatggctcgggaggcggaaaagcgcgggcgtggtcgtggccgccctcgctggcgtccgcctgcgggcgcggctgctcgtgctcgcgcttctccgcctcctgctcgacccggccgcggcggcggccgccgagccggagctcttccgccgccacagcgactaccgcgctgccgtccccgcgcgggacatttccgtggacttcgtctggggcgcccttcgagagcaacctcacgcgtctgctccgcgaggatctgcgcctcgcgccgcgcctccccgacgtgctcgtcctcggatccgggttgtggcacatgctccacgtcacggacgccgcgagctacggcgatgcactggcgtccgtcgcgggcgccgccaagtccctccgctcgcagcttccggagccgccaccacatatgttctggcttggcttgccgcacctcgtgaaccacatgctcaacacagacgccaagagggcacacatgaacggcaccatggtgcatgcctatgatcgtgaggtcgatcggaggggtgttttgcgcggtgaaggcggctcattcctgctgcttgatgtggggaagctcacccaggggtgcgggcagcaatgcacagctgatggtatgcattatgatggtgatgtgtatgacgctgtcatgcatatcatgctcaatgcactgctactatacacgggagacattgtagacattgccctcctttatcagaggtttgaaaacgtcagtgagtggaggcatgcttcatgtagtaagcaggtcgcgtacctcctcgtcgatgaggaccatatgagcatggaaaagcttatactcatcctcgggatcataaatttttcacagacgggagacacgctcctcctcctcgtgcacgaccgcgacgccgcgccacgctcccagctggtcttcttctccatcggcggccttcttccgtcgaggccgaaggcactcctctgcctcctcaccactacaccgtcgccgctggtcccggttccggtaccatccaagctgattgtgagctacagccaatggcttgttgagttaaactgtagtgttacattcaccgcttgttatgtcaaactgtaa

SEQ ID NO: 26092 - DNA, 471 bp, Zea mays
  Peptide Sequence Number=SeqID_69467
atgcaggcggcgtgcaaccgcgccaagtgggcgtgcccctctgacttccaacacacccagcatgggggcccacgcccacgcgtcatgcaaccagcgcgccggtcgctacatgcaagcaactgcaccgccgctcgcaccactgccacgcctcctcgactgcggaaccagtaccgcgactcgaggcaaccctgcggaccgggaaagggggataccccgaaaaggatccttctccgtgaaggaaacaggccccgagcctccctactgatcagaggttcgaaggctggcccctcggaggggttcaacagccgcctcagagcgcgtgggttctgcgcccactactggtcagaggttcgaaggccggcccctcggaagggttcaacggccgccttaggctactcgggctccgcgcccactactgatcaggggttcgaaggctggccctcgaagggttcacaaccgcctcagacatag

SEQ ID NO: 26093 - DNA, 1071 bp, Zea mays
  Peptide Sequence Number=SeqID_69468
atggcttcgcttgggcaacctgaccacttccagtctgaggcgacactcaacctggtgcgcggcctgctcgggagttcgggctccagcttcagcacctcacccccactccatcctccaggtggccatcttcgtccacctctgcgagatgttcgtgggggtggccccctgcacttccctcttccgccatttcttcgtgctgacgaggccgaattcggccgtgtcctacatctccaccctcggcggcgcaaggtgggagaactggcgcgccgattgggtgatcgccagcgccgaagccaacgacgccttgtcctgccgagcaacgggccaaccgtcgaccacaagctctggaggacccagccgtcgctatcgccagggctcctgcctgtgctggacaatatcgagaccttggcaaccggtggcctaacatccatgaacgtggtcgacgatttcctgaagcgccgggtcatgccgctgcagaggaggccatgccgtgctgctggttcaccggcccgaatgatatcgctggaggagcgcaccaaggcggcgtcccaccagttcgcctccaagcaatccgagcttgagcgggaccgcaaggactacaaaaaggacctccagaaggtgtacgcccgggagctggaggttggccggaaggagaagaggctggccaagaaggaggaggccttgaaccagagggaggaggtctttatagagctccaggccaagctgagtgccttgaacgaaatcctagaggagcagcgggtccagcagaccccggctgtggagaggctgcaaaagctgcagcgagagctcaagggcaaggcccgcgacgcttccctcgccgaggagaagcttaaagaaaaaggagagtccttagataggcgggagacggacctcgctaggcgggaggcagacctcgccaggcgggagaaggatctcgcctttaaggaggaaatgcttgaaaggcgggagaagttgctggccaagcatgagctcgaggcggaggagaaggagcggacgctggaggagcgggtccgccggttccaggcggcgcaggcggcactgaggccctag

SEQ ID NO: 26094 - DNA, 402 bp, Zea mays
  Peptide Sequence Number=SeqID_69469
atgtcggcgtcagtgcgctcaccctcggtgagggccgcaccgactgaggacctacgggcggagctcaaccgcaggcatgcgggagaggacgctccagtctctctggagaggcctgatgacctgcaggcagaactcaaccgtaggcgtgtgggcgaggatgctcgcgtctctctggagagggcgcgtgagtgccagcagaacgttgagggtcgcaacctcgacctagacttcttcgcggttgcgccgcaaactccaaggggtgcccgaattcaggtatacgtcatcgctattacggcagcaggtggagacactgctgtaatggcaacatacttccatgtagccttgtctgggccagcccagacctggctcatgaacctcaccccaggatcgatctactcctag

SEQ ID NO: 26095 - DNA, 204 bp, Zea mays
  Peptide Sequence Number=SeqID_69470
atggagcctggcggagggacagctatcggagcggttgagtccttgctgacgtcctcttgcttccgtaagggggctgagagccgccgccgtcacagggttgggcgatgtggaagctcctccgaggccgaggtcgagtctgtcttccgtggtcgaggtcgagtccgagcccctgggtcgggcgaggcggagttcgtcgtcttctag

SEQ ID NO: 26096 - DNA, 351 bp, Zea mays
  Peptide Sequence Number=SeqID_69471
atgtccggtgtgccaaccacgtcatcaatgccgttggattccgaccgttggagcttctgtcttctgggcccgcctggatgtccgccgctgcgttttcccgaggctggcgagttccggaggccgctcttccttggagcaccggacactgtccggtgtacaccggacagtccggtgaattatagcggagtgcctctggaaattcccgaaggtggcaagtttgagttggagtcctctggtgcaccggacactgtccggtgtacaccggacagtccggtgccccagaccagaggtgccttcggttgtccctttgctcctttgttgaatccaatatttgatctttttattggctaa

SEQ ID NO: 26097 - DNA, 192 bp, Zea mays
  Peptide Sequence Number=SeqID_69472
atgaccaccccaccaaccactcgccccgtcgcattaactccgcggcgggacaggcggcgcctctggcaggagaagcaggcgacgcttcgccttcgccataataaccgcgccaaaaaaagggaccgggaaagggtgataccccgaaaaggatccttccccgtgaaggaaccaggctccgagccaccctactga

SEQ ID NO: 26098 - DNA, 984 bp, Zea mays
  Peptide Sequence Number=SeqID_69473
atgtcttcgcgctcccttatgcatcgcgtctttccaccttccaagcccccggatggggcatacccgccgtctttccgcctcatcgttggaggaacgcaactccgtgggagttggtacctttcagccatcgttcggcttcaaggattttcatcacacagcccggttgcacccctccgctggtggtcacccaagacggtgacctccagcccctggatggggagaggcaagccgggctgtgatctcgatcccgccctcagcgtcgagggtgttcgtcatcctcactggggcggggagcgaggcgagccggggctctacctcctgcgcgggtcagcgggccacctcttcttccagcttctggtggtggcaaacaccctccagctctgcggaggaggtgtcctccagccatgccggggaaggcgaactgttgctgcccagctaggatgcaacattccaccctcttccttgcattcccggcgaggacggcagcgaggacctgccggtgcgcttgggagcggcccgctctttggctttaatagctggttcgcgtcccttgagcgggaacgcgaacgagagccctccggcggccgcgtccaacctgggaccatggctgctgctgcagaggtcactggcgggtcccccgactcgcctgttggttgtctgaaccgcttcaccaagcgtgagtcgccccgtgtaaaggtgatgagtgagccgaagcctcaggtggggctggcgccctcggaggacggctggccgaggccccggggtgaccggccgagccgcctgctcgggccggattcccggagaagatcctggcggcgatggcccgggcttggtgatgatgtcgtccttcagagcggagacccttggaccgtgtcgccgtccgaggccaggtcggacctcgccgaaagtgttgtcgatgccgaaggtgctgctgctcccttccagcgtcaagacccgagcctgcaggatcggattgtcttgtag

SEQ ID NO: 26099 - DNA, 168 bp, Zea mays
  Peptide Sequence Number=SeqID_69474
atggtgatgaacctggacgtagcggtggacggggaggtgggggctggtggtggtggtgcggctgaagggctgggggtggtggttggggatcgccgacttcctgataccaggttgtcaagggcgtcgggcccgaggggggtatataaggccataggccagggctactaa

SEQ ID NO: 26100 - DNA, 777 bp, Zea mays
  Peptide Sequence Number=SeqID_69475
atggcacctcctgttgacgtggtcggtccgcgccctaggttgggcgatgtggaggctcctccgaggtcgaggtcgagtctgtcttccgaggccgaggttgagtccgagcccctgggtcgggcgaggcggagaccgtcggttgaggctagggctgagtccaagcactggggtcgggcgaagcggagtttgtcgtcttcaggggctaagcccaagtccgagccctgtgtcgggcggagcagacccgagtccgagccctgggtcgggcggagcggagttcgccgtcttccggggcttagctcgagttcgagccctgggtcgggcggagcggagttcgccgtcttccggggcttagcccgagtccgagccctgggtcgggcgaagcggagtttcctatggtgcctgaggccgggcctggctgcctgtcagcctcgctctgtcgagtggcacagtagtcggagcggcgcaggcggcgctgtccttctgtcaggccggtcagtggagcggcgaagtgactgcggtcacttcggctctgtcgactggaggacgtgcgtcagaataaaggtgtcaagccacctttgcattaaatgctcctgcgatttggtcggttggtgtggcgatttggccagggttgcttcttggcgaagactgggcctcgggcgagccggaagtatgttcgtcactggagggggcctcaggcgagaccttcgtgctgatgggggttaccagctgagaattaggagccttgagggtacccctaattatggtccccgacactag

SEQ ID NO: 26101 - DNA, 636 bp, Zea mays
  Peptide Sequence Number=SeqID_69476
atggcgccccgcacgctctatgacgacggtggctctcagcccccttacggaagcaagaggacgtcagcaaggactcaacagctccgacagctgtcctttccgccaggcttcagcgctcctccgacggccacgacaccacacgaaccggaagttgcagagaagcgcaaccatcagctccatgtggatctgaccatagctcaagcccttccaactgccttggaaagtcgtgaagtaattgcttttgaagccctgaagcaagccaaggatgagcacgtccagaagttgattgaggcctacttggtcacccacaaccaacgtagagccctacggatccaagagcctgcttcatccaacccagttcaacccatgagagctgaagatcaccagattcttgaaggtcacccgatttttatcagaggagaaaataaggcttgggaactcccagaaggagccatagtcatggaaggaatgccagtctcccctaaggctatggataagcaagagcaccccaagtccacccaagatccaacgccgaagttttttgagcccctaaccatgaagaagatcccaacaccctcccttgagatcaaagaagaagctgcaagcaccccaccagcaccaccaccctctgagtag

SEQ ID NO: 26102 - DNA, 633 bp, Zea mays
  Peptide Sequence Number=SeqID_69477
atgtcgcggatggggttgcgcaaaaacagcaaacacccggagagcatcgacgtcgtgctgttcactgcgcagcacaaagcagcgagccgcgcggagacgtcggggctgctgctcacggcgagaaaagctgggcgcaggaaacagcagggggagggaggtcggccgtcgaccctagccgcggtcatgggcaagctggagagtgtcgtgccccctgcgcgccgatgtggccgagcaggagaggggcgtcgagctgctggtcggcccatgggaggaaaacagcaggggagtgaaggacgccatggctgggggcgcgtggagcagggagcccgctggtggccttgctgtcgtgaagcagggaagaagaaaggcagaggacgccacgggaggagcttctgcgcggcgtccattgcaggggaggtggagctcgcgcccatgggagaagaagggcaggggacgccatgggaggaggctgctgctcgcctgctgcaaggacgtcgagttggggaggctgagcgcagggaggaagaagctactgctgggagcgccttcactaggggagctcggccatggctgccctacacaagggaggccagggaggagggcgccatgggaggccccttgctcctgcgctga

SEQ ID NO: 26103 - DNA, 624 bp, Zea mays
  Peptide Sequence Number=SeqID_69478
atgagaaatcgcatccccgaggtcgctaaggcagcaatgattgaggacttctaccggggatccaatgactcggccttcgtccgagctatactgcaaagggcaccgaccacctccgaggagctgttccgggaggcgaacctctacatcaccaccgatgaacgggctcaggaccacggcgtgacgtggaccagcaaaccgacaagcgttgggagaagaggcctcgagaagaggtccatagcgctggaccacccctctctcatgcccgaggtgcaccccgcggaggcgagcggacattggacgacatccttgatgcccagtgcccgtatcacaaggatatgcgccacaccttacggaactgcagagacttcaagcattctgtcgggaatgtccgacccttccaacctctaccacctcccccgccgcgaggagggccaggtgaacctcgacgacctcagcaacaagaaggttgtggcagaacctcccaagttattgggcccacatgcacctgtccttgtcttaaagacctcagacggctatgcatgtgcaccagataacttaacaggatccgtccgattgccccaaggacattggatataccacttacaaccaggaccgcaagattaa

SEQ ID NO: 26104 - DNA, 144 bp, Zea mays
  Peptide Sequence Number=SeqID_69479
atgacggcgaccaggcgagatccgaacgcggcgaggagactccacgtcgcgcagagaagaacaaggagcaggggctgggcgtggcatggggagaggcaagagagaactcctgctagggagccgagcacagggagaaattcgtag

SEQ ID NO: 26105 - DNA, 432 bp, Zea mays
  Peptide Sequence Number=SeqID_69480
atggaccccggcgtggcccctgcgcgcgtccctgtgcggctcgcgctcccccgtttacccaacgcgttcccacgtgcgcagccccacgcgcgcggtggtgatgaggatgatggttatgattatgcttatggtactgtgactggtcagtctagccacttggagaggctgcaccaccgcctgcacgaggagcaggagcgtcgacgacaggagctggagcagcatggctcttctttctcgcttcaacaagaggtagagtctgtgaggagctgctcccctgtgctcccgctggaggtgccccctgcaccaccactgagcgccccagccgctggagtagctactggaggagacccagacgacggaggtagcgacaacagctcgagccacatcaccgacctttctgaggagcaggagttggaaggatgggttgcctga

SEQ ID NO: 26106 - DNA, 714 bp, Zea mays
  Peptide Sequence Number=SeqID_69481
atgcagatgtcgtccgaggcgtcgaaggtggcggtgccggagtcggtgctccgcaagcggaagcgcgaggaacagtgggccaccgagaagaaggagaaggctctggtcaagaagaagaagtccatcgagagccgcaagctcatcttcacccgtgcaaagcagtacgccgaggaatatgatgcccaggagaaggaactggtgcagcttaagcgcgaggcccgtttgaagggtggtttctatgtcagtcctgaggcaaagctgctctttgtggaagatcttgcagcttctgcgattgaggcagatgtgttcactaatatcttcaatggcgtgttcctcaaagtcaacaaggcgactattgacatgctacgcagggttgatccatatgatgcatatgggtacccaaacttgaacagtgtcagggagttgatctacaagaggggctatggaaatctgaacaagcagaggatccctctgtccaacaaccaagtcatcgaggagggcttggacaagcaaaaaatcatctgcgtcgaggatcttgttcacgagatcatgactgttggcccacacttcaaggaggcgaacaacttcctgtggccattcaagttgaaggcaccgctgggaggcctgaagaagaagaggaaccactatgtggagggcggtgatgccggtaaccgcgagaactacatcaatgagctcatcaaaaggatgaattag

SEQ ID NO: 26107 - DNA, 597 bp, Zea mays
  Peptide Sequence Number=SeqID_69482
atgtcgtgcagcgcgctggcttaccttaattcaatgccacaacgctttgatgccaagactgctattggaggtcggattggagccgcggaggccatcgacgaggagacgatgaaggcagtggtgaacatgagcactgtctggatgtctggcaaaacaaagcacatcaacatcgattcgcgtgggtcaacacaactcaacatcacgatccggaccgggcacacagagatctctgaagcttacaagatagaggaggttgtcgcttaccagatggaggaggagggaggtcggattggagccgcggaggccgtcggcgaggagacgatgaaggtagcggtgaacacgagcactgtctggatctctggcaaaacaaagcacatcaacatcgattcgcgtgggcacacagggatctctgaagcttaccagacagaggaggtggtctcttaccagatggaggaggaggtcagcgtagagcgacacgccatgggtcacgaagaccccggaatcgcgggggaggggatcatcgcgagcggcgcggggcagggggacgatggcgattgtctcgcgggcgggcaggcgagggagaggcggcggtcgtag

SEQ ID NO: 26108 - DNA, 795 bp, Zea mays
  Peptide Sequence Number=SeqID_69483
atgaagtctcgcatggcactggggttaccgagcccggagaaatctcaaccagagtcgggctcgtcatcttcctcggaacccgggggcccaggagccgaggcagacgactggggcggtggcgacgaggcgaacggctggggcggtggcgacgaggcgaatggctggggcagcgacgaggaggacatctggtccggcggcgtcgatgtggatggcaggggtggtgtgggcgtgttgcggggaaacgatgctcgtctttgtctcagacgcgaggtcgacgcccgacgtgtcccccgctggggcgccggcgtcgtcgactcgctcgacagccgacgaggtgccgcctccttcttggccatggttgccccgcctcctcctccatcggcggggaaggtgacgggacagacctggatgctgctcttccgtgacgcggggaagacgtcgtcgattccgccgccgacgggcgagctgaaggccgccattatcgttgtcgcgcggcggaggaaggagtaccatgtcgtagctgccgtcgagggacatgaactcgagactcccgaaatggagcatcgtcccgggctggagaggttgctggagactacccatctgaagcttgacgggaagatgttcgtcaacacgcagcaggcccctacctggcgcgccaactgtcggcgtttcgaccccggggggtccctggaccaacgagtaaattgtcgctgcgtgtcccagcccagatgggtcggcgcgagacggaacacaagggggaatgttggggacttgttctcaaatgctatgaattaa

SEQ ID NO: 26109 - DNA, 144 bp, Zea mays
  Peptide Sequence Number=SeqID_69484
atggccatgatgggttctacatcggacaagatgtacctctgccaggtgaggaaacagcagacttttgttgtttttgttctaaggtggtgcccaaagaagaacctcagcagtgaagccgcgggaggatgttggcctcccacttga

SEQ ID NO: 26110 - DNA, 618 bp, Zea mays
  Peptide Sequence Number=SeqID_69485
atgaacgaaaatggagatttgcaggatagaattgggattcagatgggtcaagttaagatggtagaaatcaaggaggccgcggaaaaagggagaaatgggaagaccgaggccgcggagaaggaagggagcataaatcacggactcatgggtatcctcagttgggacagtaaccccatggcaaatccgccaagaacagagttccctcggagggagaaccccgatggacacaaggtggagaagttcgggctcagagatgacggacatgtggttacctgcgaaaggcaactggctgttggggtcgattggaggaatcaccacggcagacgaactcgagcctttcctcttgggcgccatctcgattttaccggcgagcagagtgggaggcgaattgcagagaggattcagaagcaagaactagggcacggaaagcagaggcggctaaaagcgcagcacttatgggatattcccgagccagataccgtttcaaaaagcgaccagtcagcacccggcggttatttccaaaacaccagcgtgccacgtcatcacccggcagttatttccagaacaccggtgcgccacatcatcactcggctattatcctcaaagtggcccgcgtag

SEQ ID NO: 26111 - DNA, 327 bp, Zea mays
  Peptide Sequence Number=SeqID_69486
atggggtcgcttcgatcgaccacggaggtccttgccatgaacgttcccaggatcctccagcagcatggatcaagcagtctcattagctgcgagaagcagacgattcgaatcgagtttttatccttgcaagtgaccgcacttgtacccaccataaccggaatgggagaccacgtctcaggtcgcgtgaggggtaaagtctgcgggcaggttcactcagttatggtttctagtgtaggtttgaactacgacagtggtttaataatttccaaaaattttgtaaaaattacaggtatgattgatttttatccagtgaactacattgaataa

SEQ ID NO: 26112 - DNA, 231 bp, Zea mays
  Peptide Sequence Number=SeqID_69487
atggcgccccgcgtgctccgtgacgacggcagttctcagccccctacggaagcaaggagacgtcagcaaggtcccgtcagccccaacagctgtgcttctacagggctcaagcgctccttcgacggccacaacgccacatcaacagggctccaacacctctccgacagccacgtcggcatgagcttcttcgccttctatttcggcggtatcagcgttgacttttcgctgtaa

SEQ ID NO: 26113 - DNA, 936 bp, Zea mays
  Peptide Sequence Number=SeqID_69488
atggctgccccacgaaccactcgtcccgtcgcattaactctgcggcagggcatgcgacacctttggcaggcgaagcggacgacgcttcacctccaccataatgaccgcgtcaaaaaagggactgggaaaggggatactccgaaagggatccttctctgcgaaggaagcgggccccgagccctcctactgatcaggggttcgaaggctggcccctcggaagggttcgagagccgcctcagagcactcgggctccgcgcccactactggtcagaggttcgaaggctggcccctcagaagggttcgacagccgcctcaggccacttgggctccgcgcccactactgatcaggggttcgaaggctggcccccgaagggttcgacggccgcctcagaacacgcagagcgagggatgactctgggtacgtctgatacatgtccgaggctggggctacgctcccgaggtaccctaggacatttcagagaccagcaggagcgattctgtaacggaatcccatcagagggaggcatcgagccctcggaccctatcaaacgggaccgggaaaacagcgccgcctgcactgctccgactgctgtgccacccgccagggtgaggctgacaactgccaagtccggcctcaggcgccataggaagctccacctcgcccgaccccagggctcggactcaacctcgacctcggacgacggtctccgcctcgcccgaccccagggctcggactcaatctcgacctcggacgacggtgtccgcctcgtccgaccccagggcttggactcaacctcgacctcggacgacggtctccgcctcgcccgaccccagggctcggactcagccccgacctcggaggagtctccgcctcgcccgaccttgggctcagaccgaccacgtcagagggggggtacatcattaccctacccctag

SEQ ID NO: 26114 - DNA, 297 bp, Zea mays
  Peptide Sequence Number=SeqID_69489
atggcctttggtccgttggatcgtgaacagagggctacgattagatcgggtgtaccgcttcgacccctggactttccagaaattggcgcccagtccagagcacgtttaaaacatataaatgaattagtaaagatttttactgcatattttatttacatgcttggtgtgatgttgattttggctatctatgtatgtattgggttgatgcgagtagacgagcaagccactggggaaactgaggttcaacaagtagaagtagctgagcaggagctcattgaaggcaagttgtgcccttga

SEQ ID NO: 26115 - DNA, 351 bp, Zea mays
  Peptide Sequence Number=SeqID_69490
atgactactcctctcgacgccctgctcaccttgagcgtggccatggctgacctccactctcccttggtcgacgcaggcaccatctcttggcgctgcctgactccattttcctttctatgctctctgctctcttggccgctggcagtcagggcgctgactcctgctccctgctccaaaaatgcagcgaggtcccgtctccagaccagctccctgggtcagcgagtttctccatctccggcgccggccacttccttcaccgcacgacgtctccccccccccccacgctcgacctcagcagggatgcagcgatccccgtcgatttgcgcggccccggatgccatcgtttcctag

SEQ ID NO: 26116 - DNA, 2637 bp, Zea mays
  Peptide Sequence Number=SeqID_69491
atggccgctggagccagcgactactctttcgcggcggagtacgttggcccgccactcccctacacgctcccgcgcgccatcccgctcgacctctcccgcatcccgctcgccgcgctgtcttcctcgcccccggcctccccctccgcctcctcgtctccactccccgtcgttcgcccgctcaccccgtcctccctctgcaacgccatccacgcgcacgcccacccggcgccccgctccgccgtccccgcgccagccgggggaggagctgtggtggattcccccacctccgtcatcgagaaccaccacgctgccgcgcaccactccgccgagctcccctcttccccctccgacgacgaggccgcaggcgacggcgacggcgacggcggctccgaggcgctgccgctgaagcctcgccaccacccgcccgtggtcaccttcgccgagaccagcggctccctcctccagtcctctgatgacgaggacgagtatgaggaggaggacgacgacgacgacgatgccgacgcaggggagactcggccccgtgctgctgccggccagtcgagcggctccctctcccctgcgcactggaggggcggcaggacccgcggctgctacaggtgcggaaaaggaggcggcttctggggccgcgacaaggagtcgtgcctcgcctgcggcgcgcggtactgcgtggggtgcgtgctccgggcgatgggctccatgccggaggggcgcaagtgcctggagtgcatcggccggccagtggccgagtccaggcgggacgcgctggggcgagggtcgcgcgtgctccggcggcttctcagcgcagcagaggtggagctggtcatgaggagtgaacgggaatgcgcggcaaaccagctgcgggcggaggacgtgtacgtcaacggctccaagctgtcgcctgaggagctcgtggtgctgcaggggtgcccgtgcccgccgtctaggctccgcccggggttctattggtacgataaggtgtctggcttctggggaaaggagggacacaaaccacattgcataatcaccgcaaatctaaatgttggaggttctctagatcaaaaagcaagcaacgggaacaccggaatattgattaatgggcgagagattacaaaatctgaactgcaaatgcttaagttggcaggagtccaatgtgctgggaaacctcacttttgggtgaacgctgatgggacttaccaagaggaaggccaaaaaactgttaaaggaaagatctgggataagcctatagtgaagcttcttagtcctgttctgtcattgccaacacccaacaaagcagctaatcaatccagcgaagatgctgttgacatagtaaacagagccatccctgactacctggaacaaagaacaacacagaagtttttgttggttgggtcaggggcaagcaccatactcaagcaggcgaagttcttgtacaagactggcaagccattttcagtggatgagcgtgaagatctgaaacttatcatacaaagcaacatatacaactaccttggcatattgcttgaagggcgtgagcggtttgaagaggaatctttagctgatagaagaaaaaccagtcagtgtgacccttctagctctgggtgttgtgaacctggattatgtgacgaagtcactgagtactcccttattccacgtttgaaagcattctcagattggattcttaaagcaatggctttaggtaatcttgaagacatatttcctgcagcaagccgtgaatatgcaccacttgttgatgaattatggaaagatcctgctattcaagctacatatagaagaagtgaactgccattccttccacctgctgccagttattttcttgacaaggctgttgatatatctcgaacggaatatgagctgtcagatatggatatactgtatgctgatgggattacatcctcagatggggtagcatcaactgaattctctttccctcagctgtctttgggtggactgggtgttgatgagcccgatgcacaagacactttgctaaggtaccaattgatcaggataaacagtagaggtttgcatgggaactgcaaatggctgcaaatgttcgatgacgtaaggcttgttatcttctgtgttgctgctagcgactacgatgagtactacgaagatgcaaacggtaccattgtcaacaagatgatagagagcaggcagctgttcgagagcatcaccctccatccaacattcgagcaagcagacttccttctgctcctcaccaagttcgatctcctagagcagaagatcagcagttccccgctgacctcgtgcgattggttcagcgacttcactcccctgatcagccgcaacctcctcaacggcggtggcggcggcggccgcaggactgcgcgcagcagcaccggcgcgacactgccccagatggctgcgcactacatggcgaccaagttcaagaggctgttcgagtcgatgacggggcggaagctctacgtgtcgtacgtgaacgctctggaccaggagtccgtccggtcggcgatccgctacgggcgggaggtcgtcaagtgggaggaggagaagcccgtgttcggtgccagcgagacagtctacagcgaggagccgagctccttcactgcctga

SEQ ID NO: 26117 - DNA, 426 bp, Zea mays
  Peptide Sequence Number=SeqID_69492
atggtggtggtagtgggagctggggccaggaagcttgtgaatgacttgccgaagcaacagatgctacaggttgattacccacgtattctggtatatagggagagtagcacgaagcaggtggattcttcctccgaagcccctagtcatctcagaaaacctataagcttcttcccttctttagcggaaatcattatcggcctggatgtactcatccattttctgaagcagcttctccagagtctaagggggtttcctggcgaaatattgagccgtaggtcctggccaaagcccttaaaacagggcctcaatgacgatttcattgggcaccgggggcgcctgtgctctcagatgcaagaaccttcggacatacacctggaggtattcctcgtggtcttgcgtgcactggaacaaaagcttgagcagtaa

SEQ ID NO: 26118 - DNA, 289 bp, Zea mays
  Peptide Sequence Number=SeqID_69493
atggcaccttttgaagcttatatgggcgacgtgtcgaactcgctaaattggtttgaacctggagaaagtgccccaacggatcagaacgaccgcagcagagggatcccaccgccggtgatctcccccgccgtgattcgtgtcgccgacgtcaagattcgcgtgcggggtggagtgataacatcgcgggccgataagctcaccgacgaccgccgcctcccggccgtgcgccgcgtggctcaacctttccaccgcgtcgccataactcgctactactgtcaaatcaacgccg

SEQ ID NO: 26119 - DNA, 498 bp, Zea mays
  Peptide Sequence Number=SeqID_69494
atggcgcttcctgttgacgtggctggcctgcgccctaggttgggcgacatggaggctcccccgaagccgaggtcgagtctgtcttccatggccgaggccgagtccgagctcctgggtcgggcgaggcggaggtcgtcggcagaggccagggcgcccgagtccgagccctgggtcgggcggagcggagttcgccgtcttccgggtcttagcccgagtccgagtcctgggtcgggtggagcggagttcgccgtcttccggcccgagtccgagctctgggtcgggcggagcggagttcgccgtcttccggggctgagcccgagtccgagccctgggtcgggcggagcttcctatgaccagtcagtggagcgacgaagtgacggcgtgtcacttcggctctgtccggagggcgcgtgtcaggaaaagctttatgctgatgggggttaccagttgagaattaggagtcttgagggtacccctaattatggtccccgacagtag

SEQ ID NO: 26120 - DNA, 624 bp, Zea mays
  Peptide Sequence Number=SeqID_69495
atgcccagctcagtacgctccacaggggactccacagacacccacactcatcaggctacctccactggcaccccggcgaggcctacaggacagaagacaaaccctacatgcttcaagtgcagtcagattgggcattatgctaatgcttgtccagtggggaattccagtgcaccagctcagaacaagcaacagactcctggcaagggattcagcattgccagggttaatcaaccaccacagccttctgcctccttctcccacacggctgcaagcaggagcttttcctccatggccggcgcacaggaagccgcaggctccttcatgcacgccagcgctggagctccttctccctcgcgcgggcctgctccagccgagcttctgtccatggcgcttgctccctgcaggagagcagtcggcgccccattttcctccttctctacttcgtgcgcgcaggagcagaagctccttgggagcacgccgacgcccagctcatccccagcgccccttcttcttcatggcagcgagctccctcccccattggctcggcgccccctttctgtacctccagcggcaggggcctccatggccaatgttggggacttgttctcaaatgctatgaattaa

SEQ ID NO: 26121 - DNA, 162 bp, Zea mays
  Peptide Sequence Number=SeqID_69496
atggtgggtacaagtgtggtcactacacggcggcagccggggtcagtggagcattgtaccatgcaggatttggttgatggtgtgacttggcctaccaccctgccaccgggttggacggtcgagtgggatgtggctccggcaggagaggagcatgaggagtag

SEQ ID NO: 26122 - DNA, 429 bp, Zea mays
  Peptide Sequence Number=SeqID_69497
atggccggagtcggtcggtccacgcgcgcaggcggggatgctcgtcggcggcgaggagaccggcctggtcacggcgatatagttcaatcgaatgggtcagagaggtccacgggatgccagagaagctatgagcgcaaggaattggtcggagactcactggatagctcggtccacgcgcggcggcggaagaccgaagtccggctagggacagggagttgtagcgtcaccaaggtgccagtgtcagaatgcctggtcccgaggttaagctgcgccaaaaccgtgtcaaatgaatttggtttgagttcaaactttcccagaatgtgttcaagttttgaaaagcagagaacacagaggatctttgagaagaggtctaaaattcagaaattcagaaatctgaatttctctaaaggttcattgatcaagggctga

SEQ ID NO: 26123 - DNA, 234 bp, Zea mays
  Peptide Sequence Number=SeqID_69498
atggcagccgacgacgcccctcctccgacggtcgtgagtgccgtctcccctctcgcatcctccaccgaaggcctcgggtccgttttccactgcactcttctctgctcttccatccaagcacataattatccattggatatgggtatggtggaatttggtatccgcgggtacggttatggatataataagtgggcgggcgggcaatgggtatccggcgggtacgggtgtgggtag

SEQ ID NO: 26124 - DNA, 339 bp, Zea mays
  Peptide Sequence Number=SeqID_69499
atggccgccacaagccaccgcacaccgcgacccattcctgcgctgctgctcaggggttggatggaactcggttgtattcgtcgtgatccatggaccctgtgcacggaatccgcaaccatcggcgggtatttggtgtcgagaatttatcgtcggcgtggtcagattgccgccgcgctgccgtactccctggacgggattcccgtgcgggcgattcaaggatataatgatgttcagatgaaggtaccttcggacttaggtcaaaaccacagtgtgaagaagcgcaaagaatacgaaggatggcgcaaagccgaagctatgcgcaggggagcttcggcgtga

SEQ ID NO: 26125 - DNA, 1710 bp, Zea mays
  Peptide Sequence Number=SeqID_69500
atggaagtcgtggagctggtcccatgtgcccgtaataagtggggcaactggtgggattactggttttatgtttcagaggctgaagtcgaataccacctagggctccccgcagccattatgtgctctcattattatgtggcgtacccgccatttgaagtagcggaggatgatgagaatgaaagggtcgtttggatcgatgcccgtacgagtagtggacgcgatctagttgaggaattcatagggtatggggtgtggcccttggcgcatggatgggcgttgggcgaagtatgccctcgtgagatgccctccctgggtgggcggaaagtgcgaagtccactttttgctttggatgtgcgagggcgggatcctgccacggtcgtgcgcgaagcggaggatgggtcggtgcgaattgtggggcgctacgtgccaaagacggaggcccagtggagctgggaaatacacgaatccaacgaccgcctaaatagggtcttcgagttgaatcgcttaccgtatggcggttatcccggggaagacgttgtcgaccgccgcgggaaaagacaagtggctgtgactgaagaagaccctacgcaggaggtcgccccagccactaagaaaaggaagctaggtactatggtcggggaactgggggtctccgatagttttgctatggagttgatggggacatgcgcggcccccgggggaaggatgtcttcgcccgagctccgggagtcttcggcgcggatgctagaggttaccgggggtcgatggcccaagaacgttcctatcccccgcgcggctggcgaagacttctttacgtctcgcatggctcgtgacttgagggtgtttccttacggacagaatattgctgctgttgtgtcggcagtgatgaacaaggaccctcaagatgctgcgcagaagcgccgagctgtcgtcaggatggtcgatcccgtgcgcgaggcgaagagggcgcggggaagcgcgaaggctgcagcctcctgcagtggcaagccggtgtcggctgcgaaaccggctacgcccggaggcagcaaagcgtcgacgggcgagaaggctgtagccgtgggtggaaccaagcctctcccgggcggaccttcgcccgcgaagctgcctccaccggggaagcgtgttgctgacttcggcacgaatatcagtgtcgatgattatctggttgggtcgggcgagggacaattggttgttgtctcgccttcggtggcagccacctcgccatcggcggtggtgaaggcgaaggggtccatgcaggacccgtgggccgccttctgcgggagcggcgagattctgacggccgctgccgctagggacgtggcgggcaccatgtcccagcggctgagggaagtgtctcagcagctgtcgcagcagctgaagcaacatgcggatgctgtccgggataagtcggctgcggagagcaagaaccgcaggctggcggagaaggtggccaccctggaggccgagaagacggacctccggcgccggctagcggaggagaggagagaggctaaccaggccgtcgctgaagcgcaggctgcgcaagtagaggctaaggtggcgctggcgaagggtagcctcgccagccaacgcgccgaggagtgggaggcgaggttcaatgccctgcgcagtcacgtggacaaggccgagacctcggagtgctcagaagtcgtgcggacgcacgcgtag

SEQ ID NO: 26126 - DNA, 318 bp, Zea mays
  Peptide Sequence Number=SeqID_69501
atggcacctaagagagctagctcgaaggcagccccatccattgacgaagctgcgaaggcagcgctgctagccgagaaaaagggcaaagccctcgtcgacaccacccaccaagaagcctgcgaagacgacacactcagcaagaggcagcgcaatgaacaacccacacccgaaggcagtctccgcacttgcagctccggaggacaaccgcaacctcccctaggcttcgctccatgggagggcgcagacgccaccgaggacggcgaagtcattggcgtttcagcagaggaacagctacagctgcgtgccttttggtcttaa

SEQ ID NO: 26127 - DNA, 633 bp, Zea mays
  Peptide Sequence Number=SeqID_69502
atggcgagagtagtgtgtaccttccgtggcaagaggctggacagtggtgtatctgtgctctcggttggcgtgaacccggtctggtctgaagaaacctggtggcgagttgacatatgcaagggtggtgcccaaggaagaaccccatcagtgaagtcttgggaggatgttggcctcccacttgaaaaacaatatacttttatacgggaggggttttttcctcccggggtgtgggcacaggacagtcagcgcatagctgaattgtcagctaacgtcagacgcttgcaagacgagctttctaaacgggatttggcggttgattgggccatcaactcatgttcggttgcttgggaccgcgaagcaaaagctcgagctcgtgtgactgagcttagtgcagccctcgacagtctgcaagtatactgcaatactttacatgaggaagtacatgtactgtatgctcgactgcacccggacgtgtctcccaacgctactgcaattggagccggaccgtcgggaacagcaaacgaaggactggatgaggagttggacctttttagacctcctccttccatgaaccatgctgacgaacggtctcctgcagcaggaaatggagcagcaaaggatgacgaagactag

SEQ ID NO: 26128 - DNA, 183 bp, Zea mays
  Peptide Sequence Number=SeqID_69503
atgatcatgtgcgcttggctaagcgaatggcttcgtatgggcaggagatggttcaacgccatggggaggagtacgattggaggaaccagccaatcgaccctcaggcagcatatgctagagcaggaggacaagcccttggacggttgggtatttttgattctacgattgattccagagagctga

SEQ ID NO: 26129 - DNA, 738 bp, Zea mays
  Peptide Sequence Number=SeqID_69504
atggtgaccaccagtttgatggtggggagaagcaagccggggtgcggcctttgccctgccctcagcttcaaggatcttcatcatccttgctggggcggggggcgagctgagccagagctctacctcccgcacgggccggcgggccacatcctacatcagcaatcaggggagagggcgctcaccggcctagcggagggggcggactttgacaacgcggggccgatcggccgcaagcgtcgtcagctccagcatgcctggttcgctggctcagctggctctggcacagcttctggtgccacctcccaccgctgggcggagcgtggctatctgcccgccgtacgggcggctgttgcgccacgtgcaccgggggaccgcccaagaagccgcgcggtgctagggcggcgttcgtgttcttgggctgtcccgccctcgctctggcacgacgcctccgcgcggaggtcggtgctcacccgtccgggaggactcgagtggggatctgccggtgggcaggtggctacggccgtcggtgctgaggtggtggcagccggagaaggcttccctgccgaccagaccgtcagcgccacccgcggaccgacctctggctctttagctttgatagcttgtcctcgcccctcgagtggggacgcgagcgagggccttgtcgcagcagcatctgccctgaggtcatcgctgctgctgtttggctacccggagcggaggtcgttgtcgctgctgtag

SEQ ID NO: 26130 - DNA, 426 bp, Zea mays
  Peptide Sequence Number=SeqID_69505
atgcaccccttcgacttcgacacatccaacgtggaggcccaggcccacacgtcatgtaaccggcgcgccggttactacgtgcgaaaaactacaccgccactcgcgccagtaccacgccttctcgactgcggaaccggtgccgcgactcgaggcaaccctgcgcatggcccaaaagtgccaaccaagcacatcggtcacagggaccgggaaaggggatactccgaaagggatccttccccgcgaaggaagcgggccctgagccctcctactaatcaggggttcgaaggctggccccttggaagggttcgacagccaccccagagcactcgggctccgcgcccactactgatcagaggttcgaaagctggcccctcggaagggtacgacagccgcctcagagcactcgggctccgcgcccactactag

SEQ ID NO: 26131 - DNA, 1578 bp, Zea mays
  Peptide Sequence Number=SeqID_69506
atggacaaggatcgccagggggctgcacaaaaacgccaagcggctgtcaggcttgttgatgccaggccaaagaggcagcgggggtcggcgaaggctgcggcccccggcggaggcaagccgccgctggcggcgaagtcaggcgtccctgcatctagcaaggcgccagagacagcggcaggcgccggaggctccaaaccggtgaaggctgtgccgccgcccagcagggtggcggaggccgcgaaggcggcccgagcgttgccgtcgacagacaagagtgtcgccgacttcgccaccgacatttgtgtggaggactatcttggtgggtcggacgaaggccaacttgttatagttgcgcctgccgcggcgacagcggttgctgccgcaacgccgaaggcgaagggcggagcacttagcgccggaggcgaggtggcggccctcgcggctgtgaaggatgaggcgggcgctgcgtcccgccggctgaaggaggtggtggagtcgctgagtcaggtggctgactttgccaaccgcacggcgtcgggggccctcacggcagttgtgtctgccgaagtcgagagacttcggacacaacatgctgacgccgtccgagagaaatcggccgccgacagcaagtgccgcaagctggcggacaaggtggccgcgctggagggggagaaggctgacctccggcgccaattggcgggggagaggagggagaccaacgaggccctcgccaaggcgcaagcttcgcaggcggaggccaagctggcccgagcggagggaaatgttgccagggagcgcactgagcagctgcaggagcggctcatcgccctggagagccgcgtggagcaggccgaggccgcgatgcgagcggaggccgaacggacgcgcacacagcttgtgagcacatatcgtgagctgggtgcgcggaccagtgacttcgaagtgccggaccgagagtccaggcttcgctgtctggaatgggtgcaggaagaactgcaggaacttcccgctgtcctgggggggtttatgtcgtacacctccctggtcacctgcgagggggcgatgaacgcgctctcccgcgaagggtgccggcacttcgaggtcttcgaccaggcggatgaagactttgatcgagatgtctataaggttgaagacctcgtggtgaaggattctgccggggccctctacgaccggatgtggggtccgcacagtcgcgaggtggtcagggagcgggcggagacggcgatggctcaggcgttgcgtggcgagcgggtggacgacctcggggcgttgaacagcgtgctgcctgacccggagccgacccctgcggaggccgtgtccggggtcgccctggagccaaccccggaggccgcggaggacgcaccggatgcccccacatccgcagcggccggcgaagacctgcccccgaaggtggccgaaggcgcacttgatgcccccgcggctgctgcgccgagtgctgaagatcccgcggcggtggcggcggaaacaacagcggaaacagcggcggagccaatggcggaggcttccgcagcgccagggccttcgcaggtggcgtag

SEQ ID NO: 26132 - DNA, 384 bp, Zea mays
  Peptide Sequence Number=SeqID_69507
atgtatcctggttcgggcaatgtgaggccctacttccagcaaaggagggatgaagcttatattactcccactgaggtgcctgcagtagggattacacgcacggtgggagaggggaagtccccaggtgtgcacattaaatgcaagtgtcccctgctggcctttgggtgtgccttctcctcttcgcctgagacaggctcggtagagacagatagaccgattgtagaatgtggcgacctcgggcgagacggaaacttgcatgaggaggaggaccctcgaggaggggtctcagtcatgacaacatttatgaggaagaccccttcagagggcctcgagcgaggaggcgacttggcctcttacccttggggattatgtctgggccattaa

SEQ ID NO: 26133 - DNA, 861 bp, Zea mays
  Peptide Sequence Number=SeqID_69508
atgaggcgaaggtcgtcagctctaaagtcagaggccactaataggggctcgacttcctcgtcagcggagcccccaagaatttgccatcagtatggaccctcggcgacctgctccaccgcaaatcccgcaggcgaccactccgccaactgtggcacacatcagggaaagctcgaccatcgcctcgagaagacttccgccttgcccgagcagggctctaaccttgatgtctgcaacgaaggactcccaacatcacccagcacagggacgctgacgcatcccataagcaggccttttacccataccgaggccctgttacaactactacggctagggacagtgatcaagttcgggagcctagagttcatgtcactcggcatcgagtacgacatggtgctcctcccacttgtccctctaaagcgtctgagcacccgtcgctgcccttctcgtcgtaggaggcaaagatggaacgacatcaactatgccacccatggcaccccgtgccctggtgatactcctgagatggtcgatggcatagactcccttgcgagtgacctagccaacatcagcatcgcacccgaagcgccatcggcggcacttgcatcaactctcctggtaccacctcctccagtatgggacgtactggctccacgcgacgttgagcgagatataccagccacgccgcacctcccacccgtgggtcgggaggagccgaccattccttggcaggacatgacaggggctaggggagaaccgtctgtgttcaaccctatcccctttcaaccaagtttcgacaccagctccatcaccaggctatatatcggacttcctttcccctcgggatgcttagactccaaggaatag

SEQ ID NO: 26134 - DNA, 114 bp, Zea mays
  Peptide Sequence Number=SeqID_69509
atggcttccgttgaaagccatccgtggcttcgtatgaaaggcaatgatgtcttgcatcgtaagatagtcgtgccttgcagcgtacgactgaaaggtttgtcttcgaaacattga

SEQ ID NO: 26135 - DNA, 369 bp, Zea mays
  Peptide Sequence Number=SeqID_69510
atgtcgcgtgcgtttgacgactactatatcgaggattgtggcgtcatcttggcgtcggaggtgacacagaggaggatcgacaacaatgaccagttcgtcatcctcgccaccgtcagggtagcttttgtgccgccaaaaacgttcaaggagagtggaaagggaacatatcagcacaagtttactatgtctgggatggcatctgatgattcacctgcccaagtgaatgttgaaggagatgtttcagagaaaaaagtagaagttcaagaccagaatgaagtgggtgggatgccctcacgacaagaggaggaggcagcaattaagaaaaagtatggaggaatattgcccagaaagactccacttatatctaag

SEQ ID NO: 26136 - DNA, 534 bp, Zea mays
  Peptide Sequence Number=SeqID_69511
atgaccgactcgcgccgtacccgcgtcgacgagcgtcggtcggctcgcggctgcgaccatgggcgggggcagcaggttggggaggaagaacagggcgaagaccgggaagacgaacgggacgtccgacgacggcgaaaacgatggtgcgcgcatgatgtgaaacgtcctcgtggacatgcaatagccactgcgcgagtcggtgttggggctggtgttggacgaatacggggaggaggcgcatgcttctacgccctctgccgagaatggggtggcgcggaggtggagtgtgaggggagagagaaaagaattagaatggcgaatgaggtggtggcaactgagacgagaaccatcattatcgtgcggagaaattatgcggacttggtaatatggaattatgtctcacatacgtgcatctattacctgttgtacatcgcaaattatctgatcaccatcttgattcatgaatatgaactaatcatggagttgagctttgctcttgcagcacaagtttactatgtctgggatggcatctga

SEQ ID NO: 26137 - DNA, 528 bp, Zea mays
  Peptide Sequence Number=SeqID_69512
atggggttggggacgggggagaggccggatgcggagcccggaacgggcgcggaggaggtgcgggagacgtcgatcccgagctcggcgaggaagggcgggtgccgggcagctgagcggcgcggcgcggcgcggcgtggctgtcgagcgggcggcgcacccgtgcgaaggcaggcgagggatgggacggactggtggggagcgaggaaggggaacggggagcgcggggcagacggctacggtgccgagggtagcgtgtggatccgtggcagaaggaacaacccgagagtcgtcgacgttggcgacaaccatgaggctcccctgcttaacgatggacaacgcggtgtagctgctctggaccgcgtccaagcggcggcttcgcgggagcttgtcgtacacagcggcgcatgcgaccacgtaagactgcttttagaggtcgaactaacagtcgccaagcttcttctcgttatcgatgagcgacaacaacgcgaatgcctcctgctcatggagtttgttcggggtttgaagtag

SEQ ID NO: 26138 - DNA, 354 bp, Zea mays
  Peptide Sequence Number=SeqID_69513
gatcatgaacgtgcttactttgattctgctgattgggctctaggaaagcaaggtggtgttcccaacaagcctaaaggtcctcttgaggcactccgacccaagcttcagcctacgcaacagaatgcccgcgcccgccgaacttcatatgcgtctgcggacagtgacggtactcctcctttcctctactacctaatcggcaatctctcagcatttatatttcctgtatgcaccatagatgattgctttttccccccctccgtggcagacactttgaatctgtcccccgaggatctggtcccgcaaggagaacccagccagcagggagaaccagtcgaggacaagaacaaggaataa

SEQ ID NO: 26139 - DNA, 333 bp, Zea mays
  Peptide Sequence Number=SeqID_69514
atggtgtcgtctgatgattcggacgactccatggggttgtctgccacagagcggtcgtacatttggtccgtcgagcgcacggggctcggtgggtcggatgactcgaaggaggtctcctcggaggaggcagaggactcatcagactctgaggagggcagcaacggcgagggcgatggtgacggcgacgagagcgatggcggcagcagcaggggcggtgacggcagcagcgacggtgacggcggcgacggcagcagcgacggtgacggcgacgacggcagcagcaggggcggtggcgacgacggtgacgccggtggcaatgtgctaccggcttaa

SEQ ID NO: 26140 - DNA, 807 bp, Zea mays
  Peptide Sequence Number=SeqID_69515
atggggaggaagaaggggaaacggggggaggagaagagggcggcggtttccggcgcggctacgtgggatcctggcgggggctgtgggaggatgagggaggaaggagaggagggtgacccgggtgcggcccgcctggcgggtgttacacccggcggtgtgtacctcctcccggggtctcttctcctagtgtttgtctggttgctggtccgtgtcccttcgcggtgttggtggtacgggatttgcacttccaatgaggtcttgaacccgctcatccgcggtgatgggtctcccccatctgtgaggcttcgtcccaagagacaggttgagccgggtcccattctccggctttatggtgtcgtcgcacgtttcggcgtcagttcctccgtcgtcaggatgtcagggaagaaaggagtaggtgtagcagtgtgcttcttctcgtcctcctttgagggcgatggtatcggggtgatcgcccgctacgcttttccatccccgttcggaatgttcatcttccttcgccgggtgatctgtgtccactccttagtgggtgaggtggacaatggagttcgtcgggttggagaggtcgtggttgactggccttctaccctccggggacttctgagaccagacttgcgcgggaccacgccctatcgccttgttagcgggggcatggctcgcggtttcactgcagctccctttggtgctcctgaggagaatttcttcttgggtggagttgctatgtggtgcagagttccctctacatctgccacgcaggagatggtcccgaagcaaaaaaacagctcctag

SEQ ID NO: 26141 - DNA, 1374 bp, Zea mays
  Peptide Sequence Number=SeqID_69516
atgcccccgcctcccctctccacgcgtgacccgcctcagccaaatctctccgcgcgtgtccacgtccagctgcaaactccgcgaaatccacgtccaactggcctctgcgcgatgccatccgacccgtggtcccgtgcacaaccatgccagctcctcctgcgcgaacaaccctgcatttatctccatgcctcagccgcctccaccccatttggtcgcatgaccgagcgcggagcgcctcgccacatccactaccactctctacgtgtcaatctgatccggcatgcgtcgtccaggctacaccgccctgacaccgaggccacgaagagggagctgcaggaagggcatgacgggtcaccgcgtgactgctcacagaggaatgcgacgcgtgggttgtacgactcaatctcgtcggcggcgcgcatgaagggcatgacctcgggggcgagggctccaggcaccagctccccagcttccgccataccctccggtagcctccgcaatgccagcgtctgcgctagcgcgtcctgcctccgcctcgccgcgctcatcgccgtcgaactcgacggccccgcctccatcgccacgcgtgtgatcgtgatgcttctactgatgatgatgatgatgggggcagggcggtcggcggcagcggcgatttatacgccattggagagaatggagactgacggaggaatgggcccgtcctcccgcgcggccaccctcccgtacgagggccctggaccttccttttatagatgtaaggagaaggcccagggtaatgatgggcccccctgtgatgtggtcggtccgagcccaaggtcgggcgaggcggcgactcctccgaggtcgaggctgagtccgagccctgtgatcgggcgaggcggagaccgtcgtccgaggtcgaggttgagtccgagccctggggtcgggcgaggcggaggccgtcttccagagccgtggttgagtccgagccctgggtcgggcgagacagagtttcctatggcgcccgaggctggacttagctgctgtcggcctcactctggcgagtggcacagcagtcggagcagggcaggcggcgctgttttcctatcaggtcagtctgcgaaggggcaaagtgactgcggtcacttcggccttgtcgactgtagagcgtgcgtcaggataagatgtcaggcgatctttgcattaaatgctcctgcgatacggtcggttggcacgacgatctggtcaaggttgcttctccgcgaagcctgcccgagctgggcctcgggcgagtcgagggtgcgcccgttgcttgaggaggccctcgggcgaggcgtgaatctgccttggtcttactattcctactcgaggcttgggcttgggcgaggcgagatc

SEQ ID NO: 26142 - DNA, 690 bp, Zea mays
  Peptide Sequence Number=SeqID_69517
atgggtcaagggacacttgcctccaccaaccaggtgctgctcagggtcttctcctgcgagttcttcggactcctcaaccaccatgaagactctgacaactttctgtggctagcatcccctggagatggtgatgcacccttgggactcttccctgctgagaaaaaggatgaccccatgtggtgcaaccgtagcgacgctatgacacatctttctaacatcgctcaaaccaccaagctcaccctcgacagccgagaagactttgtggtcgacttgtcctctgagttggtggagaaggacctacaggtggaaaggctgagccagcgcatcaccaccttggagcagcaggtggaaatccgagataatactattgatatcttggagaaccagctccatgatgtgcagcgggaactcgaagaagctaatgaccacctagacatgcaccacttaaagatggaggccaatgaggccggaagcgagggagaagaggctcccgaggagttaggaccagcccctggtgccaacgggactacctccgtgatgcccccttcacccgcatccagtgtcgcttccaccgctcaggaggcgcttcgttataattcaccggactatccggtgcaccaccggacagtgtccggtgctccagggaagagcgactcagaactcgccagcttcgggaatctgctccgctaa

SEQ ID NO: 26143 - DNA, 795 bp, Zea mays
  Peptide Sequence Number=SeqID_69518
atgaggaggcaagggagagaactcctcgccgccgccgtccttgcaggggaggtgatggtggtagcgatcaaaaacttatctggttttgttgaggctgacaaggatggaaattggtcttgtcccactgacaagaagcataagcatgagatatttccaaacccggtattagaagtcaacagactagctgctaatcttcaatcatacttggagcaaaggggagcaaaactgcctgatgggcatatcatcgggagagttgttctgccaaatcccaactgcaggccttcctatactataagcacccaaccagaggtcatgctgtatgatcaatggaaggatctcaagacagactcaaagactggactctcagcatggattaaaggtgcatttactggaagcagaagtgacatgcaagattctgtactccagaatctacattttattctcagctcatcgcctatgtgggacaggttggaactcaaaggagacaaaaatgttcttggtgaattcattgaattcaaaggcaggcatgaggacgttcaacttctcaaaattctcaagaggtcaaaagtcagtcgcttcatcatccagaagtcaactctttttggtggttttggtaggtcacgagttcaaatattgtattctcctcgtgactatcgagctgaggggacttcatcttcagagttgaaagagatttctgtgaagcaatacacggagatcgttttccaaccactgcgttccaaaaaggctcggaagttcaagctgtccaatgttgtttctgtcacactgagtgcctag

SEQ ID NO: 26144 - DNA, 303 bp, Zea mays
  Peptide Sequence Number=SeqID_69519
atggaggcgatggagcgtgggcacgtgagcagcaatggatctcagccgccgatgcaaaccctagccgccataggtgctgctagactgagcccgagatacgtggggaagagaagacgtgggctttatccctcacgcggattgggctgggatccctgcagggattgggtcatccaaaggagccctaagggatggggaagtttcttcttgtgtggggatgtaaacatggaaaattattttcgacgagtaaatagggatgaaaatgggaagcattctccatccctgtctttggcggggacccgttaa

SEQ ID NO: 26145 - DNA, 681 bp, Zea mays
  Peptide Sequence Number=SeqID_69520
atggcccccccctgtgatgtggtcggtccgagcccaaggtcgggcgaggcggcgactcctccgaggtcgatgctgagttcgagccctgggatcgggcgaggcggagaccgtcgtccgaggtcgaggttgagtccgagccctggggtcgggcgaggcggagaccgtcttccggagccatggttgagtccgagccctaggtcgggcgagacggagtttcctatggcgctcgaggctggacttagctgctgtcggcctcactctggcgagtggcacaacagtcggagcagggcaggcgacgctgttttcctgtcaggtcagtctgcggaggggcgaagtgactgcgatcacttcggccttgtcgactgtagagcgtgcgtcaggataagatgtcaagcgatatttgcattaaatgctcctgcgatacgatcggttggcgcggcgatctggtcaaggttgcttctccgcgaagcctgcccgagctgggcctcgggcgagtcgagggtgcgcccgttgcttgaggaggccctcgagcgaggcgtgaatctgcattggtcttactgttcctgcccgaggcttgggcttgggcgaggcgagatcgtgtcccttgcgtggatagagccaagacctaaattgcgcccatcaggcctttgcagctttgtgctgatggtggttaccagctga

SEQ ID NO: 26146 - DNA, 534 bp, Zea mays
  Peptide Sequence Number=SeqID_69521
atgcaggcggcatgcaactgcaccaagggggcgcaccctttcgactttgacgcgtccagcatggaggcccaggcccacacgtcatgtaaccgacgcgccggttactacgtgcgaaaaactgcaccaccacttgcgctagtaccgcgccttctcgactgcggaaacggtaccgcgactcgaggcaaccctgcacatgacccaacagtgccaaccgagcacatcggtcacggggaccgggaaatgggatactctgaaagggatccttctccgcgaaggaagcgggccccgagcccccctactgatcagaggtccgaaggctggcccctcggaagggttcgacagccacctcagagcaagcaggccccgagccctcctactgatcagaggttcgaaggctggcccctcggaagggttcgacagccgcctcagaacgcttgggctccgcgcccactactagtcagaggttcgaaggctggcccctcggaagggttcgacagtcgcctcaggccacccgggctccgcacccactactga

SEQ ID NO: 26147 - DNA, 336 bp, Zea mays
  Peptide Sequence Number=SeqID_69522
atggacaagacatatacctgtccactccagcggtggacgctacgaccaaaatacacgaaccgcacagtggctcgctcgttacaaggcaagaccattgactctctgcaccacgtgggctgctgcaatcatggcccccactttggcgcacgagatgggccagcgtgctaccggcccagcccgacatggctagcaggccgacaggtcgttcctaggccactaccacggcacgtgggccagtccgacatgacccgatttgctagccgggcctcgtgggtcgggcccaacatgggctgtgccgggtcaggttgggccggcccgtttggccatctatactga

SEQ ID NO: 26148 - DNA, 765 bp, Zea mays
  Peptide Sequence Number=SeqID_69523
atgcagactgacctgaggcacgaagaaggcgaaccaccgcacaaggagcgtgcaactgccccgcggttatgcgccccttcatttccggggcaaccagcagtcaggaagacgaaccgccgcacaaggagcatgcaaccgccccgcggttgtgcgccccttcatcttcgccgaaaccagcggtcgaaaaggcgaactgccacgcaggaagcgtacaactgccccgcggttgtgcgcccctcagctttgctgcaaccggcggtccaacatgggggcctaggcccacttgtcatgcaaccggcgcgccggttactgagtgcggaaaaatcgtaccgccgctcgcgccaatgccacgtcttctcggggccatcgcggaggactgaaaagataagttttcagaaccagtgcagcgactcgaggcatctcgcgcatggcccaacagtgacattaagtatgaaggtcacgggccagtcaaccgtgggaataggcgtagtagttggcatgaccgtaggtgggccggcagtaattgcatcaacaggcgcgcaggagcagcaagccaaccgccaatcagactctggccccacctgcaggctcgcatcctcccctgaggcgggcccgggggccactgtcggtaccctgaatcaggggtaccctcttctacagtatgaagacgctgtacacgtacgacgtctccaggtcacgcggagaacggcacccaaccccaccacatgggcaggtctaagggcaccacgtggcaaggaaagataa

SEQ ID NO: 26149 - DNA, 303 bp, Zea mays
  Peptide Sequence Number=SeqID_69524
atggggctcggtgtatgcggcttgctctgccaaggtggcaatgagaatgatggttttggtattgactctggtaatggtaagcgctattctttccgtttggaaagggttgtcagcattgcaacccctgctcaggagaggatgaagccgtggaaggagaccttcaggagttccaagattacgatgagttctaggtgtgggttagcggcaacccccagtcggctgcctatgaaggccgcgtgtacctacgtttcttttctgcactttgattattgtaaagactatgagaatgtctcagacatatga

SEQ ID NO: 26150 - DNA, 939 bp, Zea mays
  Peptide Sequence Number=SeqID_69525
atggcccgtatcagtcacctggagagactgcatcgtcgcctgcacgaggagcaggagcgccgacgccaagagcaggagcaggagcagcaggactcttccccctcgcctcaacaggaggtggagtctgagaggccgctttcccctgcacctcagctagagatgccccctgcaccaccacagggcaccccggctgctggaggagaccctgacggagacggagacgacgatgacgccggtggcagttcgagccatgacacggagctctcggaggagccggagccggatggatggattgcgagacccatcactcgtgacgttgctcgtgggtgtcacttccacgacgctctcgataccttgttgcgttgggcctttgaccgacacacttggtctttcgagtaccgttgtgtagtctaccagcatcgtcgtgggctatacccagaccagtgggaggctacttgcttggtgcgtcgtccggacgatgatctccggggtgtagaggccttcttagagcactattctatcactaagagggatactgctgaggcagccatgcaagatgtagcacgacaggcactttctcagtattgctcgttgttcagcggggtagctgatggccttgacctgaagtactaccctcgccgttcgaccgacaatgctggaggtgtgattgtctcgctagttggtgagggcaatcccaggctgagcagcatggtcaatctggtcgccgtgctcaacacagagttggaccacgcccttgacgagttgggcaaggttcgggcggaggttgaggaattgcatgctgaatgcgcggcatgccactatcttgatggtggttcccccgcccctgttgggattcagcacccttaccgttcaccgccccgtggtcgcttcgactatggtaccccagactgtaggacccgcatagatttagatccatag

SEQ ID NO: 26151 - DNA, 1557 bp, Zea mays
  Peptide Sequence Number=SeqID_69526
atggcggttgcgaaggctgctgcttctggcgcgggcaaaccgccctcgggtgagcctacgaaggggcgaaggttgccttcgtcgccgcgtactgacgaggcggcgacgcgtgttgccgacttcgacacagacatctgcgtgggggattatcttgttgggtcgattgtggggcaactgggtgttgtcccgactccggtggtggccactttgccgacggcggcggttggtgcgaagggtgcttcgcaggacccgtggtccgccttctgcgtgagcggcgcgattccgtcggccgccgccgctaaggatgtggcgggctctatgtcccatcagctgaggcatgcgtcgcagcagctgaagcatgcgaccgacttcgccgaccatgttgcgtcgggttctttgacttcggagcttgctgccgaagtcgagcgtcttcgggcgcagcatgcggatgctgtccggaagaagtcggctgtggaaagcaaaagccgcaggctgacggagaggatggccgctgcggaggctgagaagggggatctccggcggcagttggtggaggagaggagggacgcgaacaaggctaagcttgcgcgggcggaggccagtctcgcccgccaacacgccaaggagctggaggcgtggctcggcagcctacgcaaccgcgtggacaaagctgaggcctcgacgcgcgcggaggttgagcggacgcatgtgcagctcgtggatgcgtaccgagagctaggtgtgcggaccgccgccttcgaagcgcccggccaagaggtgggccttcgcttccttgagtggctgcaggaggagctgggggtgctgccgacaatcgtgacgggcctcatgtccttcgcctccctcgtcacctgcgagggggccatgaatgctttgtcccgcgaagggtgcgggcatttcgaggtcgaggacccggtgcttaagcggtcggcgggggcgctcttcgacaggatgtggggtcctcacggccgagagacggtccgggagaggtccgaccgggcaatggatcagatggcgcatgacgaggaggtggaggaccttggcgatctagacagcacgctgccagaggcctcggggtggagctggtgccgccgtccgatgcgggcgagggcccctcggcgaaccccgcgccaactggagctggagaagaccccgtgccagcccctgcgccggtgggttccgacgtttgggcctgcacaagcaaccgctactgacaatactgattttgcggcggagacttcaaccgtagtgcctaccgatgatagtttgtttggttctgtgtctgaatgttttgagtctgatggtgaatccgagagctcgtttccatggacggaggagtcctcggatgaaggcttggattattttgttgcgttggatgtagctacagcggagacttcgccgcgtgtggagggtgttggggatcttcccggtgcgagtattgggtgtaggcggcgaagggtggtgggaaaacttagtgtgggtgaattttcgcgaagtggcaggcgccgtcgtatggggatggagcgtggccgtctctga

SEQ ID NO: 26152 - DNA, 867 bp, Zea mays
  Peptide Sequence Number=SeqID_69527
atgtcttcttcctcccttatgcgtcgtgtctttccatcttccaagcccccggatggggccggcctggccgcacccctacgccggcgatcacccaggatggtgaccaccagtttctgggtggggaagagcaagccgggctgcgatcttggtcccaccctcagcttcaaggatgttcatcatcctcgctggggtgggggccacgctgagccggcgctctacctcccgcgcgggtccgcgggtcccccttttccgcggcgttcgggggtggaggcgctcgctggcccggcgggcggcgcggacttagacaacgtggggctgatcgacggcgggcgtcgtcacctccagcgtgtcggagtcgtcggccgggctcctggcggcccctcctgccagagggcggccgccgcgccaggccggtgccccactcgtctgggaggatttgagtggggatctgccggggggctggcgtcccctgccatcggcgccgaggcggaggcggctcgagaagtcctcgtcgccgacgggatcactgccaccgtccgcgccccgggccactgcgccggccaggccttccccatggagtggggtcgttcgtacctgcggagggggaaccggagttccgtttgtaatggcatctcgaatgccgtctcgcctgttgattatctgaaccgctttaccaagcatgagtcgccccgtgtcaaggtgacgagtgagtatgaacagaggtggagttggctcgagaatgggaacctggttggccggagcctagccgggttgtccgtcagcggagccgacgccggagtcgatcagccgaggcctcgggtcgggctggcgcccttggaagatgcttggccgaggcctcaggggtaa

SEQ ID NO: 26153 - DNA, 930 bp, Zea mays
  Peptide Sequence Number=SeqID_69528
atggagccatatttcatcactaatgggattagacaaagtcaatatggtataactgaagtaaagcacaaggaacgacttcgaggccatgataattttatccttgcacaccagtgcgagcaggaagaggaggatgacgaggaggaggtgcaacaccatgaggaggaggacgagcaggcccatgaggaggaggacgaggtgggcatagatgctgaggcagatgacgataccactgaggctcctgtcgttcgacgaaggggcactcggaagggccactttgtcctacctccgtcagcgcctgcacaatctgaagctcgagtactgatcatcccggttggtgatagccaatgggaagacacgtcatttgacggtcgaggaattgtcaccgacccgaaaggtgtggtggttccttgcactagctggtcgcacttcgcactagctccacatgctacatatggaacagctcaaggcgccgtcaagcacaacttttggagacactatcgtgtggaacctgaggctcaagagcatgcagaccgagtattagagaacaatgcgaagaaggtgtgcagggatgcattttccaatgctcgtctacaagttgtgaacgcgtacatgaagcgccgaggtcattctatcaacaactttcgacaatattcagatgtctacttgactgtagaccagtacatggagcaattagagtacatgactgcttacaacgcacaggcgcaacaagcaatgaactcttggtttccacagcaggcacaacagcaaccatttgttttccctcagtttcagccgccgatgcctcagtggggattacatgctccaccacctccacctccacctcaggatccaaacccgttacacgacttcgtcaaccagttcttggcttctggaggtagtggacacaactccaacgaccccaatatgtga

SEQ ID NO: 26154 - DNA, 1050 bp, Zea mays
  Peptide Sequence Number=SeqID_69529
atggcgggggagctctggctgcacagtgagggcccggctccagaaaaggggtcaggcgcatgggggagtgaccgggaaacacgtgtcgtggacgtgtccatggctgagagcgcgggtgggaggttagggaaggggaggtggctaacaggtggggtccacgagccagcaagggcgaacgcgcgaatgggcgggtgttacagatcggctcatcaggatgaaccattccctcggggggctattgctggagtagaggtcgaaccagacctcgatctacaacttcgtaaacttgcctcggccataagtaaccttgaccgaatgcaggaccaaattaagtcgaaggcaccgacgaggtctcctcagatagggaaagggcgaaggctaacgcgggggctgaaggcgagggcccgcatcatgcgaagggctgagcaagggagcgaagacccctcccagcaagggctgcaagaaggtcttctctcggcgaagcaaagcccaaacctggccgctgggtcaatcagagcctgtcaaatgctccgtcgccaaccgcgcctccctgccgcaccctcgccgccgctggctgtgctccggcgagccttccgctcggaagctgccctcgaggccatccgatcgcacttgcactcacccccatcaaagtccacctcaacatcctccgatgcggacggggacgacaaggcggcccccgccagcctcgcgctctacaactaccccaccttcgctggcgcttatgccgcgctcgccgcccgcctcttccatcaacgcgtccgccgccgcctcctcgttctccctttctcctccgtcgtacccttcagagccgaagactttaaggatgcggggttccagacgtgctatctcttggacttcattgggcccaagaagtttgctttcgagctcgcccgattcatccccaggcgagttctaggtccacctggatgcctaggtgacaaggcgccactgtttccccagggtgagctgcaggggcggagccagaaatataatataagggggaccgatcaattcatcaatattatatga

SEQ ID NO: 26155 - DNA, 225 bp, Zea mays
  Peptide Sequence Number=SeqID_69530
atggccatcgtcatcggcgaggtggtgatgtcgtcacaggccgacttctgcgtgctatacatcgatgccgccataccaaaaggcaccaaaagaacaccgctcgggccacacttgaccctgagcgcgttcttcggaccagcggtgatcccggcgtgggccctagctgggctggcgcgacctcagggcaatgggcgaggcgacctcggcccatgccgccacaactag

SEQ ID NO: 26156 - DNA, 267 bp, Zea mays
  Peptide Sequence Number=SeqID_69531
atggacgagggttgcactcaacccctttcaagtgatcctatgatcaacttgaataccacggtattcttccttatagttttcttcccatttgcgaggaatctccacaagttggagcctctcgcccttacaagattgatcacaaagaaagcacgaagtaaggtcggaaaggaggtcggaagctttcctcgtcttgactacgatgtcctcgacgtaggcctcgaccgtgcgaccgatgtgggcgacaaacacatgtttcatgcaccgctg

SEQ ID NO: 26157 - DNA, 381 bp, Zea mays
  Peptide Sequence Number=SeqID_69532
atggaggtccttgaccttacccggaggtccggtctgtgtatgcaggggtctggcgccttcccatgggggtccggacccactgttgataccttggaggtggcccccgggcccacctcagggaaggatacgagcctgcaggtggggccaaagcttgactggcgattggcgcgccgcttccgtgcatttgctgacaaactgacgcccaaggagtatgacttgtgggcccgggcccccacgtcagagattgggccattatttttgacggagatgaagaggcgcactatcgcgggcggcggttcgctcgtggcggtccgccttcttcgcactcggagacccgcacaccagctgtatgacttgtgggcccgggcccccgtgtcatag

SEQ ID NO: 26158 - DNA, 438 bp, Zea mays
  Peptide Sequence Number=SeqID_69533
atggccaccgctggggctatggcctggcgtggttggggccgaatcggcgatgtcgtcgtccttgttagttgcagtcgcaggcacctgcagcagagttctacctccagtgaatggacaatgagtcggcgcggggagctgcacgaagcagcaggtggtgctgatgagcagcatcccggtgaccaccaacgcagcggcggctttcgacgaaattgccatggagttcacaagctgcaggacggaagggtgatcttgctttggagtagtagggaagatagatggggaagaaagaggatgatgagagagctcagcagccaggaagaattttttacagggggctcaggcctcagggctattcggtgtggaggaaccaacgcgcctatccaagttggcggggttctaatctggttctcgtacctggatataaaaaaggggtcttaa

SEQ ID NO: 26159 - DNA, 348 bp, Zea mays
  Peptide Sequence Number=SeqID_69534
atgcacatcgccggccacgacatccccgccgagctcatggaccgcttgcgcgccataggaaccgccttcttcgccctccccgtccaggacaaggaggcctacgccaacgaccccgccaccggccgcctgcagggctacgacagccgcctcgccgccaacgcctgcgggcagcgcgagtgggaggactacctcttccaccttgtgcaccccgacgggctcgccgaccacgcgctctggcccgcgtacccgcccgactacgtcgccgccacccgcgactttggccgcgcccgcccgattgcggcgttggttggcgtggtattgttggtcgcggcgcgattggcggaatga

SEQ ID NO: 26160 - DNA, 693 bp, Zea mays
  Peptide Sequence Number=SeqID_69535
atggctccccacctcgtcgccggcctggcaaggagcgagtctgaggggttaaggtttcttcttgtaactaggttgtgcatacgtgtacgccagcccggtgagattctggacattatttttttatctaacccacccatacggtttcccatccttgctggtatgatgacatccgaattgagtaaccagtgtcggcaatcggaccagcaatcactaccaccgcccgtgggcatcctccctcaacgccatcgtagcgcagctgccgccgcaaccgctgggcgcaggcctaccgctcactctgaacacggtggcggccactgggaacagcggcgctggcggcatcccggtgctgcagcttgccaatggcagcggtttcctcgaggcgtgcgtcaaggcgaaggtgccctcatcattggaggcgacatcgaggccattaaagccaaagagatggaggcgcggcagcacacgacgctcggcggcctggctgctgagacggagaaggagctagaccagttcatggaggtgtaccatgcgatgctggtgaagttgacacgaaagatggagccacagctcaactcgctttccatctccggaaggtcaccgcgtagcaccctttcaactgagcaccgaccgagctcctccaacagcagcaggaagaaaggcgagattggcagcgccaacccgcagaagaggtag

SEQ ID NO: 26161 - DNA, 1371 bp, Zea mays
  Peptide Sequence Number=SeqID_69536
atgtgcatgacgccccagtcgtcggcggcggcgcgcactcgtcccgctgctgctgctatcgaggaagggggagatgtcgacgacggggatcctcagcgtgttgtggtcgttggcatggcgctcgcgggcttcggccacgtctacgtcgacctcctggccagtcgcgccgacgcgggcgcgctcgccgccgtcgcctcccgctccgacgccgcgccgctcgtgcgcaggctcgatcgcgtcgccgccgccaccgccgcgctctacgccgagctcgacgcgctcgccgagctcgagcagtcgacgcggaggccgccccccgaccaggcccgccgcgcgctcgagcagcgcgcggtggcgtcgccacgacgtgcgccggctcagggacgcgtcactctggaactggacctacgacagggccgtgctcctgctcgtgcgcgtcgtgtgcgccatctacggccgcagccgcctcgtgttcggcgaccccgttctggggctcgacttgctggccatgacccgggagtcggggcaatgcgagcaaatcccgcagctctccagtctggtggcagcagattcagtccccgtactccaaagcagtctcagcgatgccccgggaagatgttcatgcactgcttgagcttgagtagctcaacgccatggacggacgggctcgaggacgagttctcggaagattccagctgcatcagcagcacaattagatcagggatgcttgcaccattcagcagcgagcaggggatacccatcaccaccacaacgccgccaccatcgaacagtggcagtatcggcagaaaggtgcggcggttcagtccgaagagcatggtgacatcgctcgcgccgacgtccacggtcggcggctccgccctcgcgctgcactacgcgaacatcgtcatcgtcatcgagaagctgcttcggtatccgcacctcgtgggcgaggaggcgcgggacgagctgtaccagatgctgtcgtggagcctgaagctggcgctgaggaggagcctgagagcccgcgcgaggagcacggcgatctacgacgcgttcctggcgcacaactggcgggagacgctccagaagacgacgctggcgtggctcgtccccatggcccacaacacggtccggtggcaggccgagcggagcttcgagttcgagcagcagcagcagcggcgggtcgtgttggagcggagcgtgctgctgcagacgatgtacttcgccgaccgggagaagacggaggcagcagtctgcgagctgctcgtcggcctgaactacatctgcatgtacgagcggcagcagaacgctttgctcgactgctctagcagtctcggcttggatgattgtgtggagtggcaagtccagtag

SEQ ID NO: 26162 - DNA, 633 bp, Zea mays
  Peptide Sequence Number=SeqID_69537
atggaggttcgttgccaaaccagcttttgccagaatgaagatggtttccccaagttactgagagcatgcacagttcgcctcggaatcaggagcccgccagagtatgatggtcatgaattcgtcgagcatggcacagagaagtgtgtcgtgactatatacattggatccagtccataccatgtggaatggagtgtcactgctgcgaggatgtgtgcattggaagggcagcagttgcttgaggacgaccccacagttgtgtacctcactgcatacctgctcacccttgatgcacaaggagagaagaaggcttgggaactctcagaaggagccatagtcttggaaggaattccagtcttccctcaggctatggataagaaagagcaccccgagtcctcccaagatcccctgccggagttgtttgagcccctcaccatgaagaagattccagcaccatcccttgaagtcaaggaagaagctgcaagcaccccgccagcaccgccgccctctgaggagctacaagtgacagtccagcttgaagaagagttcgaccccgtcttgccatctcaatcgccgccagaagaaatcatcaacatcagctccctcttgacccatccaggagatgtctcatattga

SEQ ID NO: 26163 - DNA, 168 bp, Zea mays
  Peptide Sequence Number=SeqID_69538
atggggattcttttctatggacgacgaccaaagaacaaaaaggtaaacggcaagcggaaagactcgctggtgccaacagctgcttggaccccggacacgcggcctccacaccaagacccacacacgatccaagccatagtgaggcagtggatgaaagatcaacggtga

SEQ ID NO: 26164 - DNA, 381 bp, Zea mays
  Peptide Sequence Number=SeqID_69539
atgaccgaccaacccgaggtcgacggccagcacatcatcttccccaatgggtctgctcaccgacgcgttccttggataggcgcggtcaccgacgacagcggaagcgctaccagccatcccactaccgactgccctcactatcgctctctggtcaacgccggagtaatggtggcgccgtgccccgccacaacaagctggcaatttgattctactacgggttatgcatgcatcaacaacgaagaaacgtcgagcaggcacgggacgcagcccgggtacaattacgtccatgccctcgaacatttgtttgtctgggccgaagctattgactttcgtcatcttgcactatcgctagagcccttgagcttcgttttaaggagttga

SEQ ID NO: 26165 - DNA, 423 bp, Zea mays
  Peptide Sequence Number=SeqID_69540
atggtggaccccgctgtggtgcgagtccggctatttccccagcttcctggttgtcgcgcggcgatggtgctcgtcggtggagcaaattccagggagcctcgcctgcccaccaactccgcgcagaccaccggccgttttcaaccagccgacaatggcgcaatgcggatagagaatagactacgaggcccacccgtcggcgagccgaactcagaatacgtcatggaattaccactagacgcgcagagcagcggaagacgtctcgatgtagacgaacgcgtcgagcagtgccgtgtagtcgtcggcgtccttcacgtcctcgcacggttcgtcctagtgctccagatgcagcacctccgagcactctcttcagtggcggacctagaaattggccaagacccgggccgaagcgaccataaactctaa

SEQ ID NO: 26166 - DNA, 231 bp, Zea mays
  Peptide Sequence Number=SeqID_69541
atggggtggccggcggatgagcgcgccgtcgctagggacttgatttgtgaagaaatagaactacaggggcttaagtgcaatgaaaatgaggaagaaactgtgattgaagaagttgtcgctcaagctgagaatcctccagccgagaataacttctacttcgacatctgtggagtagacccagaacctcctgcaacacaaggcaagccccggtgcattatcccctttccttga

SEQ ID NO: 26167 - DNA, 264 bp, Zea mays
  Peptide Sequence Number=SeqID_69542
atggatatcaaggtagagcgttgggctgagactggtggtggcggtatgcttgagcttgaggacataaagatttttcactgggagaaggaacaagataacaggaggagggagaaagaacgttttgttgcgtctgtgtttatcgcaacggaaagactcgctggtgccagcagctgcttggtccccagacacgcggcctccacaccaagacccacgcacgatccaagccatagtgaggcagtcgatgaaagatcaacggtgatttaa

SEQ ID NO: 26168 - DNA, 126 bp, Zea mays
  Peptide Sequence Number=SeqID_69543
atggggaaggagggggaagaagagaaggaaaagggttttgctttacatgggatctcaagccgaatcctgctatactttggaaaagatcaaggtttagcgaggaggaaagggaaaaggaaagggtaa

SEQ ID NO: 26169 - DNA, 321 bp, Zea mays
  Peptide Sequence Number=SeqID_69544
atggaggtgaagtttggtaggggaaagagggaggccaagggggacagtgggtcaccttggcgcaacccacgtttgcaggagaaccgggcccccggggccccattaactaggatagaagttcttgaggaggagggtgacgtaggatctgttgatgctatcaaggttaatgttgctagagtggaatgcatggagaacacccatgatagttggtttcatggaacgtctgaggcttttaaggcacgcaaccaacgtagcagcaatgtcaaggtggacagggggaatgccaagtcgggagcacgtcagggaggaaagcgtggttga

SEQ ID NO: 26170 - DNA, 357 bp, Zea mays
  Peptide Sequence Number=SeqID_69545
atgggaagacgcggtgcccaacgcctgaaaaggcgcgacgtcgagaactccacagcgtatgcaaccgaggcattgcatgtggttgtcgaagggtgcactagggatggaggcgggggcgtggctcatcggcatggtgcaggcggggctctggtgctcgtaggctcggtagtttctacagcggacggggtcgcgacaatccttgacgtggtgatcggaggtgaggcagcaaaagtagtggttggggcaggtgatgggttttgggttttgacagggcaacggtgggcgagggtggctagggataatagggcttgttggaaagagcaggcgagtctagagggtggggtgtgtgagggttaa

SEQ ID NO: 26171 - DNA, 963 bp, Zea mays
  Peptide Sequence Number=SeqID_69546
atggtgagctcctcgctcaaggccacggcggcggctgctaccatggtggtcgtcgcggccgtcatcgcgtccacggcggacgcggccggctcctactacatcccgacgcctgctacccccgacttcctctcgtcgcccgtcttcctgtgggtggcggccaacgtgatcatcgtgtggctcgtctcctcctcccgccgccgtggcagggcggccgacgacgacaccggcgagccgtcctcggcagcccacgacggcggcggcggcgaggcagtggttccgggcgccgtggacgacgacagcttctacgcgtcggagtacgaggctttctccgacgcgacgctggtgtccaggaggccgcaggcccgggaggcgagcgcgggtcggagaagcgaccgcccccgcgtgcgcaagaagccggccggcggcggccaggacgcggccacgaccccggcgacacgtgatgatgagccgccgccccgcgacggtagacgacggcgtggccaggaggagacggcggcgcctgctgtatcatccgtcgtcgtcgacgaggacgtctcgatggactcgctgtgggcgtccatcgtgcagcagcgcgcggcgcggccggtggtggtgcggaagagcgagtcgtggggcaacgaggagctgccccggctgcagcgcgtggccgagacggcggcgcggcggcaggtgcgcaagtccgtctcggcggtcgtcgccaaggcggcggccgcgacgccgccgcctgcaccaccgtcagcgtccaggcagacggggtggcggacccgggatgtgctcgtcaccatctcccccgacgatctcctccggcgcgcggagagcttcatccggcggcagcgcgagcacctgcggctgcagcggcaggagtccgagcagcgccagctgctgctgcagcagcgtcgcgtccacggggccgcgccgccggcacctctcatccgcgtctag

SEQ ID NO: 26172 - DNA, 573 bp, Zea mays
  Peptide Sequence Number=SeqID_69547
atggcggcgctgcatgcgatctccatcgccgcggcccctccaccgatcgccttccgcgagacatcatcaccagcaacctccgctgggatttgggacgagagggaccctcactctttactcttttactgtaggattcaatgggttgttttctctgttgtaagcttcaattcgtttggtttgattggcagtgatataaaaaagttgaaactttcatacttacctgccgagaatgcattgttgaagttgcaaagatctgaggggtcaacagtggctaacttccctgtcactttattccaaagagcaaaagggaatcccaccctagctgtgatattttccctggattatggttgtccaggaatcctacatggagtggaatttatctccgggttaattaaccttggttgccaaactagccctcaatgtgcgggacaagaagggaaatactgctttgcacatagctacacggaaatggaggccccagggatctggaataacaggagcctgatggttgcatcagtagagttgaccacttctcagtattgcgagatgcatcttacatggtcaagaagataa

SEQ ID NO: 26173 - DNA, 213 bp, Zea mays
  Peptide Sequence Number=SeqID_69548
atgggtggaaacagtagggtcgacaacgtcgaagcatcagggttcgacgagaagaacgcgagcagtcacgtgaagacgcttcccaaaaaaccttattcgccctctcccggtgcaggatctcgaaggcgatcggttctggagacctgctctcccgatcgcagatgcacgtcggcgctcggtatgaagaggactacgatagcggcgcagctgtga

SEQ ID NO: 26174 - DNA, 2049 bp, Zea mays
  Peptide Sequence Number=SeqID_69549
atggacaaggatcgccaaggggcggcgcaaaaacgccaggcgactgttaggattcacgaagctcggccgaaaaggcagcggggaactgcgaaggctgtggcctccggcggaggtaagccgccgctggcggtgaaggcgggcgcctctgcacctagcaaggcgccggaggcaacggcgggcgccggaggctccaagtcggcgaaggtggtgcccccggccagcggagtggcggaggcttcgaaggcggcccgagcgctgccgctggcgggcaaacgtgttgccgacttcggcaccgacattactgtggacgactatcttggtgggtcggacgagggccagcttgctatggttgcgcctggcgcggagatcgcgacggcggccatagtgccgaaggcgaggggcgaggcccttgacgccggaggcgaggtgtcggccctcgccgtggtcagggacgaggcgggcgcagcgacccgccggctgaagggagtgacggaggcgctgagtcaggcgacggaggcgctgagtcaggtggctgacttcgccagccgtactgcgtcgggggccctcacggcggctgtgtctgccgaagtcgagagacttcggacacaacatgctgacgctgttcgtgagaagtcggcctccgacagcaagtgtcgtaagctgacggacagggtggccgccctggagaaggagaaggctgacctccggcgccaactggcggcggagaggagggaagctaacgaggccgtcgccaaggggcaggctgcgcaggcggaggccaagctggcgcgggcggagggcaatcttgccaaggagctcgccgaacatctgcaagagcggctcaccgccctggagagccacgctaaggaggccgaggccgcaatgcatgcggaggccgaacggacgcgcacacagcttatggatacatatcgtgagctgggtgcgcggaccggtgacttcgaagtgccggaccgagagcccggccttcgctgtctgcagtgggtgcaggaggagctgctggaacttccagccgtcgtgggggggttgatgttgtacgcctccctggtcacctgcgagggggcgatgaacgcgctctcccgcgaagggtgccggcacttcgaggccttcgaccaggcggatgaagattttgatcgagatatctataaggtcaaagaccccgtagtgaaggaatccgccggggccctctatgaccggatgtggggtctgcacggtcgtgaggtggtcagggagcgggccgaggctgcgagggctcaggcggagcgtggcgagcgggtggacgacttcggggcactgaacagcgcgctgcctgacccggagccgacccctgcggaggccgcgactggagtcgccctggaaacaaccccggagactgcggaagacgcgccgggcgtccccacctctgctgtggccggcgaaggcgtgtccccaaaggtggccgaaggcgcgcctgacgcccccgcagctgctgcgccgagtgctgaagattccgcggcggtggtggcggaagcagcggcagaggcgacagcggaggctcccgcagcggcagggccttcgcaggttcaagagtttgggcctgcgcacgcaaccgctactactgagtttttggcgacttcgaccgcggaaggtggaaatgaatatggtgggtctgtatgtgagttttttgattttactgactctgggagctcggttgagtggagtgaggagtcgtcggaggaggacttggattattttgcggccttggacgtggctgcggcggaggcttcgccacgcgctgcggacgcgccagacgtgccgggtcctagcaccgggcgccgacgacgaagggcggttgcaaagcgtagggttagcgcggaggaaggggctcggcttcgcgtgagtagggttggtcggcaggaactgttgtctttgccggccgccgcgagcacaggggaaggggaactgcgaggtctttttgcgggtgaggagcttaggataatgttatttaattatagggagatggggattattcctaaggtggagccgatgtag

SEQ ID NO: 26175 - DNA, 615 bp, Zea mays
  Peptide Sequence Number=SeqID_69550
atgcagcccggctgcacccctccaccggcggtcacccaagatggtgacctccggcttgatggtgggggaaagcgagccgggctgtggcctctgcccctccctcagcctcaaggattttcatcaccagggctggggagaggagtgtgccgagttgaggttggcccccgcgtgggcggcagcccgctccttcactcagtgatcggagggaagggcggccgtcgtccgtggcgccggcagctgcaccgtgcctggctctcggacgcgagtggcttcggagccgcttcgcagcgccggcgtctgccacggcagctggaagaggttcttccgcaggcgctgatagccaaagccggccacgggctgacctccaactctacggccttccgcccgtccttgcctcacgagtttgggcatgggcgggggcctcctggcagcagcatccgccctgaggtcagtgctgccgctgttcggccccccggagcagaagtcgtcgtcgccgccgctgctggagcgggtgacggcgcgccgttcgccggtcttccgtcgctccgcaggcccacccctatcgagtggggctgttcgtacctgcggaggggggaaccggagttccgtttgtaa

SEQ ID NO: 26176 - DNA, 669 bp, Zea mays
  Peptide Sequence Number=SeqID_69551
atgccgagttactccacgcatgcatgctgcttcaccggcgagcagccgagcaggagcagagcagctgtcgtcgtcgactcgtcgttcggggctcggccgctcggggtcgggggcgactggggcagattcgcagaagctctagtctccagcagccgagcaggggagttcgcgccgcctcaccggcgcgagtgcgccgcgtcgtcgctgccgccgtgccgtgagcccgcgccgccgtctgttgctgcctggctgagtggctggaatgctggttgctgccgctggaagctggataggaagggtcctctagacgcccagcaaggaactctaaatgacactctaaattatagaggacgccacacgcatcctagatgtggagacttggagacgtccgctatccgggcgaggggtcgggctcgcgcgggagccgaccaagctgggctcgaagaggccatgctcgagcgggtccggcgacggaccgctctcggtggttggaggcaaggaggtggcccgcgaggagacaaagatcgaaagctccggtgcaaccgtcggtgttcgtcaccgtcgaaccgccatcacaaagaagctgagaagatccacggcgccgacgaaggaaggtgcggagaaacgcaagcgcatctcgtcgccgccatcgtcatcgtcttccagtag

SEQ ID NO: 26177 - DNA, 759 bp, Zea mays
  Peptide Sequence Number=SeqID_69552
atggctgtgcttcgacaaaacccaagtggcatgactgatgcagataagacatctcttgcggctactcggtttgctgctattgaaaagaagcccttccatttcttacattgttggtccatattgaaggatcaaccaaaatggatggaccagcacatgggtaaccaaaatcctccacccaacccaattggtacccaatcaaatactattgacttagatggtggtgaagactcagctccatcaagttttacttcgaagagaccgcttggtcgtgattcagccaaggaaaaggcaaagaagcaaagatcagagaacacatcatccactgattcggagtacctaacacggatgggtgagctttctttggaacggttatctgtgtacaaatcagtagcttcaactgaggagaagaagttggagttcatgaaaaaacaggagaggcagaaactgatattggagaggaagaagcttaatttagagaagatgaagatggaacgacaaaaggtgaaggaggacacggaacaggaggttctcatattgagcatggatttgacaaaatgtaaccccctccttcgacagtactacgaggcgaaacaacaggagattctggcaagggttactggaagctcgtcgtcaagcaagtcgggtgcgcttgcagtagggggttacaagcgtccacacgggcgtaaggagaggacccaggtatacaatgggggtgtagcagagtactacgtgtctagcgggggagagctagcgccctaa

SEQ ID NO: 26178 - DNA, 213 bp, Zea mays
  Peptide Sequence Number=SeqID_69553
atggcgttcggcctcatcatgtgcttcgtggaccgcaacgcggcgcagtgcctcgactgcctctctagggcgccgcccggtatcgcggcggcgtgcccaggcagccggagcgtggacgcggcgtacgacgcgtgcgtgctccggtactcggtcgcgccgatccccgctgccgccgacctcgactacgacccttcggtcacggcggcgatttga

SEQ ID NO: 26179 - DNA, 441 bp, Zea mays
  Peptide Sequence Number=SeqID_69554
atgggcaagagcaagaaaggcgaaagttcgtcgcaccactccggcgacaagcggaagcgcgagccgagccctccctcgcaggacttcggcgattccgagtactcggaggaggagttttcctccgagtccgaggggtcgtcggtctacacctctcccccggcatcgtccgatgactcggacggttcccaggggatcaccgctgaggtgtggacatacatccgagccgtcgagcgctccgggctcgagggctcggatgagtcagaggtctcctcggacgaggagaactcctctgagtcgtccgaggaggagagcggcggtgacggcgatgacggaggcggcggtgatggtgacggcgacagcggcaagggcgacggcgacggtggcgacggcaagagcggcagcggcagcagcaaggccagtggcaaagcgccactggcttaa

SEQ ID NO: 26180 - DNA, 246 bp, Zea mays
  Peptide Sequence Number=SeqID_69555
atgccgagaagctcggcggcagctacgccaaccgtgcgcgaagaagtcggggatgaccagcgggtctcgcgactcagtgaagggttgagcagcgcgagagggagggctggccagtgggccctaggtgtcggcgccaggttctgggtggtgcgcgatgtaattgtggacattactccacaacccatcacactcaatcaaagatccaaatcagataagcatcacaagaacaaacattcaagcatataa

SEQ ID NO: 26181 - DNA, 1515 bp, Zea mays
  Peptide Sequence Number=SeqID_69556
atggagaaggatcgccaagacgcaccgcagaaacgccgggcattcgcgagggttggggacccgtggcgcgagatcaaaatgacgcgggcgagcgcaaagcctgccgcccccggcgctagcatgcctccgcctggcgcgcctggtgccagcgcgccgctgcctgccgtgcccacacaagagcgaaggccgacgtcgccaccgcgcgctgttgagatgatgatgggtggccccaaagtctccctagatatttccatggaggactaccttatgggcgaggttgcgatgttcgacgcccacactgggcgaggacctgccgtagcggagtctaggcaactggctattgtcccggcgccggtggctggccccgttgttgcggcggtcggggcctggggcgaaggggtctacacaggacccgtggtccaggggaggattgagcgcctccgaacgcagcatattgaggcagtgcgggacagatcagccgcggagaacaggagccgcaacttacttgagaagctatcggcggcggaggctgagaaagaggacctcggccaccggctcgctgtggaaaaggagaacgcggacagggcccacgcggaggcccaggctagccgtgccgaggccaacctcgttctccaacgcgctaccgacgcggagtcggggcacaggagtcttcgccgctatctggacagagcggaggcctctactcgcacaggggtgggccgagcacacaagttgctcgtggacgcgtaccgtgagcttggtgtgtgtactgccccctttgacgcgtctggcgaggaggaggagctagagctactcccggcgattgtgacgggtctcatgtccttcgcctcgttcattacctgtgaaggagctgcgaatgccttgtcccgcgagggatgcaggcacttcgaagtttttgaccgatccaacgaggacttcgaccgtgggatcttccaggtcggagacgaggtgttaaagtggtccactggggcgctttatgataggatgtggggcccgcacggccatgataccgtccgagagaggtcggaccgggcgctggagcagatggcgaatgatgaagaagtcgatgactttggaggcctggaaagctcggtgacccatgtggaagatgtgaggatggagattggggagcaaccggctccactgaccggcccttgcgaggaccctgtggcggccgctgccccgtctggctccagcgacggctgtgccggctgccgaagaccctgccgagccgaccgctccttcgcaggtggcgggattgtgttaggggttccgacgtttgggcctgcgcaagcaacccctgctgatgatgttaattttgtggcggccgcgaatgcgatgtctgttaatgaaaatttgtctggtttggaaactgggtcttggtcgtctgatggggttgagtttgacagtccgtttttgtggactgaagagtctttagacgagggttttgtcacacccgggtttcggggcaccaagacccgggcgcgaacataa

SEQ ID NO: 26182 - DNA, 558 bp, Zea mays
  Peptide Sequence Number=SeqID_69557
atgcacaatgaaactcaaccccgaaacgttctacgcgtagcagaggacaacccaaacgctaaggacgaacttacaggagaaaggggtactcaaggggccgcctgtccttgtcaaagacgtttagaccctcgagtacctggtttatccccagaatattcccacgaggggaggttagagatagtcattaagaaaagtaaaataggaaataagattgcacaatttggatcatgcaccttcacatcgaggactagaaagacttcggcggaagtcgtggagatagtcccttgtgccaggaacaagtggggcaactggtgggatttttggttctatgtgtctcctggtgatgtcgaagacctgcttggcctccctccggccattctatgctcacattgttatgtggcgttccctcaatttgaggtggcggaggatgacgaggacgaaggggcccttcggtatgctgaccgcttgagtagcgggcgcgatttggttgaggaatttatcggctatggagtgtggcccttggcacacggttgggtactgggtgaagtatgcccctag

SEQ ID NO: 26183 - DNA, 1254 bp, Zea mays
  Peptide Sequence Number=SeqID_69558
atggcggcctccctcctctcccgcgccgccgctgccgccgcggcgctgcgcggcgcggcccggccgaaccacctcctcgctcgggcctccctccccaaggaaaccctccttcctcccctactactactcatcatcatcatcaccgccgctacgcccctcgcggtcggtcgggtcgggtgggcggcgcgcgcggcggagggcgccggtgggccccggtgcggcccgtcgccactgctgggcgcgttcgggatcgcggcgcggtgcaacgccacgtcgtcttcgtccgcggtgtccgaggccaccggcgtccacacagtgcccccgacggagcccgtggtgtcggccgagtggctccacgccaacctcaaggaccccgacgtcaaggtacttgatgcctcttggtatatgcctgcagaacaaaggaatccattacaagagtaccaggtggcccatatccctggtgctttgttctttgatgttgatggaatatccgacagaacatctagtttaccacacatgctgccatctgaaaaggcattttcagctgctgtatctgctcttggcatctacaacaaagacgggatagtagtttatgatggaaaggggctgttcagtgctgctcgtgtttggtggatgttccgtgtatttggacatgataaagtttgggtgttggatggaggtttgccccaatggcgcgcttctgggtatgatgttgaatcaagtgcctctagtgatgccatcctaaaggccagtgcagctggtgaagcaattgagaaagtttaccagggtcaattggttggtccaaccacatttgaagcaaagttgcagcctcatcttctttggagtcttgatcaggtgaaagagaacatcaacacccagacacatcaacttatagatgctcgatcaaaacctagattaactgatttgaaacttttattcagatttgatggtgcagttcccgagccacgaaaggggattagaagtgggcatgtgcctgggagcaaatgtgttccgtttcctcaggttcttgacagctcacaaaagctattgccttcagatgagctccgtaaacggtttgagcaagaaggaatatcacttgatcagcctcttgttacctcttgtggcactggtgtgacagcatgtgtattagccttgggccttcatcgacttggcaaaaccgatgtcgcaatttatgacggatcgtggaccgaatggggcgcccatcctgacactccagttgcaactgctgtttag

SEQ ID NO: 26184 - DNA, 879 bp, Zea mays
  Peptide Sequence Number=SeqID_69559
atggtgcgcacgaagaatgtgtcagcgccagggggaggagacgacgacgaccctcctcgccccttcaggcaggtcaaggggaagactgtatacttagagcagcaggaaggctgcaagaagcggcgtttggatagagcagcctgtgcagcagctgagcagagggaccctgcagcggcagatttattcagcaccaagatacaggagtcattctttcgagctcagatgtcagcccagatagctctacgagcgcaccggctattggatctccctgctttcctgctagcagccacctgtgctatggtacttctgatcctcctcgatgccctcacgacggagtcgctccagccacagctcacggcgcggccctattccgaccgcctttcacagatgggtcttgacactctccagcggatttcactccaacggccaaagtttgatgtggttgatttccttatatgtgagatcgaggacatggtattggatggtcttcatgcccggcgacagctgtcgtatgctcattatctctgctacatcttcgcacaactgatccggccaccgcagttccagggcactcttgaggcctcacgccttcattttggctcctattgtccagcttctgaggacccagtgccagtacctgatctagtgacaaacactcaggcagaggatgtggcataccatcagttcgagactcagggcatagccattcctgatgatgatgatgatgatgatgatgatgatgatgatgatgatgatgatgatgatgattttgggatcccgcctccgccttttgtgcctccccgctcacatgatcatgaggccgggagttcccgtgctgcccctcctgccattgaccctgctctggcggcgatcatttag

SEQ ID NO: 26185 - DNA, 168 bp, Zea mays
  Peptide Sequence Number=SeqID_69560
atgtggggtccagaccctgcagacgaacaaccccaacccttgttggctcatgagttcctccatgtcacactcggttttagaaggcaaaccgaatgcgaaccatttcacaggatgcgaagagaattggaccaaggcaatgaggatgcaacacctcaaaagaagacataa

SEQ ID NO: 26186 - DNA, 360 bp, Zea mays
  Peptide Sequence Number=SeqID_69561
atgctgcaagcagtgcttgaagtcgaaaatgcacgacaaaagagacggggacagccacgacacaacaacatggaagggggtagctggaaggctagcgagctgacacaagtgacggagacagccaagtccggcagcaagcccgtagcgacgcacgacagtggggagctcggcaagatggggagcaacgaccattggcgtgaggagagccaggaaaatgacacgcataccaaaacgatcctgggcgcgacggatatgagggaaacgtgcagcatggacagaaggaactcggcaccattgctggccgaggcgagtgcgcttggacatggacaccgaggcgaagagaggaaaaccagaacgtga

SEQ ID NO: 26187 - DNA, 2013 bp, Zea mays
  Peptide Sequence Number=SeqID_69562
atggtggtgacggcggccggcagcgcggaggaggctgtgcggcggtgggtggacgccgccggaggacgcctcgtcctcgacggcgggctggccacggagctcgaggccaacggcgccgacctcaacgacccgctctggagcgctaagtgcctcctctcctccccgcacctcatccgcaaggcaaaccactcccctcaaaccctgctcttcgccactattcaagggtttgaatcaaagggtttttcaaaagaacagagtgaaaacttactaacaaagagtgtcgagattgcactggaagctcgtgagatgttcttgaaggaacatctggagaagtccactcctatacagcacccggttctggtcgcagcgtctttagggagttatggagcttatcttgccgatggctccgagtacagtggggattatggtgaagctggtacgaaagagttcctgaaagatttccatcggcggaggctccaggttcttgcggaagcaggccccgatttgattgctttcgaaacgattcccaacaaactggaagctgaggcgtatgtcgaacttctcgaggagtgcaacatcaatatccctgcatggttttccttcaactcaaaagatggagtgcatattgtgagcggtgactcgttaatcgaatgcactactattgctgacaagtgtgcaaaggttggtgcggtcgggataaactgcacacctccaagatttatccatggactgatactctccattcgaaaggtcacggacaagcccattctgatatatcccaacagtggcgaaagatacgatggtgaaaaaaaggagtgggtggaatccactggtgtgtcagatggtgattttgtttcttatgtgaacgagtgggcccctctacggctctaccccaacgggaacgacaccgaccaccgtgggttcgtgcccgccgacctcacgctcgcactcgacggcagtggtctgccagaggccacggccacgtaccgcccctaccggcaagcgcacagcaacaggccgtgccgcttcgatggatcgtggtacactacacctgcggtacagcgggtggttgttggggaggaagggcgaggtggaggagcttgtgaagaagacgagcgtcaagttgtggagaggcggagaatcaaacgacgacgcatcggccgccacaggctaaaggcgtgttgcgacggccgacaacttggccgggaggattggcaacggcgcgtcgaggcgcagcacattgagggcatgcctgatgtccggcctctgggtctgccccgatggacacgccatgtgtcggcggtccggttccaacatcgcgcaccagagctcgacgacgagaacacgctccatcccctgaacgtcgtagtccccgcccagccgcgcgtccagaaccctcccggtttcacggagctcccagaccctgtgcgccaggtggagcgtgttcccgttcgacagcgtcaccacggggcactggccggccacaagcgatctcgaggagcacgatgctcaaaactgtacacgtcggaccccacgctcgtccgcccagtgctcaggcactccgggtccacgtacccggtcgtgcccgcgccgccgccgtcgtccgagaccatcggccgtcctcgaccaccgccctcgccagcccgaaagtccccgagcttggcggcgaacgacgcgtccagcatcacgttgcttggcttgacgtcgcggtgcacgacgcacgactccgtctcctggtgcaggtacagcagcgcggagccgatgccaagcacgatctggtacctcgcgtcctcgcccccacgccagcttcttgtctgtgtcgtacaggtgcctatccacgctgcctttgcgcaccagctcgtagacgagcaggaggtcgtcgccaccgccgccgccgaagcaccacccgacgagcagcacgaggttccagggccggagtcggctgatgatcctcacctccgacatgaacttgttccagcgctgcgtggaacttttggagttggagaatcttga

SEQ ID NO: 26188 - DNA, 243 bp, Zea mays
  Peptide Sequence Number=SeqID_69563
atggccgccccccctcagctcgcctccctcaagcacgccgcgctcctccctgctcgaccatggaagccgcaccgtcgacctcgcctgaaccccctctgccgcgtccctctccctgacttccgagcttcagtcatggtgtacggtgggatggggctcaggtccctattcgttgtccacctgtggcgcaatgaaaggctcgaactgggcatcattgtcaatctcgcggtttcaagtcagatttag

SEQ ID NO: 26189 - DNA, 656 bp, Zea mays
  Peptide Sequence Number=SeqID_69564
gaagaagtcgatgccgaccagatccgcgtggatgcagaacgcctggccgcctggggatgtgctcgagcgcagggggcggacgtgcgtagcagggagataagcaggggatccggagggagatggggcgcgcacggcaccagagcaggagggcgcgcggccaccatgtcaagcacaggggcgaactggactgaacccgagctcgaagaaagaggagaacggctgggcgaggccgcggcacaggaaaacggcggcgaccatggaaaaagggactcggccgtgggagaaacagagcaggggctgggggtgcgcgccatagctggagcaggagcacgccggcgagctcgcgcggccgacgagcagagcaggagggagctccgcgagctgggcgagcatggacggacgagcgcgccagggacgcagggtgctggcccgagcaggacgtctggcccgaccgcccgagcagggagcaggcagcggagcagggctaccggcggcaggggaccgcggtccgcggagggagggagggagtgggctgcgggcgagcggcgttctggcgatgaggatttcctcgggagcagccgccacccacgccaaagtgccaaacagaagctagggttagcgttccttgggccgggctgcttggaaatgaggatatg

SEQ ID NO: 26190 - DNA, 603 bp, Zea mays
  Peptide Sequence Number=SeqID_69565
atggccggcttcgagctcacccagcccctgctctgtttctcccacggccgagtccctttttccatggtcgccgccgttttcctgtgccgcggcctcgcccagccgttctcctctttcttcgagctcgggcgcccgcatccttccctccgtgaatcagatgctggatatgagaaatttttggttgatagattgaccctaaagccaggaaagatatcagtcctcgcgaaatccattcgcactcttgcatgtatggaagacccaatcaaccaaatactcaaaagaacagaggttgctgaaaatttaattctcgagaaaacatcatgtcctttgggtgtactattggttatttttgagtccaggcctgatgccttggtccaggagacattgcttgttcataaagatcttataaaggctcaaggtcttgatgacttactgctatcactcaaaacagaaggctcaaggtatagcatatattgttttcagttactttttcaggagacattgcttgttcataaagatcttataaaggctcaaggtcttgatgacttactgctatcactcaaaacagaaggtttgcatttcactttacttgcgcatccttaa

SEQ ID NO: 26191 - DNA, 369 bp, Zea mays
  Peptide Sequence Number=SeqID_69566
atggaggatgttgttgagggttgtggtggtacgagggctggtagatatgtggtggaggaggatgatgatgaggtgctcccctggttcggcctaactatgtccgctattgatagcacgctggaagaagctattcctaaaaatcttttgctcaaccttcctgagatcatggtcgtcgacgtccgtgtagcgctagcctgctggttgggcaagagccccgatgttatttcagcccccgagggtgccctagcccatgaggatgctacgatctgctccctctttgctgcttccatgaatgttcacgtggggtcaccaatgccccggactggtgatgctgcggtgacaagttctgatcttcttgctggtctatag

SEQ ID NO: 26192 - DNA, 390 bp, Zea mays
  Peptide Sequence Number=SeqID_69567
atgaccggtgctccggtgcggctgacacctaattctacccttaatgaccataatccctcaattaattgcaaagctctagctcctaatctctctgtccacggcgggtcagacaggccaggaccggttgaaccgccccctagggcggttgaaccgccccctgacacccctggcgacctgactgccagtctgactggcagactgcagatcagaagtcagagggtcagaaatcagttgagctgcccccaggaccagttcagctggtctagaccagagagttttggagagaaaaccccagctcagctgcccgggggcaagttcagctgggtatggtcaaagaggtccacagctgaagttgaagttcagctggagttgaaagttcaactcagctga

SEQ ID NO: 26193 - DNA, 195 bp, Zea mays
  Peptide Sequence Number=SeqID_69568
atgggggagcgagtgcgggcgtgggcggtgctcaaaaaggagctggggtgcgtgggcgggagacgtggccagggttctcagcgtgcggcgcgagtgcacgtgttctggtccaaggtgggcgtggagaaggcggagctgacagagcggtcccacagcgcagcggcgcgggtgcgcgacctggctgggccgagctag

SEQ ID NO: 26194 - DNA, 156 bp, Zea mays
  Peptide Sequence Number=SeqID_69569
atggttggtttacaggtggtgatgaggatgaaggttatgattatgcttatagtaatggttgcctttggtgcaatccatgctcaggtaaagaagaaggagaatggtgtcgaggcggatctccaggagttctgggacttcgacgagttcgaggattag

SEQ ID NO: 26195 - DNA, 258 bp, Zea mays
  Peptide Sequence Number=SeqID_69570
atggctgctcggcagccaggaacggaaggccaggggctgctcgccattcattggctggccagtaggcaccagccagactgcgcgacaacagcgggtcgccatggcggccggacggggctgatcgggcatcgcggccaggcggggaacggggatggccgggacagcagcgcgtcgagcagcatggcgcgtggcctggctcgacgagggccggcgcctggcgcttgcgtgaggagggcctgggtggttttgggaagatga

SEQ ID NO: 26196 - DNA, 489 bp, Zea mays
  Peptide Sequence Number=SeqID_69571
atgaagtttgttcatcatgcaagtatgtccaaagcaggacatcaaaaggcacttgatacattagacgacctggtccgagttttgtcaagaatagaacctgatattggtgtgatgacagtgacgacggagggggatgtatttactgggggtatgggatcaggcagtcaaactgaacaagctgatcaaaatattaagtctgtgttgcacgtggttggtgatgaaaacgtgggtgataaagctgggtgtgagcctggtgcatcaaatgctttagtaagagttgaacatgatggcgttcgcaaaagtaaaatgctgggaggtgaaccccttttgcgtggaggaattggaatagaagattggggtggttgcgaaacagacaaacaatctaggaagaagctagattttaacattggaggagtgagtatggataaaccaataaatgagaaaccaaaaggaagaatgataagaagtgatgagttgaatgaagattga

SEQ ID NO: 26197 - DNA, 282 bp, Zea mays
  Peptide Sequence Number=SeqID_69572
atggatcttgtcttcgggctcttgcatctatctgaaagccttagcaaatatgatatcagctgcactgcctgtatcaaccaaaacattatggaccagaaatcctttgataacacaagagataaccatagcatcattgtgtgggtaatccttgagttgaagatcctcttgagagaagccggctctgagcatgaaccgcctgttatcgggagaatcagcttcggagccaaagcagttccagcttggttcttgaacgaagccattgtctcaggagagtggaagtga

SEQ ID NO: 26198 - DNA, 372 bp, Zea mays
  Peptide Sequence Number=SeqID_69573
atgacccaattggagacctggaagccaaggtggaacaacttcggtcagagctacgtcaccggaatagggatgggcgcaggacagccagaccgcgaagcaaaagctcgagctcgtgtggtagagcttagtgcggccctcgacagcctacaagtgtattgtaatactttacatgaagaatacatgtattgtatgctcgactgcacccggacgtggcttccgacgttgctgcaaatgggagccggaccatcgggaatagcaagtgaaggacctgatggggagttggacctttttaggccccctccttccatgaaccttgctgacgaacggtctcctgcagcaggaaatgaagcaacaaaggataatgaagactag

SEQ ID NO: 26199 - DNA, 198 bp, Zea mays
  Peptide Sequence Number=SeqID_69574
atggcgcggcgactagcgcggtgccggcggcacggtggtgatgaggatgatggttttgactatggtaatggtaactggtattctttccatttggaaagggttgcctttggtgcaatctatgctcaggtaaagaagaaggagaacggtgttgaggcggatctccgggagttccaggacttcgacgagttcgaggattag

SEQ ID NO: 26200 - DNA, 894 bp, Zea mays
  Peptide Sequence Number=SeqID_69575
atggggtacaggggatttctagccgtcagatctagtgcatatggtccagattacaccggatcgcctatttatgatcctacggtccgaaaaccaccttccacctccggtcaaagcagagtggtggcggcgagcctcacggtggggctctcgccggtgaaccccggatctgtggccccagtgctcccaacgcatcataacttagccctaagtgaagctgatatgaaggtgaaactggtagagggagttttacccgagacaccgatgaaggtagagctgcccacgccgatgtgtggcagtgaagggttgcgaaatttcagcacacgaggccacgagggtcagggaaaagcggaggcacccagggggctttatcccctggatgaggaggttagggaagaagaggagttgacaggtggggtccacgagccagcgagggtgaccacggaaacgggcggccggcttgccagacacgggccatttggccatctatacctccgcacgataatgatggtcctcgcctcagttgcgatcacctcgtttgccattctacttgttttctctctcccctcatgcctccacctccgcgccaccccattcttggcaaagggcgtaggagcaggcgcctactcctcgtattcgtccgacaccagccccgacaccgactcacgcagtggctattgcacgtccacgaggacgtttcacatcatgcgtgcaccatcattttcgtcgtcgtcggacgtcccgttcgtcttccctgccttcgtcctgttcttccaccccaacctgctgcccccacccacgatcgtagccgcgagccgaccgacgctcatcgacgcggtcgacatatgctacggagttggtggtggtgttgtttcgcttcggcgggtccagggctag

SEQ ID NO: 26201 - DNA, 258 bp, Zea mays
  Peptide Sequence Number=SeqID_69576
atggctgctcggcagccaggaacggaaggccaggggctgctcgccattcattggctggccagtaggcaccagctagactgcgcgacggcagcgggtcgccatggcggccggacggggctgatcgggcatcgcggccaggcggggaacggggatggccgggacagcagcgcgtcgagcagcatggcgcgtggcctggctcgacgagggccggcgcctggcgcttgcgtgaggagggcctgggtggttttgggaagatga

SEQ ID NO: 26202 - DNA, 567 bp, Zea mays
  Peptide Sequence Number=SeqID_69577
atggagatttgggacaccctcaagattgtgcatgaaggtgacaatatcaccaagatcaccaaaatggagctcctagaagggagaaggttcaaaagagatgcacaaccggatcaagatgatggtcaacaagatctgcatctacaggagcaagaaatggaccaaccatcgagtgttcaaattaatgctctgagcattcatcaaaacaaagacaacaaagatgtgaaccctacaactactctctggagtggtggtggaacacaaggagtattagttctgcttgagaggaaggtggagtttgtgaaggctcaccatgtatgtatctatgatacacaaggctccaagcgaatgacccctcgtaatcagtacgccactaatcctttggtaatcatccgtgccacacaaatgaccttgctaagaaggcttatccctacaaatacaatcaagaacacaagcaagaacagaaagaacgacatcatactcatattgatcacaaagttggggtctcacaaaccgatgaacgacgtcactattcaaaatagattgaatctaagcaaattccaagtctaa

SEQ ID NO: 26203 - DNA, 1386 bp, Zea mays
  Peptide Sequence Number=SeqID_69578
atgtcttcgcgctcccttatgcatcgtgtctttccaccttccgagcccccggatggggaacacccgcaatccttccgccttgtcgttggaggaacgcaacttcgtggaagttggtacctttcagccattgttcggcttcaaggattttcatcaggcagcccgaccgcatcccctcaccggtggtcacccaagacggtgaccaccagctcctgggtggggagaagcaagccgggctgcgatcttggtcccgccctcagcttcaaggatcttcatcatccttgctggggcggaggccgggctgagccggagctctacctcctgcgcgggttcgtgggtcagcctctccttcagcattcgagggagagggcgctcaccggcctagcgagaggggtggacttcaacaacgcagggccgatcggcggcgagtgtcgtcagcttcagcgcgttgggctcgctggctcagctggctctggcttggctcccggtgcctcctctcgccacaagggcggttgttgcgccgcgcgcaccagaggtccgcccaagacgtcgcgcgctgctagggcggcgttcgtgttctggagctgtcctgcctttgccccggtacggcgcctctgcgtggaggtcggtgctccgctcgtccgggaggattcgagtggggatctgccggtgggcagacggctcctgtcgtcggtgctgaggtggcggcggctggagaagtcctcgtcaccggcgagatcaccgccaccatccgcgcttcgggcctccggctctttgtacttgtcctcgcccctcgagcgtagatgtgggcgagggcattgttgcagcggcgtccgccctgaggccatcgctgctgcagttcagccacccggagcggaggtcgttgtcgctgctgctggagcgggcgacgactcgcctgtcggctatctgaaccgcttcaccaagcgtgagtcgcctcgtgcgaaggtgacgagtgagccgctcttcgatgagccgaagctggaggtagaggtgtcagcacggacagaggcggagttggctcgaaaagaagacttggtcggccggagcctggccgggtcatccactggcgggaccgacgctggagttaagttgccgaggccacgggccgggctgatgtcctcgggggacagctggctgaggcttcggggtggccggtcgagccgtctgctcaagccggattcctggagaagaccctggcggcgatggcccgggcgtggtgctgatgtcgtccttcggagtggagatcctccgaccgcgtcgccgtccgaggctaggccggacctcgccgaaggtgtagttgacgccgagggtgctgctgctcccttcaactgtcaagatccgagcctgcaggatcgcgttatcttgtag

SEQ ID NO: 26204 - DNA, 342 bp, Zea mays
  Peptide Sequence Number=SeqID_69579
atgcagtcggcatgcaaccgcgccaagtgggcgcaccccttcgactccaacgcgcccagcatggaggcccaggcccacacgtcatgcaaccggcgcgccggttgctacgtgcgagcaactgcaccgcccctcgcgccactacctcgcctcctcgactgcggaactagtaccgtgactcgaggcaaccctacgtatgacccaacagtgccagccaggcgcatcgatcacaggttcacgaactccggcgagcgcgattacactattccggtgggtctggtcctcgactcaagctcgggcaagcttcatggcctctcgggaaagctatccgagggcttggattga

SEQ ID NO: 26205 - DNA, 813 bp, Zea mays
  Peptide Sequence Number=SeqID_69580
atgaatcgtcaggatttttacaccgggaaaacagtcgctcgcacccactgcacggtgggccgcaaaaaccaaaaagtgaacctacatggtgggaccgctccgcgctcgaaaacagtatcgtttctcgacaatgagctcagggaaggtgtttttcggaccttcggcttcctgaagcctaagagacttttttcacggatcaagctcattatgaaaaacgatctagcaccgcgaaggggctactgttgggaccatgcttcgtcgccgaaggtcctgcggaaagaaacaacttcgactgaagctgctccatttgagaacaagtccccaacagggccctatgagatcaaagcgaattatgggcccgtagcatatcaattgaagttgccaccccacatgtcaacagttcatgatgtgttccacgagcaccccgtcaaggagttcgtgaacccgccggagcacgtggaccaggagccgctgacgaccttcgccgcctgcgctcgtggcctgggcagctccgaccacctcagacaccgacccgcacaccgacgtgaccgctgtgacctccccgacgccactgaacaccccgccggagctcaactgtcgtcgggcatgttctgtttatttgtgacctcaaatttatacgacagacttcagagaccaatattcacccattattgcaacctcgtggacggagagtacatcctcgtgccggagcaaggagttgctcaggaggtagcccaggatccagcaccagaacctgccatcgaggatctgcctgccccagctttggaaggcaagccccggttttatgcataa

SEQ ID NO: 26206 - DNA, 183 bp, Zea mays
  Peptide Sequence Number=SeqID_69581
atggtctcccattccggttatggtgggtacaagtgtgatcactgcacgatggcagtcggggtcagtgaggcattgtacgccaaggcggacatggttgctagagtgacttggccgtccatcttgccaccgggttggacagtcgagtgggaccctacctcagctgaggaggagcatgaggagtga

SEQ ID NO: 26207 - DNA, 363 bp, Zea mays
  Peptide Sequence Number=SeqID_69582
atggcggggaaacggtggcattcaagctccattacacgcgaggagaatggtcggctcggggcttcggtgcggggtcggtttcaaggcacgtcggggcttcgggtcgctcggacttggtgtcacgggcgctgtgcggggctgggcgtgctcggcgcggcgggcagtgcagggctccgtcgagtcggctggcatcggggtcgcctgtgcaggggctcggtgtcgcggccgcgtcaggggtcgggatcgcggacgcaggggcgcggcgcgctcgacttccagctcggggtagcgagcgggcgtcacgcaggggctgtacgacgccggtccctggcggagtcgcgcgacttctggtgggcgcggtga

SEQ ID NO: 26208 - DNA, 450 bp, Zea mays
  Peptide Sequence Number=SeqID_69583
atgggcaagaacaacaaacgcaagcgcgggccaactcctccgtcagaggactttggcgactcggaatactcagaggaggagttctcctctgagtccgaggggtctccggttcccgtctctcccccagcgtcatccgatgactcggacgactctcaggggattgtcgcggaggtctggacgtacatccgggccgtcgagcgttccgggctcgagggctcggatgagtcagagtactcctcggatgaggaggactcggacggcggcggcgaggacgaggacgacgacgacgacgacgacggcggcgacgacggtgacggtgacggcagcggcaggggcggcaacggcggcagcagggtcggcaacagcagcagcaggagcggcaacggcggcagcagcaggggcagcggcggcggcggcagcagcaagggcagcaacaaggccagtggctaa

SEQ ID NO: 26209 - DNA, 273 bp, Zea mays
  Peptide Sequence Number=SeqID_69584
atggcgtcaacagtgagctccggcggcgagggaaagaacgaggaggaagtgagagacgccacgggtactgtttcagctagccagggatcgtgggttagatttagattaagtccagggggttttgtgcaagattgcaacctcgtggacggagagtacatcctcatgccggagcaaggagttgctcaggaggtagcccaggatccagcaccagaacctgccatcgaggatctgcctaccccagctttggaaggcaagccccggttttatgcataa

SEQ ID NO: 26210 - DNA, 282 bp, Zea mays
  Peptide Sequence Number=SeqID_69585
atggattttgtcttcgggctcttgcatctgtctgaaggccttagcaaatatgatatcagctgcgctgcctgtatcaaccaaaacattatggaccagaaatccattgatcacaaaagagataaccatagcatcgttgtgtgggtaatccttgagctgaagatcctcttgagagaagccggctctgagcatgaaccgcctgttatcgggagaatcagcttcggagccgaagtagttccagcttggttcttgaacgaagccattgtctcaggaaagtggaagtga

SEQ ID NO: 26211 - DNA, 249 bp, Zea mays
  Peptide Sequence Number=SeqID_69586
atggcggggagcgtccgagaggagccggaagtggagcaccacctgcgcgtggagaaggcccacgactctcaacagagttactcgaccaagccacctggagagactgcatcgtcatctgcacgaggagcaggagcgccgacgctaggagcaagagcagcaggactcttccccctcgcctcagtagtaggtggagtctgggaggcagccttcctctgcacctcagctagagatgcccctgcaccaccatag

SEQ ID NO: 26212 - DNA, 555 bp, Zea mays
  Peptide Sequence Number=SeqID_69587
atgacgaaacttaaggagaggagtctcaccaggtttctccggtgcggcgcctggtttcccagaggaggagcgatccgcggcgatggtgcttccgtctcggatgggatgaggaggaggggtcgcggtccgtgctttatagctagaggaacgcggatttcgaagaccagatcccgtcggcaagttcggaatccgttgtggtgtgctggcgaccatgcggtaacggcggagtctgttgagaggagcacggagcaaggaattcgtgagtgcggcgcgactgtccacccgaggggcctgctagcagtggccgagagggggaatggacgagtggacgacgggatcggatctcgcccagatttctcgccaccactacgaaattctgctgagaacgatgagtgtacggtggaggagaggctgcgtcgggagggtccagcggagaagataagtccgctgcatgcccggctgaagaaacggcatggtcgaggaccgcgcaaagctccggatgccggccgctccgagtttgccgcgcgacgggatctgttgggatttaggagataa

SEQ ID NO: 26213 - DNA, 2760 bp, Zea mays
  Peptide Sequence Number=SeqID_69588
atggcctctctgaggcatcgccgcggcggcaccggagccgccaacgactacgacgacgatgacgtccatgacgacggcagcgggacaccgcctggcactgacaccgccacggacgaggagcaggaggaggaggaggaggaggaagaagaagaaaagggagaagaggaggaggaccgccagatgcatcacctgggactccactccatgactgcaaagggcatacagcacctgtgctctgagctcctcgagatcaagaaggcctcggagcaagacttcagcgccaatgtttatctcagctacctctccttcatcaggatgttccaagaagccggtgatctggacaaggacgtccaccacctgaaacgtcaggtcatggcgcacaggcggctggtgcagcaactcagcgccaactgcctgtactcgtcttcatcagcgtcgatggtgctacctcgctccggctccgaggatgacgaggccgacgcggaaggggtcctcctcccggaccgtcagggcgagcgcgacgaggacctggagctggacgcgcttctgtccgagcaccggacggacgaggccatccagctgctggagctgcaggccgcccaagcgctgcggacgatgcagcagcaagcaggggcagccgacgaagccgaaacggtcgcgcgggcgctggacgccaggaaggcgagggtcgccggccgcctggcttccgtggcgggcaacccgcggacgccgcggcccgagctcctcagggcgctgtccggcctgtgcaggctcggcgacgcggagcaggcgaaccagctgctcctcggcctgcaccgcgggagcgtcgtccgcggcgtggaggagctgcgcctgcgcgcgtcgcaaggaggtcacctgcagctgcagagcagcggcgccggcagcagtaactacatcaaggacctcgcgcgcgtggtcttctcctccatcgtgcgcacgtcgaggggcttcgtggcgctgcacgggcacccgtcgccctacaccgcccggctcgtccggtgggcgagggaggagatggaggacctgagcgccgccttctccgagtacgtgaggtccgtgtcgtcgcccgctgccgctgccggccacagcttggctctggcgctggacgccgcggagtgcgcggtctcctacactcccctgctgagggccgtcgacatcgtggactccgagcgagacgtggttggccttgtcgtgccctgcgtccgggacgccgtgaccatgtatggcaggcatctcaaggaggtggtccggctgctggtggattccgacgcctgggtgctgggcaggttcctcgtgccacctggactaatgatgcagggtgctggagcagcgctagctgagtactgcctgctgacaaccaacggaaggaaatttgtcaccctcatacaggaggttgtggaagacgtagcgtggccgttgcacaagcttgggatcgggacgaacgattcagtaggcctgcagctcgtggcggagctgttcagggagtacatgcactccatcgtggagctcatccccagaaaggaagcagcagctgctctgcaagacgaagccagcggcgacgcgcagtacacgtggcagctcgccgtgctgatcaactgcaccacgctggtgtccctgtttccggccatcgcgtccggcgtcttcaggacaccagcatcatccacgtcggggtttccggcgtcagcacagagagaggtggacagcctcgtctcgctggtcaaagaagcggccgggcagggcgtgactatgccttccatggccttccaagtggtgttcctccgggtgaggcgtctggtcgaggtgtatggcgccatcatgagcggcgatgacgggacgacgaagaagctgctgcaggagctgatggaggcgatggtctgctggctctccaccaacctggaatcgtgggccgtccatggcgacgcccaggcccagctcgacgtccatttcctgctggagctcgcgcagctcggtggtttttcctccgagagcatcaggagcagcgcgatggacttgattaccaaagcacaggagaaggtggcgggtggcgaacaggacgatgccgtccgcgaggagcgctgcggcggctgggctgcagatgctgcaaagcacgctgtgcaggtgctgctagcgacggaaggtggagacgtagcggccgggaacgacgctggggaggaacgcgatgagatggcaaggaggagcagcaatgacgaagaagcaggccaagaggaagcacccgaaggtgagaatgaggatcatgaggatgagagtggggctgccaacaagtccagcgacgagtttgtaagcatggaggacgaggacgaggatgagggcgaagaggatggcgtaagaatgcctgctcgtgcagctttgtcgtcagagagtccgaagcccgggcactcagcattgggcaatggagaggagatggcgaacattcgatcaggccatcatcatcccgagcttgaccaggctgagggcggaggtgacgacagtgtgcaggctgatgacgagacacgggatggagaagggatgtgccatggtgccatacagcagcaggttgaagagcagagcagcagtagctgggaagacattgatggcgaaggaggcggtggtgggaggagcagcacgcggcgtcagtcaactcctcctgtgatggcggcagggaaggatgctcctaccgggagcagaaagaagagggaggcagtgagcagaagcagcaaacccagcaaacccagatggcat

SEQ ID NO: 26214 - DNA, 201 bp, Zea mays
  Peptide Sequence Number=SeqID_69589
atggaacgttcccgtgctcacaaaaacccatgtgatatctatctcccacaaggccctgaggctcaagccaattttgagggaggcaagagcggcaagggtaagtgtgacaagaagagccggagcgacaagaggaagcgtcccccaaccccttcgtcagacgacttcggcgactctaatgcggtgacctatccagatttataa

SEQ ID NO: 26215 - DNA, 714 bp, Zea mays
  Peptide Sequence Number=SeqID_69590
atggacatccacgctagggtcagtcctccccatatcgagggatccgacgcagcgcggacgaggtcactgctaccccctgagagagaaggctcgatgacgatctcgtcgttgagcatccccccgtcgagctccatcctgggaggatccgagggaccggcctcctcggcgtgccacgtccccgagctcggcgcaacttcgggggtgtcggggatggcacataggaggtcagagaccgtgggtgacgctgcacccggcgcagcatcccccgcctctgccccgtccccggaggagacggtgatggcctccgtcggctacgcggggcacgtgggcaccacctcggacgcggcggtgtcgggctcgaccggcttggcagaaggcctcggcctcggcctccgtctccttggtccttgccgccccgccatagacgtgggcgacagggcggtggccctatcttctacaggcactgaggcaggggcaggggtcaggggcggaacgatggtcgaggccactatgggcccagaacaactacatggggaaggggagcaggggcgggatcagctcgcccgcgccccggacaggcaaggaggaatattgttcagaggttcaaaggtcaggccctcagcaaggttcgaaaagaccgcctcagaactccagggattcgaccccgttactgatcaaggtttcaaaggttggcccctcagaagggctccataa

SEQ ID NO: 26216 - DNA, 261 bp, Zea mays
  Peptide Sequence Number=SeqID_69591
atgacaaggcagacccaccagtcagtgagtaactccaaacgctggcgcgactggcgttgtgggctccactcgtcggtgccccaggactgggctgaaggcgcagtaaccgtgtctgcggaacgggacccaggcgtcagtgaggggtggagggttcaggcacagaggagggggaatgggccagaagggaagaaaagagaaacggcccatgcaggaacatcccatatatatggagctccacgacatgatgggatctatgtgtga

SEQ ID NO: 26217 - DNA, 1089 bp, Zea mays
  Peptide Sequence Number=SeqID_69592
atgacggctcgaggtggcgccgccggcttccatggtggcgcacctcaccggagtttcattgccagacgccccaagcgccgaacagcaatccaaacgatgctacatgtcctaaaaaccgaggcgaatcgcttgaggggaaactcaccggtggaggtgttgcataggagtcggacgtcgacggttccatattttagctcttcattgggtatcatctatgttctggccaaaccagcaatatatgcgataatttctggtgaagtactgtcaactgaccagggaaaagcgcaaggttttattgcaaccgtgcagtctgtagctatattgttggcaccacaatttatgagtccactgacctcttacttcatttcagaggaagtgcccttcgactgcaaaggtttcagctttattgtggcgagtttcttcttgggatttgccattggttcagctgctcttgtgtctctggcgctttttggtgccttcatcagcagagctggagtgaaggttgtccatgtcctctcccccaaggttttcattggtttgattgttggagccatgcttccctattggttctctgccatgaccatgaagagtgttggaagtgtcaccctaaagatggtggaggaggtccgcagacagttcaacaccattcctgggttgatggagggaactgccaagcctgactatgcaacctgtgtgaagatctccactgatgcttccatcaaggagatgattcctcctggtgctctggtcatgctcactcccctcattgttggaaccctcttcggtgttgagactctctctggtgttcttgctggtgccctgattgccatctttgctcccaacaccggtggtgcatgggacaatgctaagaagtacattgaggctggtgccagcgagcatgccaggaccctcggccccaagggatctgactgccacaaggctgctgtgataggtgacaccattggtgaccccctgaaggacaccttgggcccgtccctcaacatcctgatcaagcttatggcggtggagtcccttgtgtttgcccccttcttcgccacccacagcggcctgttgttcaagtacctgtaa

SEQ ID NO: 26218 - DNA, 966 bp, Zea mays
  Peptide Sequence Number=SeqID_69593
atggcggggaccgtgaccgcgaccgcaaccacggccaccaccgaggtcgggaccacagtgaccgcagccacctccgagatggaggccaccgcgaccgcagccacctccgagctggaggccaccgcgaccgcagccgccatcgggccgccttcagccatccccgataaatatatgcataaaaaccggttgcagtcatttgctgaacgaacatataagaaaacgccaatctacaaggttgagtctgaaggccagtctcatcagcctaagttcacatgcacagtggaagtgggtgatcaacagttctcatcaactggtagttttagtcgtaagaaggaagcagagcaggacgctgcgagagttgcttatgagatcttgacaacagttagtgagagtgacgttaaggaggcatttgagctaattgatcaggtgccagtgctctacgaggggttgaatgcttttgttaagtttcttgcttgtgtactagacacgtgtgggctggatgcagttttctgcaaatcaattctcattgaatttgctgtcaagacaaagaccactttgccctcttactctgtagtttgtgtttgtctcaaaaagcctttgaccctgttcgctgcaattgtggtgtttgatggaaatgcatatcatggtgaatctgcacccaacaagaaagatgcagagcagaatgcagctcgtgttgtgatcaagtcgattttagctaagcatgacacttgtatggtgagaattgttagatcgaagaaacaacttataactgctgtcagatcttctggaaacaccccagctacttttactcctatacagtttacacggcctgtttcatatgcagcatatggcagaccagatgatacaacacctgttttgccaaatgaatcttcctcattagctgttcaacgaggcatcaatgttgtacctgcagttgggacatctgtgaacccatcgtcagcaaat

SEQ ID NO: 26219 - DNA, 179 bp, Zea mays
  Peptide Sequence Number=SeqID_69594
gcataccagatgatacaacacctgttttgccaaatgaatcttcctcattagctgttcaacgaggcatcaatgttgtacctgcagttgggacatctgtgaacccatcgtcagcaaattttgtggatttggcagccagagtctacggattaccatcagtactcactgagttctcgttttag

SEQ ID NO: 26220 - DNA, 204 bp, Zea mays
  Peptide Sequence Number=SeqID_69595
atggcttctaccggggtaacccgaggcagggagcttacatttggggagggagacgtcctccttggacttgccgacgatgtccatcgggtccatctccaggcgcagcaacgaatccgcgcgacagaaggcgggcgcgaggtagcaagtgctccccgcgagcgaattcggacgacaattcggcttgctcgggcagagtggaattga

SEQ ID NO: 26221 - DNA, 291 bp, Zea mays
  Peptide Sequence Number=SeqID_69596
atgtcgcgccgtgggttgggtggcggcgccactgtttcccaggtgtgggaggacgtagcacctgtgtcgttgatcggccagtggacatctatgattagattggaccgtatcatattgttaattggaacattgagaaccacccgggaaaatagtgctaccacaagggcagaattggacgcccttggccaagtaattagaaaagctagggagagattatcttacccgaaaagggcaagcggggaggtgtcgctgctagagtatagggaggtcctcaggtcgaactatatgtaa

SEQ ID NO: 26222 - DNA, 633 bp, Zea mays
  Peptide Sequence Number=SeqID_69597
atggagggggaatcgccgcgagtgaacttcgagtcaccgtcgaccaggcctttggcgttgtgcgcagtgccttctctaggccagaggaagggtgtttgtggccgcgacatacggaatttgccaccaacaccgccgcaattcctcaccgtcgatcaaggcgccgctgcgccgcgtggtcagagcctctgtgccacgattttgggtgagaccctctcactttttgatttcgtcgtccttctcaggtcattatgcgcacttcgatttgggtttagggtcaccgtggccgtggattggtggccgcctgtgatgtcgcgctgtgggttgggtggcagcgccactgtttctcgggtgcgggaggaagtagctcatgtgccattgatcggccagtggaccagcaaggttatgagacacttgaagagcaagctggtacctaggaatctcgagtccaagatcatattgttaattgaaacattgagaaccaccagggaaaacaatgctaccacaagggtggaatggggcgcccttggccaagtaattaggaaagctagagaggcattaccttacccagaaggggcaagcgcagaggcgtcgctgctagagtatagggaggtcctcgggtcgaactatctgtaa

SEQ ID NO: 26223 - DNA, 108 bp, Zea mays
  Peptide Sequence Number=SeqID_69598
atggaaacatgctctgtttccaacctgggctggtgttgcctgactgttctgctggatactgcctttggaactgctgctgccgctgaggtggacgctggttatgcctga

SEQ ID NO: 26224 - DNA, 228 bp, Zea mays
  Peptide Sequence Number=SeqID_69599
atgtcttcgctggaggctcctactccggtggagacaactagacggaccccagagggaccccgtgttccccgatctacggagctgaagcttgccttcctccagaaacccttccggattccccacgggtccaggcttccgacaggtagcgcatacgtgtacgccaacctggtggggtccgtccccataaacccagcctgttggtctgcacccacgcatgatgagttataa

SEQ ID NO: 26225 - DNA, 218 bp, Zea mays
  Peptide Sequence Number=SeqID_69600
atggccaagccactgcacccccctgcgcccacccctgcgcagctcccctctccctggccggcgcccaacccaccggcgcttgccctgccgcgcggctcggccccgcagccagccccgcccctaccccaagcgcagcggccatggcgccccggcagctacctggcgcggcacggcatggcccagccgccagctcgccagtcggctcgtcgctccctcac

SEQ ID NO: 26226 - DNA, 600 bp, Zea mays
  Peptide Sequence Number=SeqID_69601
atgggaaagtgccggacccctgtatatacagactggaccttcgggcgatgtgccgcctccgcatttaatgagacctgtccattccgcgggcaggcggcgaccagtccattccgcatgcggcgtgcctatccattccactggcaggcagtacgcccatgctgccgcatgcactacgctcatcattactcacacattaccaaggaagcagccacagcatatcagtactgcatggactacggacaacatggcgccaggagattgctcaggcgtactcgcattagttacttctataatgtattccctccgttgtgctcctgggcccacatgtcggggctcgacatccttacggtcaataccatgaaggtagatggagtcgatctacctgccaacaaccgtcgcaggaggattgttaatcaaccacaacccgagatgaattctccatcgaaccctccaccggctggagcagatccaacagctgttgctcagatgcagctgctgcaacaaatggtaaacactatgacagaaatgcaagctcagatgcggcaagaacgtcaggagatgcgccaggagtggcaggaaatgcgacaggaactccggtag

SEQ ID NO: 26227 - DNA, 891 bp, Zea mays
  Peptide Sequence Number=SeqID_69602
atgtcgctcgcgtcgggattattcggaactaacggtggcgctttcgtcgtctcgcaggcagtcgatcaacatgctaagcgtggtgccgtcgccgacggtgagcatgctgatggcagcgagcccaaacctgctacacaggcttgctgctccccttgttgggtgaccaggattctgaccacatcttatggaatcaaggaagggggatggtcaagcctcctgctgctccccttgttgggtgacagctcttgctacacaggcttgcttatgaagagatgcatagacagttcgcccaacattgggacatacccagacattgggcaagctgctttcggtgttgtttgtcgaatctttgtatcggttgttctttacttggagctttatgcaagctgtgtggagtacatcacgctgcttggagatagcatgtcatcagtgtttcccttagcacattttgacctgaatgcacacactctctttgcgatcacaacggccttggcaattctcccaacagtatgtctcaggaacctcagtctcctctcgtatctttctgctggcggtgtgatggcgacaattgcagtcatcgtcttcctattctgggttggctcctgttctgattgtgaatccgtacacaaagtatgcattgacaatgactccagtcgccttgtctatagaggaagccctgccaaagaagcgctggtgatggcattgcttggatctgtcttcacaatgcttgtggctctgatactcccatgcgcgtgctacctctccatcaagaagggtgcagtgccattgtgggagatcatcctgtgcatagtcatcataatgatcggcgccgtatgtgcatgcgtgggatcatacacctcagtcagccagatgattagcagcaccagatag

SEQ ID NO: 26228 - DNA, 903 bp, Zea mays
  Peptide Sequence Number=SeqID_69603
atgggtcggtgcgagacggagcgcgaaggggggagagaagccggagggagacaggcgcgtaatgagaggatccagggtaatgatggccccttctgtgatgcggtcggtccgagccctgggttgggcgaggtggaggctccttcgaggtcgaggtcgagtctgtcttccaaggccgaggtcgagtccgagcccctgggtcaggcgaggcggagaccatcggctgaggccagggctgagtccgagccctggggtcgggcgaagcggagttcgtcgtcttccggggctgagcccgagtccgagccctggggtcaggcgaagcggagttcgtcgtcttctggggctgagcccgagtccgagccctggggtcgggcgaagcggagttcgtcgtcttccggggctgagcccgagtccgagccctgggtcgggcgaagcggagttcgtcgtcttccggggctaagcccgagtccgagccctggggtcgggcgaagcggagttcgtcgtcttccggggctgagcccgagttcgagccctgggtcgggcgaagcggacccgagtccgagccctgggtcgggcgaggcggagcttcctatggcgctcgaggccggacttggctactgtcagccgcactctgtcgagtggcgcaacagtcggagcggcgcaggcggctttgttttttttgtcaggccggccacctttgcattaaatgctcctgcgattcggtcgatcggcgcggcgatcgggccaaggttgcttcttggcgaagactgggcctcgggtgaactaaagctttgtgctgatgggggttaccagctgagattaggagtcttgaggggcgccgaacatggtgtctccagtgagctgctgacgggtaatccgagtggacgcccgtgccccatttgttag

SEQ ID NO: 26229 - DNA, 294 bp, Zea mays
  Peptide Sequence Number=SeqID_69604
atgggcgcgaggaatttgagaatggctcaccggatagctcagcctacgcgcggtggcgggcgaccgaagtccggtgacgatgatctcgctgttctgatgaggcagggcctcgatccttgcttggagaagcttcacggctccacggggaagctgtccaagggctcggttgaggctgagggtctctggaaatggctggccgcggtggccggtgctcgagtggctcgggcaggtggcgcagagctcgccagagctaagggtgatgtctggccagcgaaggcttatgggttttgctga

SEQ ID NO: 26230 - DNA, 1065 bp, Zea mays
  Peptide Sequence Number=SeqID_69605
atgcatcgcgtccttccaccttccgagcccccggatggggagcgcctgcgctgctttcgtcttgctgtcgttgttagaggaatgcaacttcgcagaagttggtacctttcagccatcgctcggcctcaaggattttcatcaggcagcccggctgcatccccttgccgatggtcacccaagacggtgaccactagtttgatggtggggagaagcaagctgggctgcggcctctgccccgccctcagcttcaaggatattcatcatccttgttggggcggagggcgagatgagccggagctctacctcccgcacaggttcgtgggccaccttctccttcagcattcaagggagaaggcgctcaccggcctagcggaaggggcggactttgacaacgcggggccgagcggccgcaagcgtcgtcggctccagcatgcctggttcgttggctcagctggctctggcacgacttctggtgccacctcccaccgctgggcggagtgcggctatctgcccgacatacgggcgactgttgcactgcgcgcatcaggggaccgcccaagacgtcacgcgctgctagggcggcgttcgtgttcttgggctgtcatgcccttgctccggcacgacgccttcacgcggaggtcggtgctcgcctgtctgggaggacttgagtggggatctgccagtgggcaggcggctgccgtcgtcggtgctgaggtggtggcggctgaagaagtcctcgtcaccgacgagatcgccgccgccatccgcgctccaggcctctggctctttggctttgatggcttgtcctcgccccacgagtggggacgtgggccttatcgcagcagcgtctgccctgaggtcatcgctgctgctgtttggccgcccggagcggaggtcgttgtcgctgctgccggagtgggcggcggcgtgccacctgggattttgtcgtcccgcaggccctccaatgtggggggttgttcgtacctgcgggagtggaaccggtgttccgtttgtaatggcaccttgagtgccggtgtctgttcattgtggctgtcggctatgtaa

SEQ ID NO: 26231 - DNA, 1068 bp, Zea mays
  Peptide Sequence Number=SeqID_69606
ggtaatgatggccccccctgtgacgtggtcggtccgagcccgaggtcgggcgaggcggtgactcctccgaggtcgactgagtccgagccctggggtcgggcgaggcggagaccgtcttccggagtcgaggctgagtccaagccctggggtcgggcgaggcggagaccgtcttccggagtcgaggttgagtctaagccctggggtcgggcgaggtggagtccatcttccgaggtcgaggctgagcccgagccctggggtcgggcgaggtggagtccgtcttccgaggtcgaggctgagtccgagccctggggtcaggcgaggcggagtccgtcttccgaggtcgaggctgagtccgagccctggggtcgggcgaggcagagtccgtcttccgaggtcgaggttgagtccgagccctggggtcgggcgaggcggagtccgtcttccgaggtcgaggttgagtccgagccctggggtcgggcgaggcggagaccgtcttccgaggccgagacgggggccgagccctggggtcgggcgaggcggagcttcctatggcgcccgaggctggacttagctgctgtcggcctcactctggcgagtggcacaacagtcggagcagggcaggcggcgctgttttcctgtcaggcgatccttgcattgattgctcctgcgatacgttcggttggcgtggcgatctggccaaggttgcttctccgtgaagcctgcccgagctgggcctcgggcaagtcgaagctttgtgctgatgggggttaccagctgagattaggattcttggggacgcgcctcacctcactccgcactcaccttcgctggccagacaacacccttagctccggtgagctctgcgccacccacccgagccacccgagcaccggccaccacggccagtcattttcggagactctcagcctaaaccgagcccttggacagcttccccgtggagccgtgaagcttctccaagcaaggatcaagaccctgcctcaccggaatagtgagatcatcgtcaccggacttcggtcgcccgccaccgcgcgtaggccgagctatccg

SEQ ID NO: 26232 - DNA, 1020 bp, Zea mays
  Peptide Sequence Number=SeqID_69607
atggacgtcgagctaagagggatgtcatcaagaggcatacgagatggaccttgcccagttactgtggttgactggacgaggagtagcgggaattggaaaaacaacactggttcagtcggacgaccacacatctttgtgctgcgtgccggcggcgtggagcagacaaagacgctattcgaacacgaggataagctcctgcagccagtggttggttggttggtttcctcgcccgtgccgtgcgcagctgaagccgatggaatgaggctcgccgcagccaagcctgccgccatcaccgtcgcccagcggcagccgatccccatccccacatgcagctccagccgcaatcaggccaagaagagccgccgtagcgcatggagggtcgcagtggcaagccgcgacgccgcagacggagaagcagaggcgggcgcgggccagggccagggccaggcaccgacgggacggcgtggcccggctgtcggcgaggcggcggcagcgcatgccgctgccggacggccttctccggcgcccggcgtcaggcgagttccctgttcaccccgggacaccgtcgagtccatcctaaacaccggcgcgctcgagagtttcggggagacggggcccggcaccttcacttgcgcgctgcgccgcgtcgggctcctcggcacgaggtcgccccggtgctggacctccgagtcgccccgaccagcaccgaagcaccatcgagatgctgtcgtgcaggaggtgcttgagcagcagaatgaactcttctcagcattcatgagtaaccatataacgtggagcgacgacgccgaggagccctgcctagacatccatgtcaaactggaggtcactctggaggtctacaccaagccattcagcatgcttccgttgtcagcagtggagaagccaggtaacctgttgatgcaaggcctgctggacaggctcgttcccgtgctgggagagcagttgctgagggactaccattcctgggctcaggctcagcagcagcatgaatcgtcttga

SEQ ID NO: 26233 - DNA, 588 bp, Zea mays
  Peptide Sequence Number=SeqID_69608
atgacgacgacgagcagcagccggtcgtcccaggcggcgctggctgagacgaggccgccgcagaagcagcagcagcagtcatcggagtacactggcgtgaggctgcggcagtggggccggtgggcggcggaggtccgcgtgccgggcacccgccagaagctgtggatcggcacgttcgagaccgacaggcaggcggcgctcgcctacgacgccgccgtcttctgcttctacggcgtgcacctgcccaggcggcgaaggttcaactgccccgccgcgccgcgccccgacatccctgcgtgggtgcgcgtccagctcaacgtcgccagcgtcaaggccatcgcggagaggcacgcccgcgtcgtcgacgcccgcctcccacctctggtggcggcggcgggcgctggtggtccttctgccggcggaggtgcgtctgcaccaccacctggtgacgacagaacggacggcatggacgacggcgaggccctcgtggcaggagcttctgctgctgatgaaagcctgtgcagcgtgcccccgctccgtcgacgacgccgaacaagtgcccgccggccggagcccggagagagctag

SEQ ID NO: 26234 - DNA, 378 bp, Zea mays
  Peptide Sequence Number=SeqID_69609
atggcgggcggaaataagctcgccggagctaagggaaagtggctggccggagaggggacagggagttgtagcgtcaccaaggtgccagtgtcagaatgcctggtcccgaggttgagctgcgccaaaaccgtgtcaaatgaatttggtttgagttcaaactttcccagaatgtgttcaaggtcattcagctccaaggtccaccatagtgcagaaattgcttgtgtgtatttcctgtctcagtttaaatatgccagcttttcattcactacactaaaccagtttaacttccttcacaccggtgcaccccaagacatggttagtacagtatcctggagcgtttgtggtgacattcccaagggcataccacattgggtttag

SEQ ID NO: 26235 - DNA, 471 bp, Zea mays
  Peptide Sequence Number=SeqID_69610
atggcgcgggcgccgaggagcagccgggcggcgaggaggcgggcgcaggaccggctccgccgcggcagcgcgcacgcggcggtcagctgcgaccatcgcgggggggtgcacgtgggcgggcgtgcgggagcggacgcggggccggcgctgcaagcggcgctcgcctacgacgccgcgatcttctatttgtacggcgcactccgcctgcccagcccgcgcaggttcaacttcccggcggcgccgcgcccggacatacccgaggacgtgcgcgccatgctctcccgggacgacatcaaggtcatagcgaagagccacgcacgctccttggccaggttctttctcggtccacagcctgccgtcagccctgcagccacttcaccaccaccaccaccagctcctgctgctgccggcgaagcaactgctactagcgacagtgacagtagcaacgacagcaactactacaagggttaa

SEQ ID NO: 26236 - DNA, 417 bp, Zea mays
  Peptide Sequence Number=SeqID_69611
atggagaagcggcctcaggaactcttcagcttcgggaaaagccaacggctcgtcagctataattcaccggacatgtccggtgtgcaccggactgtccgaggcattaaatgcgccgcagcgcgcgcagacgtcaggtttgcccatactggcgcaccggacaatgaacaggagctgtccggtgcgccaccggacatcaagggtggcccacagtcagaactccaacggtcagattccaacggcactgatgacgtggcaggggcaccggacatgtccggtgtgcaccggactgtccggtgcgccatcgagcagactggctccccaacggccacatttggtggttggggctataaataccccaaccaccccacattcatagccatccaagttttcccctttctcaaccactacaagagctag

SEQ ID NO: 26237 - DNA, 834 bp, Zea mays
  Peptide Sequence Number=SeqID_69612
atggagctagatagggctacgtacgtttgcaaggcatccacaaagtcaacccaaatatatcagcaagcagtatcgatctgttctcacacgctgcaggcggacgataacttagactatgacggcgccgagcagcagcagcggggcagcgacgaggggcggtccccagccccagcagcaccgcggcgggcgttcgttacgcggcggcgggagcccgtcggcgcacaaggacctgggctgacgggcgtgcgggagcggctgtggggcggttgggcggcggagatccgcatcccgcggacccggttcaggctgtgggtcggcaggttccagcacgcgttgcaggcggcgctggcctacgacgccgccatgttctgcttctacggcgagcgcctccccagccagcgcaagttcaacttcccggccgcgccgcgccccgccatccccgaccacctccgcgcgcggctcactgtcgccaacatcaaggccatcgcggcggactacggtcggagctgcgccgccttcttccttgcgccggctcagctgtgccctagtgcaccagctgccgccgccgcatcaacgacgccacctctgatggtggtgccgccagccactgaaagcgccgccgccgccgccgccgccgccagcgctgaagaagcagtcgtctccacaacaactgatcatgtcgtccctgctgctgctagcaacgccgggaaccatgtggatggaggcttcatggaaactgctgactgcctgctctcctgcaacccagatgatttcgtcggggtgttggaggacatggacgacgtggatctctttattggccagcagcacaactga

SEQ ID NO: 26238 - DNA, 1887 bp, Zea mays
  Peptide Sequence Number=SeqID_69613
atgaagcaagtggaccgtcctccaaataaccccaagcgtataacaattcagtcaagccaggagtgtttcagtgttgacattccctctgcagaacagcctaatccatgtccagaagttggaattcctccaaatgttgtcagtcaaaatttgaccaatgaaacagttcagattgattctgatgaagatgacttcatgccagctctgaagaagcgtaatgtttctgaaagccacacaagagtgttaagaaaagtcgtgacaaagaggattaaacatgaggagctaccccgacagaggcttaatgtgaggtgcaaccctcaagatgtcattgcaagcattaacattttgaatgaaagacaacgtgaggctataagacgtaaaggtttctctaccattcttgatatgacagtagatgcgttgtgcagtagatcacaccttcaatggttgatggacaagctagaccccaaggatatgacaatacgtcctggtccaggaaaggaactcaagatcacaaaggacattgttcatcttatcctcggcgtgccaaatcatggcggtggtaaacctttggggattgacgaagcagttgcagcaagcaacttgagggcagagcttggtgtggccaaagatgagttcaatgtgacatttctacaggatcgtttaaggaaaggcgaggatgatgacctttcaatcagatgtttcttcctcattctattcaatcgtctgctgtttccaactgctagctggggcataacatatcatgaggtgcttctcacagaagaaatgcaccgtttccatgagatcgactggtgccagttgatttttaatgatctatgtgaagctgccaagaagtggcacaaccgaatcaccacaaatgtctccacgactatatatggatgctccattgttgtccttttgtattacttggatcacctgcatacagccgctgccccccaaaataagactggcacacctcgcattaaattctttgataagaatagcataaaagctttgaccaaagctgacaagaggaagccggagtgcaggaccaatatttttgatgcaccgcgccctgcccccatgcctcggccaacttttaacatcaaacttccatctatcaaagagatgatgtcaagtaagatcaacgatctcccacatcgtcatcgatctaaattcacagatattcttgctgcatatgacttggaggttgacaagtcatgcgtagccataaaagacatcattgacaaaattattgagaagcaatacgacatagcagacaagtttatagaattgatagacgaggtactacgtgccgagtctgaaaatttagaaaacgagtctgatgagccacagcaaccggggaatttggctgattcagcaggacacactgttgatgccacccagcccacacccgatatgccatcccaagcttcgcagctcgagacccagctgggtggtactcagtttgaagaaattcatgaaagacaacagcatatccgtagagtgcttgagacgtgtcccgacgaatcggatgtggtttcaaatcaacaaagaggtgaaatggcaacagaggaaatggaacacaatgacagtgggccagtttttgaccagacccaactcctcatgtcagatgatacactcaaagggacaacaaactctggatctgatccaccacttacagagcaagagtgtgttcgttctctatgggatttaatttgttccaaggacattgaccaaagcagggttgtcatagattacggtgaatacagtgcaaactgtatggatatttatgaatctttcacggagggcaaatgtcttgagaaatgtctttcatgcagtgtttcattgagtgtgttcgtgatgattccaaaaatcatcgtcgaactctga

SEQ ID NO: 26239 - DNA, 939 bp, Zea mays
  Peptide Sequence Number=SeqID_69614
atggaggtgggagagggtcgctggaccgtcaatcagtggctaggattaagaatctattataccgtttcgacttgggatagggttgaaccgctgaagaacctttttaaacgatcttggcttcctggaattaggaacgtggatttgaaattccgaaaggaaggtgtgatggaattggatgctgctgcattgccagagctgccacaggatgtgttgatggacatctttggtacacttgaggtccctgacctcatccgagcaggctcggtttgctcgtcatggcatgctacctacaaatgcttgctcgacctgaggcaatacaagcaaccccagacaccatgcctgttctacacttgtgaatctgccggtagcaacgtagggtttctatacagcctcaaggaaaataggtcctacaagttaactctaccggagccacccatccgcagtaggttactgatcgggtcctccaacggttggttgattactgcagatgagaggtcggagctgcaccttgtgaatcccataactggagaacaggttgcacttccctctgtgattaccttagagcatgtgaagcccatctttgatgcatcaggtactatctgtatgtacgagttgtcatatcagacaccacccgacctgtttgatctcggtgatctgcgcgatgaactctacttcaaggcatttgtgtttcccgatccatccaccactggaagctacatcgtggttcttattcatgagccatattcacggctttcgtttgcacgaccgggagatgacaagtggacctgggttggacaagagaagtgcctgagccctgtgtacatgccaacgtggctgtcgaagagatgcttgagccctgtgtacgcgataacgtggccgtcggagaagtgcccgagccctatggaggcacagctggcggtgcggctgggattctgctga

SEQ ID NO: 26240 - DNA, 249 bp, Zea mays
  Peptide Sequence Number=SeqID_69615
atgagctccagggttcccaccctccgacgcgggggctgggtcccacatgtcatgcgagctgaccggaaacagaagaagccgaaccgccgcacacgaagcagggaccgggaaaggggatatttcgaaaaggatccttctcagcgaagggaacaggctccgagcccattactaatcaggggttcgaaggttggcccattggaagggttcgacagctgccccagagcactcgggctccgcgccctttactga

SEQ ID NO: 26241 - DNA, 180 bp, Zea mays
  Peptide Sequence Number=SeqID_69616
atggagaagctcaaaagatgtctccaaggggatgcagagcatgacgaagctgcaaaaaagtcgttcctaagggagcgcaacgatcatcatcatcataacatgaagcacaaacagaaatactccagcttcgacaacaattcttcgatgagcatgagaaagcaagaacatgcttcgttgtga

SEQ ID NO: 26242 - DNA, 366 bp, Zea mays
  Peptide Sequence Number=SeqID_69617
atggccggggccgaccgcgggctgacctccgactctatggccttctgcccgtccttgcctcacaagttttggcatgggcgggggcttcctggcagcggcatcgagcccgaggctggcgctgccgctgcttggtccctcggagcagaaggcgttgtcgtcgctgctgctggagcgggcgacggcgcaccactcgtcggccttccgttgctccgcaggccttccccctcggagtggggttgtctgtacctggttggccggagcctagccgtgtcgcccgtcagcggtgccggcgcccaagtcggtcagtcgaggcctcggatcgggctagcgcccttggaagccggttgcccgaggccccaggggtaa

SEQ ID NO: 26243 - DNA, 453 bp, Zea mays
  Peptide Sequence Number=SeqID_69618
atggagctcggcaggctcatgaacgagaaggccaggaggatgttgtccatggggcagaggaagcggctgcagctcgccaggctgctcgccatcgatcgacccatctggctgctggacgagccctccgtcgcgctggacgcagagggtaccaggctgcttaaacacatcatcgcggatcaccgggagaagggtggcatcgtgttcgtggccacgcatctgccgattcaggttgaggattctatgtcgcttcggcttccccagaggtttcctcggaggaagacgctgaacctttttgaacgatctaggcttcctggaattaggaacgtggatttgaaattccgaaaggaaggtgtgatggaattggatgctgctgcattgccagagctgccacaggatgtgttgatggacatctttggtacacttgaggtccctgacctcatccgagcaggctcg

SEQ ID NO: 26244 - DNA, 210 bp, Zea mays
  Peptide Sequence Number=SeqID_69619
atgcagtctgcaaatctcaatatttgccaactgccatgcagtaaggctaagcaatgctcagcttttaccatcatctttggtaatccttacactcatgagctcccacttttgggaaggaggcgacaccggctgagcgaactcgtcggtggccatgtctggtggcgtgctggagcagcgcgggcaggccgcggcaagcggctgcaacaatag

SEQ ID NO: 26245 - DNA, 639 bp, Zea mays
  Peptide Sequence Number=SeqID_69620
atggcggcggtggcggtgctcgactccttcatcaagcgatgcacggcgtcaaaggaggacttcggcgggccagcccagccagagaaggcctgcttccttctcggcatcggagaattcggaagaaggaaggagagttcagaggaagaaaggacgaaggagacgaggaatagtatttctgccaaaacattcggtgtttttggtctcctagaagaagtctatgctgcagcgtttctgcatgtactcggccagcaactggccgtcgagtccgacggccacctcgcagccgacgtggagcgggtgccagtgccggttgccccagaacgccaggcgacgtggagcgggttgcggatggagagctgccccgacagcgacacggtcccgccggacgacgggccgatgcccgacgcggagaatgccgtcacgtggaaccgcggccgatgcgggcggacagcgaggtacacgacaaagaggaccacgccggcgacgaggagcacggtgaggaacgccgagcacagcagcctggtgcatcgcctcacgtgcggccgctccgcgggcagcggacgccggatgcgggcgacgatgtggcctgttgacgaggcggcctccggcggcatggtgctggtggtgtacgtgcgctag

SEQ ID NO: 26246 - DNA, 285 bp, Zea mays
  Peptide Sequence Number=SeqID_69621
atggagatcggttgtccgactgacgtgaagcacgtcgcgcacatcggctgggacagcgcggcgggcgacgcgtctccgagctgggtaaacggacaccagaaattcagggcactgccgctgcgacttccttcaaatgtctggattctgatcgatgaacgacatcatggcgtcctcagacttgtcgtccctgggcaacttcgcagcgctcactggtacctcctgggtttctcaaggtttctgaagcctgagataccagcagcatctctgaactctgaatcgctgttg

SEQ ID NO: 26247 - DNA, 135 bp, Zea mays
  Peptide Sequence Number=SeqID_69622
atggctcacggacaggcaaggtcactgaaatacagaagaggcgaagaaaatgagatttgggcactcggctcggaaacgatcactcgaaacggggaatttggtgaaattaaagcctgcaatatcggatgggcgtga

SEQ ID NO: 26248 - DNA, 528 bp, Zea mays
  Peptide Sequence Number=SeqID_69623
atggcgcgtagcggtgtgccctcccctgcctacgtgcgcagcggccgccgtgccccactggcatggtcgtgtgcatccctccggcgagggccgctgcacccgcctgatggccggcggcacttcccagccccgtgcccccgtctcgtcgctgttgcgccgccgtctattgttgcagccgcttgccgcggcctgcccgcgctgctccagcacgccaccagacatggccaccgacgagttcgctcagccggtgtcgcctccttccctgtgttgtgccgccccatactgcaagttgaagaaaagaaaactgtctctgcttcgttcgttcatgtgaccaaggaaggagaacgggcccatcatggccacgtgtccacattcggttggcctcaagaatggtcgttgtcacacccggatttcaggggcaccaaaacccgggatgtgagtacagcaagggtgagctcacataagttcatcgctcaacaagttgtggggaataatgtgcatgaactcgccaaaagtgggagctcatga

SEQ ID NO: 26249 - DNA, 2719 bp, Zea mays
  Peptide Sequence Number=SeqID_69624
accagtcacaagccgccgcggctccttgctcaacaatgtctctgcatgcgggaacggcacagacgtgctccgtgacatcaacctcagcgtccacgacggcacagccctcgtccttaccggcgccaaccggctccgggaaagaccaccctcctccgcatgctggcgggcttctcgcgcccccttggcgggggagatcctctggaacggacacgacatcacctcccccggcgtcttccagcagtacaagctgcagctcaactggatgtcgctcaaggacgccgtgaaagagaagctcacagtgctcgagaacgtccagtggttcgagctcctcgaggggaaggacggcagcaggtcgggcccggccatccagctcatggagctcggcaggctcatcaacgagaaggccaggaggatgttgtccatggggcagaggaagcggctgcagctcgccaggctgctcgccatcgatcgacccatctggctgctggacgagccctccgtcgcgctggacgcagagggtaccaggctgcttgaacacatcatcgcggagcaccgggagaagggtggcatcgtgttcgtggccacgcatctgccgattcaggttgaggattctatgtcgcttcggcttccccagagcggggcccagtcgtcatccttcttcccccactcgctcgacgcagacccaatcccaacagaaatcgccgcatggctcgccgctcacttcggatcggccgaacgacctcctggatatcgggctgccccacccgatggggctgccgcgggggaacttcggctagccgtcatccgcgcctccagtgtgggcctcagagccttccctcggttgcgggggcgggcgctggtggcctcgccacctggaattgtcgccggggacttcaccaattggtcgccggacctctcctatcacgatcgagccgccgcgcagcgagggcggacttcctcggagcttaatctgcggtatggctaccattttcctactcgccgtctctccctctccgtttcgcacaaggttgcgctaggattaggactcctcgaggaggcaccggatacgatcatcctcaccaccagcagtcaggaaagggagcaggggcacggaggttaccttgttgccgaggaactggggcctatgaggcacaaatctggtggtttcaacaaggccaaccccatgcctggcaaggcctatggagctcggaggagggcagaggcgccgggcagctcaggcaggacgaaggggaggggaggggaggggcagggcagagtgcgggtcgcaaatcaccggtgggcgccgctgtgggctaagggtggcctcgtggaggtggaaaagggtcgctggaccgtcaatcgagaatcagtggctaggattaaaatctattataccgttttgacttgggatagggctgaaccgctgaagaacctttttgaacgatctaggcttcctggaatttggaacgtggatttgaaattccgaaaggaaggtgtgtcggaattggatgctgttgcattgccagagctatcacaggatgtgttgatggacatctttagtacacttgaggtccctgacctcatccgagcaggctcggtttgctcgtcatggcatgctacttacaaatgcctgctcgacctgaggcaatacaagcaaccccagacaccatgcctgttctacacttgtgaatctgccggtagcaacatagggtttctatacaacctcaaggaaaataggtcctacaagttaactctaccggagccacccatccgcagtaggttactgatcgggtcctcgaacggttggttgattactgcagatgagaggtctgaactgcaccttgtgaatcccataactggagaacaggttgcacttccctctgtgattaccatagagcatgtgaagcccatctttgatgcatcaggtactatccatatgtacgagttgtcatatgaaacaccacccgacctgtttgatcttggcgatctgcgcgatgaactctacttcaaggcatttgtgtttcctgatccatccaccactggaagctacatcgtggttcttattcatgagccacgttcacggctttcgtttgcacgaccgggagatgacaagtggacctcggttggacaaggtatcggatataaagactgcacatatgtggatggtcttttgtatacagtggattggactggagaaattgatgcttttgattttaccgcatcccctgttaaaatgacagtaattatggacagtctgaagtatcctccatgtgaaaacctgtacattattcaggctccatggggtgatctgctgcatgtttggaggactattgacgttccacccaatgctccatcgtgggaccctgaaaagtgcctggcagaaaccgtaaaaatacaagtgcataaagtggacttggaagcaaagaaatgggtgaaaataaacaggttgcagtgtgatggtgttttatttcttggccacaacgattcactttaccgtagtgctcaagtacatccaggactcaagtcaaatcatgcatacttcactgacgattgtaaagaattgactgttgcattcaaaaattccacacgtgatatgggagttatggacttggaaaataatgccaagaaggaaattgtctctcaaatttggtccaactggccctgtcccacttggataacacctaatcttatgaagctgaatcaggcattcaacaaatag

SEQ ID NO: 26250 - DNA, 501 bp, Zea mays
  Peptide Sequence Number=SeqID_69625
atgctgcatcaaccggctggttctgtgatcgtcaaggaagaacgagatatagcatcgatcgcagagttgctgtcgggacagctctccatccgcaacccgaaccgggacatcgccttcttctacgaccggttctacctctcggtggagtaccgcggcgccgacgtggtcaagggccaggccctgacggccgcgccgctgtaccagccacccaagacgacgtcggccctggcgttccagggcgtggcggcgtcggcggccagcggggacatggcgcgggacgcagtggaggccggcagcagggtggagctgacggtgaaggtgcggtccaggatccgcgcgcgcctggcgttctggggcaaccggcactggcacccgctccacgtcggctgcgaggtggccgtcggactcgacggccagttgctggccgagtacatgcagaaacagaggtccagcttgggcgtagcggcaacagtactgtgccgcgccaccgacgcgagatag

SEQ ID NO: 26251 - DNA, 330 bp, Zea mays
  Peptide Sequence Number=SeqID_69626
atggcagagattggggttcttggagattggggttgttcttggtggcggagagggagggaggcggaggatggctgtggctgcgcgatggccacgacaacttcgcccccacatccaatctcggtgcctgatattgccttgaggcaagcagggggaccgggaccggaccccatggcggcggtggcggtgctcgactccttcatcaagcgatgcacggcgtcaaaggaggacttcggcggccagcccagccagaaggcctgcttccttctcggcatcgggttcgagttcgacatcaggggcctcctggccacacaccaatcacctcatccctaa

SEQ ID NO: 26252 - DNA, 261 bp, Zea mays
  Peptide Sequence Number=SeqID_69627
atggcgtgcaaggtgaaagggatcttcaagggcctcaaggccttctcccggatcttcgcggtgaaggagcacgagatggagatcggttgtccgactgacgtgaagcacgtcgcgcacatcggctgggacagcgcggcgggcggcgcgtctccgagctggatgaacgacatcatggcgtcctcagacttgtcgtccctgggcaacttcgcagcgctcactggtacctcctgggtttctcaaggtttttggttcttcgtgtga

SEQ ID NO: 26253 - DNA, 372 bp, Zea mays
  Peptide Sequence Number=SeqID_69628
atggagatcggttgtccgactgacgtgaagcacgtcgcgcacatcggctgggacagcgcggcgggcggcgcgtctccgagctgggtaaacggacaccagaaattcagggcactgccgctgcgacttccttcaaatgtttggattctgatcggtacagtttttgatttggttctgggtcttcacaacacacgcactggcttcaggtttctgaagcctgagataccagcagcatctctgaactctgaatcgctgttggtatgccaccgggtctcgtgcttcacgcaaatggcgaccaaaattaaagaactcgatcacgcaaacagtgtgagaaacttgtcccagacatatctcggtttggtccttgcttcatga

SEQ ID NO: 26254 - DNA, 360 bp, Zea mays
  Peptide Sequence Number=SeqID_69629
atgggcaagagcaagaagggtggtagttcttcgcatcactccggcgacaagcggaagcgtgagccgactcctccctcggaggacttcggtgactcggagtactcggaggagttctcctccgagtccgagggctcaccggagaactcctcggactcgtccgaggagggcggcgatggtggtgacggcgacgacgacggaggcgatggtgacggcggcgaaggcgacgacaagggtgctgacggcggcggcaaaggtggcagcggcaaaggtggcagcggcgacggcggcgatggcagcaagggcagcaacagggacaacaacaagggcagtagcaagggcagcaacaaggccagtggctag

SEQ ID NO: 26255 - DNA, 372 bp, Zea mays
  Peptide Sequence Number=SeqID_69630
atggggaaaaaaaacttcagcgcgccgaggaagaaggacggactctgcaggggcgtcaagtgcagggagcagagggctcggcctccatggggaagaaggcccctgcgttggctgtctggggaggagcaggaggaggacgggactgctgctcgccaggaggaacgatggctggtcggggaagctcagctgcgagattttctgggcgccatggctgctggtcttgctccctgcttattgccgtggagagtagggaggaagaaaagggcagaggacgccatggacaggagctcgatggccatgggaggaggggaggagccgagctccctgcgcgctgccacagggaagaagagctccctgccctggcgtgcgtga

SEQ ID NO: 26256 - DNA, 252 bp, Zea mays
  Peptide Sequence Number=SeqID_69631
atggggaaaaaaaaacttcagcgcgccgaggaagaaggacggactctgcaggggcgtcaagtgcagggagcagagggctcggcctccatggggaagaaggcccctgcgctggctgtctggggaggagtagggaggaagaaaagggcagaggacgccatggacaggagctcgatggccatgggaggaggggaggagccgagctccctgcaagctgccacagggaagaagagctccctgccctggcgtgcgtga

SEQ ID NO: 26257 - DNA, 315 bp, Zea mays
  Peptide Sequence Number=SeqID_69632
atggacgccccttgttgttccctgcgcctagctctctctatccagcgagccccattttcttccatggaaaaccaacagcgagcccccttcctcgctgttcgtcgtggtgcccgccggctgttcggcaatatgcgcagcaagctgcgcgcagcagcagcacgccgtgtgttcgctgttttgcgcagccccatccgcgatgccgtcgaaacccgtgctagccgtcaatcgccattcgtcgcgcacgcgcgttcgatacaagatcggtcgggtgaaccacgtgcttgcataactcaaatccgatcccgctcaggttga

SEQ ID NO: 26258 - DNA, 411 bp, Zea mays
  Peptide Sequence Number=SeqID_69633
atgggcaaaggcaagagaggtcgtggctcgccccaccatgccggcgacaagcggaagcgggatccaagccctccctcgaaggatttcagcgactcggagtactcgaaggaggggatagttgcggaggtgtggatgtacatccgctctgtcgagcgtgccgggctcgaggggtcagatgagtcggaggtctcctctggtgaggactcctttggctcgtccgaggagcagagcgacagcgacagcgacgacgagagcggtggcggaggcaacgacagcgacgacggtgacgacggcgaaggcgacgacaacggcggcaagggcggtgaaggcggcaatggcggcagtggcggcggtggcggcaaggacggtagtggcagcggcaaggccagtggcaaagcgccaatggtttaa

SEQ ID NO: 26259 - DNA, 462 bp, Zea mays
  Peptide Sequence Number=SeqID_69634
atgagtcaagttcaattcgtagaaatcaaggaggccgcggaaaaagggagagacgggaagagcaagacatctaataagaaaaggaacgtaaacgacagattcacgggtaacctctgtcggtatggtgacaccgcggcaaattcgccaagagcagagctctttcgggagcaaaaccccaacgtcgacaagatgaaggaggtcggattccgagatgatggacatgtggttacccgcgaatggcaactggctgttggggtcgataggcgggatgatggccgcaatggagctctgcctcttctacttcggcgccatcacagtcttgccggtggaacgagtaggatcgagatctcagggaagcagaggagtggttcgaggcggaaaagtgaagttagggctcagaaatcaaaactgcacgtcggcgcgagtataaatggggtttcctgggtcgggcactatttctaa

SEQ ID NO: 26260 - DNA, 171 bp, Zea mays
  Peptide Sequence Number=SeqID_69635
atgacggttggtggaggctgtctgtcgtatggtgcaccgggacagtccggttgctcaccggacatgtccgagaacgatccggttgaagagctcgaagaactcgcaggagaagcccctgagcagcagtcggtggcgatgatactgatggttttggttatgcctatggtgctg

SEQ ID NO: 26261 - DNA, 609 bp, Zea mays
  Peptide Sequence Number=SeqID_69636
atgagactgatggttttggttatgcctatggtgctgatggctcatcttagacacactgcacgaaagtccgtcatccccttcttaccctcccgccttgctgagcgtccgcttcgccgtcccgtggccggacagtccagccacttggagaggctgcaccaccgcctgcatgaggagcaggaacgtcgacgacatgagcagcagggctcttctttctcgctccaacaagagatggagtccaggcgccccctgcaccaccactggggcgccccagcctctagagtagctgctggaggagacctagacgatggaggtggcaacgacagctcgagccacgacaccgacttctctgctgaccaggagccggaaggatgggttgctcgacccatcactcgcgacgctgctcgcgggtgtcacttccacgacgcgctcgacaccctgctacgtcgggcacttaaccagcgtacttggtctatcaagtatcgctgtgtggtctaccagcatagtcgtggggtctacccggaccgctgggaggcgacctgcttggtgcgccgttcggagaacagtctccaaggtgctgaggtctgctcagagcactattctatctcttag

SEQ ID NO: 26262 - DNA, 237 bp, Zea mays
  Peptide Sequence Number=SeqID_69637
atgacgaaggacttcgccatgacggcttctcttagagggagcccttcttggttgcccagcggtgcaagggtagcccctagcgttattgcctttttcagcggcatgtcgaaggtggttgctcgagctcctggtgtcgaaggtggtcgtttgagttcactggaggtgggcgccaatgttggtcacttgttctcaaatgttgtgaatcaagaacaaggcaagacacttgttaaagattaa

SEQ ID NO: 26263 - DNA, 255 bp, Zea mays
  Peptide Sequence Number=SeqID_69638
atgaaggaggaatgctataacattgctatgcagtgctcagacaaaccaaaatatgcttttactagtgttggtgtgttctcggctgagcaggatgtcattcgtggtgaccctaagggtgggatcaaatggattgagggtgaaatcgaagcatttgacgaagttctcactggcagggggatttttgtgtctgcgtcgacgctcggggagctatatctttggttgaaaaagctagctgtaaacatacgaaggctgtaa

SEQ ID NO: 26264 - DNA, 1452 bp, Zea mays
  Peptide Sequence Number=SeqID_69639
gcaaagctccgcgaagaagagatggctacacttcccagtaggggcaatccccaaaaacccttcgcaaaccgccgcgaagatggctgtttgcacgatgaagttggggctgagattgtgcagctccaccccgtagacgtgcaaaatcgcccgcatgaaataacttgccggcactctaaacccccgctcgtgaaaagggacgaagctcagcacataccccagcggcggggtcggggcggctccgctctgaggggccatccactctggctgtgggtcaccggagagaggacgaagcaaaccatcagcaacaagggcctccagatcgtccgccctgacggtggaggaaggcctccagatccttctctgcgaaggaagcgggccacgagccctcctactgatcagaggtttgaaggctggcccctcagaagggctcgacagccgcctcagagcactcaggctccacgcctactactgatcagaggttcgaaggctggcacctcggaagggttcgacagccgcctcagagcactcgggctccacgcccactactggtcagaggttcgaaggctggcccgtcagaggggttcgacagccgcctcagaccacttgggctccacgcccactactgatcaggggttcgtaggctggcccccgaagggttcgacagccgcctcagagcacgcaaagcgagggatgactctgggtacgtctgatacatggccgaggctcgggctacgctcacgagcaaatcacctgcaggtacttttggagcgcgcctctgggccactagccgacccttatcgaacagggcacgggcgtccactcggatcacccgttagcaactcactggagacaccatgttcggcgccctccgagggcaacatggcgctcccccctcctccttgcggaaaggcgatgcaggggcatatgaaaaaagtcgagtcagtccttgaccgtcctctcgctctgtgcggaggctcgggggctgctctcgcaaacccggctccggccaaaccgttgacagcgtcaacataccagcccgagaacttggaacctgactatgcacccgggctacggccagaaaacagcaccgcctgccccgctccgactgctgtgccactcgacaaagtgaggctgacagcagctaagtccagcctcgggcgccataggaagctccgcctcgcccgaccccagggctcgggctcagcctcaaccttggaagacggattccgcctcgcccgaccccagggctcggactcagcctcgacctcggaagacggactccgcctcgcccgaccccagggctcggactcagcctcgacctcggaagatggactccgcctcacccgacccccgggctcggactcaacctcgaccttggaggagtcaccgcctcgcccgaccacgggctcggaccgaccacgtcacagggggccatcattaccctacccctag

SEQ ID NO: 26265 - DNA, 258 bp, Zea mays
  Peptide Sequence Number=SeqID_69640
atggcgggcgaaaaagagctcgccggagctaaggaggggtggctggccggtgctgaaaccctaggtgacactggggtgtcacaccaacggtcggtcgcaaagtctgcgggcgacgcgtggcagctccaacggtcgatggagggcatcggactatccagtgtgcactggacagtgtccggtgcgccgatgggcctggagctacaacggtcgtctatgcccggtttggaaggaaatcgcgcaccggacagactacagtag

SEQ ID NO: 26266 - DNA, 222 bp, Zea mays
  Peptide Sequence Number=SeqID_69641
atggagagtacatgctcatccccgagcaaggatctgtccaagaggaccaggagcaagcttccgaggctgctgttgaggatctccccgcagccccagcaattgaaggcaagccccggtaccattcaggaaatggttgatggtgtgacttggcctaccaccctgccaccaggttggacggtcgagtgggatgttgctcaggcaggagaggagcacgaggagtag

SEQ ID NO: 26267 - DNA, 108 bp, Zea mays
  Peptide Sequence Number=SeqID_69642
atggcgggcggaaaagagctcgccggagctaaggaggggtggctggccggtgctggattcgagttagggatcaaggtgaacatgcttgatctttggctcaaggtctga

SEQ ID NO: 26268 - DNA, 261 bp, Zea mays
  Peptide Sequence Number=SeqID_69643
atgcatatatcttacgcattgcattcattagattgtaatcttctcgacggagagtatgtgctcatccccgagcaaggatctgtccaagaggaggaccaggagcaagcttccgaggctgctgttgaggatctccctgcagccccagcaattgaaggtaccattcaggaaatggttgatggtgtgacttggcctaccaccctgccaccgggttggacggtcgagtgggatgttgctcaggcaggagaggagcacgaggagtag

SEQ ID NO: 26269 - DNA, 558 bp, Zea mays
  Peptide Sequence Number=SeqID_69644
atggccgtgatgggttcaacatcggacaagatgtacctctatcaggaaaacaacgccgcctgccccgcttcgactgctgtgccactcgatagagtgaggctgacagcagctaagtccagcctcgggcaccataggaagctccgcctcgcccgacccccagggctcgggctcagcctcaacctcggaagacggacttcgcctcgcccgaccccagggctcagactcagcctcgacctcggaagacggactccgcctcgcccgaccccagggctcagactcagcctcgacctcggaagacggactccgcctcgcccgacccccgggctcggactcaacctcgacctcggaggagtcaccgcctcgcccgacctcgagctcggactgaccacgtcacagggggccatcattaccctacccctaactagctcaggctacggggaacaagaccggcgtcccatctggctcgccccgggaacccccgaggtcgaaacgccgacagttggcgcgccaggtaggggcctgctgcgtgttgacaaacagcttcccatcaagctctag

SEQ ID NO: 26270 - DNA, 378 bp, Zea mays
  Peptide Sequence Number=SeqID_69645
atgccgacgtcgccttccagtcactcggcgttgcctccaaaacgccgatttcgtgttcggtcgctcgacattacctctaaaatgccgacgtcgccttccagtcagtcggtgttgcctccaaaacgccgatttcgtgttcggtcgctctgcattacctctaaaatgccgacgtcgccttccagtcagtcggtgttgcctctaaaacgccgatttcgtgttcagtcgctcggcattacctctaaaataccgacgtcgccttccagtcagtcggcgtcgcctccaaaacgccgatttcgtgttcagtcgctcggcattacctctaaaaatgccgacgccgccttccagtcaatcggcgttacccctaaaacgctgatatag

SEQ ID NO: 26271 - DNA, 438 bp, Zea mays
  Peptide Sequence Number=SeqID_69646
atgggcaagaacaacaagcgcaagcgtgagccgactcctccatcggaggagtttggtgactcggagtactcagaggaggagttctcctctgagtctgaggggtctctggctcccgtccccctgcgtgagtcgtatgatgactcagacgactcccaggggcttgcggcggaggtctggacgtacatccaggccgtcgagcgttccgggctcgagggctcggatgagtcggagtactccttggatgaggaggactcggacggcggcggcgaggacgaggacgatgacgacaacgacgacgacggtggcggcggcaaggacgatgacagcggcggcagtaggggcagcaaccggggcggcaacaacaggggcagcaaccggggcggcagcagtaggggcagcaccagaggcggcagcggcggcaacagggccagtggctag

SEQ ID NO: 26272 - DNA, 1395 bp, Zea mays
  Peptide Sequence Number=SeqID_69647
atggctgggtgctggccaaagtatgccctcgccagatgcctactttgggccagcagctggtgtgaagtccggccttctctttggatctacgcggccgagacccgaccgcgttcgttcatgaagtggaggatggggcgtggctaccctggagatgacgctgctgcggctgttgaccgccgcgggaaaaaaccagtggtcgtggctgaggaaggcccttcgcgggaggctgccccagccactaagaagagaaaaatagtgatggacaaggatcgtcaagatgcggcacggaagcgccaggcaatcactagggtcgaggaccctatgcgcgagattttgtcggccgccgccgctagggacgtggcgggcattgtgtcccaacagctgaagcatgcggccgccttcgccgaccatgttgcgtcgggcgccttgtcttcggagtttgctgccgagaggcaacgactcaagggcaggatcgagcgcctccgagcgcagcatgtggatgctgttcgggacaagtcggctgcggaaaacaagaaccacaggctggaggagaggctggcggctgcggaagccgagaaggaggacctcaggcgtcggttggcggaggagaggagggacgcaaacaaagtttgtgctgaggcgcagtccgcgcaagctgaggccaagcttgcgcgggcggaggccagtctcgcccgccaacgcatcaaggagatggagatgaggctcggcagcctacgcgaccgcctagacaagatggaggcctcgatgcgcgtggaggtcgagcagacgcatactcagcttttggacgcgtaccggaagctgggtgcgcggaccgtgcccttcgaagcacccggtcaggaggtgggcctccgcttccttggatggctacaggaggagctggaggtgctcccgaccattatgacgggcctcatgtccttcacctccgtcgtcacctacgagggggccatgaatgccttgtcccgcgaggggtgcaggcacttcgaggccttcgaacggtctgacaaaggcttcgagcacgaaatcttccaggtcgaggacccggtgatgaagcggtcggctggggctctttttgataggatgtggggccctcacggccgagagactgtccgagagaggtctgaccgagcgatggatcagatggcacatgacgaagaggttgaggaccttggtgatctggacagtacactacctgaggcatcgggggtggagctggcgccgccatccgatgcaggcgagggcccctcggcgacccccgcaccgactggagctggcgaagaacctgcgccagctactgcgctgacgggtgcggacgcctcgaaggtggtggccgaaccagctgccgaagacccagggccttcgcaggtggcagaatag

SEQ ID NO: 26273 - DNA, 720 bp, Zea mays
  Peptide Sequence Number=SeqID_69648
atgtcgggttggtccccagatttgaacaccttcacggatctcttgcagtccgatggtcaaccttcaacttctcaagccagaattcaagcctcattcccggtacgtccgtatgcccctcccccacctgctgcggacggaagtcaagcttctttccagatacctccatacgcccctcctccatatgctccacctccgtatggagtacctccttatgctccatatgctccacctccgtatggagcacttcatccatatgctccacctacgtatggagcacctcctccagttgcacctttatctgttggatctgaaaaccaagctgaggaaaatggtggcaagttgttcgccacgagcccaagtggcactgaagacaccgaggaggaagtgccccgaccagtggggcgtgatagggcaaaggcggctgcgcgaaagacaaagacgaaggggaaagggaaggaagccatgagcagcgaatcaacaagtgaagcattcaaaatgaataacttgtggggtggattagtgaaggccaagcttttgaagcaatggaacatcctaaagggccgatcaaccagagatatggacccggctgaaagacgtacccatggcagggccgtaaagatggtcgaaaaagaacttggtctgctagatgacgaagaagaggaaccggaagcggaacgtgaagaggaggaagatgaggatgagatcgaggagtccgattag

SEQ ID NO: 26274 - DNA, 348 bp, Zea mays
  Peptide Sequence Number=SeqID_69649
atgtcagccagaagaaaacataaggttccatgtgtgcaatttgcttcttctaatggcactgtactatctgagtctgttgggcaagcgccaattacacaattttacccaaacagaatcagatgcaccatcttgggtaaaacactcagaaagaggtttaccacaagtggttacactagggaatccaagtccatgaaaggtgatatagattcaagaaaattaccagcggagggatctgtagatgcggactttgcaaccagtccattttatccagcactagtcatggatcgacatgatcacacacgcaggaaaagcacgcgtgaggcggtcgaggtgcgactagagcgataa

SEQ ID NO: 26275 - DNA, 396 bp, Zea mays
  Peptide Sequence Number=SeqID_69650
atggacgccgaagctatggccgaagagcttcggcttaatatggtgacgaagaccaatggggtggatgacgacctcgacttgaagtactaccaccgtcgctctacaggcagtaccggaggtgtgattgtctcacccgctggtgagggcaatcccagattgagcagcatggtcaacttggtcaccgtgctcaacaccgagctagaccacacccttgacgaattgggcaaggctcgaatggagattgtggaactgcgtgctgagcgcacgcagcaccgccatcaggagaatggttcccccgcccccgttgggactcagcgcccttaccactcgccgccccatggtcatcatgcttacgacactgcagactacaagacctggataaacttggatccttag

SEQ ID NO: 26276 - DNA, 261 bp, Zea mays
  Peptide Sequence Number=SeqID_69651
atgggcggaagttcgacggtggcggcaaattgggcgcgctccggtcaaggattcgtcaaggcgaggttctggaactctctggcgagctatggcggactcttgcagtaccacaccgacgacccaccgcaacagttgacggtggccaaggtcgggttaggcaggttatgcaacccaacatgtaggtcaggttggttgtatatgaccaagttagtgcagggcaccaattttaggttaaaacatgactatagaagtagagtttaa

SEQ ID NO: 26277 - DNA, 663 bp, Zea mays
  Peptide Sequence Number=SeqID_69652
atgccgccggggctggctgggggccgcgcccgcgagccgtacggccgccgggctgcgcccgccaccggggctaggggcctcgcccgccgagccggtgccgcgccgggccgccgaggccgctgcagggggggccgatgctcgagaccaattgatgcagttcttgaggatctcctgggcctgtgggttaggacccacacatgcttccgctgcgccactccgatcttgttggttgatgttgattgcattgtcttcattggggttgccaaaaggacatgtgcattggaggttgccaaaaggacaggtgcaagaggaaagaataacgagaaaaggggccacacgcccgcgccgaggccatgcgcccgcgctggagccgccgtggccgaggccgcctgcccggccgagatcgacgcgcgcccatgccgccggggctggctgggggccacgctcgcgagccgtacggccgccgggctgcgcccgccaccggggctaagggcctcgcccgccgagccggtgccgcgccgggccaccgaggccgctgcagggggggcagggagagggaggggcgggggaaggggaggtcgagcggcgtcaagggagagagagagggatgtgcgcgagatcggggagagagaaggaggtagggggaagggggggtggggctga

SEQ ID NO: 26278 - DNA, 249 bp, Zea mays
  Peptide Sequence Number=SeqID_69653
atgtggggcgcgcgcgggcatgatctggcgcacacagagcgcgtcgaacacgtggagcttttcttctgcccatgttccacagctcacccaagtcgcaaacatgcgaatcttggcaaaaatccggcgcgagtcttttcctggcacctagagctgtctctcatctgtgagctgccatggcagatatggcctaggtacctccttgttttggtttatggtgtgacttggcctccatccctgtcaccgggatag

SEQ ID NO: 26279 - DNA, 96 bp, Zea mays
  Peptide Sequence Number=SeqID_69654
atgaggcttgaaagggatcaagactcgtggtgctcaggaggtgatgctggcaacatggaggacttcgaggagttccaggattacgacgagttttag

SEQ ID NO: 26280 - DNA, 384 bp, Zea mays
  Peptide Sequence Number=SeqID_69655
atggccgcggaggaagaaagaggcggatgggcttaccggcggcgagactgctccggtgaggtggttgagggtgtaggggaggtcctgagggtcacggcgatgtgcgggtcgccgtcggggatggtcggagtcggccggtccacgtgcgcaggcgggggagctcgtcggcggcgaggagtccggcctaaccagggcacgataggtcaatcaaaatgggtcagggagcttcaccagggatcaaggaagctaaccgagtggctggtgcggcttggaagtgactggagggagctggccacggtggccgaggctggagtggtgatggttggcggtggcgcggcgtgctcgaggcgaagtccgacgaactttggctcgggcaggacttga

SEQ ID NO: 26281 - DNA, 489 bp, Zea mays
  Peptide Sequence Number=SeqID_69656
atggaagaccatgtcatagggaacatgtctcttgaagtgagtgggcctggtactataaaaggtttgtttttctttagattttggagcttgtttgtgattgatccaaggggtttaagcctaaggtccctgtggagaagtggtagagagtcatttggtcgacaagttttgttaaacttgctccccctgttgccatggaaaactgagagtttgcagggggtcaacagggagtgcatgggagccacatttttgagtccatgttgtgctggcacactggaaaacacatcccctctgcatgtttgccaagttcagggaacacctatcccatttcaggtatttaaagggcagggagcagtgaaaatctcctctctacctcgagctctactcacagaccactgcatgggtgttgaggttcttgtattcctgctagtgatgaccctctaccacagccaccaagtctgctctgtccagagcatcaagtgccagtggtga

SEQ ID NO: 26282 - DNA, 564 bp, Zea mays
  Peptide Sequence Number=SeqID_69657
atggattacagaatccctccacttgtgcgccagtcttccctcgaccaatttctttcacctgtgtgcggattggatgaagggaccgagggagtacgtcaacgcgccaggtatttatacctaggccacgacaccagcggggttagcgacaacggcaacgatcgccgagatctgcgcaggcgcagctcgccccggcggaaatctcgtggttcacggatgctgttgcgcggcgatggagctcggtgcccaacagaaaagcggataggaaggagcggcttcgattcttatactccgagaagcacgaccggaggaatcgggtctgagcccaaaaccagccccggtggtttggtgaccgaagatttcggcatggaggagatgcgcgcgactttgctgcggtatttccacgaggttgttgatgaacctgctaggtgggacccattcgtcggccacgcgcgtgaagggggcgcgaggaagcaggctgcgccctggaggagggttcaggcgcgcgcgggccacttgggacgagaaagacccgagctaggccgagccagggaggtgggagagtga

SEQ ID NO: 26283 - DNA, 324 bp, Zea mays
  Peptide Sequence Number=SeqID_69658
atggtcgttgcagcaccgtgcttgccgtgtgcagcaggcctggccgagtccctcctctatgttgtgccatcgctgcacgctgccacaaccaaagttcgcaaccctgtggtgtttttcaacgagccgtgtcttcctcgtgttcttgattgccgctcctcgcacctgcgatcagcgccctgcgtcatggatgcgcgtcatgtgatcggcatagtgccagaccatagatcactgtcgcccctgcaacttggagctcaactcggtatgatttcagagattgcattgtttgcttcagttaatgttacaatcagttcatggtcgttataa

SEQ ID NO: 26284 - DNA, 171 bp, Zea mays
  Peptide Sequence Number=SeqID_69659
atggagcccaatggaaatgcagtttacattgaaatttggctatcatcacaatataaatcacatttgaccatcacaatattcagtgttccatgtttcccaccgaatcactgttcggataacatggagaacatcaaccctttcgatgagaatggagagcagggtacggggtaa

SEQ ID NO: 26285 - DNA, 177 bp, Zea mays
  Peptide Sequence Number=SeqID_69660
atggagccccacagacgtggacctagcggagcagctcttggaggcttcgtcgagaggacgagccacagggagccgatcggagttggcctcgcagacgtcctccaggtccaaggggacgccaacatcaccggagttgcacgccccgtgctcgattatttgcctgatgatagaaaatga

SEQ ID NO: 26286 - DNA, 198 bp, Zea mays
  Peptide Sequence Number=SeqID_69661
atggcctcgagcgaggactcaaactcgggatccagatctggagccagaacttcgttatatattaaagatgtgacattcgtttatgtatcatgggtcatcatatgtgtgagacttgatcccagcacacatttgagacacatgatcggctttggccccctaaatccgggtgtgacagaagtggtatcagaggaatgttga

SEQ ID NO: 26287 - DNA, 366 bp, Zea mays
  Peptide Sequence Number=SeqID_69662
atggccgtgatgggttcaacatctgaaaagaagtacctctgccagatggtgcatactatccagaccactcgtgtgaacaccaactatatccctccaccacgacaagctcctgtctacctagtggtcactagcctttgcagctgtagcgtcatctttagcaccgccagcaccagtagctcaagccaaggcaaggatccagatgattttggtgatggtggagacgatgatgatgatgaagaagaagaagaggaaaacaacaatgaagaagccaacaatgagcaggaggacaacttcgttgggataaggcccatcactaagcattacacttcaatgttcgagacgaggcacttccctaacctgctgtag

SEQ ID NO: 26288 - DNA, 162 bp, Zea mays
  Peptide Sequence Number=SeqID_69663
atgctgctaggcgagctctatggtctctcagccacacttatcggcaacaacttcacgacacaaggctacatggagaacttgaagaagcccacgccaggattgcagcccttgaagctcagctcgaaggaaggaatccacccgaagcctaagtccctgccatag

SEQ ID NO: 26289 - DNA, 711 bp, Zea mays
  Peptide Sequence Number=SeqID_69664
atggaggccagtcacaccatcaaccaaaagaaggaggtacctgcaaaaattatgccacaaattcaaaatttgaaatctaaatttgaaaaggaagaagagagaaagaaaagaaaatataaaagaaaaagacgccctggcatgtggagcccactcgtctgccgctcaccgcgcgtcattaatcgaagccgtatcaatgcgccgcgggtcccgcacgtcagttgttcaaccgcgtccacgtcgcacctcggtgatctcgctgcgtggtgggccctagagtacagaccgtactcgcgcgtcagctcgggcgtggatgggaataccggccatgccgtgatcctcgccgggccacgcgagccgtctccacgcccgactcgcccacaaatagtacccaccaacctcttctattcgtgcccctttcttcgctaccacttctccgcaaccaccatagcgccgtcgcgtctgcatatggatttaatcgccgccaccgtggaagtcctcaaccgagctaatatccacgcctcctgtgataccgaagtcttcctctggcgcggggagtgttggatgtggctgcacagcttagattttgcaacggatacgccccaattcctcgccgtggtcaagactagccacggttctgcctcgttccgtggtcggcatcgtcgggtcgccaatactaggtatggaaacctcagccctgtccgtcgcgtttag

SEQ ID NO: 26290 - DNA, 375 bp, Zea mays
  Peptide Sequence Number=SeqID_69665
atggagaggaagccgacgtccaaggcaccacttgcacagaggtggtcgagcgccacagacgagctcggtgctcaacctgctaccctcggtgaggtccaaaaagacagggcgttggaggtggagaacacactcggtcaggggaggaagaagggcagaggacgccatgggaggagctttagcgcactgaggaagaaggggcagagagcacgcagggaggtggaggcgccatgggaggaggctggagatggcgtggggaagaatgggagagctgcagccgtgtgggagacgaggaagaagattgtggcggctgcttgggggctaggggtaggaatgcaaaaatgcctccaattgcaaggagagggctcctatttatag

SEQ ID NO: 26291 - DNA, 321 bp, Zea mays
  Peptide Sequence Number=SeqID_69666
atgaagaggaagccggcgtccaaggcgccacttgcacagaggtggtcgagcgccacggacgagctcggtgctcaacctgctaccctcggcgaggtccaaaaagacagggcgttggaggtggagaacgcactcggtcaggggaggaagaagggcagaggacaccatgggaggagcttcagcgcgccgaggaagaaggggcagagagcacgcagagaggtggaggcgccatgggaggaggctggagatggcgtggggaagagtgggagagctgcagccgtgtgggagacgaggaagaagattgtggcggctgcttggggctag

SEQ ID NO: 26292 - DNA, 150 bp, Zea mays
  Peptide Sequence Number=SeqID_69667
atggattacagaatccctccacggctgcgccagtcttccccgaccaatttctttcaccttcgtgcggattggatgaagggaccgagggagtacgtcaacgcgccagatgtaattgtggacattactccactaatatctcacttattctaa

SEQ ID NO: 26293 - DNA, 723 bp, Zea mays
  Peptide Sequence Number=SeqID_69668
atggaagactctctggtcattaggacatcctactgctcagaggtggaggggttcccacatctattgcgaagttgtgcgcttcgcatggggatctgcaagaagccaaaatatgtctggaaggaatatctcaagaacggaatggagaagtgctctatggcagtctacctgggagaaagccgaaactacccgaaccacccttctttccaagtcactttcaccggataccgcttcccagatacttgccaaaatgttgcccgaaaagccctccaacaactatgccagaactacagcagaaggaaaagacttcagaccctgttagggagagaccctaccgaggatgaccccaccatcgtctacatggttggatacctccacaccctcgataaccaatatgatgaccttgcctcccactgtactcacctaaactcccgggtggaaagcctggagcatcaagtcagggaacttacaagggaaaaggcgtcccttcaagagagcctcgagatagcagaaggcgaggaaaccaacacccgtgaggcctaccgcactctgaagatggattacgacaagaagctgaagaagctcgcccccgcaagaaaaatccgcaagaagaccaaaagccaaggatgtcagactgagcagaaggaagaagcccctccagccctacctcctaccaggataggggaactcgtccgacaccgaggaaatgtccctagccagccttga

SEQ ID NO: 26294 - DNA, 549 bp, Zea mays
  Peptide Sequence Number=SeqID_69669
atggcctgttttctaaaagggctaagaccaaaactcaagaccatcctcgccagccaagatttcctcagcttctcgcacctctccaacaaagccatccaagtggaaagggcaaaagaggaagaaaaagggcacctcaagaggaaattccaggttctccgagctcagcagcaagaccgtcaccagagagctcgatccttcggacatccacccaagggaccaagcttcaatagaccagttggactcactccgtcacgttatagccagcagagtcagagttcctttcaggccccctcagttgcaagcaaccaatcgccagcaaatgcctgttggcactacggagaccctagtcacttcaagaataactgcccccagttgaaggcacccggacctacctactccaactcggtgaatggccccaagattccctcggcacctgcctccaaggcaccccccccccctccaacagttagcagagcaggacccagtaccagggcagagcacgagttaatcacgtcgacgcacaagaggcccaacaagctccgggagtag

SEQ ID NO: 26295 - DNA, 285 bp, Zea mays
  Peptide Sequence Number=SeqID_69670
atggaacagggagccgagcgccatggggtgagcttggccagcgtccattgcagggggtggaggctcacgtccgggtgtaggagagttggggaggggcgctcggtagagagaggagcagccatggatggagctcggatggggggaggaagaaggctggctggagatgtggcgccatggatccagggagaaactactcctatgtttgcggagaagaagggcgcggcttcctgcacttgggttcaagggaaacagagaggagggagaacagagttccaaaataggtag

SEQ ID NO: 26296 - DNA, 1674 bp, Zea mays
  Peptide Sequence Number=SeqID_69671
atgtgcaccactcccgtgccgtcgccgctgcctgtggcgctggtcggagtcaagggagaccaccgtgtctacgtcacggtaccccagcacccggaaggcgacgtggccgtccatcgcagccggcagttcatgtgcagagccgtgcccctgccgacggcgggggagaccttccgggaggcagtagcgctgtgccggctggcgttcccgatcgcgttgacggctctgctgctctactcgcggatggccttgtccatgctcttcctgggcaccatcggcgacctcccgctagctgccgggtcacttgccatcgccttcgccaacatcaccggttactcggtgctgtcagggctctcgctcggcatggacccgctctgctcccaagcgttcggcgccaaccacccacgcctgcttggcctcaccctctaccgctcagtcctcttcctgttctgctgctcgctgccgctcaccgcgctctggctcaacatgtctaggatcctcgtcttcctcggtcaggacatcgagatcacggcactcgcccaggagtacatcctcttctccctccccgaccttttctccttctcactcatccacccgctccgtgtgtacctccggtcgcaggggataacgtggcctctcgccgcagccgcgggcgctgccgtgctgttccacgcgccgaccaactacgtgttggtggggcggctccggctcggcgctcctggggtggccgccgcggcgtccgcgtccaacttcgtgctcctcggcgtgcttctggcgtgcgtcgtcggccggcgcgactcggggcttcgagcggcggggccgcccacggcggagtgcctcgccggttggggtccgctcgcgcggctggcagcgcccagctgtgtgtcggtgtgcctggagtggtggtggtacgaggtgatgatcctgctctgcggcctcctgccagacccgaagccggcggtagcatccatgggcgtgctcttgcagacgacggcgctggtgtacgtgttcccgtcatcgctgggttttggcgtctccacgcgggtgggcaacgagcttggcgcgaaccggcctggccacgcgcgtgccgcagcgcacgtggccgtggccggagccgcgtgcatgggtctcgcggccatgtcgttcgcagctggggtgcgccacacttggggccgtatgttcaccgccgaccccgacatactccggctgaccgcggccgcgcttccagttgtggggctctgcgagctcggaaactgcccgcagaccgtcggctgcggcgttctccgcggtagtgcgcggccgacgcgcgcagcgcacgtcaacctcggcgccttctacctggtgggcatgcccgtcgctgtgctgctggccttcgggctcggcgtgggcttcgtcggactctggattggtctcctcgcagcgcaggtgtgctgcgcggggctcatgctcttcgtcgtcggctccaccgactgggaggcgcaggcgcggagggcgcaggagctgacgtcatgcgcggtgggcgaaatggagaagactggggcccacgcgtcagctaccacggaagcgggaggcaggccggagaagggggagcaggaggagggcgtagaaaggaggcacgacgactacgagccattgatgatttcgaacagtggggagcccgagccagaaactgtgtag

SEQ ID NO: 26297 - DNA, 372 bp, Zea mays
  Peptide Sequence Number=SeqID_69672
atgctgctaggcgaactctgtggtcctcagccacacttactggcagtagctacacaatatgaagtacaggcatcttcctctcgtcttcatggagaaagccagaccagcattgtttcaggtggagctgaagaagatcgcctcaacaccctagttggtgtggtggcaggtcttaacaccgacctggatagtgctaccctggtcctttctagggtacacttggagctggaggatgcacacgcaaggattgcagccctggaagctcaactaaaaggaagggatccccctgaagctcaagttcctgccatggcgttgtcccctccccgcaagaggatccactatggagaaccaggatccatcaccagactgctataa

SEQ ID NO: 26298 - DNA, 59 bp, Zea mays
  Peptide Sequence Number=SeqID_69673
atgactgtagcaaaatggttcgtgccagatgcacgagggatagtggacaatgtttacag

SEQ ID NO: 26299 - DNA, 426 bp, Zea mays
  Peptide Sequence Number=SeqID_69674
atgaacgaaaatggaaatttgcaggatagaattgggattcagatgggtcaagttaagatggtagaaatcaaggaggtcgcggaaaaagggagaaatgggaagaccgaggccgcggagaaggaaaggagcgtaaatcacggactcatgggtatcctcagtcgggacagtaaccccatggcaaatccgccaagaacagagttccctcgggggaagaaccccgatggacacaaggtggagaagttcgggctcgaagatgacagacatgtggttacctgcgaaaggcaattggatgttggggtcgattggaggaatcaccgcggtagacgaactcgaggccttcctcttggacgccatctcgattctaccggcgagcagagtgggaggcgaattgcagagaggattcggaagcgagaaagcaagaactag

SEQ ID NO: 26300 - DNA, 270 bp, Zea mays
  Peptide Sequence Number=SeqID_69675
atggggtcgccatcgtcgccagaaccaggtggagtgcgaccgtgccatgcggggcatggtggtggagagctggtggtggagagctacgactacatcttcaaggtgcgcgagggagatgctcttcagctaccagcccttggctttggctccgccaactcacccgagttcagtggatctgagccctatcggcttggatctggccctcccttgttggatctacgccatggaggtggtggtcctggtagggtggaggggtggagcttgctttag

SEQ ID NO: 26301 - DNA, 288 bp, Zea mays
  Peptide Sequence Number=SeqID_69676
atgtcgctgcctctgacgacttggagttcgcagggatggtcgatggcagcagagactttatcttcaacatgctcttcatggactcagactcaggccatagttctcctacgagcagtgaagaaggttcctcagcggtgtgcacaacatgaaggcacgatttgggagaaggatgaatcaattccgaagctacgaatgaagaagctttggcttgacgcaagggtggtgatggagaatggaaccgacctaaaggggaatatactaccaagtcctcggctgattactctttag

SEQ ID NO: 26302 - DNA, 408 bp, Zea mays
  Peptide Sequence Number=SeqID_69677
atgaagcaccctcggtcgtacccaaaggagctgggtgactttgaccagcagcgtcaagggccagcgtgtccttgtgagctagaccgccgtccaaggtcgacgaagcgcaagaaactatccggctctatcaaggctgagcccaacactcagcctcggggcactcgtgctcaggctcaagctagccgacccagtctttcagttcccctaatcccagaccatgagagtgataacgatggttgcaaggacactgtcaccgatctgcatctaccagatgcttctgtcatccacaggcttcgtcttcatgaggctcatgcagttcgccatggtggaaaacctcttatggattactattccaagggtggctcggcgatgctgcaagacaaggggcatgtgaaagtaaagggatga

SEQ ID NO: 26303 - DNA, 147 bp, Zea mays
  Peptide Sequence Number=SeqID_69678
atggcgccttacacctcacatgagctcccacctttgggttgtaacactcatcaaactgtgtacatctgcaagagactccaagttgtggagatccttgtgaagggaaagtataaggatgaccggcgactcaagttgatcattggataa

SEQ ID NO: 26304 - DNA, 636 bp, Zea mays
  Peptide Sequence Number=SeqID_69679
atgggatccactttagtaagcatttctggaaaacagagtcttttgattattgaaaagccttaccttgactcccttaaccagcatacccttgagagtcttttctttagtcggttatgtaatcgcttccgcatttctttatctccgatgttctgtaatctctgcaagacgggtgaaacgttcctggaaaggacaactgtaggtgggccaaattacttgggaggttccgtcacagagggtgcctctaagcacgacccagcccacgagggtggtgctaaagacgacctaactcccaatgatgctgggccaggctcctctttggctgcttctatggacgttcacgttggatcaccactggttcaatctgaggaactcgtggtgacaaatttatctgctgctctcgtcggtctggtcaccttagaggccaatgacccagatgctaggaatccactgcctgctgatggagctgagaatgtcttcgattctgtatatgcccagctgaaatcttgtggcgtccctgtccccgaccaagttttgtctttgatgcagtggaaccctctacagcttcagaggcagatggaagatctaaggcagtggaaccctaggttgtgtaagcgtgagcatgtcacaccgacttaa

SEQ ID NO: 26305 - DNA, 213 bp, Zea mays
  Peptide Sequence Number=SeqID_69680
atgggcccaatccggctgttatcggcccaccgggccatccttcacgcgcgccggtgtggcctcctatcagtggggtgcactggtgcgactcagcacttcaggatcactcaccggcatgtggacccgggcgtcgtcgtatcaaccgcacggcggaagttctgcgcggacgccgagaaaatcggcggtgatcccccaccaatcgcagacccatag

SEQ ID NO: 26306 - DNA, 195 bp, Zea mays
  Peptide Sequence Number=SeqID_69681
atgtcctcactgccgcgggcggggcctcaccgtggatggggtcctgggcgcgtcttcggtatggggggacgattgggcggaaatcatggtggtgaagtgcccaggaaaaatcaggctggggcgtgggattttacggtggttatcgcggggactgacgccggcgtaccttcaccacatatctctgatttgacatga

SEQ ID NO: 26307 - DNA, 702 bp, Zea mays
  Peptide Sequence Number=SeqID_69682
atgacttctcacgaatcctcagaaggagggaacacacattcccacacggacagacttgcacgagagggttttcccctcattgtgggaggtgctattgggagccggttatacgacgcctccccaatacgcggtgcagttgttcgaggagcaccgggtaccccgctggctgaagatactatcgagtccaccgctcttcacgtactgactaccttttttggttttcaccccttggagctgtcaactcatcccattggcttgttccccgctgaaaaggaggacgacccaatgtggaaggatcgagtggagcatgccaaggatgtgtgggctctttacctggggcagactgctcacctgacggtgcggtgcatgaatgccctgtatcgtctgcaagcagtgcgaggtgaggcaatgtcccaactgatgggaatagtggagtctaccaagatcaccctggataatagggaggaccttgtggtagatctgtctactgagctggcggagaaggacctccaggtggagcagatggccacccaaatccaagagcttgaggagcaagaaattcaggacatggaggcagaaggggtcgacgaggatgtcgacatcgagggaggagaggagccggagcctgcatccagcttggacactgctagctcagggagaccaccttcccccgagtctagtgttgcctcgtttgcccattag

SEQ ID NO: 26308 - DNA, 321 bp, Zea mays
  Peptide Sequence Number=SeqID_69683
atggatggcggcaaccacccccacggcggtgagccccccatctcgcagcacctgcaaggcttccagaaggtgctggagattcttctgcctctcgcgcggggccctgtagcgccagttggtgccgaaggtggtcaccactcgttgagaaaacgatgggagcctcccatcgtcgttctgaaggacaggcggtacctttggcaggcgaagcaggcgacgcttcacctccgccatgatgaccgcgtcaaaaagggaccgggaaaggggatactccagaagggatccttctccacgaagaaaacgggccccgagcccccctactga

SEQ ID NO: 26309 - DNA, 453 bp, Zea mays
  Peptide Sequence Number=SeqID_69684
atgggcaagaacaacaagcgcaagcgtgagccgactcctccatcggaggagtttggtgactcagaatacttagaggaggagttctcctctgagtccgaggggtctccggctcccatccctctgcgtgagtcgtctgatgactcagacgactcccaggggcttgcggcgaaggtctggacgtacatccgggccgtcgagcgctccgggctcgagggctcggatgagtctgagttctcctcggacgaggaggactcggacgacggcgaggacgaagttgacgacgacgacgacggcgacgacgacgacagtggcaacggcgacggtgatggcggcaacggcggcaagggcagcaccagaggcggcagcagcacgggcagcaccagaggcggcagcagcaagggcagcaccaagggcggcggcggcaagggcagcggcggcaaggccagtggctaa

SEQ ID NO: 26310 - DNA, 909 bp, Zea mays
  Peptide Sequence Number=SeqID_69685
atggcgcccagcctgcccccgccctcgcccctgcctcggcgtccccctctgtgccatcctcgcccacacgcctcagcgcaggtcttcgaccaccgctacttcttccccccacacccagtcttcggatctgtgcgcggacaggaagggcatgtgggtgtcgccgccaccgccgttctagggattgcagggcgggtagaggcgacaggcaaggtcagctgtgtcggcaaggagcgcctcgtggttccctgcacgaactcgctggagtcacgcgcagccggcactggtgccgaggagggtcttcaggttgtattccaagttggaatggctctattgagatttagtcatgatgatttggtcaaattacgttttgagaaactattatatgccttgagatatttccctgaggaggcaatagatccagatgtgttattgtcacttgccttctcatttaagtggttctcacttggagcatatccatgggatgctttgtacgggggagggaatatcctagcgttcgccttggcttcgttcttctcttgcagcaggtgtgctcccagttctcaagctgtccaactcagctccttgtccttgaactatatgaatgatgttgggtgtgtgccaaatgtgctccatttcacaaatttgatagatggtcttggccatgctggtaacctagaagcctacagcttgctttctccactaagaactaaaggttgtatttctctacaggctttatacatagctccaaagacaaagcattctacacccaagtatgggctcgtctaccttgcatccttaattggcaatgcttctcaaaagcacaaggggaaaatctctctgtctctagctacaaaaactgctcttgctatctattatgatggcgaggacaactccattgccgctgcctga

SEQ ID NO: 26311 - DNA, 318 bp, Zea mays
  Peptide Sequence Number=SeqID_69686
atgggtgcgcggcggcggcgtctaggatccggctgttgttttccttcttcatggttctgcttcaggcatagaccagccacgacgaggcttcgatcaacggtgaaggtgagggtggaggctgatccccatggcgttcaggattgggatccagctgatgcagctggtctagcttgtggtgctttgacgttggcattggtctgcttggagcaagggagaggtggtgagagctatcatcgaagtggagaaggacaagatgctttggatagggtccgtctgatgccattcatcgctgtctttgaccccgtgaaggcatcttag

SEQ ID NO: 26312 - DNA, 150 bp, Zea mays
  Peptide Sequence Number=SeqID_69687
atgtctcagatgcgttgcattcagcccatttcggtcccaccttttgtgaacacagagagagtgggagagcaggcctccgaaattgctgtccgcagaggtacacttgcacaggtttcccactatctgacgtaccatgaggccatgacataa

SEQ ID NO: 26313 - DNA, 153 bp, Zea mays
  Peptide Sequence Number=SeqID_69688
atggagcgtgtgaaccccacgctggtgcccaccgacctcgacgttggcaccagggtcacgttccctgtcttctgccagtgctcggccgccgccgacaacgccacgacgctcatcacctacgtcatgcagcccgggacaccttgtgcaacataa

SEQ ID NO: 26314 - DNA, 240 bp, Zea mays
  Peptide Sequence Number=SeqID_69689
atgggtctggctccgcccctgcaggaggccaagatgctccgagtggtggatgcgttttcgagccaacaggtcgggtcaggcggaggagggctgaggcatcacggcgtcggcgtcgaagcagaggagggggcgatggtgcgagtgcgatcccaggcgaaggagggacgcgtttacgcacggccgcaacatttgaggagggcatgtatggggctcctggtggtggcgcacgatggcgattga

SEQ ID NO: 26315 - DNA, 249 bp, Zea mays
  Peptide Sequence Number=SeqID_69690
atggcctggggtgtgtatctcattacctccttctccctgctacacccgctggctgtggctccacgtcgccagtctgctggtggtgcggcaagaggtcagctcccttctggttttggcttcccacaatcccacggcctaggggctaccagtaccagaatccttgattcaataatcattatgagcgatcaggttcacattctagctgttgttgcaggaaacatgcctttgttagtatgggagacactttga

SEQ ID NO: 26316 - DNA, 1434 bp, Zea mays
  Peptide Sequence Number=SeqID_69691
atgaagcccacggccggcgccagcggcaagggcggcgccgtgtatccttctctgccgcggctcaagtgccaggagtgccgccgtgccctcgtcgtcgtcggggtcgagtcctacgccgacaggctacccgcacacgccgcgcccggtaatcatgcatcttctgttcaggacagtgttatgggtgcaagcaagatggacaattcttatgttgtgctatcgaggcagaacaaagttcagggtcctagaattcccccacgcccaggaagtgcggtggcggcacatactgatcccaaccaatcaacaagagcgatagaggggtcatatatagtgctaccacctccttccgcttccatatacaagaaatctgcctctgaaggaggtggtgcgcagctcacaccaccaggtggaaactccagtagtcccttgtcgggaaacaattctgggtttcactctagtgtaactgtgctgaaaagggcttttgaggttgctagctcacaaactcaggttgaacaaccactttgtctggaatgtatgagggttctttctgataagatggacaaggagattgaagattgtaatgctgatattaaatcttatgaggcttgtcttcaacgtttgcagcaggaaccctacaacatcctcagtgaaacagattttcaaaaggagaaacaaaaggtgaccattcctattgatattgaggaagaggaaaagaaacttaaatgtgctattgaagaagctgaaaagcaatattctgaagttagttctgagatgaaagatcttgaaataaagtctaaacaatttgaggaattggaagagcggtactggcatgaattcaacagttttcagtttcagttgacatctcatcaggaagaaagagacgcagtttttgccaagataggagtttctcaggttcatttggaaatgttgaagcatactaatgttctcaatgatgcattctatatttcatgtgatgaagtaattgcaagaataaataactttcgcctcggacgccttcctaatgtagaggttgagtgggatgagataaatgttgcgtggggtcaggctgcacttctgttgcataccatggcccattatttcactccaaaattccgataccggatcaagattcaccctatgggaagctatccaagattcacagacatccacaatcatacatatgaactgtttggtcccgtgaatttgttctggagcacccgatttgacaaagccatgacatggtttctgacttgcctgcaagagttcgctgagtttgccataagtctggataaggagaacaatgttccacctgaaaaaacactgaagcttccccacaatcgtgttattcatgccatagttattgagaccaactggacatcaaacttgggaggtccatggtttgattgggctattggaccactgcctcaaagtagttaa

SEQ ID NO: 26317 - DNA, 408 bp, Zea mays
  Peptide Sequence Number=SeqID_69692
atggttacaaggctaagaaaagggggagaaagaagtgggggatggatagctgtgagggagcctttatacatctgggaagatgcggtctcgacaggtcgtgcgcggtcgccaggccgaatcaccggcgaaatcccagccgagcgcgacggagagttagttgagggaagggatagagctgacgacgtggtcccacaaggcggtgagatgaacgcgcgcgcgacgactgacgaatggacccggtttgtcagcgacggtggtcctatcctgcttaacctgcgcacggggagcggagaactcgtgcttgattccttcctcttcaagatactcatccacttgaaggttctgaactcggacccattatcgttttctcttcttaacctgagctcaaacttgttagggctctcctag

SEQ ID NO: 26318 - DNA, 981 bp, Zea mays
  Peptide Sequence Number=SeqID_69693
atgtcttcgcgctcccttatgcatcgtgtctttccaccttccgagcccccggatgggggacacccacaatccttccgccttgtcgttggaggaacgcaacttcgcgaaagttggtacctttcagccatcgttcggcttcaaggattttcatcagtcagcccggctgcatcccctcgccggtggtcacccaagacggtgaccaccagcccctgggtggggagaagcaagccgggctgcgatcttggtcctgccctcagcttcaaggatgttcatcatcctcgctggggcggaggccgggctgagccggagctctacctcccgcgcgggttcgtgggtcagcctctccttcagcattcaagggagagggcgctcactggccctgcgagaggggcggacttcgacaacgcggggctggtcgacggcaggcgtcgtcagcttcagcgcgttgggctcgccggcttggctctcggtgccccctcctgccgcaagggcggttgtcgcgccgcgcgcacgggaggaccgcccaagacgtcgcgcgctgctagggcggcgttcgtgttctggggcggtcctgcctttgcaccggtgggggcggctcgagaagtccccgtcgccgacgggatcaccgccaccatccgtgcttcgggcctccggctctttgtacttgtcctcgcccctcgagcgtcggagtccctcggctcggtcggccttgctgtccgaggcttctcttgcttagtcaaaggaacccctcggccgctctttgatgagccgaagccaagggtagcggtgtcagcacggacagaggcagagttggctcgaaaagaagacttggtcggccagagcctggccgggtcgtccactggcgggaccgacgccggaattgagttgccgaggcctcaggccgggctgatgtcttcgggggacagctggccgaggcctcgggagttgagatcctcggaccgcgtcgccgtccgaggctag

SEQ ID NO: 26319 - DNA, 174 bp, Zea mays
  Peptide Sequence Number=SeqID_69694
atgaggatgtctaggaatgagcctggacgtggtccaataacccaaaacatcggcatgattgggtcacgggtgtgcgcagtgggcgcaatgtttatactggttcaagcaggacatccctactcccagccatcgacgacttgcgctactgacaccattgatgaccaaaactcgtag

SEQ ID NO: 26320 - DNA, 927 bp, Zea mays
  Peptide Sequence Number=SeqID_69695
atggcgcctcctgttgacgtggtcggtctgtgccctgggttgggcgatgtggaggctcctccgaggtcgaggtcgagggctgagcccgagtccgagccctggggtcgggcggagcggagttcgtcgtcttcaggggctgagcccgagtccgagctctggggtcgggtggagcggagtttgtcgtcttcaggggttgagcccgagtccgagccctggggtcgggcggagcggagttcgtcgtcgttaggggctgagcccgagtccgagccctggggtcgagcgaagcggagttcgtcgtcttcaggggctgagcccgagtccgagccctggggtcgggcgaagcggagtttcctatggcgcctaaggtcgggcctggctgcttgtcagcctcactcggtcgagtggcacagcagtcggagcggcacaggcggcgctgtcctcttgtcagaccggtcagtggagcggcgaagtgactacggtcacttcggctctgtcgactggagggcgcgcgtcaggataaaggtgtcaggccacctttgcattaaatgcccctgcgatttggtcggttggcgtggcgatttggccaagctttgtgctgatgggggttaccagctgagatttaggagccttgagggtacccctaattatggtccccgacatgggtgcgcgcgagcgcacccgctgggtgtagcctccgaggcctcggaggagtggtttgactcctccgaggtcttaatgcctcgcgcaatgcttcggctgggcgagaagacggtcaaggacagactcgacttttttacatacgcccccgcatcgcctttccgcgaggaggggggaagcgccatgttgccctcggagggcgccgaacatggtgtctccggtgagctgttggcgggtaatccgagtggacgcccgtgccccatttgttag

SEQ ID NO: 26321 - DNA, 701 bp, Zea mays
  Peptide Sequence Number=SeqID_69696
atgagcatcatcctgcagtacctggtcttgacctgtggtgtatgtgagacagcaagagtgagctcacatacgttcatcgctcaacaagttgtggggaataatgtgcatgaactcgccaaagatccgacggtccagcgtgatatgagcccagaatttagatacgaccgtccgatcccgatcggacgatccaccgcctcctcccccaatcgatacgcgcggcataatccaaaccgttcagagggcatccaacgaccgaaatcccttcttcaaccccccgatccacaccacggcggcggtcaacgaatcccaccgtcaagcacgccggtgaccgccatccgggcacacaagtgctactgcgctcagttgaatgtagccgcacgatccagaggcaaaggtgggctgcctggtaaagtactcaccgttaaatgcggtgtcgtttggtccgaccacggcgagcagcggactgggcctgttgacgagcaatcgccacagcttcgacgccatgacccccgacttggtggacgccgcgacatctacacgctctggcgagtcattgggcggatcgtcgagcggtggcgaggaggggagaggatgagcagcacgcggcaaaggggcaacgccgagctccgtcgatggcgaaagagaggaggtcgtgcgcccagtatatatggccccgagttccaggaatccccaataatcgg

SEQ ID NO: 26322 - DNA, 636 bp, Zea mays
  Peptide Sequence Number=SeqID_69697
atgtcttcgtgctcccttatgcatcatgtctttccaccttccgagcccccggatggaggatgcccgcagcccttccgtcttgtcattgggggaacgcaactccgtaggagttggtacctttcagccatcgttcggcttcaaggatcttcatcagtcagtccggctgcacccctccgccggcggtcacccgagacggtgaccaccagcccctgggtggggagaagcaagccgggctgcgatcttggtcccaccctcagcttcaaggatgttcatcatccttgctggggtggaggccgggctgagccggagctctacctcccgcgcgggttcgtggttcggcctctccttcggcgttcgagggagagggcgctcactggccctgcgggcgggtcggacttcgacaacgtggggctggtcgacggcgggcgtcgtcagcctcagcgcgtcgggcttgtcagcttggctcccggtgccccctcctgccggaagacggttgccgcgccgtgcgcacgggaggaccgcccaagatatcacgcgctgccagggcggcgttcgtgttctagggcggtcctgcctttgcaccggtacggcgcctccacgcggaggtcggtgccccactcgtccgggaggatctga

SEQ ID NO: 26323 - DNA, 318 bp, Zea mays
  Peptide Sequence Number=SeqID_69698
gccacctttgcattaaatgctcctgcgatttggtcggtcggcgcggcgatttggtcagggctgcttcttggcgaagacagggcctcgggcaagccggaactttgtgctgatgggggttaccagctgagaattaggagccttgagggcccgggtgcacggtcgggttccaagttctcgggctggtatgttgacgctgtcaacggtttggccggagccggggggggaagcgccatgttgccctcggtgggcgccgaacatggtgtctccggtgagccactggcgggtaatccgagcggacgtccgtgccccatttgctag

SEQ ID NO: 26324 - DNA, 177 bp, Zea mays
  Peptide Sequence Number=SeqID_69699
atgaatgaacaaagtgcaaatctagagcagagccaaggggctgcttcggtctggggcaccggactgttcggtggtgcaccggacagtgtccggtggtgcaccggacagtgtccggtgcgccaggccgcctcggccgaagaggccgctctcgggtttttctccggcgacttcggctaa

SEQ ID NO: 26325 - DNA, 459 bp, Zea mays
  Peptide Sequence Number=SeqID_69700
atgtggcagaataccaagatggtagaaatcaaggagaccgcggaagaaaggagaaataggaagagcaaggccgcggatgagaaaaggaatataaataacagactcgtgggtgtcctctgtcgggacagtgaccccacggcagatccaccaagaacaaagttccttcggaggaagaactctgacggagacaagatgaagaagtggcgcctagccactggccttattgctgcctttgctgctgcccttgctgccgcccttgccgtcacctttgccgccctagccaccaccttcgccgtcgtcgctgtcgccatcgccgtcgcctccgtcgccgccgccaccctcgccgccgtcgtcgtcgtcaccccctcttcggatgagtcagaggagtccccctcatccgaggaggcctccgactcattcgagccctcgagccctacgcgctcgatagcccggatgtag

SEQ ID NO: 26326 - DNA, 714 bp, Zea mays
  Peptide Sequence Number=SeqID_69701
atgaagtcggggtcgtcctcttcctcggaacccacgggtctggaggttgagatggccgtcagtcggtctcaagttgaccacatatggtaccccgaaaggtgcgagactaatgtccgacaagtccctcgcaagtcgcaagggtgccggcgtcatcagtccgcccggggttggcatgttgctgggaagcgacacccgtcgttgtctcaggtgcgaggacaacttcgacatgtcccccgcaggggtgccggcgtcgtcgtctcgctctggtccaacagccgacgaggtgccgcctcttgcttggccacggttgctccgtcttctcctcctctggcgaggagggtggcggggcaaacccagatgttcctcttttgccgcggggagatgccgtcgtcgagttctcctccgtcgggcgagccgacgaccgtcgttgttgttgtgctgcgaggggaggagtaccatgtcgtagctgccgtcgcgggacatgaactcgagactcccaaagcggagcaccgtctcgggttgaagaggctactgaagattgtccatctggaactcaacgggaaagtatttgtcaacacgcagcaggacccctacctagcgcgccaactgtcggtgtttcgaacccgcgaggaccctcaaccgactagtgaatttgtcgttgcgtgtccctgcccagatgtgttgatgcaagatggaacacaagagggaggatga

SEQ ID NO: 26327 - DNA, 513 bp, Zea mays
  Peptide Sequence Number=SeqID_69702
atggctgttcttgcaacgatggtgtggagggccaccgaggcagtgggaaggggagcagcagcgggcgcgccgatggtcgggcttgcaccaatggccacgcctagggaggccgtgttgttagagctggagaagatgcagccacaggtggtgctgctctgtgggacagaagtagggctgacaatggctgtgctgagcttgttggggccaagtgggaggatggggagggcccacaatcgcacatggaggagaagctcgggttggcagcatggaagatggctggtggaggcgaggccgcgagcagctctatggtggggaagatgtaggagccttccctggccgcggccccctaaggcgcgtcatggtggccagggcccaagctcgagcgcccgccgccccccatcgaggtcatgcgccattgatagactaggagctgctgtagatatcgtgcagcggagagaagagggccaacagagggctcgcagactgaggagaggagccaaccccaaccgctag

SEQ ID NO: 26328 - DNA, 1086 bp, Zea mays
  Peptide Sequence Number=SeqID_69703
atgccgtgtcttctcgactgcagaaccagtgcagcgactcgaggcagccccgtgcgtgacccaacagtgccaattaagtgcgacgatcacgggctcgcatcctcccctgaagcagcaggagagcctcagagccctctcccacatcataaagacgacgcacccgtgttctgttcctcgaatgactcgcgcacgcgcaacagatgccccacgaatcgcccgtcacatcgcattaactccctgggatcgagaaaagggatatttcgaaaggatccttctcagcgaaggaaacgggccccgagccctcctaatgatcaggggttcgaaggttgcgccctgtggggtttggcaaccgccccagagcactcaggctctgagccctttactgatcaggggattgaaggctggcccctcggaagggttcgacaaccgcccagagcatgcagaggtagggatgaccctgggtacgtccgttacatggccgaggctcgggctatgctcccgagcaaatcacttgcaggtacttttggagcgcgcctctgggccactagccgacccttattgaacgaggctcagggacgcgatctcgtctcgcccgagcccggcctcgagcaagaaacagtagtcccagatggattcacgcctcgtccgaggacctcctcaggcaacgggtgcacccccggctcgcccgaggcaaaactcggtcacttcacccctttactgatcgttctgactggaaaacagcactattcaccccgttctgactactgtgccaaccaccagggtaagactaacaacagtaagccacaacctctcccgagttcagcctcgggcgcagtagggaactccgcctcgcccgaccctagggctcggcctcagcctcggcctcgaaggaggtctccgcctcgcccaacctcaggcctcggcctcaggggtaggtctccgtctcgcccgacctcagcctcggcctcgggaggagtcacatcctcgcccgacctcagccttggcctcaggagaagtctccgcctcgctcgacctcggcctcggaccgactacgccataggggatacatcattaccctacccctag

SEQ ID NO: 26329 - DNA, 327 bp, Zea mays
  Peptide Sequence Number=SeqID_69704
atgatgaccgtcagccttgtggtggggaagagcgagccgggtcgtggcctctcccttgcactcagcttcaaggatgttcatcatccatgctggggaggagggcgagccgagttggggccctgccttccgcatgggctggcgacccgcttcttcctccagcattcgggggaaaagggtgttcaccagccttatggaggaggcaaactgccacctgctgcccggtcggagtgtggctgtccgtccaccgcacgggcgacggtcacaccgtacgcagggttcgagacggctctaaacgagtccgtcaagaactgcaaggcgcttgcctag

SEQ ID NO: 26330 - DNA, 345 bp, Zea mays
  Peptide Sequence Number=SeqID_69705
atggacccagcggatgccatcgcagtgtgtctcaagacacgtacactactggagcggctggcaatggcgcgactcatgcatcatcgccacctcgagctccggcgccagtcgaggctcaatcatcaagacgtcgcatgccatattttcgtgtgcgcctcaagagttctctcgaagcgtcgccgccgccgtcaacgcattgttatgggctcctcggcttcgacaaatgaaagtgaggttgtctccatgccggtgcatctggagctggtagcgccagtcatcatcctctccgacgatgaagatggggagatcgattggacgacactgatggacgatgacgacgagtag

SEQ ID NO: 26331 - DNA, 403 bp, Zea mays
  Peptide Sequence Number=SeqID_69706
aaatgaaacggcaatcgccgaacacgaagcggtgacttttgacgcctttttgctcctcaaagttcgagtaaacgtcgatccagttctcgattttgatgtatttaaatggtcatcggccacatttccattcatcgcaactcagaaaaaactgtggcgcctagctttacccatgtcgacatcaccgagtgattcctctacttcttttgtctcccattcttctagccgtgaaccaaccccagagtgggatcctatagcggcatatgaaaaacaggcacctttgcactgggatgcagatggatgggactttgtagttgcatcggaatccgacgacgacctcaccgacggggacgacctccacttcctcgttgacggggagctggactccgacaccagcactgagtga

SEQ ID NO: 26332 - DNA, 171 bp, Zea mays
  Peptide Sequence Number=SeqID_69707
atggttctcgtgggaatcagtggcggcacatggcatcgcagtgaagggtgcatcaaggtgaaccaacttcgtgtggagcgcgtggccgtcggatcgaaaaccaaggagttggtctattttgcttctagcggagtggatagactctatgtaaatattgttaatttgggaaag

SEQ ID NO: 26333 - DNA, 918 bp, Zea mays
  Peptide Sequence Number=SeqID_69708
atggagagtcatgatctccgggcagaaaaggaatcacgacttgtgggtggtgatgagaatgtgggttttggcattgactctgatgatggtaagtggtattctttccgtttggaaaggatggctcgtcttagacacactgcatggaagtcagtcacccccttcttgctctctcgtctcgctgagcgtctgcttcgccgtctagtgactgaggcgccccctgcaccaccattgagcgccctagcccctagagtagctgctggaggagacccagacgacggaggtggcgacgatagctcgagcttcagcaccgacctttccgccgaccaggagccggaaggatgggttgctcgacccatcactcgtgacgttgctcacgggtgtcacttccacgatgcgctcgacaccctgctatgtcaggcactcgactgtcgtacttggtctatcgagtatcgctgtgtggtcttccagcacagtcgcggggtctacccggaccgctgggaggcgacctgcttggtgcgccgtccggagaacagtctccggggtgcggagatctgctcagagcactattccatctctgagcgggactcagctaaggcgaccatgcaagatgccgcacggcgtgcgctttcgcactactgctcaatgctcagcgggatagctgatggtctcaacctgaagttgagcagcacagtcaacctagccgtcgtgctaaacacggagttggaccatgcactagacgagctgagtagggctcgtgctgagattgcccaactgcgggctgagcgcgtggagcgtcgtcacctggatgatggctccctcgctcccgtcgggactcagcacccgtaccgctcacctcggcatggacaccagtcctatggcaaccccgactgcaggaccaagataaatttagaaccatag

SEQ ID NO: 26334 - DNA, 315 bp, Zea mays
  Peptide Sequence Number=SeqID_69709
atggagagtcatgatctccgagcagaaagggaatcacggcttgtgggtggtgatgagaatgttggttttggcattgactctgatgatggtaagtggtattctttccgtttggaaagggttgtcagcattgcaaccactgctcaggagaagatgaagccgtggaaggagacttccaggagttccaagattatgataagttctaggcgtgggttagcggcaacccccagttggctgcctgtgaaggccgcgtgtatctacgtttcttttccgcactttgattattgtaaagactatgtggatgtctcagacatatga

SEQ ID NO: 26335 - DNA, 1233 bp, Zea mays
  Peptide Sequence Number=SeqID_69710
atggcacgccgtcgtcttcaccatggcctccaactcgtgtgcctcgtcgccgtcgtgttgacggccgccccagctgcccatgcaatcttccatttcgacatccgtttcgacgcaggcagcccgttcttcggcggcggccactccaggcatgacatgtggcgccgcgccgccctcgagagcaacgccaggctgtccaggaggctcgccagggccctcggcaacaagcagagcggggccgccgccgacgccatcgtggagcccgacgtgaccctctcccagtacacccagcagggccactccctgaccgtgggcgtgggcacgccgccgcagcccagcaaggtgatcctcgaccttggcagcgacctcctctggacgcagtgcagtctggtgggccccacggcgaagcagctggagcccgttttcgacgccgccaggtcgtcctccttctccgtcctgccctgcagcagcaagccgtgccaggagggcacgttcaccaacaagacctgcaccgacagcaggtgcgcgtacgagaacgactacggcatcatgacgtccaccggcgtgctcgcgaccgagacgttcaccttcggggcccaccaaaacttctccgccaacctcaccttcggctgcggcaagctcaccaacggcaccatagccggggcgtcgggcatcatgggcgtctctccgggacccctgtccgtgctgaagcagctgtccatcaccaagttctcctactgcctcaccccattcacggaccacaagaccagcccggtgatgttcggcgccatggccgacctgggcaagtacaaaaccacggggaaggtgcagacgatcccgctgctgaagaacccggtggaggacatctactactacgtgcccatggtgggtatctccatcgggagcaagcggctcgacgtgccggaggccatcctcgcgctgaggcccgacggcaccggcggcacggtgctagactcggcgaccacgctggcatacctcgtggagccggctttcaaggagctgaagaaggccgtcatggaaggcatgaagctgccggcggcgaacaggagcatcgacgactaccctgtgtgcttcgagctgccgcgtggcatgtccatggaaggggtgcaggtgccgcctctcgtgctgcacttcgccggcgacgcggagatgtcgctcccgcgggacagctactttccaagagccgagccccgggatgatgtgcctggcgggtag

SEQ ID NO: 26336 - DNA, 1098 bp, Zea mays
  Peptide Sequence Number=SeqID_69711
atggggatgattcgtaagattaatctaatgggtgtgcctctgcaggtcgaggatcttctctttaacattgacatgaaaaagcaaagaaagagaggatgctttgcatgccgagagaagggacacttcagggacagctgtacaagtacagccaaacccaaaaaggggaggagcaaagtcaaggcgcttacatgtgtgaaaacttgggatgactcttcaagcgaagatgaacctccaaggacacacagccatcgatcctcatttcgctcatcaccgtcatcacgcaagtgcctcatggcaagaggtaaaatgagtattccatcctctagtgatgatagcagttgtgatgatggtgaagctaccgatgatagccttatcaaaaagaatgaaaaacttaaggctaagttagctagctctaaagaagccattgaaaacttgctgggaaaaatggaaattcttagcatacacaataatgagctaactactaagctagaaaacattggtagcacctcaggagtatctttaattaaaatacctgaaattattaagaaagatgcttatatttcttgctttgatttaattgatgattctaacccctgcaaccaagttcctattgagaatgttgttatagaaacatattcgaatgaggttgcaaaggagaatgagcaattaaggcaagaagtggctcgccttggcaaggctttctatgacaagaaaggcaaagctaaacaaatccaaccttctcaggataacaacattacgggagtgaacaagcttgtggagggagaaatcgtgatttgtaggctatgtgacaaggaaggccataagtcttaccaatgcaaggcgatgaccggggataagcaaaaacaaaagctcaagcaaaagcctacaaacaaaatctccaacaccgacaccaacaaggtggataaaaaggttgctacaccatatttgatcaagaagaaaaagaatggaaaggtgataacaatcaataccaacaagcaagctaacaaaggaaacgaggccaagcgcatctgggtgccaaaggagattatctcaaccatgaaaagcaccaagaaggtttggaccctaagaggtaagtga

SEQ ID NO: 26337 - DNA, 423 bp, Zea mays
  Peptide Sequence Number=SeqID_69712
atggaaaatggcacaggggcagcgcgagcagaagagcagggggagctcgcccttgaaacaagggaaggagagcagaggttgcgtggttcggcgaggccgcagccatggataaaactggagcagggagggaacggcgtccatgggaggagttggggtcgaccatgggagaggctggaaacggccatgggagggagctggggactgccggcgtccaaggtcaggggcagaagccgagggagtagggagcgttggagcgcagcgaggtctgagcatcggcgagggaacgacggccacggaggaagagaaaggaacggggcggcggcgtcggcgatgcgcgccgccgagcgccgggatggggtcgcggcgtcagcgaccgtcggaaccacacgagcagcaggcggcggcggctgcgtactggattga

SEQ ID NO: 26338 - DNA, 108 bp, Zea mays
  Peptide Sequence Number=SeqID_69713
atggcgacgggacggctcgggcaggcgggggtgaagggatggctcgggcacagtgagcgggggcgcatggcgccaaccgagctggttaagtttacttccataagttaa

SEQ ID NO: 26339 - DNA, 456 bp, Zea mays
  Peptide Sequence Number=SeqID_69714
atggctggtggctccatcaaaatgccaataatggcatcggtttccgtggatgaggagaggaaatcagggagggagaggaaggggaagggattcggtcgttcctggcgcgtcagggaggtgagaaggcgcgaccggttcggccaggggcgtggggtcgggcgtggccgggcacgaacgccggagcggtggcggcgcggcggtgcgagcacggggaaggagaagggggccagaaaaccactatatgataattacaagtttgttcttcgagcagacgagttgtggagagatacttctattactatactaaaatggttacaatatcatgacattgcaaaagaactaagtatatatcaaataagagaacatgttgaggaaatggaaaagatggtcaacgatcataaggtaacaatggtttccatatttgttggggacttgttctcaaatgctatgaattaa

SEQ ID NO: 26340 - DNA, 321 bp, Zea mays
  Peptide Sequence Number=SeqID_69715
atggggagcgcccgcgttgctttcgtcttgctgctgttggaggtggctttcgtcgtcggtgctagggtggtggcagccggagaaggcttccccgccgacgataccatcagcgccacccgcggaccgacctccggctctttggctttgatagcttgtcctcgcccctcgagtggggacgcgggcgagggccttgtcgcagcagcgtctgccctaaggtcatcgttgctgctgtttggccgcccggagtggaggtcattgtcgctgctgacggagcgggcggcggcaagccaactggagtttgtcgtcccgcaggccctctga

SEQ ID NO: 26341 - DNA, 1185 bp, Zea mays
  Peptide Sequence Number=SeqID_69716
atgccatcatccgaggagaccttgagtgacttggcggtggttgagttgcagcctggccacaccgtggagttttgtacctcaaggattttctcgggccgcatcctggagatgcagcggcttggttactttggtaacggtgtcgggcaggccccaggtgcagaagagaagaggaagataggggataagatagcccaatttggatcgtgcaccttcacaccgaggactgagaagacttcggctgaggttgtggagatagtcccctgtgctatgaacaagtgggtcgaggacaaggccgtgaaaattgtagggaagtatgtgccaaagacgaaaacattaaggagttgggacattcgcggttcaaacgcgatgtcaacgaccgacgagagcccctcacgggacaaggctccgggtgcagccgccaagaaaaggaaattaggtacagcagctgaggggttgagggcttccgatcattttgttgtggatttgttggagacatgcgcgactcccagggagacgatgtcttctctcgagctccgggaatcttctgcgcgaatgctgaaggttaccgggggtcgctggcctaggaatgttctgataccccgggtggccaccgaggacatatttacgtctcgattagctcgtgacatgaagattttcccttacggaaggaatgttggtgttgttgtatcagcagtggagaaggatcgccaagatgcgtcgcggaagcgccgggcgtacaccaggttggtggacccgaggcgcgaggcgaaggtggcacggcctagtgcaaatcctgccgccccgggcgccagcatgcctctgcccgccatgcctactagtgagcgaaggcctccctcgccactacgcgctgctgagacagcggtggtgggcgtcgaagtctccatggagctctccgtggacgactacctggtgggcggggtcgctatgttcgacacccatacggggctggcttctgctgccggcccagtggccgcggtgaccgtggcgaagagtgacgtggggcccccggaggacccgtggtccaagttctgtgccagcaaggcggtcagggacaaatcggcgatggagaacaagagctgcaacctacttgagaagctgacggcggcggaggcggagaaagaggacctcagccatcggcttgcggaggagagggagggcacataa

SEQ ID NO: 26342 - DNA, 528 bp, Zea mays
  Peptide Sequence Number=SeqID_69717
atgtcgctttccaccctccttgtggaaaggcgacgaaggggcgaaaacagcgccgcctgccctactccgactgctgtgctacccgccagggtgaggctgacagcagccgagtccagccttaggcgccataggaagctccgcctcgcccgaccccggggctcggcccccgccttgacctcggaagacggtcttcgcctcgcccgaccccagggctcggactcaacctcaacctcggaagacggtctcccgcctcgcccaaccccagggctcggattcaacctcgacctcagaagacggtctccgcctcgcccgaccccagggctcggactcaacctcgaccttggaagacggtctccgcctcgcccgaccccagggctcggactcaacctcgaccttggaagacggtctccgcctcgcccgaccccagggctcggcctcaacctcgacctcggaggagtcaccgcctcgcctgaccttgggctcggaccgaccacgttacaggggggtacatcattaccctacccctag

SEQ ID NO: 26343 - DNA, 555 bp, Zea mays
  Peptide Sequence Number=SeqID_69718
atgtctggcgaggaggtgggccttcgctttctcgggtggctgcaggaggagctagagtcgctcccgtctatcccgacgggcctcatgtcctacgcttcgctcattacctacgagggggcggcgaatgccttgtcctgtgaggggtgtagacatttcgatgtcttcgatcgggtcggagacgaggtgctaaagcgatctgctggggcgctttacgacaggatgtggggctctcacggtcgtgacactgtccgggagagggctgaccgagcattggcgcaggttccaacgtccgggcctgcgcaagcaacccccgctgatgttgatactagtattttggcggctgcgaatgcaacgccctttaatggaaatgtgtctgagggttctgaaactgagtcatggtcctcggacagggattattttgggagcccgctttcgtggatggaggagtcttttgaggaagatttagactactttgttgtgttggatttggctgcatcagagtccccgtcgcaatctgatgcgcgcgaagagactgttccccggccaggacaatag

SEQ ID NO: 26344 - DNA, 72 bp, Zea mays
  Peptide Sequence Number=SeqID_69719
atggcgctcgtccctagcctgtctgtagggcagcccctgcgtgtgcgcgtgtgtaaatgcgtcacctattag

SEQ ID NO: 26345 - DNA, 1053 bp, Zea mays
  Peptide Sequence Number=SeqID_69720
atgcaggcggcatgcaaccgcaccaagggggcacaccctttggacttcgacgcgttcagcatggaggcccaggcccacacgtcatgcgggcagaagcagcagtcaagtcgtcagcaagctcacgccccctcctgggacagcgagagaaccctctcccacggcgtaaagatgacgcgcccgagttccgttcctcgaacggctcgcgcacgcacaacggctgccccgcgaaccactcgtcctatcgcattaactctgcggcaggacaggcggcacctttggcaggcgaagcaggcgacacttcacctccgccatgatgaccgcgtcaaaaaaggtgcgccacgtcattcgatttcgtatccttttccacttcctctttctctctcttgccacagggaccgggaaaggggatactccgaaagggatcattctgcacgaaggaagcgggccccgagccccctactgatcagaggttcgaaggctggcccctcggaagggttcaacagccgcctcaaagcactcgggcttcgcgcccactactggtcagaggttcgaaggccaggaccttggaagggttcaacggccgcctcaggccactcggtctccacgcccactactgatcaggggttcgtaggctggcccccgaagggttctgacagccgcctcagagcacgcagagcgagggatgaccctgggtatgttcgatacataaccaaggctcgggctacgctcccgagcctcggctccggaagacgacgaactccgcttcgcccgaccccagggctcggactcggcctcggctccggagacgacgaactccgcttcgcccgaccccagggctcggactcagcctcgactccggaagacgacgaactccgcctcgcccgacccccgggctcggactcagcctcggctccggaagacgacgactccactcgcccgaccccaaggctcgagatcaacctcgaactcgagaggagcaatccacctcgcccgaccagggctcgaaccgaccacgtcacaggagagggccatcattaccctacccctagctag

SEQ ID NO: 26346 - DNA, 390 bp, Zea mays
  Peptide Sequence Number=SeqID_69721
atggctttccttccatcttgtgggaagtgcttaactccgccggttaccctatgccccctttgtacacggtgcagttgtatgaggagcatcgggacggacgacaccactgaagcggcagccatgaagactctgacgacgttctgtggctaccatcccctggagatggtgatgtaccccttgggactcttccctgctgagaagaaggatgaccccatgtggtgtaaccatgtgagccatgtgaaggacgtgtgggcaatgtatcctgacttggttgggagggtcactgttcagtgcatgagtgtgctgtaccgccttcaggcccttcagagcgatgctatggcacatcttgctaacatcgctcaaactaccaagctcaccctggatagctga

SEQ ID NO: 26347 - DNA, 669 bp, Zea mays
  Peptide Sequence Number=SeqID_69722
atgatgaccgcgtcaaaaaaggccccaagccctcctactgatcaggggttcgaaggctggccccttagaagggtttcgacagccgccccaaagcactcgggcttcaagctcattactgatcaggggttcgaaggctggcccctcgaaagggttcgacagccgccccagagcattcgggctccgcgcccactactgatcaggggttcgaaggctggcccctcggaagggttcgacaaccgccccagagcacgcagagcgagggatgactctgggtacgtccgttacatggccgaggctagggctacactcccaaggaaaaacagcgtcgcctgccccgctctgattgctgtgccacccgccagggtgaggctaacgacagctaagttcagcctcaggcgcaaccggaagctccgcctcgcccgaccttgggcctcggcttcaggaggaggtctccgcctcacccgaccccagggctcggcccccgcctcagcctcaggaggagttctccgcctcgcccgaccccaggttcagcctcaacctcgacctcagaaggaatcacgtcctcacccgaccctggcctcggcctcgagaggagtctctgcctcgcccgaccttgagctcggaccgaccgcgtcgcgggggatacatcattaccctacccctagctag

SEQ ID NO: 26348 - DNA, 1264 bp, Zea mays
  Peptide Sequence Number=SeqID_69723
atgacgcttgatgccatagtctcgggggttggcagcggggcctcccctgcttgccgcttaatggttgttgtgggttggccgaaactttatttctcctcttcgttccccaagcaacgatggggcatcgtgtccgcattgacagatttgtcggggctggcgaggcaaagtgcccccgtggcgatggcgaagaagtcgagggcaccgaaattgatgcggctcctacgagcgaacgctgatgaacagaccatcggaatgaaggatgtcgcttggcacgctaacgatcccctacctagcgttccaattgtcgtggtttctggatccagtggacaagatttgtgtttggcagtcgcatcgcaccctatcctccccagtccccaccagtccaccaccctctccccgcctcccgctgcgaccaccgcaccggcgaacttggagggccgctcggcgctgcacaccaagccggggatggccgccgcgcttgcgagctcgccgcttgttcacctaactacctcccgcctccgcctccccaggccccaggcctccgcttctagttcgggtccagtctgctcgatcggcgtgtgcttgggatggaggctgaaggtcgggtggagggccctgaggcggcgcgaccggcttcgatgcttctccaccgacgggggcggcggggaggagggggaaaagcgtggcgaggaggagacatcggcaacggcggcggcatccccggcctcggttccagcggagacacaggtgggcgctggggaggagctggcgtccgagcggagtcggtcagggagcttttcttcctcatcctcgtcgtccgggactcctggtgtatcaagcgagccaccgctgttgagttttagtgttgataatatcgatacagttaaactgttggaacttctaggcccagaaaaggttgatccagttgatgtcaaggcaattaaggaaaaactctttggttatacgacattctggttgacaaaagaagaaccttttggtgatcttggtgaaggagttcttttcattgggaacctccgtgggaagagagaggaaatctttgcaaaacttcaacggcaatatgtcatttctctgttacttttccttctcactatgttctcctgcattgagctaggaattgcatcaaagattagcagtcttccaccagaaattgtttcatatttcactgatccaaatgctaccggaccccctcctgacatgcaacttctgctcccatttgtggagtcggctttgccagtggcttacg

SEQ ID NO: 26349 - DNA, 1470 bp, Zea mays
  Peptide Sequence Number=SeqID_69724
atggccgggaaggcaacggcttcggcagcagccgacgccagcgccggcggcatgtctggtgggcccgaggccacggccgagccagccgcctccccagtgcgacagccgcctcgacagaagagccggtctcgggaactcgctccatggcaactggagccgcctgagcccctcgttgtggggcatcttgcgagaaggcagctcggcctgactccccggggtcacctcaactccccagccgaggggtcaagtaccccctcggtctgcccccgctcttcggaccggaaccccggcgtcccggccccggaaaccgacggcgccagcccgctcgggggctggcttgacgactcctggcctagcctcaagcctgggctgaggccaaggcgagtggccatatcgtcatcttcgtcatcgtcttcatcgtcgtcgtcgtcgtcaggcgtttccggtgacggctccctcggaagtccatcccactcctgccggcgacggagcttttccaaggcgtctcgggcccgcgtccgctcgcgggcccgagccttctccgcgtcctttttctccttcctcttctctgcggcaacccgccacgcagctcggtccaccgcgtcctccgggaccggtggccgggaaggcttgtgccaccctacctcctggagacagacgaaaagtctcggccgtgaggaccaagggcaatccgacgcaaggagaaagaaggagcggacactcactaggcacacacacccgcggtcgggacgcatcaagggctgggaaagggcgccggcgtccgggttttcccaacgcgacggctacccgcccgtggaggtcatcgacggggaggggatccgaggacatccgcgaaccctccaagtcggcctctgccgtcatctcccaaagcggcaaccgccgcttcgccaagggaagcaccctccggcgatggatggcggcaatcacccccgcagcggtgagccctcctttccgcaacacctccagggccttcaaaaggggctggagattcttctgtctgtcgtgcggggtcccgtagcgccaagcatcggcggcgacggtcaccactcgctgagtaaacgacgggagcctcccgtcgtcatttcagaggacaggcggcatcgttggcaggagaagcgggcgacgcttcgccttcgccataatgaccgcgtcaaaaaagggaccgggaaagggagataccccaaaagggttccttctccgcgaaggaaacgggccccgagccctttactgatcagaggttcaaaggctggcccctcggaggggttcaacagccgcctcagagcgctcgggctccgcgcccactactggtcagaggttcaaaggccggcccctcggaagggttcaacggccgcctcaggccactcgggctccgcacccactactgatcaggggttcgtaggctggccctcgaagggttcacagccgcctcagacacagagcgagggatga

SEQ ID NO: 26350 - DNA, 393 bp, Zea mays
  Peptide Sequence Number=SeqID_69725
atgtggggaaactggtatgattactggttctatgtggcgggaggctcggtcgaagacctcccaggactcccggcggccgtgatgtgctcccactgctacgtggcgtttccgccgtttgaggtggcagagggtgatagtgacgaagaggcccttcatggtgctgcccgcatgagtagcaggagtgatttagttgagggattcatcgggtatggagtatggcccttggcgcacggctgggcgttgggcaaaggtcggatggggggcaactggctgttgtcccgcctccggtggggccactttgccaacggcggtggttggggcgaagggtgccacgcgggactcatgggccaccttatgcgtgagcggcgagattctgtcggccgctggcgctaa

SEQ ID NO: 26351 - DNA, 687 bp, Zea mays
  Peptide Sequence Number=SeqID_69726
atggtgaagctgacaatgatagctcgtgtcactgatggccttccactggcagaagggttggatgatgggcgagatctgaaggattctgatttctataagcagcaagctaaacttcttttcaagaacttgtcaaaagggcatcatgaagcttcacggatgtcaattgagacagggccctactatttccagtatccttgtgccgtttatgttccttatgtctacattattgagggcagagtatgttatctgactatgtgtgaccgctcttatccgaagaaacttgcattccagtacctagaagatctgaaaaatgaatttgagagggtcaatggcaaccaaattgaaactgctgcaaggccatatgcttttatcaagtttgatacattcatccagaagactaggaaactgtatttggatacaagaactcaaagaaacctcgcaaaactgaatgatgaactctatgaggtgcatcaaattatgactcgcaatgttcaagaagttcttggtgttggtgaaaagctagaccaggtcagtgaaatgtcaagcaggttgacttctgatacaagaatatacgcagataaggctaaggacctcaaccggcaggcgttgattcggaagtatgctcctgtcgccattgtcattggggtagtattgatgctgttttggctcaagaacaagatatggtga

SEQ ID NO: 26352 - DNA, 918 bp, Zea mays
  Peptide Sequence Number=SeqID_69727
atggctcgtcttagacacactgcacgtaagtcggtgattcctttcctgccgtctcgactggcggagcgtcctctgcaccgcaccgtgtccggacagtcgagtcacctggagaggctgcaccaccgcctgcgtgaggagcaggaacgccggcgccagcacggagagcagcagggctcttcctcctcaccccagcaggaggtggagaccgtgaggccccgttcctctgttgcccagctggaggcgccccttgttccaccgcgggacgtcccggctgttggaggagctgttggaggagaccccgacgacgacgactcagaccatagcacggagtcctctgagccgcaggaggcggaaggatgggtcgcccgacccatcacccgtgacgccgctcgcggttgtcacttccacgacgcactcgacaccttgctacgccaggctttcgaccggcacacctggtcgatcgagtatcgttgtgtggccgtttcggagcactattccatctccgagagggacactgcagaggcggctatgcaggatgcagcacgacgtgcactctctcagtactgttctttgttcggtggcgtggccgacggtcttaaccttcggtactacccccgccgccctactggcagcacagagagtgtggttgtttcacctgttggtgaggctaaccctaggttgagcagcatagtcaacctagtcgcagtgcttaacacggagctggatcactctctggacgagctaagcagggctcgaacggagattgcggagttgcgtgctgagctggcagagcgccatcaccaggagggtggttctcccgcgcctgttgggactcagcacccataccgctcaccgccacgtggtcaccacacttatggttctcctgtctgtaagaccaggatagatctggatccttag

SEQ ID NO: 26353 - DNA, 807 bp, Zea mays
  Peptide Sequence Number=SeqID_69728
cgcgtagcgctgcccagcgcgcactgcccacgggcccacgtgtcaggtgcgtcgtcttcaacgccacactccttcggcacactcgcgcgcccgcagaacctcctcccctctccatcctttccccacgacgccctgttcatctgcttcccccccgccccccgacgcggcgaccaaccctggcggccagcctacgcggtgcgagcggcagccagccccggccgaacctccccggccacgcgcgcgtgggcatggcgcgcggtgcggcaagcagcccggcaccccagctcggcacggtcgtgtagccccggcggcgtgtggacgcggcccccggtgcccggccagcccgctcgcgcgtggcagctcgcggccgcccagcgtggcgcgctcgcggcgcccgcggtgcgcagccagcccgcccggcgtggcgcgccccccacctcctctcggcgcgcggtgggcggccagcccacccgcggcgcgctcgcggcggcctgcgtggcagcctgcccggcgcggcaactcgcggccccggagcgcagctcggcgcgaccgtccatggccctgcgtgccctcgtgcggtgcctttgccccgacatgctcccagcgggccctggccggcatccagccgtcgtgaggaactggggtgtagttcgcttcgccgtcgtgccgttaatgggggtcggtgtatgcggctcgctctgccaaggtggtgacaaggatgatgtttatgactatggtaatggtaaagaagaaggtgtcgaggtggatctccaggagttccaggacttcgacgagttcgaggattag

SEQ ID NO: 26354 - DNA, 984 bp, Zea mays
  Peptide Sequence Number=SeqID_69729
atggcaaacacaatgcgagcaactcaaatagcacgaaaaatactcacaacacaaccttctatttatatactcagaaccccacagtttggtgggtcccgcagtatgacatggattattgcaggaggcttcagctttggaatgaaggtcttctctcgtgacaagggtaaaaatatggtgcacactctccagactactcgtgtgaacatcacccgtgtccctccacctcagcaggctccttcctacccagttgtggcagaagaagtccctatggagttgcaccaccttgctgtaaagaatggtgtgatcttggaggatagttctgaggagattctggcaacacctactccgtcctcagaacatcatgcctttgctgctggagcttcttcttcagcactacctgtgctagtagctcaagcccctactctggaggtgaggaccctaatgattctggcaatgatggaggtgatgacgaggatggagaaaacaacgacaataatgatgatgccaacaacgagcatgatcaagaagatggcttttgttggaatgtggcctatcgtggagcattacacctcaatgttcgagatgggacacttctcaaacttgcttcaggatgtgctacacgcactggaaacctacgttcgacctctttatgacaccagacgggtatctgagcccccttgggcttgttactatatcactcatgtgcatatcagaatgttggatgtaggagatagaggtttcaggactctatcatctcacgagtctctgacgccgttgtccacctatgctgctttggtcagcattgttgctcggagagctttgtggtccttcagccatatctatcggttgcagctgcacgacatggtgtacatgcaccttcctctatgtcctcatgatgagaaccagaccagcgtgcttccaagagaagctaaagaagatcgcctcaacacccttgtaggtgtggtggcaggcctagtgaaataa

SEQ ID NO: 26355 - DNA, 384 bp, Zea mays
  Peptide Sequence Number=SeqID_69730
atggcccaagggcacatttccctttcagccgaggctgagtccgagccctggggtcggacgaagcggagtccgtcgtccagcgtcgaggttgagcccgagccctgggtggagcggcaaagtgactgcggtcacttcggctctgtcgactggagagcgcgcgtcaggataaggtgtcaggcgatccttgcattaaatgctcctgcgatacggtcggttggcgtggcgatctggccaaggttgcttctctgcgaagactgggcctcgggcgagccgaagctttgtgctgatgggggttaccagctgagattaggagtcttgggggtacccctaattatggtccccgacagcagtgtatcgcagtacataaatacctacaccaagtag

SEQ ID NO: 26356 - DNA, 1347 bp, Zea mays
  Peptide Sequence Number=SeqID_69731
atgaagaacgtagatcgacctccttctaatccaaaacagattataatccagtctactcaagagtgcttcagcgttgacataccccgtgttccggcggagactgttagacccgaaacaaggcgagctgctgatgaggatgatgactttatgccattatccaagaagcgtaacttggacgacagtcctgggaaagtcttgaagaagcagaggcttaacatgagatgcaacccccaagatgtattagtaagcatccagatattaaatgacagacagcgccaagcaattgcacggaggggattttccagtattcttgatatgagactggacgcactcggcagcagatcacatttagcttggctgatggaaaagctcgaccacaatgacatgacaattcgagccggcccagggaaggagctgaaaattacaaaggatacggtgcacctaattttggggttaccaaatgctggtggaggaactgcattgggcatcgatgaagctgttgctgccaacaatttaagagctgaacttggtttatcgaaagaagattttggggttgcagctcttcaagatcgtctgaggaaagggtctgacgatgatttaagcatcagatcctttttcttgatattgtttaataggttgttgttccctactgccagctggggaataaccaaccatgaggttcttttaaccgaggagatggattgtttccaccagatggactggtgccagcttattttcaatgatttatgccaagctaccaagaagtggcatactaggagcgttacgaacgtttctacaaccatttacggatgttccatcgtcattcttctgtattatttggatcatcttcatgactcagcggcaccccagaacaaacgtggaacaccacgaatcaaatattttgataggaatattattcaagccctgacaagagctgacaagggcaagatacgcaaaggagaagaagcatttggacattgttcgcataagaccaggaaaaatacttttgatgtacctcgtcctgacccatctggaaagcactcaattcacatcgaactcccgctcatcagggatttgatatcaagcaagctgaatcagcttccatcccgccaccgcctgggtttcatagagaagttgtcacattttgatacggaggttggtaaggcgtgttcagttattaaacagactcttcagcagattgttgagaaacaatacaatctatctgatgtttttggcgagttaattgatgaggtcctccgtgctgagtcgggggacaatgaagatggttatgatgtacagaaaacaacttcaaaatcagatgatattcttccccagacagcatgttag

SEQ ID NO: 26357 - DNA, 342 bp, Zea mays
  Peptide Sequence Number=SeqID_69732
atggctaggtcaagctgcgaggagcacaacggaaaggagcgaactgggggtaggaggaggggcagcgacgagggaaggaaggggaggggcgacgactgtgcgacccttcgagtgaggaagatggcacgacagtccctctttggtgcggcgcagcggcgagcatcgcgtggcgaggtaggctatgatatgtttctgacacattttttgctaatggcttctaggaaacgacacaagattggtgaggtgatcgccaaatcttgcctggagaaagggatctccaaagttgtcctagatcgaggcagattcctctaccatggcataaatgatagaactcggtgctag

SEQ ID NO: 26358 - DNA, 621 bp, Zea mays
  Peptide Sequence Number=SeqID_69733
atgcacgacgatgtggagaccctctatgttgcggagaaacttgatcgcatactagcgcagctgcaaaccataaacaataggctggattcccacgacgctcgcctggccaagctccagcaggcatgggttggctcctctgctgctaccacaggcggcttgggcgcaggcagcgtgggcatgagtggtgaaggtggcctgggtgctggcagaggcggccacatgggcagcggcgccgttgctttggaggaggcaaacgagccccgcgagggagtactcaaggcaccggaggtcggcaaattcgccctcgccggcgtgaccgggaggctgaggggcaccgccgcagggccctcgcgggtggagcggcccctccgtgacgcgtggcttccacagtcgcgggattgttcggccatcaaggctaagtcgaaggcggcgccgaggaagttagcgaggtcgatgaggaggcagaacgtagagaagggcgacgaggagggcagcaccccgcacggcgcgaggaggcgaaaaaagaccctcagggagctcgacattgaggtgggtgggcgagccatccggtggcggccggtcctcccccgcctggcggtctgctcgtggtggccaagctag

SEQ ID NO: 26359 - DNA, 2556 bp, Zea mays
  Peptide Sequence Number=SeqID_69734
atgaatcagcttgattcgtttgtcgttgaacaaaggaaccagatcaataagaagagaagaaaaacgcgtcaacgaaagaagggacaaaatgtccaggcaaatgacattgtcacaacgatagaccttctgacaccaggtagtgtgcatgaaactgttagtggcagtggggaaacacatctaggcgtggtggagtctatgcatgaacaccataggttatgtaatcagacaccaaggcgaaaagaggggaagttagattacataaggaaacatagagcactacaagctcacactttgaatccggtgtctctcgccatagaggacccaacatatacctctgtggttgtacacccaacagcttatgcaacagaacatgatactatcggtgacgctggggaaggggacgattggacacaaccccatacaactgcagagatcaccgacattggtgatgatgatgatgagggtatcatattcgaagaggatgatgatgagaatgagggatacttattcactggccaatgtaactatgaacaagtccccaacaacatcaatatccatggtactcaagatgaatctactgccactgatgtgcctgatccgtacgataatgtgtacaataacatccctgaagaaacacatatgctgaagcctgttcccaactgtggttattgcactgcaaagaaatttgagtatgagtcacctggtttttgttgtcgtggtgggaaggttgagctagcaccactggagacccctccgcagctcaaaaggttatgggatagtacagactctgttgctaggcactttcgtgataacattaggttttttaatggccatttctctttcacttccttgtattgttgcctcgataatatgactactaatgtgagggattctggtatatacacgttctgggctcaaggcatgatgtaccacaatatcaagtcatttggtagggaaggtggggcggagcataaacacctagagctttacttttacgatgatgatcccagtcttgagcatcggtaccgtaagtgtcgtgcagatcagcttcagagagacaaagaggttattagacagatagttggcatacttcgtggaaacccgtactccgagcacctaaggagcatgggccatgttgagaatcttgacgactattatattgcattgaaccttgaccagacgttgaaccaaaagacgtataatgcgcctctcacttcagaggtggccgctgtctggatcgaggggagcgaacgacgaggccggttcagtaagagtgttatgttacatgggaaggataggtcaaaccacgggatccgatcataccatggatgctatgatgcactatcatatccattgttcttccctaaaggtgagcttggatggcatgcaaatattccaaaggttggtgtatctatggacgaagtggatgcataccgtgcgatacatagggcaagtaatgcaaatgatgaagatgtggatgagctatctgatagttttacccaggatgacatgtcacactttagaaaaaaattggctgctatattactatcttcatacatgaacaaaagaaggggatatccgatatacaaatatgataaagaagttcatactggaagcccctctgatgttgagatattagatagcccaacaaatcataagaagaggaaactactccatgtgcttgataatagcgaggtattgatggaagatgaggatggccccattactcaagcagacttacaaaggtggtttgttgatgaatgggataaaagaactcctacaaaagtctcggcggatgggtgcacagacgactttttaatgagtggtctctccacaaaagacatgccagtgactaaagacgatttaatagatgtgctatgtgattacattatggcaatccaagacgataggacattagagatgatatgggtgcgaagtttcaatccttttaagatagaaatatctgtcaaagacctacagaacatattaagtataaatctagatatgactctaaaatgttttgatatggctgttcgattgcttgccaataaagagtcacgtaggccgaaaggtgaaatcataaagaatagaaagcattatatggacatgcgcttctggagaatgattggttttggtaaactgccaaagtaccatcaggaccctacagcagaagagttaacaaaaacactcgattgttggccatcaatgaactattatatcacggcttgtaaatatgttcttatgccatggaaattcaacggttgctacgcccttttcgtaatagatcatggtaaaaaacacgtcacttttattgactttgcacatattcaagattggtgtaagcatatgccatacaagaggcttaacaccagctaccttatcctacaagctatggccatgtgggggaatgatagtccaatggaatttgttagggatgcaaaggttcttcggaggaactttattattgaactgttaagttacgaggaaaattcgtgcagatatgccatcccggcaaatatacaacagagagttaacaatattattaaaaaagattag

SEQ ID NO: 26360 - DNA, 1005 bp, Zea mays
  Peptide Sequence Number=SeqID_69735
atgaccatttcctcacgaaaaaagaggaaggtttcagagccagttcagaacactgacacctgtaatctccggtctagtctacttcttgcggcattgggaatcccggcgccagtgtttccatcccgcagcgctgaattccaagagatctcgtctgcccctcgtcctcctctcttcgggccatcacggcggcggcagcggcggctcggctcgtttgcgtcttcccgtgctgcttctctagtgtacgaccagttcgatctattgtctgcagcggtctccatcttgaggtgtctgtgtccagtgtccaccgaaggtgctggagggtttggactctctgccttcttgttagcttctgttggtattgtacagtccctagagaaggctagttttcaaaagacgagttcagttactagtgtatcaggagccataccagtttgtctagacacttccagtggaatgaatggcaatatggcgatgttgaacactacaacttcaacgattgtatccactggttcaccaaacatgagtgctgagttttcttgccagaacctcaagtatactgcaccgttggctgtggagtggtcctatccggagctgcaattgttgaatgatggcctcaacaagtatgcaaatgaaccaggaatcatgaagtacataaagatagcagccacgttaccagacaagacagtaagagatgttgccatgagatgccaatggatggcagcgagaaaagaagctacaagacgacggaaacctgaagaacattatcttggaaaaaagataaaagatagaaaggataaaatggctgagccgtcatcatggggtaccaatcctcctgttcagactgagatgagatgttcctcttctatgcctgctaacgccaaacacaatgggtttctctctgcagactctcaaattgatcatggaatgctaaatatattggaagaaaatgctaagctactcaatcaaatagaagtaaatattttaacatcacaggtcaagttttaa

SEQ ID NO: 26361 - DNA, 891 bp, Zea mays
  Peptide Sequence Number=SeqID_69736
atgacgacaagaaatgaggatctaacttggcaaatgagggcaatacgagtgctacctatgttcattcttcctgctgtatcctctgtcatatattcaacagttgttaacttcacaaggatgtttgagcagaaagaccagaagacccttgaaaaattgagggctgagaggaaagctaagattgatgagcttaaagagagaacaaattattattctaacacagcagcttattcagccgcaaaggctgcagcagcttctgttttggcatctaagcttggggaggagactggcttaaaagttcatgttggagaagaaccaaagctggatgctgcagtggccagaagcaatgatgttgagatagtaccttcagatggtttgagaaacaggaagcaacccagtgcaagaggaagcaggactgggagccccacttctcataccccagcacagggaactgaaactaatctacctcctgctcctgctagtgctggcctggaaactgcaccagctccagtggtggtagagcatcatcaaggttcaggggctagtgatggtggtggatggattgcaaagattgctgccttacttgtgggggaggacccatcacagtcgtatgctttgatatgtggcagctgccatatgcataacggcttggcccgaaaggaagattacccacatgttacttactactgcccgcattgtcatgcattaaacacatcaaaacagtccatggggcaatactcaggctccaactcaggccggtcgacccctgttgttctggctgatggattatctacttccagttcagtacaagagactgaattgagtaacctgacgacattgcaggagctacccgaggaaggaaagacagacaagcaacaagtggaggcaagttga

SEQ ID NO: 26362 - DNA, 273 bp, Zea mays
  Peptide Sequence Number=SeqID_69737
atggaggagctggagcacaagaaaaatgaactaaaagaatcccaggatgaggtcttagaggatgattgtgagatcatgaaagtgtggtgcaataaggcgatagacaaggcagtcctggttggccatattttgatgaagagacccaacatcgtggttcctgatgatatcgctgccgatgttcttgcttcatcaggtacttcaaccaaggatccgacttctggcattcccgtgaatgttgttcccctcaaaatgctcgtgcatgacatactttaa

SEQ ID NO: 26363 - DNA, 759 bp, Zea mays
  Peptide Sequence Number=SeqID_69738
atgtcggttgttgatggtgtgctcgaggacaccatttctgaggacttatgcttgaatatattgagtagagttatcgacgtccgtatagattgcccggatgaagtatcttccgctagtttgttggtcgggctagaggtaagcctgtcagtctgccatggtgcttcaggttctgagggtccaccagcccccgaggatgctctagcccctgagggtactctaggccccgagggtgctccagcccctcagggttcttcgtttggctttctttctattgtttcaatggatatccatgttggttcgtcgatgccctggactggtgatgttgtagtaacaaattctattgtgcccattggtccacccaacccaaccaccttggaggttagtggttctggcgctaaaatcccaatgagtgtttatggcatagaattcccaatgggtgtatctggtgttgaaattccaatgggtgtcatgcttagtctgggggatccggatccttcaacgcttgtccctgctgaaactgtggcttctactaatgtcattgcctctgggagcgcctcagcgattccagctttgggctttccgttcttcttgtcaaatttacagaagcaaatagatgacctaaagtctgctaatgctgctttgactcaacggtgctctgatactaaggagaggtgcgcccgaaaccaagcgaagcttgatcaagtaaccaggttccttgatggtgcccatgccatgaactcctccctgcagtcgaagtag

SEQ ID NO: 26364 - DNA, 216 bp, Zea mays
  Peptide Sequence Number=SeqID_69739
atgaagaaggttgatgctttgccgaaggttgtggaagaccttcaaaagacgaaggcccccaacacagccgctgtcgcccccaccacgaggagaacctgtcgagcaagatcaaccatagcagcagggtggggtggtggagccttcctgtgcattgatagggaggttaatgtcatcttcgggggccatgggtcacatgagaacaaaggacatcagtag

SEQ ID NO: 26365 - DNA, 408 bp, Zea mays
  Peptide Sequence Number=SeqID_69740
atggcctctacccaggcggaagcggaggcgggggcaccggccccgcccgaggcggcggaggcgaaggagaagggcaagcagggcggggtgctggggagggtgtggcgggcgctcttcggtggccgcgaggacttcgagaagcggctgcagtacctgtccaaggaggaggcagccgtgcacgcgcggatgcgccggcggacgcagttctcgcgccgcgccgtgcggaacctcatcgtactctccgtcctcgccgaggtctccacgtgttttccttctttcgcccctcttgttttctgttcccacccaatgtttggagatgatttggtgatgcgggtagcggttttgctcgtctttggattcgtggtcattcgaattgttatcgtggaggagagtttgctcacaatatga

SEQ ID NO: 26366 - DNA, 636 bp, Zea mays
  Peptide Sequence Number=SeqID_69741
atgctggcccctcggaagggttcgatagccgccccagagcactcgggcttcaggctcattactgatcaggggttcgaaggctggcccctcggaatggttcgacagtcgcctcagagcactcgggctccgcgcccactactgatcaggggttcgaaggctggcccctcgaagggttcgacagccgccccagagcacgcagagcgagggatgactctgggtacgtccgatacatggctgaggctcgagctatgctcccgaggtaccctaggacatttccgagaccagcaggagcgattttgtaacggaatcccatcagagggaggcatcgagcccttggaccctatcgaatgggaccgagtccggcaaatcacctgcaggaagctccgcctcgcccgaccttgggcctcggcctcaggagaagtctctgcctcgcccgaccccagggctcggcccccgccttggcctcggaagatggactccgcctcgcccgaccccagggcccggcctcaatctcgacctcgagcggaatcgcgtcctcgcccgaccccggcctcggaaggagtctccgcctcgcccgaccttggactcggacccaccacgccgcaaggggtacatcattaccctaaccctagctag

SEQ ID NO: 26367 - DNA, 234 bp, Zea mays
  Peptide Sequence Number=SeqID_69742
atgcccaaaccggacaaaactttccccctccttatcctcccggtgctccccagccttcttaaccctggggttggaccacacgagttcggattgagtgactgcccacacagtctcgagtggttgtacgacaaaggagtacaggtagctgatggtatcattatgctcgagagcttgaaatgcttgtacttcactgccgcagatacagctgattcgatgagaatggatcacttatga

SEQ ID NO: 26368 - DNA, 171 bp, Zea mays
  Peptide Sequence Number=SeqID_69743
atgccgaagcttccttgcgcacagcttcggctctgttccatccttcgttctccttgtgtttcttcatacaacgattttgacttgtccgaagggtccatgtctgaagattgcgatacggacgaaggccctaagccgaaggtccgaaaaaacaccttcctcttgctagaatag

SEQ ID NO: 26369 - DNA, 324 bp, Zea mays
  Peptide Sequence Number=SeqID_69744
atgacaaattacaaatgtaccttcgacttgaaggaaaggagcacgaggacgaagccgctgccagaccagaaggcactggagataatttttgagaagattcaaaggaaagatacatacggagtgtttgttgaggctgtcgatccagtggagatttacaagaaggagaaaattattgtctcaccaattgtcagcatgcctgcttccagcaaagttccagagaagacaaggattgcactcaacccctctcaagtgatccaaaaatcaaacttaggtgccacggtcttccttatcacatatatccatgttcacaaggaatctccataa

SEQ ID NO: 26370 - DNA, 411 bp, Zea mays
  Peptide Sequence Number=SeqID_69745
atggacagacaagatgccctgaggagccctcgcctgctgttggcagtgtggagggtggcagggaatcctcatcgttatactgatggtacgacatacaacaggttttgtatcattgtcaaaactattagagatgagaaagaagtccttaaagctattgagtatgtgcatgaattgctagacaaagaagtagccgcagaaacgagtccgacagacatattggtttgtgggatgagccaaggaggtgctctagccaaagcgagtgttctactctacccaaaaactttaggtggttgtgctatctttaatggttcagttcctataagtaaatcattcgctcaaaaggtgccatctgaatctagaaaggaaagtaaaaataccagcgtgaagcaaaagcaaatgcccaatgcgtga

SEQ ID NO: 26371 - DNA, 162 bp, Zea mays
  Peptide Sequence Number=SeqID_69746
atggtgggtacaagtgcggccactgcacgacggcagtcggggtcagtggagcattgtaccatgcaggatgtagttgatggtgtgacttggcctaccaccctgccaccaggttggacggtcgagtgggatgttgctccggcaggagaggagcatgaggagtag

SEQ ID NO: 26372 - DNA, 84 bp, Zea mays
  Peptide Sequence Number=SeqID_69747
atggctcaaacacgtgacggtgtggatggctgggacgtggacccccaaagtcagcgaccgagagaaataaaatcttatccatga

SEQ ID NO: 26373 - DNA, 1182 bp, Zea mays
  Peptide Sequence Number=SeqID_69748
atggccttgttcttcgtctccgggaagggacccggaatcgcggaggcggttgtgccgcccctgcgttcttctactcgaggtgtctcgaattcagccgccctccaggcccatccacactccggaacatcagacatgaagaacgtagaccgacctccttctaatccaaaacggattataatccagtctactccggagtgcttcagtgttgacataccccgtgttccggcggagactgttagacccgaaacaaggcaggctgctgatgaggatgatgactttatgccattatccaagaagcgtaacttggacgacagtcctgggaaagttttgaagaagcagaggcttaacgtcagatgcaacccccaagatgtattagtaagcatccagatattaaatgacagacagcgccaagcaattgcacgtaggggattttctagtattcttgatatgagactggacgcactcggcagcagatcacatttagcttggctgatggaaaagctcgaccacaatgacatgacaattcgagccggcccagggaaggagctgaaaattacaaagaatacggtgcacctaattttggggttaccgaatgctgggggaggaactgcattgggcatcgatgaagctgttgctgccaacaatttaagagctgaacttggtctatcgaaagaagattttggggttacagctcttcaagaccgtctgaggaaagggtctgacgatgatttaagcatcagatgctttttcttgatattgttcaataggttgttgttccctactgctagctggggaataaccaaccatgaggttcttttaaccgaggagatggatcgtttccaccagatggactggtgcgagcttattttcaatgatttatgccaagctgccaagaagtggcatactaggagcgttacgaacgtttctacaaccatctatggatgttccatcgttattcttctgtattatttggatcatcttcatgactcagcggcaccccagaacaaacgtggaacaccacgaatcaaatactttgataggaatattattcaagccctgacaagagttgacaagggcaagatacgcaaaggagaagaagcatttggacattgttcgttccgaagctcctcagagacctgttacacagctgtaccacccgttgaagcacaattcaaggcatga

SEQ ID NO: 26374 - DNA, 927 bp, Zea mays
  Peptide Sequence Number=SeqID_69749
atggcttcccacggatcctcagatgacggaaatgcactgtcccacactgacgggcttgcacgagagggttttccccgcattttgtgggaggtacttcagggggccggatacacaacgcctcctcagtacgcggtgcagcagttcgagaagcaccgagtgccccactgtagggtgaggatgactctggagcctcatcccctacagccaggctggcgttcattagactctgagtcttttggataccgggctgaggacacgatagaggcgattgctctgcacgggttgaccactttctgcggattccatcccttggagctggctacccaccccattggcttgttccccgccgaaagggaggacgacccaatgtggaaggatcgggtggagcatgccaaggacatctgggccatctacccaggtcagactgcgcacttgactgtgcgatgcatgaatgctctgtaccgtctgcaagtgatgcacggtgaggcgatgtcccacctgatggcattgttggaggcgacaaagatcactttggacaatagagaggagctcgtggttgatttgtccactgagatggtggaaaaggatttgcaggtggagcagttatccaatgagatccaagagttggaggaattagtgggtaccagggagaacaccatcgaggttctcgaggatcagctccttaacactcagcagcagctggctgaggctaatgagcacctggatatgcatcaccaggagatccaggacatggaggccaacgaggacgtcgacatcgagggaggagaggagcctgcctccagcgtggacactgctggctccgggagaccaccttcccccgagtcgagtgttgcctcatggccgggagatagcgtcgcggtcagaatgagcgcgatcctccaccgcctcccactctgcaggagctaa

SEQ ID NO: 26375 - DNA, 252 bp, Zea mays
  Peptide Sequence Number=SeqID_69750
atggttggaatctcgacaggtgggaactgtttggaaacctacgactcctatgttagcagctgctgcattgttaacatagggagaactggtggttctaagaacaagcttttcctggatatgcaagcattaaaagccaaaatatcaggtttggcctcgaatctttctactgaggctggggaaagtgttaatgaatcaaagttggatatgcggtctttggtcaatctagaggtgtcatttgcccctaaccgttaa

SEQ ID NO: 26376 - DNA, 489 bp, Zea mays
  Peptide Sequence Number=SeqID_69751
atggacgttgtagtgatcacaccgtcacgagagctgagcaaactacaacctgcaagagctacacatggcatgcttgaccacatcatggtggagaatgcaagtgttaaagttgcattgaatcgcattgccgttgtttctatcctggatgcacataccctgcgtccacacccccatggtgcacgttatgtcgcgcccccgcatccgcctgcggtcgcacgccgccccgcatcccgccggcagcaaccatctttgctgactgatggctgcaaatatttcttcacggtagctctctgctcagcaaccatctcccagcagagccgccacgccatctccctgaccatcaccagctgttccctctcggcatttgcaaggaaccttgctctgcatagtgttgatatctggccttttcttcattccggaatctccaagatggctggtatatacatgcacaagtgggataatgaactttgcatcactgtgccaaactga

SEQ ID NO: 26377 - DNA, 546 bp, Zea mays
  Peptide Sequence Number=SeqID_69752
atggtggtgagaagcaagccgggctgcggcctctgccccgccctcagcttcaaggatcttcatcatccttgctggggcggagggcgagctgagccggagctctacctcccgtacgggccgacgggccacctcctccttcagcaatcaggggagagggcgctcactggcctagcagagggggcggacttcgacaacgcggggccgatcggccgcaagcgtcgtcagctccagcatgcctggtggctacggccgtcggtgttgaggtggtggccgccggagaaggcctcgccgccgacgagatctttggagccatctgtgctccgggcctatggctctttggctttgatagcttgtcctcgcccctcgagtggggacgtgggcgaggaccttgccgcagcagcgtctgccctgaggtcatcgccgctgttgtttggctgctcggagcagaggtcgttgtcgctgctgcagtggtcggcgacgagccacccaaagcttgtcgtctcgcaggccctccgatgtgggggttgttcatacctgcgggggtag

SEQ ID NO: 26378 - DNA, 330 bp, Zea mays
  Peptide Sequence Number=SeqID_69753
atgagcttgtcccaccgcacaaccttcgcgaggcctgccgcggagagcgatgctggatcggagtggcgcagtatggtggtgacgatgaagtgctgcttctcgtacgtggacagcaccacaccctactacagtcgttgctctttggacccttttccgacgttgattgaaccattgcacaaaagggggattttgagtgataatattcaattattattgttgattggaagaatcaggggtaccctcttctacagtatgaaggcgctacacccgtacgacacctccaggtcacacggagagcagcacccgaccccaccacatgggcaggcctaa

SEQ ID NO: 26379 - DNA, 474 bp, Zea mays
  Peptide Sequence Number=SeqID_69754
atgtcggagagcaaatctccggccgggtggcggagtgcacccgccctaaatcctaagatgaggaggggcctaagcgttttgcttgttggttggaaaagtgggaagaacacaagaacacacaaggatttagagtggttcgggccgccggagcgtaacaccctactccactgggaagcttcttgtaaaagggatgatgggtactgcgccgctcgtcacgggcgcactgttcgccaacagactggtcaggcgtgtcgtctgctgggtgaccctgacgccgtctgccggcgaattggacaggacgcattaaatgctgagagggtgcgtcgcccgtcagcgtggtggcaggcggcgtgtctctccgcaataaatgcaaagactgcacaaccgtatgggccctacgtcaggttcggcctgttggcttatgtcacgggccataaaccacgcggccgcggcaggtttccgcctgagcggtga

SEQ ID NO: 26380 - DNA, 813 bp, Zea mays
  Peptide Sequence Number=SeqID_69755
atgccgtctgccacgcctattcccacggctgactggtccgtgaccttcatacttaatgtcactgttgggccatgcgcggggtacctcgagtcgctgcactgcgaagatgaggggacgcacaaccgcgaggcagttgtacgcttcttgcgtggcgaggagtgcaaccccatggggttccattcttccgccatcgctcggcttcaaggattttcatcacacaccctggctgcaatctcccaacagtggttatctagagggatgaccaccagccttgtggtggggagaagcaagccgggttgtggcctccctcctgccctcagctttaaggatgttcatcatctgtgctggggaggagggcgtgccgagttggggccccgcttcttccctcagtatccgggggagaagggcgtttgcctgctttacgaaagaggcgaactttgggatgcgggtctggccgactgcaggtgccgccagccaccgcgtgcccggtgcttcggcttgagtggcttcggcgctgcctccgacgctgccttcgatgctggatcggggcgtggctgtccgttccccgcacgggcgacggtcgcgccgtgcgcagaggcggtcgtcgccgtcgatgctgatgtggttgcctccgctggcgagccgctcggagctagctatcctgtggccctactggtgtggggggtggtgaagcatgcaggcccacggtacgggatcaggttgagcggctgcacgggcttcggaccaccccaggagactaatgcccattctctagctccggtcccgaggttgtcggacccgcaggacttataa

SEQ ID NO: 26381 - DNA, 357 bp, Zea mays
  Peptide Sequence Number=SeqID_69756
atggcactcagccccgcaaaccagagccgcccagtcgggtggcttgggtgccgtctcctaggacggaaagaagaaaaagaagaaggaccgcgactaccagaagccatggtccaccgctctggtggtcgcagccacgaccgggggccagggcaaccgcaacaaacgcccactcccatagagggtgagcggcgcgagcagtcttccaaagatggctctccacctcgctgtcgacctggcaaagaaaagatggacgatggcgaggtggccgcggctgagcgggatctcgggtatcagtcgcccgagggggacctgaaggatgtcttcgccggaggctcctacttcggtgaagacaactag

SEQ ID NO: 26382 - DNA, 3240 bp, Zea mays
  Peptide Sequence Number=SeqID_69757
atgactagcgggaatctgctggtttgctcgctccttcatcaaagatacaaggacttctctccttgtcttatagaaggtctactgaagatcttctttcctggaaaatctggagatgatttggatgcagataaaaattcgagagccatgaagaagagaagcacattgaaacttttgattgaactatattttgttggaattgtcgaagatgctagcatatttgtaaatattataaaagatcttacatcagcagaacatttgaaggaccgtgaaggaactcaaacaaacctatctcttctatctacctttgctcgtcaagggaagttttttgtagggctacaacctcatggtcaagaagcttatgacgagttctttaaggacctaaatgttactgctgagcagaagaagttctttaagaaagccttgaactcttactatgatgctgtagctgaactactacaatcagaacatgcgtctcttcgtctaatggaggcggagaatgcaaaagttttaagtgccaaaggtgaactaagtgatgagaacacatcctcatatgagaaactcaggaagtcttttgatcagttactacgtggtgtttcctcgttggctgaatctcttgacatgcaacctccagtgatgccagatgatggaaatacaacaagagttactacaggaaccgatgcgttgccttcttctggaaaagaatcatctgcattggaacctatctgggatgatgaagataccaaagctttttatgaatctttacctgatctcagagcatttgtgccagctgtattactgggagaggttgaaccaaaatcaaatgagcaacatgttaagggccgtgagctatctggtgagtccacttcagaacaagagactgaactacatgacaatgttccaacttctgccactgaacgtcaactagaagttaaagtagatgatctagtgaaagagagtgaagacagagataaagagaaggggaaggatggagaaaaggaaaaatccaaggagaaggatctggataagaaaaatgaaagagagaaggagaaaggaagagtcttggatggcgcaagtctggataacctcctgcagaggctgccaggatgtgtcagtcgtgatctcattgatcaattgacggttgagttttgctacctaaattctaaagcaaatcgaaagaaacttgtgcgtgccttattcaatgttaataggacttcactggaactgttgccatactattctcgtttggttgcaacactctcaacctgtatgaaagatgttccaagtatgcttctgtctatgcttgaagaggagttcaactttttaataaataagaaggaccagatcaacatagaaacaaaaataaaaaatatacggtttatcggggagttgtgcaagttcaaaatggctcctccagctcttgtttttagctgtttgaaggcctgccttgatgatttcagtcatcataatattgatgtggcttgcaaccttcttgagacttgtggtcgttttttgtatcgctcacctgaaactaccattcgcatggctaacatgctggagatactgatgagattgaaaaatgtcaagaatttggattcacgccacagtacacttgtagaaaacgcctactacctttgtaaaccgcccgaaagatctgcgcggatatcgaaagttcggccaccgttgcatcaatacataagaaagttgcttttctcagatcttgacaaatcaagtgttgaacatgttttgcgccaactacgcaaattaccttgggcagagtgtcaacaataccttctgaagtgctttctaaaggttcacaaaggaaagtacagccaagttcatctgattgctcttctcactgctagtctcagccgctatcacgatgactttgctgtctcagtggtagatgaggttttagaagagataagggttggattggagttgaatgactatgggatgcaacaaaggaggcttgcccacatgcggttccttggagagctatacagctacaagcatatagattcatcagttgtttttgatacactgtaccttatcattgtgtttggtcatggaactccggaacaagatgtgctggatccaccagaagattgtttcagaatcaggttgatcattacacttctacagacctgtggtcactatttcagtaaggggtcttcaaaaaggaagctcgacaaattcttgctacactttcaaagatacattattagtaaagggcccttaccactcgacatagagtttgacattcaggatttatttggtgagctacgaccaaccatgtctaggtattcgtcaattgaggaacttgttgccgcgttagttgagtttgaagaaaatgaacgttcagccccagtagaaaaggttgaaaatgaaagacactccgacaatgaatctcagaaaagacactcgcgagatgctggtccatctgtgaatggtgaaagcgctgcaaatggaaccgaggaaaatggcaaggctcatgaagtagcagatagtgagagctattcagatactggcagcattgatggacgggaagaagaggaggatatattatctgaggataaatcaaatgatggctcagataacgaaggcgacgatgaagatgatggcattcctgttgtttctgatgaagatgaaaatgttgaggttagacagaaagtcatgaatgttgatcctaaggagcaagaagacttcgatcgagagctcaaagcccttcttcaggagagcttggagtctcgtaaatcagaggcccgttcaaggctccctttgaatatgatggtgccgatgaacgtcctcgagggttcaaaagactcaagggccacagaatctgagagtggagaagaaacagtagacgaagagggtgggaatgctgggggtagcagcaaggtgcgtgtgaaggtgctaatgaagaaaggacacaagcaacagacaagacaaatgttaattccggccgatagttcaattgtgcaaagcacgaagcagcaggaagctgctgagcttgaggagaagcagagcatcaagcggaggatccttgagtacaatgagagggaggaagaattgaatggagcatcccaaatggggaactggggccaaggagctaccagtaccagcagtatcagatcaggtggccggggcagctgggatggttcagcacggggaggtggtcgacaacggcaccacataacgggttctggtggtttctaccacagttatggcaggagaagataa

SEQ ID NO: 26383 - DNA, 717 bp, Zea mays
  Peptide Sequence Number=SeqID_69758
atgaacaaaacaccggcattcaagatgccattacaaacggaaccccggttccacctccacaggtatgaacaaccccacacgattggggggcctgcgaagcaacagaagaccgacgggtggctcgccgtcgcccgctccggcagcagcgacaacgacccccgctccgggtggccgaactgcagcagcgatggcctcagggcggacgccgctgcaaccttgccctcgcccacgccggcgctcgaggggcgaggacaaatccccactcagatcctcccggacgagtggagcaccgacccccacgcggaggcgccgtaccggtgcaaaggcaggacagccccagaacacgaacgccgccctagcagcgcgcgacgtcttgggcggtcctcccgtgcgcgcggcgcgacaaccgccctcgcggcaggagggggcaccgggagccaagccgatgagcccaacgcgctgaagctgacgacgcccgccgtcagccagccccgcgttgtcaaagtccgcccctctcgcagggccagtgagcgccctctccctcgaacgctgaaggagaggctgaccaacgaacccgcgcgagaggtagagctccggctcagcccggcctccgccccagcgaggatgatgaacatccttgaagctgagggtgggaccaagatcgcagcccggcttgcttctccccacccaggggctggtggtcaccgtcttgggtga

SEQ ID NO: 26384 - DNA, 1167 bp, Zea mays
  Peptide Sequence Number=SeqID_69759
atgtctccgtccgccgacgcccccggcccggcctcctccgcctcggcgcccccgctcgcgcccctcatcgccgcgcagctcaactacctcctctcgcactccaagctgcccattagggtggtacagatctggtccggctgccgcaacggtcgccctgccgatcggttcaggctcgccatccccttctgcctcgactacgtccactgtaacgcaccctcgctctctcgctccaatggtactaggggggatttcgtgtacaatgcgctgtctcccaaggtggcaccagacgtggtgttcggtccggaggatgagaggttccagccgctggtcgattacgctgctgctggaaatggcgataagagctgcttggcgcgttgggattgccgcgcccccgagggactccatgcgctcgtacaggagcttcgagaattgtacattgaataccaaaaggagcgggttcacatggtggatgacgcgagactagcgtttgaactaagcacagttctctctaaggaggggattgaagtctgcatggtaccttctgctgataggccagatgaggccaaatttgctgtaccacttctggagtctgactttgactttgccaaactggtgccaggatgtccttggagattacctcaaaagatccatctccaggtcatttttcctatcagcaggagttcaagctactcttctatgccttctgctccacgactcaaactaatctcaacaccagatttgaggtcacttctctcagttgaggatgtgaaactccctccatggtcaaatgggatgtgtttggcggagtatcttcctgctttagaagacagtcttaacggtctgcttgtagatgcgtcggcttcaattggttccagaagacgctttattgaggcactagctcccatctttgggagaccattagaggctgatccggttcactttgccatcccccttcaattcccaaagcaacaacctgtcgtcacactgcagagttctcagcactgtaatgccgatgggatgcctatcacgtcgcctccgataaatgactatccctggagtcctagatgggaccaggcagagatggttgaacggatctacgacttcctgaccgacgagtgccaaaatttcaagaagttctgcagcgatgctatcactcagcagaagtag

SEQ ID NO: 26385 - DNA, 759 bp, Zea mays
  Peptide Sequence Number=SeqID_69760
atggtcttgtacctaaagctcaaggtggatattgttgctaatggtaaaagctattctgtccctgcaattgctagagctgattcggaggaagatgctgctgcagctgaggttgttgaaggggctgatctaggtattgtgggtgatgatacacaggtttccagtgatggacctttaagccctgctcctggtgtagagacagtagttgtattccccaaaaatgctggcaaaattgtactagcaggtgaagaaactgaattactagttggtctgcaaaatgagggtgaatcgactttgaatgttgttgctgttcattcaactctccatcttccttttgaccataatatgtatggccagaaccttactgttcagcctggagcttatgatctggttggttacatagtgtatgagatcgaccagcacccttaccagaatgtattctacaatggcactattgaggtcgttgaggctggaggcttactcagtgttgagtctgtgttcctcatcacccttggaaccgctcttcttggtctctttggattatgggcatatggccaggttcagcagctctcgaagaaaacgaagaaggcccccaaggtggagctcggaactggaacaactgatgccaacatcgatgagtggctggaggtatatgctgttgtctctgtgatttctgatcttttattcgctgtcatggccactccaggatttttctttgtgggttgtgtagcagaagtcggcaggcaagctgttgatttctga

SEQ ID NO: 26386 - DNA, 117 bp, Zea mays
  Peptide Sequence Number=SeqID_69761
agatactttggtacatgtgacaatgagattgatgattccggttatgattatggtgctggcgaagatgaagctgtggaaggagacttccaggagttccaagattacgacgagttctag

SEQ ID NO: 26387 - DNA, 240 bp, Zea mays
  Peptide Sequence Number=SeqID_69762
atggtggagaaaggccacgagtcgcgcggcgaaacaacggtcacccgatcggccatcaccaagcagaagaggtggcggcggagaggacaagggaccgggaaaggggatactccgaaagggatccttctctgcgaaggaagcgggccccaagccctcctactgattagaggttcgaaggctggcccctcggaagggttcggcagccgccttagagcactcaggctacgcgcctactactga

SEQ ID NO: 26388 - DNA, 339 bp, Zea mays
  Peptide Sequence Number=SeqID_69763
atgcccctcataaaagattacaacaatgactcaaacacttgtggactaaaaggaccttcggcgacgaagcatggtcccaacacctatcgaaccttaaagatggactatgacaagaagctaaagaagctcgctcccaagaagaaaatccagaaaaagaccaccaaccgagggtgccaaacagagaagaagaagacccctcaagccccaccttcccccaggatagatgattggtccgacgccgaggatatatccctagcaagccttgatgatcttctcaaggaatttggggatactttagagaaagagttcgatagtacctcagggaacgctctcgtgtag

SEQ ID NO: 26389 - DNA, 474 bp, Zea mays
  Peptide Sequence Number=SeqID_69764
atggcgagctcgtcggtggtcgccgtcccctccatccctctccctcccccgggcgcctataaaagggcccgcccgagccccgtcttcaccacaccagctccggccatctcctttgctttcccccgagccaatcgagctagcgccgccgtgcttcccccgtcgctctggtgccaaaggttcactataagccaacaaaaagaccaagaaagggctcaaacaaagagagcaaaagacatcccaaatggcaccctggtctggcgcaccggacttccggtgtgccaccggacagtgtccggtgcaccaccggacagtgtccggtgcaccagggaactcgaggctgaacttgccaccttcgggaaaatgggaggccgctccgctataattcaccggactgtacagtgtgccagcggagcaacgactacttcgcgtgcaacggtcgactgcaacacatttaatgcgcgcgtgcgcgcgtag

SEQ ID NO: 26390 - DNA, 201 bp, Zea mays
  Peptide Sequence Number=SeqID_69765
atggccgccgccatggccggctcgccctggccgcccggccgcgccctggccgcccggctcgccctggccgcccggccgcccgcctggccgccccagcccgcctggccgcgcgcccctggccgcgcgccctggccgcccgcccggccgcgcccccgcccctgcgtgctcggccgcccagccggccggttcaaccgcccctag

SEQ ID NO: 26391 - DNA, 234 bp, Zea mays
  Peptide Sequence Number=SeqID_69766
atgggcatatggccagcattttggccgaaacgaccaaagcctaagttttggttaatatcgaaggccgccggcgaccccgaccgggctagcgacaacagcctccgccccagcagcacagacatacaagcacctcaccctagcaaagatggcagagcaatctcaccaggggctgtgctacaattgcgacaagccatttatgcgaggccatcactgctaatgcctcttctactttga

SEQ ID NO: 26392 - DNA, 317 bp, Zea mays
  Peptide Sequence Number=SeqID_69767
atgaccgttgcagcgccgtggcagttggcgcaccggacactgtccggtgcacaccggatagtccggtgccccctgctgaccgttggcgcgggccacgcgtcgcccgcggattgcgcgacgaccgttgcactggcggtcgttggctcaccggacagtccgagcgccgccgccataacccccgccgtcccgagctcggttccccgtcgccgttggagctccgccgcgccctttgccccgccgctgaggtcccccaccgtcgccccggaccaccgtcgcgccattgccgccgccgaggagtccccggagcccgccttgag

SEQ ID NO: 26393 - DNA, 219 bp, Zea mays
  Peptide Sequence Number=SeqID_69768
atgatccccgggcagaacgggaatcacggctcatgggtaaaagatggttggtttacaaatgatgatgatgatggttatgactatggtaatggtaagtggtattctttccgtttggaaagggttgcctttggtgcaatctatgctcaagtaaagaagaaggagaacggtgtcgaggcggatctccgggagttccaggacttcgacgagttcgaggattag

SEQ ID NO: 26394 - DNA, 495 bp, Zea mays
  Peptide Sequence Number=SeqID_69769
atgacaaagaaagccagtttcagaggccacaacaaagctcacagtcttcagggcagcagcagagctctttcaggccaccagctccaagaggcagaggcggtaggggcttcggaggaagatatggggatcagcccaggaaactctactgcttattctgtggtgaggacaagggccacactacaagaacatgccaggtcaccatccagaagcaaaaagagattgccgaagcagaagcgtggcaaaatcagccgaaacaggttttacacactgcttcgtgctactctccctgtataccagagtacgtgggtaatcaacctgcagcttctgttgcttcggcaagacattcacaagcttcatggccccagctaccattaccaccaccactgccacctactcacacccgaagctagcagccagaagggccccagcacgcccaacaacatcgtgactttagggatcagtccgaagctcgtacagtcaataacactgtactag

SEQ ID NO: 26395 - DNA, 574 bp, Zea mays
  Peptide Sequence Number=SeqID_69770
atggcgccgccgcacggtgtgctcacgccgtcgtcctgggatgccaggggtggccgcaagtcgtgcatccgagggctgggagtgggcactggcgtggttggatctcaggcgttggcttcggatccagcggacgagcaagtcactgaggattctgaggttcaacaagtagagatagctgagcaggagctcatcgaaggcaagttgtggggcctggtggtcagctccaccctcttcgtccccacccgaacagaacccgctaccgccgcctcggggttgttggggttgatcccccgatcggactccggggtatttatagccaagctcgcggccaccccatcccatccagccgaggactgcttcggcgccgggcggggagtgtgtgaacagaaggccgcccatgccaccgccggggaatcagggctatttaggggccagggcgaggtcccggacgttcgtgagggtgtgagacgggtgttcgagggacagacggatctagtgcttgcaccgggcgtcggtgattgctcaccggagcaatccttccgccgtgactctgcatatcatcgtgggcggccat

SEQ ID NO: 26396 - DNA, 450 bp, Zea mays
  Peptide Sequence Number=SeqID_69771
atgatggacagcgttggtcggagttggtgcagcatcgatggaagtgtgggggaggagtcagcgtggcgggcgacgcaggcgtgggggagagctccggtggcggcggcgtgtaccagcggcggctatggccagggcagccgggtacgggcgacggctaggtgccagctatggagaactggtggcagcagcgtgggggagagctcgggtggcggcagctatggagaacgacggcgtggggagagcttaggtggtcgggtacgggcgacgacagcagtgggagagaaggacagcggcgccagcgatggagaacacgggcgacggcacgagatcgacggggatttattaactcccgtcggcttggtcaaaaggctgacagggattagtaactcctgtcggcttggacctgaggccgacgaggataataagtttgagtgctcgagtgcgtcctaa

SEQ ID NO: 26397 - DNA, 81 bp, Zea mays
  Peptide Sequence Number=SeqID_69772
atggttttgagaaaagtggtttttaaaaaggttcggcggttgagccgtgagctatggtggacgaaaaaggagatcgggtaa

SEQ ID NO: 26398 - DNA, 1053 bp, Zea mays
  Peptide Sequence Number=SeqID_69773
atggaggttcgctgccaaaccagcttttgccagaatgaagatggtttccccaagttgctgagagcatgcacagtccgcctcggaatcaggagccagccagactatgatggtcgtgaattcgtcgagcatggcacagagaagtgtgttgtgactgtatacattggatccagtccacaccatgtggaatggagtgtcactgctgctggacacagattcaaagacacctgccaagtcgtcgctcgcaaggcattgagggccctgtgtcaaatttatgaagaagaagtggccgacaccccgctcagattctttccgccctttcagagaaaccgtcccgtttggatgaccaggatgcgtgcattggaagggcagcggctgcttgaggacgaccccacagtcgtgtacctcactgcatacctgctcaccctggatatgattgcccgagcagaagatgcagagaagctcaaccgtaagctccatgtggatctcaccatagctcaagcccgtgcaactgctttggaaagtcgtgaagtcattgttgttgaagccctgaagcaagccaaggatgagcatgtccagaagctgatggaggcctacttggtaacccataaccaacatagagctctgcggatccaagagcccgcttcatccaacccagttcaatctgtgagagctgaagatccccagattcttgaaggtcaaccggtctctatcaaaggagagaagaaggcttgggaactcccagaaggagccatagtattggaaggaattccagtcttccctcaggctatggataagcaagagcaccccgagtcctcccaagatcccccaccagagttgtttgagcccctcaccatgaagaagattccagcaccgtcctgtgagatcaaagaagaagctgcaagcaccccaccagcaccgccgccctctgaggagctacaagagccagttcagcttgaagaagagttcaaccccatgttgccatctcagtcgccgccagaagaagtcatcaacatcagctccctcttgacccatccaggagatgtctcagattga

SEQ ID NO: 26399 - DNA, 399 bp, Zea mays
  Peptide Sequence Number=SeqID_69774
atggtgtctagtctgctgctactggaggggagggtgcaaggggaagggctccgagcagctgccgtgcgcgtggaggagatgagaaaggacttcggcgaggagccaattgcaagtgaccaacattggtggccacctccggtgaactcacttccacaacaacgaaaagctttgtcatgtcgccgaagaagccaacaacaattagtgtcgtggtcactcccttggacaccaaccaaggagaggaagcgcttgtccgagaagcacgaaaacagaagaggaaggcggtcagtcctacaccacaagatgaagcgctcgacagagaaatctagaaccttgaaactatccataatcaagtggagaaacacaaaaaacatgcttcggctctccgagctccataagtag

SEQ ID NO: 26400 - DNA, 714 bp, Zea mays
  Peptide Sequence Number=SeqID_69775
atgaagcacatgggattcgcatgcgagcacgttactgctggaccccatgaagcacataggcggtgctctctacggaggcgtgaacagtccacggttgatggctgtacggtctgcgacctggagcagaggctagggtttctacctgatgagccggacgtgttcttgcttctccggcattttcacatctcttaccactgctcgctgtttactttcttctctttccttccactccaccatggcaagaacaagaagggtggtagttcttcgcatcactccggcgacaaacgcaagcgtgagccgactcccccctcggaggacttcagcgactcggagtactcggaggaggagttctcctctgagtccgagggttcaccgactcctgcctctcccccggcgtcgtctgatgacgcagacgactcccaggggatcgccgtagaggtatggacctacatccgggccatcgagcacgctgggctcgagggctcggatgagtcggagtactcctcggacaaggagaactcctcggacttgtctgaggagggcggtggcggcgatgacggtgacggcgacgacgacggaggcgatggtgatggcggtgaaggcgacggcaagggcggtgacggtggcggcaaaggtggcagcggcgacggaggcgacggcagcaagggcagcagtaggggcagcagcaagggcagcaacagggccagtggctag

SEQ ID NO: 26401 - DNA, 762 bp, Zea mays
  Peptide Sequence Number=SeqID_69776
atggcttaccggagagctcggtccacgcgtgcaggcgggcgaccgaagaccggcgagggtgatctcgggcttctggagaagttctgccgggtccgagggcttggaaagcttcacgggccactagctgagctaaccgaagcactggcgcgacttgggggtgactggagtgggctggccacggcggccgaagctctgaaagcttggcgggcggtgatcgggcccacctgtcagcttcatcgttctcgcccatgccacactggcgcgtccgccaccgagcccctctcgccccgtcgcctcgccattaaggcacgcccgacctcagcgaccaccccgccactgtacccgacccgtcccctcacccccccccccccccgcctacccgagccgtctcaatcgacgttagcgccattcccgccatcacggcgagctcgtcagtgctcgtcgtcccctccacccttctccctctcccgggcgcatataaaaggacccgcccgagccccgttccctccacaccagctccggccatctcctccgctttcccccgagccaatcgagctagcgtcgccgcactcccccgtcgctccggtgagccccgctcttcgctcccaagtgagttttggtcaagttaaactagtgcttgagctccgccacacgatcacggtcacgaggcacacctcctcgccccctattgcacccaactacggcaccggcgacctcaccgccgtggacacccgccaccgtgccgcggacctgccgccatag

SEQ ID NO: 26402 - DNA, 159 bp, Zea mays
  Peptide Sequence Number=SeqID_69777
atggaaggaaagccctcgcgaaaaaggaagtcagaactgaaacgagtgtctcctccactggcaggggtgggtgaattcatctgcggaagggaaccaaaggacaaggggtcaagcagtctcattagctgcgagaagcagacgattcgaatcgagttttaa

SEQ ID NO: 26403 - DNA, 912 bp, Zea mays
  Peptide Sequence Number=SeqID_69778
atggcccggcccggcacgagctgcaggccggcacggcagcggcccgtaagccagccacagacagcccaacccagccagacgaacgaagcagtcaaaaaccccgcgttcctccaccggagaatcactgatgaaaaacgacagccacagcaagaagaacgtgcaccggtccgccagctccaccatgtgttgcagcttcctccccgcagcgaggttccggatgaaagcatcggcgacggagggcacgcggcagcgcgacgcgcagcagccgagctccacaaatcgcaggaactcgcccgcgtcgtccgcgtactactcgaacctccgcacggcggccctgctcggctgcaggttgttgaggccgagggcggaggagacgagtgccctggccgcgcgcgccgcccgtctggggaaggccaggcaactgcgactcgcctcccgctccgtcgcctcgtcctccaggaccctgtgcttgcactcatggtcgaggagggcattctccgccgagagtggcgccgccagaatgcactgatgctggaggagaatgaacggaaggagagggagcgtcgcaacgagatcatcgcagaagcggaagagttcaagaggtccttccttgacaagcgcaggcttaactgcgagacgaaccgaacgcagaacagagacagggagaagcctatgtgccacttgcacacacgtagccgagctccttgttccacagtagccacagctgagctcggcgccatagatcttggcgccgagctcggccacgtcagcgccaggtcgatctgcacacgccatcgaggcgaatacctcgacgccataatctatggcaccgagatttgcggaattagctcggaatccagtcgtgcaaagggtccagccccctcctctataaaaagagaggtctacggctga

SEQ ID NO: 26404 - DNA, 795 bp, Zea mays
  Peptide Sequence Number=SeqID_69779
atggagctcacccatttgacaccacagcatggtgatttccaccggattcagtcgaatcgtcctctgcaaggccaccggaaggccacacctcgctgggtggatctgggcagcacagagacgacggtggtggtcgcaggctcgcgaatgctcaaggagtggggcaaggagaggaggaaggaggtggactctgctgcggtgagtctttcgccaccaggagacaatgatgacacaggaagaccttcctggtcggacgctagagcggtcttgaccccacaagctcctaaaggagatcctgttctcgggcatagggaactttcagacaggcacaacgttaccaggactttgctttgggtccgcgtcacgtcgcttgaagaagtcccccagttcattgtcttttctaaagcagaaggtttctttggggattcttggatggtgcaatgtgagatcattcagcaaaatatgcttggtggtcaacctcaagatgaggatctagtctcggaggcccctgaagatggtcaacaacttccacttgcctttttttgtctgggccaacctttgcctgctgcgggtcttgacctcaacttcccgctagtcctgttgggggaagatgttcaggttcaacctgaagacaatattcagggagaatgggatcagtggattgttagtgttcaaccagctccgcggattcagcaggacattcaaccggatgagcagcagatcagcaatcaacactctagcttgtcttcggacagctctataggcctcaacccgggtgctccagttttgaatggttag

SEQ ID NO: 26405 - DNA, 402 bp, Zea mays
  Peptide Sequence Number=SeqID_69780
atgggcctcaagagtcaagaagttgatggcccattaaatcaggtggatcatcaagaattggaggatgccctgctcccagctgctcaaccggattggcaaccagaccctgtcttccaaatgcacatggaaagaaaaaggacggctcagttctacaggctttgggcaaattattttgcacctatgggcaaaccagaaatttcagtgaagattcccaaaaagtggtcgtccttctttatgtcaaatctgcttcagccggattcttttaattggtccaagtctttcctttcttccgagataccacctactctgttggagcctgagctggaggctctttcatttgttatccccaagagctgcccaaatgacaagtttttggataatgttctctcggagggcccttag

SEQ ID NO: 26406 - DNA, 249 bp, Zea mays
  Peptide Sequence Number=SeqID_69781
atgtggatgtgcaggatagccctgatggaagagatagtgccaaaaagatggacaaaaggccagcagaagtctgaatccagcacttcagtggaggttctccaacgtatccatgacaatagagagaaagtgaaggaggatgaacaactacaacaaatactagcaaggaaagatgaaaaccctagtttgcaaagggaaatccgggaaataaaggagcagacaagacaggaagttcttgagctgagaaaataa

SEQ ID NO: 26407 - DNA, 399 bp, Zea mays
  Peptide Sequence Number=SeqID_69782
atggaaattctcataccagtcatcttcgttgaagaagccctcctaatgaagctctctgtgctggggccttcggttctgctcatcttgagtaagatggcgaacttcttcagaggcttcgtctatctgcctttgcaagccgtcgagcgctccgggctcgagggctcggatgagtcggagtactcctcgggcgaggaggactcttcggactcgtccgaggagggcggtggcggcgatggcggagatgacaacgacgacgacgacggaggcgacggtgacgacgacgacgatggcggtgacggcggcagcaggggcagcaacggcggcagcaagggcggcaatggcggtagcaggggcggcaacggcagcagcagcaagggcagcaacagggccagtggctag

SEQ ID NO: 26408 - DNA, 1209 bp, Zea mays
  Peptide Sequence Number=SeqID_69783
atggaaattcttagcatacacaataatgagctaactactaagctagaaaacattggtagcaccccagcagcatctttagttgaaatacctgaaattattaagaaagatgcttctacttcctgctttgatttgattgatgattctaacccctgcaaccaagttcttgttaagaatgttgtggtagaaacatgttcggatgaggttgcaaaggaaaatgaacaattaaagcaagaagtggctcgccttggcaaggctttgtatgataagaaaggcaaagccaaacaaatccgacctccacaggataacaccactgcgggagtgaacaagcctgtagagggagaaactgtgacttgtaggctatgccacaagaaaggccacaagtctttccaatgcaaggcgatgaccggggataaacaaaggcaaaagctcaagcaaaagccatcaagcaaaatctccaacacctacataaaaaaagtgaataaaaaggatgctacatcatatttgatcaagaagaaaaagaatggaaaggtgatagcaatcaaggccaacaagcaagccaacaaaggaaagggggccaaacgcatctgggtgccaaaggaaataatttcaaccatgaaaagcaccaagaaggtttggatcccgaaagggaacatcatcctcggtatcggctacttcctctacgattgcctcgactgtgtcaccgtcttcgtctatggtgcctccttctgcgccactgacccatcgtcaccttggtgcctcctgagccttcccgcgtgctgcacccgcgcccgtgacttgtgcggcttgtcttcttcggcgtcctcgacagctacatcaaccacaactacccgacgcacgtcacctcgacaacggcttggcgcccttacactcggctatctcgacattatcggcatatatggctgctccagccgtagcatttgcaccgccattactctcactcatgtgctacttgctcccaaccagaagcttagcattatgcagcttgaaggcgtgctaggcgccatcgtgcagtccggcgtcatggaccaaaagctcagcggttggactggaggcacactggacaacatcgtgcaggtggagaagcagtccaatgatgtgcagatcggagccgcgttggatggcatcgtcacacaagacaacctcatggaacacctcacgccgaacgtccacgccaaatacaaatggtag

SEQ ID NO: 26409 - DNA, 609 bp, Zea mays
  Peptide Sequence Number=SeqID_69784
atggcggtgtgcagtgttgccgggggcgaggatatagtcccatcacagccgccacgacaacgacgtgcaatgggccaattccagttggggtactcgatgggaaggtggacaaatgtcgtcgatggggccttgatggatgagggcggcgcgtcggcgcagaagaggtccccaagcggcaagtttggtggcgtcgtcggcggagagggcacgcagtggcggcgaatgttgctgccagcgatgctactcggcgagaccgtgctagagatcgtccgcgtgcggtcccggatccagttcaagcccgtgtcgtcagtcaccgtcggccggccgttcgtgtctgccaaccgcgtttcccccaagaaccgaccgtgggtcaagaaggtggtgatgtttccgaactccatgttccacgcctccacctctgccgccaccgactcatgcgcgacgtcgtcgccttccaagaagcagaagtggctctacaagacgcggtcccctgtcgtggcccagcagacgccgcacaagttcctggtcaaagtcaccaccgagtgcgctgggatccaagctcaggatgcacgggaaggccctacccgcgagacccgccgccatccgtga

SEQ ID NO: 26410 - DNA, 348 bp, Zea mays
  Peptide Sequence Number=SeqID_69785
atgtaccccaagaagctcgcaggaggatgtgcaggtgaatggatagtgcttggtgggatcagcgtagaaggcgacgcactcgagccgtggccgctgctcggggaacctgacgccgaggtcacgctcgtcctgttctccaatggttaccaccaagggagtggaacgagcggtggagaaaggggagagaggcgacatgggagagaagggaagaaagggaaggatgactcacatgagaaaaggtggctgatgaagatggcgatggccagcgttggaagggactggttgccgttgccgggattgatggttttcgcttggattgggcctggtttgcaaacacatgtgggctaa

SEQ ID NO: 26411 - DNA, 477 bp, Zea mays
  Peptide Sequence Number=SeqID_69786
atgggcaatagcaagaagggtggtagttcttcgcatcacttcggcgacaaacgcaagcgtgagccgactcctccctcggaggacttcggcgactcggagtactcggaggaggagttctcctccgagttcgagggttcaccggctcctacctctcccccggcgtcgtttgatgactcagacgactcccaggggattgctgcagaggtatggacctacgtccgggccgtcgagcgcgccgggctcgaggcctcggatgagtcggagtactcctcggacgaggagaactcctcggactcgtccgaggagggcggcggcggcgatggcggtgacggcgactacgacggaggcgacggtgatggtggcgacgacgatggcaagagcggtgacggcggcgacaaaggtggcagcggcggtggcggcagcaaggcagcagcaggggcagcaacaaggccaatggctagatgccactggttttaa

SEQ ID NO: 26412 - DNA, 963 bp, Zea mays
  Peptide Sequence Number=SeqID_69787
atgaccgcggccgacggggagtcctgcgcggtggtcgcgacggccgccgacatcatctgctctctccgtggtgcggacctcgccggctggaccccgccgtggcgcaagcacgaggccgcctgcgacggcgtccgtgaggaggagggcggtggcggcgacgaggcgcgtgatctggcctggccggcggtggcgcgcgggaagcgctcgcggtcccggcgcgagtccccgtcggcctcgggctccgccgcctccgccgacgcgaagaagaagaagaaggcgaggcgaggggtccgcggcagccccgcgtcacccctcgactacagcggcgtgtccgggtccggcgcgtccaccagcggcggcgaggacggtgccttctgcttccagccagagccagcgttcccgccggccgccgcgtgccagctcgcggagcccgccgtgcttccacccccgcccccgccccccagcgaggtgggtggcctcgccggacggcggacgatcctcccggtgccgccacctcggcccgccggacagcgggcgcggaagaagatgaggctcccggagatccagcagatggtgcggtcgctgtcggtggagaacgatgccctccgcaagacgatgaaggagctgcagagggcttgcacggcgctgtcccaagaaaacggcaagctagagtggagcgctggcccacctgcagagattcatttcgacacaggggcggctttagtaggtcccggagatggcacttccactgccactgccgttcatggtaagttccttctcatggtacccggaggtggcactccactgccgttcatgacgaggctcgatcagtccactacgctaaacgaagcagtctccgtggagaacaaggggaagccgcagccccagcgtcagcgcgcagctgagcaggaagctccgagcggcttcgtgctccctgacctcaacctcccggcagacgtctga

SEQ ID NO: 26413 - DNA, 1245 bp, Zea mays
  Peptide Sequence Number=SeqID_69788
atgtacttggaaaatatcctcctccttttgactggtcgacaattggacacggccactgaaattgctgcctcaaggggtgatgttcggttggcaatcttgctaagtcaggcaggtgggtcaatgtcaaatcgatctgaccttgcacaaacactggatcaacggaaaatgaatggtctagattttgattatattgaggaagactggttaaaggccgcttttctagatttaccaattgattggaagaggtaccttggtttgattatgtggtatcaattatcacctgatacaccactcgatattgtcattcgttcttacgatcaactccttgatgaaggaccacttgatgaagcacctcagtggtccccgggtgaccattttgatatctccttctacctaatgcttcttcatgccaataaagatgagaagtttgggctgctaaagactatgttcagtgcattctcatcttcattcgaccccttggattatcatttcatatggcatcagcgttcaattttggaggctgttggagctttcagttcaaatgaccttcacttgctagatttaagttttgtttatcaattgctttgttttgggaggtgccattgggctatctatgtcattctgcacatgccgtatcttgacgatgccccatacattcatgagaaattaatcagggaagttttatcacagtattgcgagtcatggagtagagatgatgctcaaaggcagtacattgtagaacttggtataccagaagaatggatgcatgaagctctggctctttatcatgaatactatggagataaacagggcgcactggagaatttgattcagtgtggcaactggaagaaagctcatactattttcgtgacttctgttgctcattctatgtttctgtcattcacttcattcgttgttattttggctcagctaaccattaggaggtctggaggatcacaaggttcactcgaggagatgagtgaatcatgcagaagtttctttggccgattaaacgagtcgttgttagtctggggaagcaaattacctgttgagtcaagggcatgctactcgaagatggcagaggagctatgcgcgcttctggtggacaccccaagcgagacgttgaatctacccatggggtgtcttctaacgatgctcaacgctccacttccggacaagagcaggtcgtcgtacctgcaggacgcaccctccgtcttcaccgaaatcctttgcagcgatccgtag

SEQ ID NO: 26414 - DNA, 204 bp, Zea mays
  Peptide Sequence Number=SeqID_69789
atggagcctggcggagggacagctgttggagcggttgagtccttgctgacgtcctcttgcttccgtaagggggctgagagccgccgccgtcacagggttgggcgatgtggaagctcctccgaggccgaggtcgagtctgtcttccgaggtcgaggtcgagtccgagcccctgggtcgggcgaggcggagttcgtcgtcttctag

SEQ ID NO: 26415 - DNA, 384 bp, Zea mays
  Peptide Sequence Number=SeqID_69790
atggcacctcctgttgacgtggctggtctacgccctaggttgggcgatgtggaagctcctccgaggccgaggtcgagtctgtcttccgaggtcgaggtcgagtccgagcccctgggtcgggcgaggcggagttcgtcgtcttctagggctgagcccaagtccaagccctgggtcgggcgaggcggagttcgtcgtcttctagggctgagcccaagcggcgctgtcctcctgccagatcggtcagtggagcggcgaagtgacggcggtcacttcggctctgccggctggggggcgcgcgtcaggataaagctttatgctgatgggggttaccagctgagaattaggagtcttgagggtacccctaattatggtccccgacagtag

SEQ ID NO: 26416 - DNA, 165 bp, Zea mays
  Peptide Sequence Number=SeqID_69791
atggctgcttacaatgcgcaggcgcaacaagcaatgaactcttggtttccacaacaggcacaacaacaaccatttgttttccctcaatttcagccgccgatgcctcagtggggattacatgctccgccacctccacctccacatcaggttattcaatttagttaa

SEQ ID NO: 26417 - DNA, 765 bp, Zea mays
  Peptide Sequence Number=SeqID_69792
atgaaaaggttgctggagactacccatctggagcttgacgggaagctgttcgtcaacacgcagcaggcccctacctggcgcgccaactgtcggcgtttcgaccccggggggtccctggaccgacgaccctgggtcgggcgaggcggaggctcctctgaggtcgaggtcgagtctgtcttccgtggtcgaggtcgagtccgagccccgggtcgggcgaggcggagaccgtcggctgaggccagggctgagtccgagccctggggtcgggcgaggcggagttcgtcgtcttccggggccgaggccgagtccgagccctggggtcgggccaggcggagttcgtcgtcttctgggaccgaggccgagtccgagccctggggtcgggcgaggcggagcttcctatggcgcctgaggccatacttggatgttgtcagcctcactctgtcgagtggcacagcagtcgcaacggcgcaggcggcgctgtcctctcatcaggccgtcgacgtggcgatctggccaaggttgcttcttggcgaagactgggcctcgggcgagccgaagccagccaagatcaaatcaatagggagaagaatttcaccactcagcaaggaacaacaaatggtcctcatcaggaaactcggggagcagcacaacctcgaaccgcccttcggccaacttagcggtgacctccacgaaactgacgagctctgtgtggatgggtacaagagagctagtgtccaggtcttgcggtgcgccgaccgtaagtga

SEQ ID NO: 26418 - DNA, 417 bp, Zea mays
  Peptide Sequence Number=SeqID_69793
atgccgcaccctcctgcgccgccaaaccctccacagccccctcgccgcccgctcctagattcgggctcctcgctctcggcgcccatcgcgccaccgtctgccgcgggtcaggaagacgcccggcgggtggattgcccacttgagctgcgaggcgaggtaggccccaatggttttcgtcgttgtggcagtggtcgtggaggggggaggcgagtacgctggcagaactgcggtaggtgcggctacgagatgctgggatggggcgggctgcgagatgcggggatgggggaggacgatggtggaggcgtggatcccgcggcgccatggatggggcacagctgcgagatacgggcatggggcgtggctgcgagatgctgggatgggacgggctgcgaaatgcggggatgtggggagggttag

SEQ ID NO: 26419 - DNA, 807 bp, Zea mays
  Peptide Sequence Number=SeqID_69794
atgcaggcggcatggaaccgcaccaagggggcgcaccctttagactcctacgcgtccagcatggaggcccatgcccacacgtcatgtaaccggcgcgccggttgctacatgcaagaaactgcaccgccactcgcaccacaaccgtgcctcctcgactgcggaaccagtaccgcgactcgaggcaaccctgcgcatgacccaacagtgccaaccaggcacatcggtcacgggtcaatcagccgcgggagaaggcgcgacggtcgatacgaccagaaatgggccggcaggaccgggaaaggggacaccccgaaagggatccttctccgtgaaggaaacgggccccgagcccccctactgatcagaggttcgaaggctggcccctcagaagggttcaacagccgcctcagagcactcgggctctgcgcccactactggtcagaggttcgaaggtcggcccctcgaaagggttcaacggccgcctcaggccactcgggctccgcgtccactactgatcaggggttcgtaggctggcccccgaagggttcgacagccgcctcagacgcagagcgaaggatgaccctagtcaaggctcggtccactcaagggacacgatctcgcctcgcccgagcccagcctcgggcaaggacagccgaccccggaggattcacgtctcgcccgagggccccctcaagcaacggacacaccttcggctcgcccaaggcccagtcttcgccaagaagcaaccttggccagatcgccacgccgaccgaccgtatcgcaggagcatttaatgcaaggatggcctga

SEQ ID NO: 26420 - DNA, 156 bp, Zea mays
  Peptide Sequence Number=SeqID_69795
atgacagtgaatagtaactgtcttgtgcacaggtaccttggagaggaccagcaaggacttgggaaaggccaaggtgttgaggaggagcagcaagggcgttgttgggaccatgcttcatcgccgaaggtcctgcggaaagaaaacagcttcggctga

SEQ ID NO: 26421 - DNA, 522 bp, Zea mays
  Peptide Sequence Number=SeqID_69796
atggaactcgggttccgattccatagctccgtcgcaagccgttggggtcaacgcgggtttgtaggattccgttctggtgttccgcagagcgctcggactccgctacggagtataaagccggggtacctcgtgcacccctcttccattggcaccctggtgtttgaccgcgctgcacgagctaaacgccgccaccgtcaggagcgaggtagatcgtcgattggtccttggggaggggatgctcggagtcgtgggcatctcttgatgctagttgatgtgtcgctggacctggcgtaccgctgggaagcttccaattggtcgtcagaatctcctccgccccgccaatcgcctcccaccgtggccgtgtgcctccgcgccataatcgtcggtaagaagtcttcctatgtgttcaccttcgccttctcatcgcgtagaacccgtgggattcgagtttgcgtggccgtgtgtgggggagggaggtccggccatggagcgccgccgctcagggtgctcactctgccgtag

SEQ ID NO: 26422 - DNA, 501 bp, Zea mays
  Peptide Sequence Number=SeqID_69797
atgacgaaggacttcaccatgactgctgagttaccaccatatgaagatatggttgatagccttcctcttttggtttcttgcctccctgaggagagcttcatccccttggttggtgtccaagtcttggacttatttccctccattgttttgcgttcgaatcctttctcctttgccaaagctactgacttcagctcacaccttcgctacttgcgcttacaggtgaagcttccttacacattgctttggtcgaaggaacctgctgggggccctggacctcatccgagagggctccaggtccccgacattcccttctacatcaagtggatccatctgtgcccagggccccacaaggacctagaccccataggaggcctccagaccccaggttggactccttcgtgcaatcgctccgtcaaccaccaagaagggccccagggtgttggtcacttgttctcaaatgttgtgattaaagaacaaggcaacacaattgttaaatattaa

SEQ ID NO: 26423 - DNA, 378 bp, Zea mays
  Peptide Sequence Number=SeqID_69798
atgaaggaggtagatgatgaccatgcgctcatcactgattgcttgaagtgtttgaggctgaaggtggacgaaacgtgttatgcgaaggttgttgctgagagcttcattgctgctgagggcttgcttcctactggccctactgaccctacgactgggccatcatttcttcaccctgcatcggattgtgaatgctttgaacatgcctacggtggaaccttcccccgaagcctctggctgcttcggtgtatctatgtaactcctcctttttctggtggaaatcattgtcagcccttatgtattcgtccctcttctacagcgatttctcaagagaatgtgaaggctttcttgcaaagtattgggttgctggtcttggtctaa

SEQ ID NO: 26424 - DNA, 153 bp, Zea mays
  Peptide Sequence Number=SeqID_69799
atggggaccccgctggcggattctttgccgagtgctgtccggcagacacttggcaaaggaagcaaggacctgaatttgtctccaaaacatttccaagatttggggcatcaagctgaggccaagtctgaacgtgcaactaggcccaacttgtag

SEQ ID NO: 26425 - DNA, 930 bp, Zea mays
  Peptide Sequence Number=SeqID_69800
atggggagcgcccgcggttcttccgtcttgtcgtcgtcggaggaacgcaacttcgcggaagttggcagccccgctgcatccccttgccggtggtcacccaagaaagtgaccaccaatttgatggtggggagaagcaaaccgggctgcgacctgtgccccgccctcagcttcaaggatcttcatcatccttgctggggcggagagcgaggcgagtcggagctctacctcccgcacggatcagcgggccacctcttcttccagcttctcggggtggaaaccatcctccagctctgcggaggaggcgccctccagccatgccggggaaggcgaactgttgctgcccagccagggtgcaacattccgtcctctgtcctccctttcacggcgaagacggtagtgaggacctaccggtgcgctttggggcggtcggcgctcgctggtgcggtgttggcggacagacgagagccttccggcagcagtgtccgtcctgggaccatagctgctgctgcagaggtcgccggcgagtcaccaggagagtccctcggctcggtcggccttgccgcccgaggctgctcttgcttagttaaaggaacattcggtcgctctgcgatgagctggagccagaggcagcggtgccagcacagacagaggcagagttggctcgaaaagaagcttcgtcggccggagcctggccgggccatccactggcgggaccgacgccggagttgggttgccgaggccacgagccgggctgatgtcctcgggggacagctggctgtggctacggagcggccggtcgatccgtctgctcgggccgggttcccggaggagaccccggcgacgatggcccaggcgtggtgccaacaggttccttcgaggtggagatcctccgactgtgttgctgttcgaggccgggtcggattccgctga

SEQ ID NO: 26426 - DNA, 1458 bp, Zea mays
  Peptide Sequence Number=SeqID_69801
atgctccaaggtcctccccctaagacacgggggctgggtcccacgcgtcatgcaagctggcccagggcagaagaagccaaaccgccgcgcacggtgcgcgtaactgcccagcggttacaagcactcctcccctttcgcccagaccagcgggtgaaagggcggaccttcatgcaggcggcatgcaaccacaccaagggggcgcaccctttcgactccaacgcatccagcgtggaggccgaggcccacacgtcatgtaaccggcgcgccagttactacgtgcgagaagctgcaccgccacttgcgccagtactgcgccttctcgactgcggaaccagtgccgcgactcgaggcgacccagcgcatgacccaacagtgccaaccgagcacatcgatcacgggtcagtcagccacgggagaaggcgcgacggtcaatatggccaaaagtgggccgacagaaatggcggcggcaggcgggcggaagcagcggtcaagttgtctgcaggctcacgtcccctcctgggacagcgagagagccctctcccacggtgtcaagacgacgcgcctggcaggcggcacctttggcaggcgaagcaggcgacgcttcacctccgccataatgaccacgtcaaaaaagagaccgggaaaggggatactccgaaagcgatccttctccgcgaaggaagcgggccccgagcccccctactgatcagaggttcgaaggctggcccctcggaagggttcgacagccgcctcagagcactcgggccccgagccctcctagtgatcagaggttcgaaggctggcccctcggaagggttcgacagccgcctcagagcactcgggctccgcgcccaccactggtcagaggttcgaaggctggcccctcggatgggttcaacagccgcctcaagccactcgggctccgcgcccactactgatcaggggttcgtaggctggcccccgaagggttcgacagccgcctcagagcacgcagagcgagggatgactctgggtacgtccgatacatggccgaggctggggctacgctcccgaggtaccctaggacatttccgagaccagcaggagcgattctgtaatggaatcccatcagagggagcatcgagccctcggaccctatcaaacgggaccgggtccggcaaatcacctaagacggtctccgcctcgcccgacctagggctcggactcagcatcgaccccggaagacagactccgcctcgcctgaccccagggctcggactcagcctcaaccccgaaagacggactccgcctcgcccgaccccagggctcggactcagcctcgacatcggcagacgaacttcgcctcgcccgaccccagggctcagactcgacctcgacctcggaggagccttcgcctcgccctacctcgggcttggacccgccatgtcacagggaaggccatcattaccctacccctag

SEQ ID NO: 26427 - DNA, 528 bp, Zea mays
  Peptide Sequence Number=SeqID_69802
atgtccgcggtggccgtggcggctgctgctgctgctctggccggcgccgaagctaccgctgctgctggccttgctgtcaaccagcaccggcagccggggaagagctatgccacgggtgcgactgatccatgctctctgcaatatagcagtgtcgttcacagtagatacttccatctcaaagtcttcggtcaagtgtttccatggatctgcaaacacgaacatgttcaaaaaatcgctcaagtcttcggtcaagtttactcgaaggcagataaaccaaaatacaatcttttggtgatgaacttgtgcagctttcaggttgcagggcctccagctattgcaagaggagccctcacagagattgcttcaaggcttagaactaggactttgagagatacaagtactgccaataatcctccaccttttgcctcctccgatgatcctcctggaattctgaacacagtgtatatgaatattctgctcgcctctcctctcctaaaggccattttaaaggacgcgactgcagtatag

SEQ ID NO: 26428 - DNA, 481 bp, Zea mays
  Peptide Sequence Number=SeqID_69803
ggggtacgccgacagatactcgaggcagccttggtggcggttgacctcggcacacgggggcgcaacctcgccctatcggacggccatcagcatccgcatcgacttgttgtctccaagtgcgagcatggtgcgtgtcccgcgggtgacacacttcaactctaccgcagcggcggttggaaaggcgctcccctccttgtcattggtgagggagcactgcttagcaccaccacattccgctaccggccgtcatgaggacgcctctgctggtcattgttgcgacctattccagatggtcatccatgtgttcccctttcgttcagatggcgtctatgggatccaagtggctgcacacgtgcaggtccaatgcgccggagtcatcgttaggttgcagctcgaggatgacctgcttatccaggaggggtgtagtgtcagagcccaagaggaacgctacaagattgttacagtaatggcagtactatag

SEQ ID NO: 26429 - DNA, 777 bp, Zea mays
  Peptide Sequence Number=SeqID_69804
atggcaagcacagcctcagccctcaggatgtgtactttgtttttcatgtttatgtttcagaggacactgaaagacacaatgtttattcactcttctcaaaatcgtgcagttatcagagcacccggaatggacacactgaagatacctctaataacggaacacaccacaatcgatgatgtctctgtctgggagtggtctggctctgcgtatgatgaaggggctgaagcgtctgaatggttctccacttactttgggaagccaagtcgactagtgcgcttcaaagaagcatcggaaactaggccaaccgatccagattatgcccaaggttataagatcatgttcaccgattgcttcccatttctgatagcttctcagggttcactggatgcactaaatgagattcttaaagaacctgtaccaatgaaccgcttcagaccaaatattttagtggatggatgccacccatactcagaggacctgtggaaaaccataaagataaacaacctaacattcctaggtgtgaagttatgcaaccgctgcaaggtgccaaccattaatcaagaggatggagtacctggtactgaaccaactgaaactctacagacttttcggtccgaccaagtgcttcgtccaagccacaaaaataaacgacaggtgtactttgggcagaatttagtctgcaaggaatctctatcaggtgaaggaaaggtcatcaaggttggcgatccagtttatgttgtgcaggcattcgcttcttctaatgaagccccagcctga

SEQ ID NO: 26430 - DNA, 729 bp, Zea mays
  Peptide Sequence Number=SeqID_69805
atgccgccggaggcctttgccgaggactggcaccccacgcccgacgaccacatgggtattgttcgttggattgctgatcgtttctctgagtctgttatcagagcacctggaatggaacccttgaaggtccctctttctgtggaatgtgccacaatcagtgatgtctctgtgtgggagtggactggcgctgcttatgatgaaggtgctgaagcagccgaatggttttccacatttttggggtgcccaactcgactggtgcgctttaacgaagattcagaaactaggctgactgaccctgactatgcacgaggttacaaaaccatgttttctgatggcttcccttatctgatagtctctcagggctcattggatgcattaaatgagatactcaaagagcctataccaattaaccgcttcagaccaaatattttagtggaggggtgccacccatatgcagaggatatgtggaaatcagtaaagataaacaagttaacatttcaaggtgtgaagttatgtggccgttgcaaggtccctacaattaaccaagacactggaatacctagccctactgaaccaactgaaactctgcagacatatcggtcgggtgaagtgctgcttcgtagccacaaaaacaaacgccaggtgtactttgggcaaaatgcagtctgcaaggaatctctgtcagcaaatggggaaggaaggatcgtcaaggtcggggatccagtttag

SEQ ID NO: 26431 - DNA, 389 bp, Zea mays
  Peptide Sequence Number=SeqID_69806
atgttgctgcggtgtcaaccaccgcgcaaagccatctactcaacaccatattcaccaagccctcgcctgccatactcgagcgaccagtgctacatccttcggagggggtaacaacaccagcgaccactctgtctactattcctgcagcacctgctagaagaatcaagcagcgacacggcttcaacctttcgacggaatttcaggattggttcaagaagccactgactgtggagatggggacggccctagatgctctgttcaatctggatacgccagacacagttcgcctcgacaaggccttgctgggaattgctggagatgctatagctgagatccaagaggaggtggacgccatgcatgcagaggccagagcagttactgcggcttga

SEQ ID NO: 26432 - DNA, 669 bp, Zea mays
  Peptide Sequence Number=SeqID_69807
atggaaggctcttgggtcattaggacatcctactgctcagaggaggaaggatttcctcacctcctacggagttgcgcactacgcatggggatccgcaagaagcccgaatatgtctggaaggaataccgtgaaaatggaatagagaacaacaaaaatacccccacctggaggaaaagacttcaggccctgtcagggacagaccccaccgaggatgaccccaccattgtctacatggacggatacctccacactctcgacaaccactacgatgatctctcctcccactacacccacctaaactcccgggtggaaagcttggagcagcaggtcaaggaacttaagaaggagaaggcatccctccaagagtgtctcgatatagcagaaggcgaggaggccaacacccgtgaagcctaccgaaccctgaagatggattatgataataagctgaagaagctcgcccccacgaagaaaatccaaaagaagaccaagaaccaaggaggccaagctgagcggaggaagaaggcccctccagcaccaactcctgccaggatagagaatttgtccgacatcgaggatatgtccctagctagccttgatgacattctcaaggaatttggggacactttagaaaaagagttcggtggtacctcaaagaacgctcgcgtgtag

SEQ ID NO: 26433 - DNA, 111 bp, Zea mays
  Peptide Sequence Number=SeqID_69808
atggggtccaggcacagtgcttgctctgccgaggctgggtgccgaggtaaagaagaaggcgtcgagacgaatctccaggagttccaggacttcgacgagttcgaggattag

SEQ ID NO: 26434 - DNA, 348 bp, Zea mays
  Peptide Sequence Number=SeqID_69809
atggccatggagaaggccgcctccttcctctcctccctcttaggcggcggcggcggggagccggcggcgactgtgaaatctatcttcatataccctatcaagtcctgcaggggtcttgccgtgtcacaggcgcccatcacctccactgggttccggtgggatcggcagtgggtggtggtgaacgccaaagggcgagcatacacccagagggtggagcccaagcttgctctggtccaggtggagttgccgccggaggccttcgctgagaactggcagcccacgcccgacgaccacctgggtatgcctggattcattcatctgattattctctccgcaacattttgctag

SEQ ID NO: 26435 - DNA, 850 bp, Zea mays
  Peptide Sequence Number=SeqID_69810
atgcatcgcgcccttccaccttccgagcccccagatggggagcgcccgcggtccttccgtcttgtcgtcgttggaggaacacaacttcacggaagttggtaccttttagccatcgctcggcttcaaggattttcatcaggcagcccggccgcatcccctcgccggtggtcacccaaggcggtgaccaccagctcgatggtggggagaagcgaaccgggctgcgacctctgcccctccctcagcttcaaggatgttcatcatcctggctggggcagaggccggactgagccaaagctctacctcctgcgcgggttcgtgggtcaccttctccctcagcattcaggggagagggcgctcaccggcctagcgggagggtcggacttcgacaacgcggggctgctggctctggctcggctcccggtgccccctcccgccgcgagagcggttgtcgcgccgcgcgcaccggaggaccgcccaagacgtcgcgcgctgctagggcggcgttcgtgttcttgggctgtcctgcctttgctccggtacggtgcctctgcgcggaggtcggtgttcgcccgtccgggaggatccgagtggggatctgccggtgggcagatggcttccgtcgtcggcgcggaggtggtggcggctgaagaagtcctcgtcgccggcgggatcaccaccaccatccgcgctccgggcctccggctctttggctttgataacttgtcctcgcccctcgagtggggacgtgggcgagggccttgttgcagcagcgtccgccctgaggccatcgctgctgctgtttggccacctggagcggaggtcgttgtcgctgctgccggagcgggcggcg

SEQ ID NO: 26436 - DNA, 681 bp, Zea mays
  Peptide Sequence Number=SeqID_69811
atggccaccgccgcaccgggcgtgtgcgccgccgcccgggatcgagctgggacccagactaacctttttgaacgatctaggcttcctggaattaggaacgtggatttgctgtggagtctactactctcgagaatcttgcctaagctgctcggtcttcctggtattttgctgaagaaattccgaaaggaagcctcaaggaaaaataggtcctacaagttaactctaccggagccacccatccgcagtaggttactgatcgggtcctccaacggttggttgattactgcagatgagaggtcggagctgcaccttgtgaatcccataactggagaacagacaccacccgacctgtttgatctcggtgatctgcgcgatgaactctacttcaaggcatttgtgtttcccgatccatccaccactggaagctacatcgtggttcttattcatgagccatattcacgactttcgtttgcacgaccgggagatgacaagtggacctgggttggacaagtgaattactctggagaaattgatgcgtttgattttaccgcgtctcctgttaaaatgacagtaattatgaaagagctgaagtatcctataattaaatccaagaagcagatagtcgttctatttgacatgtggaaacaggtcaagctcctctgcggcagcagaaacagctga

SEQ ID NO: 26437 - DNA, 789 bp, Zea mays
  Peptide Sequence Number=SeqID_69812
atggctcgccgctcacttcggatcggccgaacgacctcctggatatcgggctgccccacccgatggtgtataagggaccccggcactcgattcatatctctcgcctcgctgttactcgccctcctcgccacaatatcgataattttgcgccgtcgcggggaaaacaggggctgccgcgggggaacttcggctagccgtcatccgcgcctccagtgtgggcctcagagccttccctcggttgcggggcgggcgctggtggcctcgccacctggaattgtcgccggggacttcaccaattggtcgccggacctctcctatcacgatcgagccgccgcgcagcgagggcggacttcctcggagcttaatctgcggtatggctaccattttcctactcgccgtctctccctctccgtttcgcacaaggttgcgctaggattaggactcctcgaggaggcaccggatacgatcatcctcaccaccagcagtcaggaaagggagcaggggcacggaggttaccttgttgccgaggaactggggcctatgaggcacaaatctggtggtttcaacaaggccaaccccatgcctggcaaggcctatggagctcggaggagggcagaggcgccgggcagctcaggcaggacgaaggggaggggaggggaggggcagggcaggtggtactggtgggcgcaggatagcccatggctactaatggctggggggcatatgcggactccgcttcgaggattacggaaaccgttgcacttcgaggattacggaaaccgttgctga

SEQ ID NO: 26438 - DNA, 234 bp, Zea mays
  Peptide Sequence Number=SeqID_69813
atgacgatgcagcttgaagtaattctaccgctggtcgcctatctggtggtggtgttcggtatctcggtttatgcgatgcgtaaacggagcaccggcaccttccttaatgagtatttcctcggcagccgctctatgggcggtattgtgctggcgatgacgctcaccgcgacctatatcagtgccagttcgtttatcggcgggccaggagctgcttataaatacgggctgggctgg

SEQ ID NO: 26439 - DNA, 240 bp, Zea mays
  Peptide Sequence Number=SeqID_69814
atggcaaactcaacttttcgctctggtggcatacccggtaagtcctttggaaacacatctgggaactcagacacaaccttgatcctctcaattgggctggggcaggaagacgaggtgcctgctgattctgcctctgaaactgatctcatgactgattgctctgacggttctggtactgatgctgaggatactgcctttggaactgctgatgttgctgaggtggacgttggttctgcctga

SEQ ID NO: 26440 - DNA, 547 bp, Zea mays
  Peptide Sequence Number=SeqID_69815
atggacgcgcttctccaacttctgacacgccagcctggggcccaggcccacgcgtcgagcaactggcgcgccagttgctgcatgcaagcaaccgcaccgccacttgtgccaccatcgcgcctcttcggttgcgaagcctatgccacgactcgaggcgacccaacagcgccagactggcgcgtcggtcaaagcgaccgaaagtgggccggcagtaatagcggcggcaggcgggcgggcgcagcggaggagcgcgcgacgcttcaccttcgccttaataaccgcgtcagaaaagggaccggggaagggggataccccgagagggatccttctccacgaaggaaccgggctccgcgccccccattactgatcaggggttcgaaggctggccccccgagggttcaacagccgcctcagatcgcgtgggcccgacacccactactggtcaggggttcgaaggccggccctccgaagggctccacggccgcctcaggctactcgggctccgcgcccattactgatcaggggttcgaaggctggcccccgaagg

SEQ ID NO: 26441 - DNA, 261 bp, Zea mays
  Peptide Sequence Number=SeqID_69816
atggagacgagccttggctggggaggggctcggctgggcgttgggcgctatgcagagggaaacaggatggccagcagaggactccggtcgagcattggaggaaacgcgccatgggagcaccgcgagctggaggggtctagccatcagagggagcgaggagtaggggcttgcagccggcagagaagggagggagagaagcgagggccgagcggcaagggagaaaccaagctggagctcgcgactgctgaagatggggcctga

SEQ ID NO: 26442 - DNA, 316 bp, Zea mays
  Peptide Sequence Number=SeqID_69817
ggagccggttatacgacgcctccccagtatgcggtgcagttgttcgaggagcaccggggctgaagatactattgagtccattgctctccacgggctgacgaccttttgtggctttcaccccttggagttatcaactcatcccattagcttgttccccgctgaaaaggaggacgacccaatgtggaaggaccgagtggagcatgccaaggatgtgtgggctctttacccaggacagactgctcacctgacggtgcgggaggaccttgtggtagacctgtccactgagctggtggaaaaggacctacaggtggagtag

SEQ ID NO: 26443 - DNA, 225 bp, Zea mays
  Peptide Sequence Number=SeqID_69818
atgcggaggctggttgatgccatcgaggggccagggtctttgctggctcgccacttcgaggctgaggtggttccgccttcaccattgccgacgactgctgccatgccccctgaactggcaaccccggtaggaccgcacgatcctggtggcatcggcaaccgcggtcgaccagtaaaatccttgcctgaaggcatcgccgcgtggtgcccgcaagcccccgagtag

SEQ ID NO: 26444 - DNA, 1272 bp, Zea mays
  Peptide Sequence Number=SeqID_69819
atggagtggggcctgcctcgggagctccagacccatctaaagccgttgctagatgccctgcgaaggctccgggatcgcggccttactacggctggggtcgtcgccgtgttctaccggtggagggttctgctgctgaccgagcccagcagggaggcacgttggctagcagccgaggagaagaagaagaaggacaaggagaagaagcgagcccacaagaaaatgctggcccgtgatgcactggagaagcaccattgggtgcgggcgagggaggggctaccgcttgaagcctctcccagcacgggcgacgacgacgaggagagggttaccgccccgtcaccgatgttcgtggcagggcgtaggggtctgaggagctggtggccgagactggtcgctgtgcccctctcaggcagcaagcgccaagcccacgcatcgtcctttaatgccacgaaggtggtgcagcgtggtgccaggcatctgcgagggcttcgtcctgccccccactctgcccaggagaccacccagaagggcactgaggttgttcagcccgctttcgggccaccggctgagcccgacaccatcgctaccgaggtggtccctgcacgcccggcgccactgatggtggccatccccgtctcttccggggaggaggcggaagcgggcgatactgcacagggtgtggcatcaccgacgttctccgacctcctatgtgccatccctgatacccccgaagctgcgccgagatcggggggtagcggtgatctcgctcgcgccacaccggatctctcgctatggagagggctgaccctgaactggatgtccattgagggcggaccgtattttgtcctcgacgacgtcgaggagcgggagatgtgggcggagctaaggactatgacccatgaggtcatgacgaaatccatggccaagtttgtcttcaatcgccgcgaacggggcatctggagctccaaggtggcggacttgacatcccgctgtgtgggactgaaggacgaggctgtggctgagcgtgcaaaggtggcggtgacagaaggaggtgagtctcggcgtcaggtcgccgaagcttcccttcgcgtcgacaccctctccaagcatcaggaggccgagcggtccgagggccgagccttaagggcccagatgggaggtcttgagaaggatctggagaccgctgcccagacctctcggacactatcccagaccatggagctaaaggtggtcgagctgaaggagatgtccgacgcagtggcagagattctttga

SEQ ID NO: 26445 - DNA, 333 bp, Zea mays
  Peptide Sequence Number=SeqID_69820
atggctctctgggacaaacggtcgactctgacaggtgaacagtgccgcgacagagtccgagcacagaagtcagagggcaccggattgtctggtgtggcaccagactgtccggtgcagctagaagacaaaaactccaatggtcgaccagctccgaaccctaacagttgtgctgatgtggcgcgcaccggacagtgcacagtggttgtccggtggcgcaccagacagtttgttgtaccgtcgtgcgacatggttgagctccaggctgaagaacttgtcttcgaggcgccgaacttcttcgcagtagacttccattcttgtgtcgtggcagtttga

SEQ ID NO: 26446 - DNA, 261 bp, Zea mays
  Peptide Sequence Number=SeqID_69821
atggcgcaagcagcgtaccaaatgaggttggtgcaagttcttatttatacgctcggcacaccccgaattggagggtcccgtctgtcattgagtgttgctattctagcaaagggaaggtaccttcggattcatgataaaaacatacacgatgagaagagcatgatcgtgacgaaggtttccgttactccgaagctacgcgcaagggagcttcggctcattcgcgggaaaaggaaccgacttaaaggagaaaaggctatttag

SEQ ID NO: 26447 - DNA, 498 bp, Zea mays
  Peptide Sequence Number=SeqID_69822
atgggcgccatccgagctagggaatcgtcgggcatggaggatagggacgagctacaggggacctcgcagctgggcactggaatccaagccagaggggcgcggcagaggaggaggaaggaggagcgcgcgagagcacggcgcgcaggggcagagggacgcgaagatgggcacgcggtggagctgagcgccggcaagcatcccaggcgcgccgcacagaggagaaactcggcgcgaagaggggcaagccagagagctccggtgtcgaggggatgcaggctccgggcaaatcccagggcgcggccatgggaggagcgacagggagaaacgccggacgccatggggacgagccttggctgggaggagctcggctgggcgttgggcgctacgcagagggaaacaggatggccagcagaggactccggccgggcgttggaggaaacgcgccatgggagcaccgggagctggagggggcgagccagcagagggagcgagcagtag

SEQ ID NO: 26448 - DNA, 255 bp, Zea mays
  Peptide Sequence Number=SeqID_69823
atgagggctgtcagccagcgcctggtggcgcaccggacattggtgtccggtgtgcaccggactgtccggtctccgaaacccttcgccttcgagatcctgcaccgggagagggcgaataaggtttttgtgaagcgtcctcacgcgactgctcgcgatcttctaggggaaccctgccgtgtatacgtcatcggccctgatgcttcgacgttgtcgaccctgctgattctggcctacgccatctatcagtatgtctga

SEQ ID NO: 26449 - DNA, 876 bp, Zea mays
  Peptide Sequence Number=SeqID_69824
atgcaggtggcgtgcaaccgcaccgtggaggcgcaccccttcggcttcgtcgcatccagcatggaggcccagacccacacatcatgtaaccggcgcgccggttactacgtgcaagaaactgcaccaccacttgtgccaatgccgcgccttctcgactgcagaaccagtgccgcgactcgaggcaaccctgcgcatggcccaacagtgccaatcgagcacatcgattatgggtcagtcagccgcgggaggaggcgcgacggtcaatatggccaaaagtggaccggcagcaatggcggcagcagaggagccgaagcagcggggaagcgacgcctttggcaggcgaagcgggcgttgtttcacctccgccatgatgaccacgtcaaaaaagggaccgggaaaggggatatttcgaaagggatccttctccgcgaaggaagcgggccccgagccctcctactgatcaggggttcgaaggctagcccctcggaagggagcgattttgtaatggaatcccaccagagggaggcatcgagccctcggaccctatcgaacgggtccgggtccggcaaatcacctgcagagactgatgggcacgattcaggtcaaggcttcgtctactcaagggacgcgatctcgcctcgcccgagcccagcctcgggcgggaacagtagtcccagaccaattctcgcctcgcccgagggcttcctcaagcaacgggcgcaccctcgactcgcccgaaccccagctcgggcaagcttcgtcgtgaagcaaccttggccaaattgcctcaccaaccgaccgtaccgcagacgcattcagtgtgaggatcgcctgacaccttatcctaacacacgtgcctcagtcggcaaggtcgaa

SEQ ID NO: 26450 - DNA, 339 bp, Zea mays
  Peptide Sequence Number=SeqID_69825
atgcatcgcgcccttccaccttctgagcccccggatggggagcgcccgcggaggaggcgtcctccagccatgcgagggaaggcgaactactgcttcctggacagggtgcaactgtccgtcctccaggaggttgcttctgctgaagcggttgcccccgctgacgagaccgtgagcgctacctgcacttcgggcctccggctctttggctttaatggctggttctcgtcccccgtgaggggacgtgaacgagggccttccagcggtagcgttcgccctggggccatcgctgctgctgtcttgccatccgagacggaggtcattgtcgtgctgttgatgtag

SEQ ID NO: 26451 - DNA, 1038 bp, Zea mays
  Peptide Sequence Number=SeqID_69826
atggcggacaccgacaggggaagccatgggagggaggtgatggtgaaatttcctgtcatccctagccgtctcgccaagattcagatgttttctcctttgtggagcaccggttatgccttcacagcgtcttctagggaggtggtggccttggaagtcgccttcttgggggccatcgctcgtttgctttgtcgtagcatgaacggtaacctgacgcgtaggtgggtctccaagtactgttatacccctggttacctgctacatccccggaatattcccccctacgaggtcattatagttgtcgggtaccgtcaaggcttcgtctactcaagggacgcgatctcgcctcgctggagcccagcctcgggcgggaacagtagtcccagacgaattctcgcctcgcccgagggcctcctcaagcaacgggcgcaccctcgactcgcccgaaccctagctcgggtaggcttcgtcatgaagcaaccttggccaaatcgccttaccaaccgaccgtatcgcaggcgcattcaatgcgaggatcgcctgacaccttatcctgacaaacgtgcctcagtcggcaaggtcgaacctcaggaggaggtctccgcctcgcccgaccccagggctcggcccccgcctcggcctcggaaggtggtctccgcctcgcccgaccccagggctcggcctcaaccctggcctcggaaggtggtcaccacctcgcccgaccccaaggctcggcctcaacctcgacctcgggaggaatcgctatgggggaacaagaccggcgtcccatccaggctcgccccggtaacaagtaatgatggctccccgcgtgcgtccatgacgatgctggttctcagcccctacagaagaaaggagacgttagcaaggtcccagcagccccgacagctgtgcttctacagggctcaagcgctcctccgacggccacgataccgcggaccccccggggttgaaacaccgacagttggcgtgccaggtaggggcctgctgcgtgttgacgaacaacttctgaaagtcgcctag

SEQ ID NO: 26452 - DNA, 879 bp, Zea mays
  Peptide Sequence Number=SeqID_69827
gcgggggtgctcatcagcggcgaggagtctggcctatctagggcgaaattgatcaatcaaactggtcagggagcttcactgggtgctagggaagacatgggtgcgaggaatttgacaatggcttaccggagagctcggtccacgcgtgcaggcgggcgaccgaagaccggcgagggtgatctcgggcttctggagaagttctgccgggtccgagggcttggaaagcttcacgggccactagctgagctaaccgaagcactggcgcgacttgggggtgactggagtgggctggccacggcggccgaagctctgaaagcttggcgggcggtgatcgggcccacctgtcagcttcatcgttctcgcccatgccacactggcgcgtccgccaccgagcccctctcgccccgtcgcctcgccattaaggcacgcccgacctcagcgaccaccccgccactgtacccgacccgtcccctcacccccccccccccccgcctacccgagccgtctcaatcgacgttagcgccattcccgccatcacggcgagctcgtcagtgctcgtcgtcccctccacccttctccctctcccgggcgcatataaaaggacccgcccgagccccgttccctccacaccagctccggccatctcctccgctttcccccgagccaatcgagctagcgtcgccgcactcccccgtcgctccggtgagccccgctcttcgctcccaagtgagttttggtcaagttaaactagtgcttgagctccgccacacgatcacggtcacgaggcacacctcctcgccccctattgcacccaactacggcaccggcgacctcaccgccgtggacacccgccaccgtgccgcggacctgccgccatag

SEQ ID NO: 26453 - DNA, 579 bp, Zea mays
  Peptide Sequence Number=SeqID_69828
atgcggggtgacgcgggtgctgaggtggcgctgtcgggcccccaggacccacctgccaccgtcgaggcaatgcctttgggttcccaagttccagctaggggtctagaggcggcaatgccgccaacagctactgcagatccaacggtggtgataccgtcgaatataccgtcggcggctctcaaggaaaccgagacggcgatcctgcgggagtgggaggcgctcgagaccgagcaccagcgccttgtcgactggtgcacccaactggaggagtgcactaaggcgacgtcctgcaaattcacttcagagcggaccgagcttgagcgggagcgcgaggacttcaaggaggacctccgaaaggtgtctgatcgagaccaggaggtgacccggaaggagatagggctggtcaagaagaaggagcacttggaccaaatggaggaggagaaggacctcgccttcaaggaggagatgtgggaaaggcggaacaagttgttggtcgagtttgagctcgaggcagaggagaaagagaagcgattggaggggaaagagtgggcactggaggagcaggtccgccggttctag

SEQ ID NO: 26454 - DNA, 132 bp, Zea mays
  Peptide Sequence Number=SeqID_69829
atgtctctaccctcccagcgcccttcctccctacgccacgccaccccctcggctgtccagcaggaagtccagcacctccctctagttagtccctccgacgttctaaatgtgtatggttacggttccgggtaa

SEQ ID NO: 26455 - DNA, 150 bp, Zea mays
  Peptide Sequence Number=SeqID_69830
atggccaaatcattcatcatcgccctcgaaggcccggctctcacctgccactgcgtcagagatccacccaagaacctccaggagctgtatcagctattcgaaaaatatgccagatccaaagagctccaccagcgcaaggtcgagtcctag

SEQ ID NO: 26456 - DNA, 243 bp, Zea mays
  Peptide Sequence Number=SeqID_69831
atgaagacttgggtcactgcccttcacgtagcattcccagtaaacaagaaggggttgataagaaaatggctagtattggcccaagtgcttgaactaggagatatgccgccacgcacggggaaaatcgcgcgtaagtccactggaccgattggcgtgccttggcatcagctggctccaaggcatgaggagagcagcatcggcaacaatgaccccattggagacctagaagcccaggtggagtag

SEQ ID NO: 26457 - DNA, 945 bp, Zea mays
  Peptide Sequence Number=SeqID_69832
atgcgtggcccccgggggaaggatgtcttcgcccgagctccaggagtcttcggcgcggatgctggaggatcgggcgaggggcaacttgttgttgttccgcctgcggtggcaaccacggcgtctaccgcggtgcttggggtgaagggtagccctttcagcgctggcggcgagatttcggcggccactgccgtcaaggacgaagcgggcactgtgtcccgctggctgagggaggcgtcgcagcagctgtcgcagcagctgagtcaagcggccgacttcgccgaccgcgtggcgtcgggtgcccttactgcagatgtgtctgccgaagtcgagagacttcgggcacagcacgctgacgccatccaggagaagtcggctgcggatagcaagtgccacaagctggcggagaaggtggccgccctggagggcgagaggacggacctccggcgccagctggtggaggagaggagggaggccaaccaggccatcgccaaggcgcaggcggcgcaggcggaggccaaattggcgcgggtggaggggagtctcgccagccagcgcgccgaggaatgggaggtgcggttcaacgctctgcaggcccgcatggagagggccgaggcctctacgcgctcggaagttgagcggaccggcaaacagctcgtggactcatacgcgagtgttgcgtggactgctgacctcgaaggggctatgaacgcgctgtcccgcgaggggtgcagtcactatgagggcttcgaccgatccgatgaagactttgggcgcgagatttttaaggtcgaagaccctgtggtgaaggactccgcgggggccctcttcgaccggatgtggggcccctatggtcgggaggtggttagggagcggtctgaccgggcgagggatcagatggcgcgtgccgaggacgtggaggacttcagacctctgaaaagtgcgtag

SEQ ID NO: 26458 - DNA, 153 bp, Zea mays
  Peptide Sequence Number=SeqID_69833
atgttggacgaggccgcgggatgggacgacctcgtcataggccttcgtccggcgacgtgtgggacgaaggcgaggctggcgaaggcatcgagcgaagggtggcgtcttcgccttcgccccaacatttgccctccgagggaccagttcgactaa

SEQ ID NO: 26459 - DNA, 711 bp, Zea mays
  Peptide Sequence Number=SeqID_69834
atgcagtgcgctctcgatccgtgcagagcgcaggtggttggatggccgcccgtgcgcaactaccggaagaataccctcgccgccgcgaccgcctccaggagcaaggcgccgacggaggaggccgcatccggagctgggcccatgtacgtgaaggtgagcatggatggcgcgccctacctcaggaaggtggacatcaagatgtactccagctacgaggacctctccctggcgctcgagaagatgttcagctgcttcatcgctggtcaaagtggtctgcataaatcatcgagcaaagacagactgactaatggctcaaaggtggatgccctcaaagatcaggagtatgtccttacatatgaggataaggatgcagactggatgcttgtcggtgatcttccctgggattattttacctctatctgccggaagctcaaaatcatgaggggctctgatgcagccactgccgtgatctgtggccacggcgtgggcaccacggcggacagcgacctctgcaccttctgtggcttccccatgtgccgcccctgctacgagtacaatcgcaaggatgacacccaggcgtgcccgcagtgcaagaccaacaagcgccaccaagtgttgagttacattgcccgcaagagccgcaagagtgaaatttgttggcttcaacgattcacaaaggacaataatcaaagatgttattcgcattgctag

SEQ ID NO: 26460 - DNA, 165 bp, Zea mays
  Peptide Sequence Number=SeqID_69835
atgcagggcctgttacaatgggccggatcacacatgggcctccatgttggacgaggccgcgggatgggacgacctcgtcacaggcctttgtccggcgacgcgtgggacgaaggcgaggctggcgaaggcatcgagcgaagggtggcgtcttcgccttcgccctaa

SEQ ID NO: 26461 - DNA, 444 bp, Zea mays
  Peptide Sequence Number=SeqID_69836
atggaagcaaagaggattgtcagcattcagagtaggtcggctgtccggttggttaaagaagaccaaaaggctttgaaaaagcaaaaaattgtatcggagcagaagatatcagctcccaagaaatggaagcttgtcaagatatcctctgagaagacgatggtacaagatgtgccgaagcagactatgagcccttcttcgtcttctgttgctgaggtctcgaagattttgaagagtttattgctaagcaaagctttgaaaatgcaacaagatgacgaagatagaaagaatgaaatcgttgtcaagggttttgaagataaaatcaagaaactcgaagactctttgaaagaaaaagatgatttgctgcactcaaccgaaggatcgctcgtgttggggtcttcttctccaccgaaggtcctcaagacaaaaacacctttggcaagataa

SEQ ID NO: 26462 - DNA, 174 bp, Zea mays
  Peptide Sequence Number=SeqID_69837
atggagagtcatgatctccgggcagaatgggaatcacggcttgtgggtggctatgagatcgatggttttggttatgactatgatgctggttgtcagcattgcaaccactgctcaggcgaagatgaagctgtggaaggagacttccaggagttccaagactacgacgagttctag

SEQ ID NO: 26463 - DNA, 141 bp, Zea mays
  Peptide Sequence Number=SeqID_69838
atggccgtgatgggttcaacatcggaaaagatgtacctctgccaggtgaggaagcagcaaatttttgttgcttttgtaccaaggtggtgccaaatgaagaaaaacaagaatgaagctgcgggaggacctagtcctccataa

SEQ ID NO: 26464 - DNA, 411 bp, Zea mays
  Peptide Sequence Number=SeqID_69839
atgggccacaggtgcaaaagtctcatcatagtcaataccctaagtccgttgaaaacctctggccacaagacgagctttatatcgctcaatagacacatcagatttggttttaaccttgaagacccatttgcacgtgataggtacaacaccagcagctgcaatagtgccacggtcatgaagatgatacccctaattaaaaacaacatgagagtcatcattgttagtacaagtatcagcaacaggttcatcatcaggactggccgtgggagtagagcgaggacaatgaatccacaccgttctatgcatgagcaccagggcaagaaagctgagcaagagtaccctctgaagtcaaaaactggcagaaagtatcagataaatattcaccaccagaatcagaacgaaaggttttaa

SEQ ID NO: 26465 - DNA, 2034 bp, Zea mays
  Peptide Sequence Number=SeqID_69840
atgggcagcaacacggaaagggccaggaaggcgttgggcgccatgaagctgatcggtttctctaagaagcaggccatcccagtactcaaggaactcctcaaaatcttcaacaacaactgggagcccattgaggatgagagctaccgtgccctcgcagatgccatcctcgataggcaagacagcaagcaaacccctccctcccaacagggcacccaagcagcccatgcggacttggagcctcttagatcaacaagggacgatcggcaacaatatctttctgctagccttgatgacacatgtgaagatgataatgaaacacccctggtcaagaggcccaggatgggcaccgctaatttcagaccagagctgcagccaccacagcaatccagtgtttcaacccaaggtgctctgcctgcttcaccacaaacgagtcgtcggcaaactcggtccttgactgtagagccacacgctgctggccatgaatatcctttagctgtcaacgatgctctagttgtgaaagaacccaaaccagaaccacaaattgatagagcagaagattttgtggctggtcctaatgccacacaactcaatgatggatcttcagattcagaacaaacttcgggttttggtgcaagaggcaacatagttcaccaagctcaaagtcttggcaggagcctgcaagcagccgcagtgtgcaagaatggggtagggtctacagttcaaaatactcatgagacttcgattgtggaggtggacgttgcttcctcagccaatggtgagttgggcactatgcattctgaggttaatagggacagtggcagcttgcataatgaagtagttgttccatttgtgaagccaatctcttgtgaggctgctgtgggcataagtgatgatgtggctggtgggtcatcagtccttgaatcctcagaaccttgtttgcagaattcacttgttgcttggaatcctgagttggctcactgtaatcaaaagacaacccatgatactactgatatatccaaaggcgaagagcgggtaagaatacctgtagtaaatgaatttggcagcgagacctgtcctccatccttttattacataccaagaaatcttgtcttccaaaacgcttatgttaacatctcgatttctcgaatttgtgatgaagattgttgtgctgattgttctggcaactgtttatcagcgccagttccatgttcttgtgcaagaataacagggggcgagttctcctatacacttgagggcctgcttaagacagcattccttgatgaatgtacctcagtgaatcatttcctacaagagcaccataggttctactgtccagtttgccctcttgaaagatctaagaacgaaggctcacctggtccatgtaaaggtcatattgtcagaaaattcattaaagaatgctggagtaaatgtggatgtggcatgcagtgtggaaaccgtgtgattcagcgtggtataacatgcaaattacaggtgttctttacacgtgagggtaaaggctggggagtacgcacagtggaagatctcccaagaggtgcctttgtctgtgaatatgttggagagatactaacaagtgctgaattgcatgaaagagcaattgagaatgcaagaaatggtgtagtattgagggatgaggacgcttgtagccttgatggttcattttatgggaatgtcgggcggtttatcaaccaccgatgctacaatgcaaatttagttcagatccctgtagaagttgagacgcccgatcatcattatcaccatctggcatttttcacgaacaagaaagtggaggcatttgaagagttaacttgggattatggcatcgattttgatgacatggaagggcccagtaaaccgttcagatgcatgtgtggaagtagatactgccgcgatccgaacaatccaagtatgttgccattttcagtgcttcctttggatgtgaacggagaaccatgtatgtatgatggtttgtttctggcagggaggatgggtagagcagctgctaagcgaaagtag

SEQ ID NO: 26466 - DNA, 1089 bp, Zea mays
  Peptide Sequence Number=SeqID_69841
atgacatgcacggagaaaggtcaggagcatgaccgactcgccctggacccgcgtcgacgagcgttagtcggctcgcggcttcgaccgtcactaccgtcactaccggaatcgaccgtcacacttgacaaagagagctcggcgaacagtacatcgacaaaggcttctttgccgagtactttttctcgggcactcggcacagactttaccgagtgtcagacggtactcggcaaagaaaagcggccgtcacggcgccgggtgacggagatgacgtcgttgtcgagtgttctaggtgacactcggcaaagaagttacctttgccgagtgtcttctaatacactcggcacagaagttacttctttgctgagtgcctaccagccagcactcgacaaagaatccatcagcgggtcccttttgtcaggttctttaccgagtgatctgtatggcactcggcaaagcgtgcctctttgtcgagtgccagggcaaccacactcggcaaagaagctataccggtgcctaggtcttggttctttaccgagtgctatagtcctgacactcgccactatcgtctcctccctgccgccgtcacggtcttccttcgccgccgtcgcgtcttcctccgccgccgttgcggccctccctccaccttcctcccgcctgcgggctcatctgcgccgcccctatccacatcagccatcgcggatcccgaccgccgtcgcatccgcggccatcatcgtggatcctgaccgctgcccgtccgccgtcgcggaaactgtccagatctgcggccgtcctcgtggatcccggctgctgcccgtccgccgccgcggatcccgccccttcccgcatctaccacgggcggatctgggcagatcccgccccttcccgcctctgccgcgggccgccgctctccgccgtccacacctgcctgctgtgcccagccgcgacttcttccatccccggcagtcgtcgtccgtcgtccgcacttgcctgctgcgcccggttgctgtcctcagccgtcgtccgcctgctgcacgccacaaacagtcgctgcagaggagaagatttgtgcaactgccatcgacccgataa

SEQ ID NO: 26467 - DNA, 801 bp, Zea mays
  Peptide Sequence Number=SeqID_69842
atggctgctatggtgaacaatgttaaaccgtatatgattatgagtttgtctaaatttaaaactgctaaagccatctggtctcatttgaaggagcgttttgttcaggacagtggtgctctattacacactctcatgcagcagacacatgttattgagcaaaatgatatgagcattgatgagtactactcagcctttgatcgtctgatgagtgctttgacatctatggtgcctgcttgtactgctgatccatgtccagctcataagtttattgagaagttcttcacttatagatttgttatgggcgttcgggccgagtttgattctcttcgtgctcgtttacttcaaggttctgacactctcacaatggctaaggcgtttgtattggctgctgcccagaaacctaagaatgtttttaagccttgtgatcattgtggcaagaccaatcatcgatctgagctttgctttgtcaagttccctgagaagttgactgatttccgtgcacgacgtgctgctcgtggtcgtggtccaggaccatctactagaggcttagttgctattgctgccacttcatccacttgtacttttgagtcagcctgggtacttgatttaggagtctccttttatgtcacatctgatcagtcaaagttggcttctactacacctgtcacagattgtgctttagtgcagacagctgatggtactgtatgccacattactcataagggttctctttgtgatccacactttatagttgtaggatctagaacaccggctagagggggggtgaatagacggttttga

SEQ ID NO: 26468 - DNA, 333 bp, Zea mays
  Peptide Sequence Number=SeqID_69843
atggccagagtaaaccatgtggtcattgatgaaattaggttaggggaatgggtcggggaaggtccaatttcgtgtccgccgctcgggagcgccggtcattgccccgttcggccagtctgcaagctcgccggagcttccccgcgctcaccgtcgtcgaggacctggcgcgaaaacgaagaagaaatcgaagtaactgaagagaagacatcaccaccaccttcagaatctcaggcaggaaactgtttctaccttgatatctgcgggttcgagcctgactcacctatcaacgaaggcaagccccggtgcatttgccaccttcctttatgtttttaa

SEQ ID NO: 26469 - DNA, 360 bp, Zea mays
  Peptide Sequence Number=SeqID_69844
atggccgtgatgggttcaacatcagaaaagatgtacctctgccaggaccgtctcgatataggcctgctgaccgaggaccctttaactggtcacatgcctcgtcatgggcatattgcaataccttacatgaagaagttcatgtactgtattcgcaactgcaccccagcgtacctgcaaatactgtcgggacagaagccggaccttctcacgaagcgggagaagcttttggtggtgaactggaccttttcagatgccgtccaagacccgatcgcaggatgcagccggaacctccagtgggagggagtccaccccaaatccacctcctgttcctcccacgcttgccgagtgaaagtcgcctag

SEQ ID NO: 26470 - DNA, 453 bp, Zea mays
  Peptide Sequence Number=SeqID_69845
atgtgtactggtcactttgccgagtgtaacactcggcaaagaacctctttgccgagtgttagaaccatatcactcggcaaagaactaagacctgggcaccggtataggttctttgccgagtgtaatggctctggcactcggcaaagaagcacgctttgccgagtgccataccaagcactcggcaaagtacctgacatggggacctctctggcggattctttgccgagtgctgtcaggcagacactcgttaaaggtaaactcctttgccgagtgtcatctgtgacactcgataaagacgccgtctccgtcaccctatgccgtaacggctgcttttctttgatgagagttcacaacactcagcaaacacttagacgaatgttcgagaaaaataattggaaagaagggtttccgatgactgagttgcgattctctttgcgcagtggatatcagtaa

SEQ ID NO: 26471 - DNA, 423 bp, Zea mays
  Peptide Sequence Number=SeqID_69846
atgggcaagaacaacaagcgcaagcgtgagccgactcctccatcggaggagtttggtgactcagaatactcggaggaggagttctcctccgagcccgaggggtctccggctcccgtctctcccccggcgtcgtccgatgactcggacgactcccaggggatagccgcggaggtctggacatatatccgggccgtcgagcgcgccgggctcgaaggctcggatgagtcggagtactcctcggatgaggaggactcggacggcggcgacgagggtgaagacgacgacgacgatgacgatgacgatgacgacgacggcgacggcagtagcagaggcggcggcgacggcagcagggacagcaccaagggcggcagcaggggcagcaccaagggcggcggcggcggcaggggcagggccagtggctag

SEQ ID NO: 26472 - DNA, 1521 bp, Zea mays
  Peptide Sequence Number=SeqID_69847
atgagggatggcggcggcggcggcggcagcagcaagacgagcaagctgtcgtggtccaaaagcctcgtgaggaagtggttcaacatcaggggcaagtcccaggacttccatgccgatgctgcagcagttggaactgggagtgtgaggtcaggtcgaggggatggagattggatggatggcagcttcactaggagggactcctacggcgccaagaagagcagaacagagagggcgtcgcggaggagccacgagcggtcgcggcgcagcaagatcgacctcgatgccgccgaggccaccgtcatgctcgactacaggttccaagaaatcgtcccgttgaacgccgggaacgtcctcggcgccgaggacaacggccccgcgaggaagtgggtgtcgctggtcaggcggacgctgaacagcctgccgggaagtagcggcagcgggagcctgcagacgccgtcgccggcgccgtacctggtggcggagatggacgcggacttcgagcggtcgacaacgcaaaacaacccgtccttcttccaccggcggtcgttccactctgggctcagccggagcatgcgggtggacggcgacctcctcgccggccctggccccggccccgccaggctcgagcgccggtacagcgtcaacgaccgcgtcatgtacggtagcaggcccagcgactacgaggccaactgccagtggggcgccggtcagttggtcgatgaggacgacggtggcggcggcgagtccccggtcacggtgttctctccgatgtcccacggatatggaaatgctcctccgcctatggaagaatgcaacgggtcagcccgtggccttgctaggtactgcctggttgcgagcaagcagatggttggactgttcctgatgatctgggctcggaaagagatgaagaacgacattaggaatctgaaggtgtcctgcgttgggaggggattaatgggctaccttggaaataagggctcaatctccatcagcatggctttgcaccaaacgagcttctgcttcgtctgcagccacctgacatctggtcagaaggacggcgacgagcaccgcaggaactccgatgttttggagatcctaaagaagaccagattccctagggtttgcggacatcggataatctggctcggggatctcaattaccggatcgcgctgtcctaccgatcggtgaaagcgctcgtggagatgcgtaactggaaagcgttgctggaaaaagaccagttagctaaggaaaaattggcaacccgtttatccaggtgcgaccgcatcttgtggtacgggagggggctcagccagctctcctacgtccgaggagagtcgcgcttctcggaccacagacctgtctacagcatgttcattgccgaggtggagtcgatcaaccacagccagatccagaagatgagttcttggagctcccagctggacatagaggaactgctgccgtactcgtatgggtacacggagatcgatcactatgggtacacagacctcaatttctactga

SEQ ID NO: 26473 - DNA, 705 bp, Zea mays
  Peptide Sequence Number=SeqID_69848
atggagaagttggctgtgtacagccaaaagactgctcggtctgggtgcaccggactgtccggtggtgcaccggacagtgtccggtgcgccaggctggcgtctgtcaactggctgctcttgggacttcgacggcggtgtacggctataaatcactggactgcccgatggtgcaccggactgtccggtgagccaactgtcggcccggccaacggtcggccgcgtaatccgcgcgcgacgcgtggcagagccaacggtcagaagggggcaccggactgtccggtgtgcgtcagaagggggcaccggactgtccggtgtgcactggacaacgtccggtgcgccaacggctttgaaactccaacggtcggcttcgccaaagaaggaaagaaatccgcaccggactgtccggtgcgccaggtgacagaaggcaagaattgccttcctggaatgctctcaacggctcctagctgccttggggctataaaagggacccctaggcacatggaggagtacaccaagcattccttgagcatttttgatcactcacacttcattcttgcgcacttgttcgacattcttagtgatttgagctctgttctaggcgagagactccaagttgtggagattcctcgcaaatgggaaaagagcaaagtaaagaagaacaccgtggtattcaagttgatcattggatcacttgagaggagttga

SEQ ID NO: 26474 - DNA, 237 bp, Zea mays
  Peptide Sequence Number=SeqID_69849
atggcaaatggtgaaagtgaaggtcatacagcgcgaggacgtggcagagcggattgtgtcgccgatgtcgtcgaggactggtgggacacgtgtctagaacatgggagacaagtatggagtacgatactcatggagttgtcggtggttgagcctcaaaaccacctaatgctacggatggcgggttttgctacgttagggcctcaaaactcggcgatgcggttcgagcagaccgactaa

SEQ ID NO: 26475 - DNA, 402 bp, Zea mays
  Peptide Sequence Number=SeqID_69850
atgggtttgaaaaccctgagtatggagggtactttcgcaagtcttacccgtctaaagaaaaagactctcaaggatatgctggcttttgggaatcaaggtaacaaggaaaggtgtcgaagtaaaagttgttctccactggaggattctcggttcgcgagccaaattcctcctctactacggattcttcctcgtgttctatacatgataatacatgtacatgaatgctcatgctatgtcatgaataagcaatcatacaatagaaatatagttgatagcaaaagggaaaggaaactgatgaacggtattgggtcgaatctagcccaacaagcccaattccacgcggaatccgagtgtgtccactcccgcgctggcagatttgcgccgaggtccctggcgttttga

SEQ ID NO: 26476 - DNA, 98 bp, Zea mays
  Peptide Sequence Number=SeqID_69851
atgactccgaccaccaccgaccatcatcaacccatcgacgtgttcgtcggaacctccccgatctccgaggacacttcaccggagctagaccgccgccg

SEQ ID NO: 26477 - DNA, 543 bp, Zea mays
  Peptide Sequence Number=SeqID_69852
atgaatccgttcgccgtggtcaacagggagccatatcctctggacatcagaggagaactagatgacacaacagccttcaaaaacttcaagaagtggggaggtatagaattccctctaccttttggaagagtactcagccctatagaaagtttcatccatgaactagatgagaaggcaatggaggacacagatattgcagttgaactttacaaactcagtgtttccaccctagatctattgaaactagcatccaaagaggaacagggtgcttatgtcggtgcatggtacaatatgcttttgtcctgtgctcaagaattgaagcatggtgtggcactttggcaagagttttatcatgcaaatgtctgcgacagagtagtttctgaaggtggtcactacttgattgctcttggggagatatatagagttgcacagattttatacttatccttgcagtgtttcaagacctgggttcttgcagatcctggaatgttgagtaaaatgttgtcttgtttggacagctgtagttttcagcggaacaaataa

SEQ ID NO: 26478 - DNA, 1014 bp, Zea mays
  Peptide Sequence Number=SeqID_69853
atgtctccttcctccctcatgcgtcgcgtcttttcacctcccaagcccccggatggggggtacccgccgtcttctcgcctcatcgtcggaggaacgcaactccgcgggagttgggagagggcgctcactggccctgcgggcggcccggacttcgacaacgcggggctgggtcgacggcgggcgtcgtcacctttagcgtgtcgggcccgtcggcttggctcccggcggcccctcctgtcggagggcggctgctgcgccgtgtgcacgggaggaccacccaagatgccgcgcgctgctagggcggcgttcgtgttctggggtggtcctgcctttgcaccgggatggcgccctcacgaggaggtcgatgccccactcacccgggagggtttgagtggggatctgccggggagccggtgggccctgccgtcggtgccgaggcggaggcggctcgagaagtccccatcaccgacggggtcaccgccaccatccgcgcctctggcccccagctcttcgcacctgtcctcgcccctcgagcgtcggtgtgggcgagggcaagattgcagcagcgcccaccctgaggcctgcgctgctgcagctcgaccatccgaggcgggggtcgttgtcgtcgtagtcagaacgggcggcggcgagccgctcgagtccctcggctcgatcggccttgttgtctggggctcctctagcttagttaaggagaccccttggccgctcttcgacgagccgaggccagggccgggttgtccgtcagcggggccgacgccggagtcgatcagccgaggcctcgggtcgggctggcgcccttggaagatggtcggccgaagtcccaggggtaaaccggccgagccgcctgctcgggccggattcccggagaagtccctagactgcgtcgcccgtccgaggctgggtcggatctcgctgaaggtgtcgtcgatgccgagggtgctagcccccttccagcgtgaagacccgagcctgcaggatcagatcgccttgtag

SEQ ID NO: 26479 - DNA, 390 bp, Zea mays
  Peptide Sequence Number=SeqID_69854
atgacccccgaccgtcgccaaatgcaaggcgcgaacgcccgaccgccgcgaatctcacctgtcgcgaccgctccgcaaacgccgcgaacagcccgcacgtgtgccgcgttccttcaaggtaactctggtctgttcttcaccaatcttccaagggatgatgttgagaggatgtttcgagaatttgaggagcatgattttgcaaggacaggatgtactgcggtagatacggttgagcttaaggaaggccctctggaacagttcacacatgagatggagccctttctacgcaagcaaggacttccagttcgcttgaacaaagcattatttccccagggatgtactccggacgaaggttataatgatagagctacgaaggttatacctccctaa

SEQ ID NO: 26480 - DNA, 444 bp, Zea mays
  Peptide Sequence Number=SeqID_69855
atggcttcactaggtgctagggacgacgtgggtgcaaggaatttgaaaatggcttaccggagagctcggtccacgcgcgacggcggacgaccgaagtccggcgagggtgatcccgggcttccggtgaagttctgccgggtacgaggacttggaaagtttcacgggctaatggcgaagctaaccaaggggttggcacagcttggacacgactggagggagctggccacggcggctgaggctcggaaagcttggcgggcggtggcacggcgtgctcgggtcaagttccgcgtcaccaaggtgccagcgtcagaatgcctggtcccgaggtcaagctgcgccaaaaccgtgtcaaatgaatttggtttgagttcaaaattttccagagcatgttcaaggaaatttggcacaactttgatatttggacttcctggttttgagttttga

SEQ ID NO: 26481 - DNA, 222 bp, Zea mays
  Peptide Sequence Number=SeqID_69856
atggttaaaaattttggcagcaaaacagtgcaaatagcaatgaatgctgtggtaacttcacacctatccgtctgtttatatagtgatgcaggaatcaatctttgtcaaggcaaaggttataaaattgtatttgatgcactgatatctgtttatgagaatcaggttgctgtatcaagaaggatgtcattattcgaggactgttatcagctattgtttgagtga

SEQ ID NO: 26482 - DNA, 426 bp, Zea mays
  Peptide Sequence Number=SeqID_69857
atgagcagattgatgcaagaaagctgcaagagaattctgtttggtagtgagctttttgaggaatatattggtcaactggcaatggcatcaatggcttcacttgataattttggtgaagatgagcagattgatgcaagaaagctgcaagagagaatgcagtgttatcagtatgcactctttgtgcactttaggctattcttctcatctgttcttttccagggacacgaattaacaaatctggaaggagaacgcatggtataccttggtcgaggcacccgcgaccgaagcaatattagaattccttcctctcagacagaggggcaagctccttttcctttggatcctccagggacgggggcgtgggaatgtaggggaaagaggatgttggcatgcggggatatgatcaatggaaggcgcagtgagtag

SEQ ID NO: 26483 - DNA, 537 bp, Zea mays
  Peptide Sequence Number=SeqID_69858
atggcaccgaagagagctagctcgaaggcagccccatccatcgacgaagcagtgaaggcagcactgctagccgagaaaaaggtcaaggccctcgcagacaacacccaccaagaagcctgcgaagacgacgcactcaacaagagacaacgcaacgatcaacccactccagaaggcaccctccgcacctgtagctccagaggacaaccacaagaaccacccccaggcttcactccactagagggcaaggacgccacagaggacggcgaagtcattggcatctcagcagaagaacagctacgggccctgcgcatcaagaaccgtaaccttcaaaagcagaaagaaatcctcgaggccaagcgcctacgtgtctccgtgcaagccaaggtgcgccagatgatacgagacgaggagcagagggctccggaactcgagcaagagattgcgctcatggcatcaactacctcgatgagcgaagccccctggcgccgcaactgcaagtgtcaccatggcccgccaacttcggggcagggaccttga

SEQ ID NO: 26484 - DNA, 236 bp, Zea mays
  Peptide Sequence Number=SeqID_69859
gcccaattgattggatcagcaacgaagttgaagcctttgaagaaattttgagtggtcgcggggatgtctgcgccttctcagctgagctatctcctcccccagagcccttcgagccaatggccgacccagaagcaaaaagagaggaagaaatcactaaaatggccgaagctattttggatgaagctatttctcaactgttaaacgaagctgcagaagtagttttaaaagaagaatag

SEQ ID NO: 26485 - DNA, 327 bp, Zea mays
  Peptide Sequence Number=SeqID_69860
atgactgaacctttgcctttcaggctaagagcgctggcactggaactgacgaagatgtttcagaaggacaaggcagcttcggtagtagaaagtcttgcgaagccaaaaaagcggagaattattcaagtaacagacgtgatccatcagacggcgccaccggcaacggtgtcaaaaattgtttttgctgaaactgccgaagccgaagctactgaaatgaaaactgctgaagctgaatccggcgaagccgaagctaccggggccgaagctggggccaccgaagagtcgaacctggaaaccacacttgaggttattgacacatactgctga

SEQ ID NO: 26486 - DNA, 555 bp, Zea mays
  Peptide Sequence Number=SeqID_69861
atgggagggtcggccgggtacgagcagggcgttgccggcgtgcaggggctctggtgggcggtggtcggcagtgggcggagctccggcggcagcgtcgagcgtgggagagagagaggagtgggtaaggacgagctcaggggtgaggggaactggctccatggctcggcgccaagctttatagggggagagaggagagggagtatcgggggaggagagggagaggccggcggcggcgacttcaatgccataatggcggcggccatggtggagggagagtggggggagaggaagggagaagagaggcggtttccggtgcggggaggtaccttcggactttggtcaaaactacagtgtgaagaagcacaaagaatacgaaggatggcgcagagccgaagctatgcgcaggggagctttggcgtgataacaggaaagggaaccgacttaaaagggaaaaggctatttagacctcgatggactattatagagttattagcaaatgtaaagggcatgggtgtaattttacatgggctgcgtctcgtgcctataaatagatga

SEQ ID NO: 26487 - DNA, 1317 bp, Zea mays
  Peptide Sequence Number=SeqID_69862
atggcggcggctcttcaggcgcagcgcctcttcctgacggcctccacctccacctcctcctcgtcgtcgtcgttcgctacgcggccccgccggacaaccaccgccgccgctccctgccgcgccggcctgcgcgtgccgtccggcgtccagacgacaacagccgcgtcgacgtcccggccggcggacggcggcggcggaatcaggctggactggatcgacgccgcgacgtcccccgccgaccgcaacgcggtcgagaagctccgcgcggtggcggaggccgcggcggaccgcgccgagatgcacgacatcatcgggcggcagcgggacaactggaaccacctgctgctgcactccaccaactcgctggcgctggcggcctccgtgatggccgcgctggcgccagccgcgccggccgccaaggcatccgcgggggcgctcctggccacggccgcggtcaccatggccgtcgccaacaggctccagccgtcgcagctcgccgaggagcagcgcaacgccacgcggctctggaagcagctggagcgcgacgtccgcgccacgctccagcaggacaaggaggcgcagcggcagccaaagcagctgggccaggccgacgtgcaggacgccgtggaccgggtgctcgcgctcgacgctgcctacccgctgccgctgctcccggggatgctggacaagttccccaatgccgtcgagcccgcgcggtggtggccgcgccgccgcccgcacacgcagcagccgaagaggaacgcccggtccaggagcttgggccgccgcggcggcatcggcaacggcaacgggtggagcctggagctggaggaggagatgcgtggcctgctgcgcgtgctaagggccaaggacgagcagcagtacctgagggtggggaagctggtgctgggcgtcaaccgcgtcctggccgtggccgggccagcgctggccggcaccggcgcggtggccgcggccttcatcgggagcggggacggcggcggcgccgccaccgccgctgccgccgcggcgtgcggcgcgctggctgccgcggtcaacacggtggagcacggcgggcagctgggcatgctgttcgagctgctgcgcaactgcgccggcttctaccgcaagatgcaggaggacatcgaggcggcgctgggcgaggccgacgtggagcgccgggaggacggggaggtgttccggaccaaggtggcgctgctgctgggccgcgacgcgtcggagctcggccagttcaggcggatggcgtccgcgtcggtcaaggacgacgacatcaaggactacgccgggaaactcttctga

SEQ ID NO: 26488 - DNA, 183 bp, Zea mays
  Peptide Sequence Number=SeqID_69863
atgtccataggccaaggtattaggtacgaggacgaggaagacgagatgggccttaacaacttgagtacgctctatcgacacaaccttcgtagccagaggagaatagccgacatcgctcaccggaccgttacactccaggcactgccgctcttggctagggtaagattatatggacttatatag

SEQ ID NO: 26489 - DNA, 288 bp, Zea mays
  Peptide Sequence Number=SeqID_69864
atgaatcatggcgccgagctcgaccacgtcggcgcagcgtcagcctatcgttgccagcgaaggacacacctcagcgccaagatctgtggcgccgagtcatattacttcggcgccacagcctttggtgccgagcaaaagggtttgatggacgagaacgtggatgaaaatgaggaggcgcacaacaacaccaagggcaacacatcgaaacgattggtacaagacactgagcgcttcagttcgatagtgggagacaacaacacgcataccttcctagacataagcttctaa

SEQ ID NO: 26490 - DNA, 951 bp, Zea mays
  Peptide Sequence Number=SeqID_69865
atgtcttctgccggcatcagcggatgcgtgcctacaactgaacaccatatacaaacgaatcatggacctgtatctgttgcagtgtacggtgaccatgacaagcctgcccttgttacttatcccgatattgctttaaactatatgtcctgcttccaaggactattgttctgtcccgaagccgcttcgctgctgcttcataatttttgcatttaccatattagccccccaggacatgagttaggagctgctccaatttccccaaatgctcctataccgtctgttgacgatttggcagatcaggttgcggatgtcctcgatttctttggattaggctctgttatgtgcttcggtgtcactgcaggtgcctacattctaactctgttcgcggcaaagtatagggagcgggtactaggtcttatccttgtttcacctctgtgtaaaggccccacttggactgagtggttatacagtaaggaagtgcgaggattctctgaactacccgaatcagacatagtgcaggcttgtaaaagcctgctagagcagcggcagagcatgaacgtgtggcgcttcgtacagacaatgaacgagagatacgacttgtctgagcatataaagcggctgcagtgcagaaccctgatttttgtgggcgacaattcccagttccacacggaggccgttcacttgacgtcgaagctggacaggagatactgcgctctagttgaggtgcaagcgtgcggttcactggtaaccgaggagcagccgcacgcgatgcttataccgatggagtacttcctgatgggatacggcctgtacaggccgcctagccaggtggtggagtgcagcccgcgcagccccctgagcccgttctgcatttcgccggatctcctgtcacctgagagcatgggggtgaagctaaagccgatcagaacgcgagtcaggcttgaggtgtag

SEQ ID NO: 26491 - DNA, 435 bp, Zea mays
  Peptide Sequence Number=SeqID_69866
atgggcaagagtaacaaacgcaagcgtgagccgactcctccgtcggaggacttcggcgactcggaatactcggaggaagagttctcctccgagtccgaggggtctccggctcccgtctctctcccggcgtcgtctgatgattcagacgactcccaggggattgccgcagaaggctcggatgagtcggagttctcctcggatgaggaggactcggacggcggcgaggacgaggatgacgacgacgacgacggcgacgacgacgatggtggcgacgacgacggtgacggcagcggcagcggcgggggcagcggtggcggcgacgggagcaagggcggcaccagaggcggcggcagcacgggcagcaccagaggcggcagcagcaagggcagcaccaggggcggcggcggtggcagcagcagcaaggccagtggctaa

SEQ ID NO: 26492 - DNA, 2157 bp, Zea mays
  Peptide Sequence Number=SeqID_69867
atggccgacgaccactactcctctaagaggaagtacgacgacccctcgccgccgccgcggcgcacggggttctcttcgggcccgccgcctgcctcgccgctcgcgggcggcgccccgtcgtacaacagcgtgccaccgccccccgatgagatccagctcgcgaagcagcgcgcgcaggagatcgcggcgcggatctttaacgccgcagaggccaagcgtcctcgcgtcgacaacggcgacgatgacagcggcggcttcggtgtaggcctgggcagcactggtggcggtggccgcatcggcggcggaggactcggcttctcgtcctctgccggtggtgggcacggggcttctatcccacaattatcttctcagagcagcgcacctcagtactcctcttatggtggatatcagggtacaagcaaaaagattgaaattccaaatggaagggttggtgttatcattggaaaagccggggaaactattaggtatatccaacttcaatcaggagcaaagattcaagtcacaagagaccatgaagctgaacctggtgcactgacaaggcaagttgagctttctggcaaacctgagcagataagcaaagctgaacagttgatcaaagaagttctggcagaggccgatgctgggtcatccggtgctggatctggtggccggaaatacaatgcaacacagccaggtgctgagacgttccagatgaaaattgctaataacaaggtgggactgattattgggaagggtggggagactataaagtccatgcaggccaattctggagctcgtattcaggttattcctttgcatctgcctgctggtgatacttcaactgaaagaactgtgcatattgatggtacccaagaacaaattgaagctgcaaagcaactgatcagtgaggttaccagtgagagccaattagtgtcattagcttgccaggaggactgcaaactatcctggagagcagatgtgcaaactatatttttgcagaatcgtgctaggaatccaatgtctggtggctattctcagcagggatatcgccctcctcgtcctcagtcaaactggggcccgccttctgtgccaccccagcagcctggctatggttatatgcagcctggggcttatcctggggcaccgccacagtatggtgcacctcagcaaccttatggtagctaccccccaacatctggtggttatcagactggatgggatcagtctcaaaaccagcaatctcatacaactccccctggtactgggtatgattattatagtcagcagcagcaacctcagcaacaatctgcccctgggacagctgcttctactgatgccactagctacaattatggtcagccttcgacgtatgcttcacagggatatgattctacctacactcagcagagtggtgggcagcaagcatatggacatgatggctacactggttaccagacccaagggcagcagcagggctactctcagcagactggttatgatcagcagggttatggcacatctgcttatggatcagctgcaagctcgacccaggatgggtccaactatggtggtcctggaggggccagtcaggcatctccagggcagcaaacatcaaacccagctgctggaagccaacctggctataccagccaaccgcccactagtgctgcagcaacttacccacctcaaggttcagctccatctggatatggcgctccaccatcccagtctggctatggcacccaaccaccacagcaagccggatatggtcagggcgcttatgggcagccttctccacagggccagaaacctcctgcattgtcaccttatggacaggctccgcctcctggttctgctcaggctggttacgggcagtatggttacagccaacctgcttacggtgcaccaccagcttaccctggtgcacccattgcaagccaccagggctatggccagcagcagtcttatggccagcagcagtcttatggcgatgcttatggtagtgcaagctatgggcagcctccagcctactctactgaagcaacacctcctgctgcatcccaggatcactctgctgcccctgctgcggcccttggaacaacagcttcgacagctcctgaaaacagtgggggcgcccaaacatccgctgaaacttga

SEQ ID NO: 26493 - DNA, 540 bp, Zea mays
  Peptide Sequence Number=SeqID_69868
atgaacagagctattgccatctcgagcaaaaaccctgtttacattgctacactcccccgttggatcaacttgcaccggagagcaagttccaacatttggcgcccaccgttcgtgctacgaaaaaaccacccgcgatggcacccaataaagctagctcgaaggctgacgaggctgcgaaggcagcactactggccgcaaaaaagggcaaggccctcaccctcgtccacaccacccaccaagaggccactgaaagacgacgctctccgcacctgcggctctgaaggacagccgcaacctcccccaggcttcgctccaccggagggcgcggacgtcaccgaggacggcgaagtcatcggtgtctcagcggaagaacagctacagctgcgcgccttgcgcatcaagaaccgcaatctccagaagcaaaaagagatacttgaggccaagcgccaacgtgtgtctgcacaagccaaggtgcggcaaatgatacacgacgaagatcagaaggcccaggagctcgaacaggagatcgcgctaatgtag

SEQ ID NO: 26494 - DNA, 591 bp, Zea mays
  Peptide Sequence Number=SeqID_69869
atggaagacctcgacgtgcttatgggcttgaggccgcctgtcgtgaaagaccccgcctcgctgtcgccaatgaactcgaggccgcctggcgtctcctttgagcttgtcctactcggcgatggccaaggcactcgcgaactggccgctctcgggattctttgggagttgctccgctataattcaccggactgtccggcaccggacagtgaacagtgtcctgtccggtgcaccatcgaactgtccggtgtgtccgtcgacagcaacagctggaatagtggttatgtaccacaacttctcgggaaagcaatggctcttcaatcgggctccaatgttaggagattgaaggagcgcagctggattggagcgccggaaatcgactggcaagtcgcctcggccgcaggggaagtcgcctcggccgcaggggttacggggtttccaggggaagtcaactcggccgcaggggttacggggtttccttcctattcggcaaatgcagaagctgtaatcccggactcgcgcgggtttctctctgttgattgcgcgaagacagttttggaaaccgggaaacgggggagacgtgggctgggctaa

SEQ ID NO: 26495 - DNA, 519 bp, Zea mays
  Peptide Sequence Number=SeqID_69870
atggatgtgttggatgagctcgatggcgttctatgccgattagagccagacattggatgtaatgagtcatgtgatgttagtgatgatgaggaaaaccaggaagaagaaataaataataataatgctggcgatggaatggaagatgacaattcaattacatgccataaaatagatgatcataaccccatgactggatgtgaacatgcgttgacattaataacagctggttaccaggaggagttctcctccgagtccgagggatctccggctcccgtctctcccccggcgacgtctgatgattcagacgactcccaggggattaccgcggaggtctggacctacatccgggtcgtcgagcgtgccgggctcgagggctcggatgagtcggagtactccttggacgaggaggactcctcggactcgtccgaggagggcagcgacggcgatggtggtgatgatggcgacgatggaggcgacggcgatggcggcggcgacagcggctgtcacacccggttttag

SEQ ID NO: 26496 - DNA, 1053 bp, Zea mays
  Peptide Sequence Number=SeqID_69871
atgccggggcgcttctcggcgctaatgttgattgtgctgtcgctgaccgtttcttgccgttatatctggtggcgttacacctctacgctgaactgggacgatccggtcagcctggtgtgcgggcttattctgctcttcgctgaaacgtacgcgtggattgtgctggtgatcggctacttccagctggcgatgatgcagacgccgcaccacttcttctcaccggacccgtttgaacgcaacctggggcgtttccgtaaaacgccgaacgaaggcacgctgttctatggtctggtgcaggatggcaacgatatgtgggacgccactttcttctgcggttcctgtgcggtgattcgtcgtaagccgctggatgaaattggcggcattgctgtcgaaaccgtgactgaagatgcgcatacttctctgcggttgcaccgtcgtggctatacctccgcgtatatgcgtattccgcaggcggcggggctggcgaccgaaagtctgtcggcgcatatcggtcagcgtattcgctgggcgcgcgggatggtacaaatcttccgtctcgataacccgctcaccggtaaagggctgaagtttgctcagcggctatgttacgtcaacgccatgttccacttcttgtcgggcattccacggctgatcttcctgactgcgccgctggcgttcctgctgcttcatgcctacatcatctatgcgccagcgttgatgatcgccctattcgtgctgccgcatatgatccatgccagcctgaccaactccaagatccagggcaaatatcgccactctttctggagtgaaatctacgaaacggtgctggcgtggtatatcgcaccaccgacgctggtggcgctgattaacccgcacaaaggcaaatttaacgtcaccgccaaaggtggactggtggaagaagagtacgtcgactgggtgatctcgcggccctacatcttccttgtcctgctcaacctggtgggcgttgcggtaggcatctggcgctacttctatggcccgccaaccgaaatgctcaccgtggtcgtcagtatg

SEQ ID NO: 26497 - DNA, 168 bp, Zea mays
  Peptide Sequence Number=SeqID_69872
atgactacaaatcaagctgttggggacttgttctcaaatgctatgagtcaagaacaaggcaacatagaaaatgttaatcgaaataacattgaattacaaatgtaccttcaacttgaaggagatgaaagtacaagcgtgacgcaaaaagcaaatgccaaattagcgtga

SEQ ID NO: 26498 - DNA, 1242 bp, Zea mays
  Peptide Sequence Number=SeqID_69873
atgggcggatttgggcctgggccacctaggccgtggcccagagcacaacccaaaaatccattgtatatagtccaaaagacatcctgcttgcaccgattgagcctggcgctggcggcctccctcagccgctcaagtcatgagaacataggctcttccaattatttcgcaaacctgcgcgattgcgttttctattttgccagcggcgcggccgcctccattcagccctgtatcgctctccacgccttcaggctctacgaatccggcaagggcagaaggcatcaagttgctgccagcaacctccgaggcggccgggtaggctatgactcaggcatccaccaccgccagtccgacctccacctccgccagtccacctccagcgtccctgtgactatcacggaacctcccaagagagagtattattattacaataccagggtattaagagtgcataaagtattattacaaaccagggaggcaaaacaccctccgcaacaaaagtttattattttcaaggtgaggggcaaacatcctcctgcgaccaacttcactgctggggctcctccttgggtaccacctttgaacagaaacaacaaaactccgctatttcgtcacctacaacaacatgggttcgaaaaacctgagtacggagtgtactttcgcaagtcttacccgacaaaagaaaaagactatcaaggatatgctggcttgagggagtcaagggtatacgtgtcggtgtttgggacccgaccgcgcacccgaggttacccctcgaggccttatatactcgagtactcgaccgtggggcgttacatgcggcggaagcgcgagccaagtcccccctcggaggacttcggtgactccgagtacttggaggaggagttctcctccgagtccaagggatcgccggtctacgcctctcccccggtatcgtccgatgactcggacgattcccaggggatcactgccgaggtgtggacgtacatccgggtcgtcgagcgctccgggctcgagggctcgaatgagtcggagatctcctcggacgaggaggactcctccgactcgtccgaggaggggagcggtggtgacagcgacgacgagggcgacgacggcgatggaggcgacgacggcggtggaggcgatggcgacggcaagagcgatggcgtcggcggcaagggcgacggtggcaacggcaagggtgacagcggcagcagcaaggctagtggcatagcgccacaggcttaa

SEQ ID NO: 26499 - DNA, 345 bp, Zea mays
  Peptide Sequence Number=SeqID_69874
atgactgaagtcagttggggatcctgcaggccaccagagttcatctacctcctcttcagcttccgtgcggtggagatcctgcaggccaccagagctcatctacctcctcttcagctcacgtgcggcagatttgaaggtgaactttttctggatctgaatgagactcttctatacttgtttttggtttactatggagtatgcattactttcagttttgatttaagcctgaacctgcttgtggccttacttattctatgcatcggtttcatctcagaacgccagccagaaggcaacattttgaagactttatattcatctgcatctataccacatagctccatttga

SEQ ID NO: 26500 - DNA, 165 bp, Zea mays
  Peptide Sequence Number=SeqID_69875
atggccgagctgcgaggacggttagagtcgtcctgcttggctatcaggacctccggtgtttgcatcatgggtcttcaggcacatttagtcatcatggaggctcgcgcgtcgaggcaagaattcgagcaggaggagcttcgccagaagatcgatgcggtgacctag

SEQ ID NO: 26501 - DNA, 2318 bp, Zea mays
  Peptide Sequence Number=SeqID_69876
atggaggtagtcgagttggttccttgcgcccgcaacaagtggggcaattggaatgagttttggttttacgtcgcggagggtaccgtcgaagaccatgaagggctccccgtgtccgaaatgtgttcgcatttttactcagcatacccgccctttgaggtggcggaggaggatgcggatgaaggggcccttcggtgcgctgtcggcctgagcagtgggcgcgacttggttgaagaatttgtagcgtacggggtatggcccttggcacatggctgggcgctgggcgaagatggggcgctgcggatcgttggtcggtacgtgccgaggacagagggccagcgtagctgggatatccgcgggtcgaatgaccgtttgaacagggttttcgaattgaatcaactgccgtataacggctatccgggccaagacgatgtggaccgccgcgggaagaagccggtggtagagtctggagacgaccctgcaccggcggccgccccatcctctaagaagaggaaactaggtactgttatgggaggacttggggtttccgatggttttgctagagagttgatgaggacatgcgcggccccggggggaaggatgtctttgcccgagctccgggagtcttcggcgcggatgctgagggttaccgggggttggtggcctaggaatgttcctatcccccgcgtggctggcgaagacttttttacatctcgcatggtttgtgaatggaaagtgtttccttatgggcggaatattgctgctgttgtgtcggcagtgatggacaaggatcgccaggcagctgcacagaagcgccaggcggttgtcaggcttcatgaagcccggccgaagaggcagcggggggctgcgaaggctgcggcccccggcggaggcaagccgccgctggcagcgaagtcgggcgcccctgcatctagcaaggcgccggaggcagcggcaggcgccggtggttccaaatcgacaaaggctgtgccgccgtccagcagggtgccggaggccgcgaaggcggcccgagtgttgccgtcgtcaggcaagcgcgtcgccgacttcgccactgatattagtgtggatgactatcttggtgggtcggacgaaggccaacttgctattgttgcgcctgccgcggcgaccacggcggctgtcgtagtgccgaaggcgaagggcggtgcccttagtgccggaggcgagatgtcggcactcgcggctgtcagggatgaggcgggcgctgtgtcccgccggctgaaggaggtgaaggaggcactaagtcagcgtcaggggccctcatggcagttgtgtctgtcgaagtcgagagacttcggacgcaacatgctgacgccgtccgtgaaaaatcggccgccgacagtaagtgccgcaagctggcggacaaggtggccgcactggagggggagaagactgaccttcggcgccaactggcggggggagaggagggagaccaacgaggccctcgccaaggcacaggctgcgcaggcggaggccaatctggcacgggcggagggcaatcttgccagggagcgcgccgagcagctgcaggagcgactcagcgccctggagagccgtgtggagagggccgaggccgcggcgcgcgcggaggctgagcggacgcgcaaacagcttatggattcgtaccatgagctgggcgcgcggaccggtgacttcgaagtgccggaccgagagcctggacttcgctgcctggagtgggtacaggaggagttgcaggcactccccactatcgtggaggggtttatgtcgtatgcttccctggtcacctgcgagggggcgatgaacgcgctctctcgcgaagggtgctggcactttgaggtcttcgaccaagctgatgaagattttgagcgagatatcttcaaggttgaggaccccatagtgaaggaatctgccggagccatctacgaccggatgtggggtccgcacggttgcgaggtggtcagggagcgggccgagacggcgagggctcaggcggcgcgtggcgagagggtggatgacttcggggcattgaacagtgcgctgcctgacccggagccggtcccggcggaggccgtgtccgaggccgccctggagccgcccccggagactgcggaaggcgctccggatgcccccgcggctgctgcggccggcggagacccgcccccagagaccgccgaaggcgcgcctgatgcccccgcagccgctgcgccgaggaccgaagatcctgtgacggtggcggcggaggcgacagcggaggcaacggcggaggctcccgcgacggctgggtcttcgcatgtggcgta

SEQ ID NO: 26502 - DNA, 1341 bp, Zea mays
  Peptide Sequence Number=SeqID_69877
atggacaaggatcgtcagggagctgcgcagaagcgccaggcggtcgtcaggctgcctgaggctaggccgaagaggtcgcgggggactgcgaaggctgcttcccccggcggcagccagtcgacgctagcagcgaagtctgccgcccctgggtctagcagggtgccggaggccgtgaaggcggccagcgccggcggaaccaagcctgccccggccagagctgcgaaggcccgagaatttcctccgccgggcaagcgcgttgccgacttcaccaccgagattagcgtggacgattatcttattgggcaacttgttgttgttccgcctgcggtggcgaccgcggcggctgccgtggtgcctagggcgaggggtagcgctctcagcgccggtggtgagattccggcgctcactgccgtcaaggacgaggcgggcactgtgtcccgccggcttaaggaggcattgagtcaggcggctgacttcgctgaccgcgtggcgtcgggggcccttacggcggttgtgtctgccgaagtcgagagacttcgggcgcaacatgccgacgccgtccgggaaaagtcggccgccgacagcaagtgccgcaagctggcggagaaggtggccgtgctggagggcgagaggaccgacctccggcgccaactagcggaggagagaagggaggctaatgaggccctcgccaaggcgcagtctgcgcaggcgaaggccaatttggcgcgggtggagggtagccttgccagacagtgcgccgaggaatgggaggagcggttcaacgctctgcaaacccgtgtggagagggccgaggcttcgacgcgctcggaggctgagcggacgcgcaaacagctcatggattcataccacgagctaggggcgatgaacgcgctgtcccgcgaagggtgccggcactatgaggtcttcgaccaatctgatgaggatttcgagcgcgagatttacaaggttgaggaccctatggtgaaggaatctgcgggagccctcttcgaccggatgtggggtccccacggtcgggaggtggtcagggagcggtccgacacggcgaggggtcaggcggcgcgtaacgagaaagtggaggactttggggctttgaacagcgcgcaacctgattcggagttgaacccggtggcggctgtgtccgaggtcgccccggcgccgcccccagaaaccgtcgaaggcgcccctgatgcccccgcggccactgcggccggcggtggctcgtcgccaactgctgcgccgagggctgaggatcctatgaagatggcggcggagccggcagcggaggatcccgcgacggctgggtcttcgcaggtggcttag

SEQ ID NO: 26503 - DNA, 834 bp, Zea mays
  Peptide Sequence Number=SeqID_69878
atggagattgacagacaatctgtccatgtcgacacactagggcctagggacaagaaagccttggttcggccatgttcgaccgataaaggcaaagggaaaaatattatcattagtgaccctcacacaccaaatctatcatgcagagtggttactcgaaggctccagacagaagaaaggctattaagaccagaggcgtcgagggccatggtaaaccagaagcctaatgtgccaaaggttaagaaagatgtatccctgtccaaaactaattcacaaccgagaagcccactcggattatcaatctggcacaacaagaggctagaaaaactcggtgcacaagagttgaagaagagaggcattacatgggttcctaatgggagttctcaagatcaaggtaaggatgatgctttaggaagaggtggagtgaaggccaaaaggaagaaagcaagtacaggatgtttgggtgaaagctatccgtgttttgggagcctcgacttctcctttgacggtgaaggcgaaacgttcaaggcccaagaggcccgacctcctccactgaggaacctctgcgtgaccacgagggccagcggctgcccccgcatcgactacacccccggagcggtgatccgctttgggaaccttgatttcttaatcaaccaggagggcgatatgttcattgggatggtcaccggtggcgtggacctcatctttgatgcactcttaacagactcggactcggatctgagtccccctaagagcatcgaggaagaaccccctggtgataaggagaacaaagaccacctggctgctgcgcccccatcggcgagagaagcaaagtag

SEQ ID NO: 26504 - DNA, 312 bp, Zea mays
  Peptide Sequence Number=SeqID_69879
atgacgaagacggtcaacgaagtcgaagcgaggcgcggacagcgccaagaccgagccctccgtgctggtgtcgcgccgggacagcgcgtcggcgacggtgttcatggcacccggcttgtattccaccgaaaagtcaaagccgaggagcttgcccacccaatggtgctgcgggatcgtcgagagatgctagtcgaggaggaacttcaggctgtagtggtcggtgcggacgaggaacgcgcgcacccaaaggtacggcctccagtggtgcacggcgtgcaccaacccaatgagctcccgctcatacgctgctag

SEQ ID NO: 26505 - DNA, 375 bp, Zea mays
  Peptide Sequence Number=SeqID_69880
atggccgtagaggttatggcgatggtcaccgcggtgatttcaataatccacatggaaggcgtcgtgcacacggacgccgagtacaagttgaagacgaggagtttgaagaccatgatcgtgaggaaggatctgatgagaatccctttgcaaatgatgaaatgtttggtcggcgtcatcatcaccgacatgctaactttgaagatagagactgttatcatgggcagcgtcatagaaatgacctggacaatattgcctaagtcaagttggatgttcctaaatttactgggaaagaaagtgcagatgaatatcttaattgggctgagcagtgtgatcaaatttttagagttgacaatctttcagatcaacatcgagtga

SEQ ID NO: 26506 - DNA, 507 bp, Zea mays
  Peptide Sequence Number=SeqID_69881
atgggggatccttcgtcctcaggtactagtgcttgtggcacccaatggctcagccaggccctagaggttaagaaggaggcacaaggcacggcacggtcacccttgccttctatctccgagggtcttccgatgagccctgagccaggatttgtcgagtttttggcggcgggcttcctcggttggcgctctcatctcgagggcccgctcctggatgggggagtgttctattatgcccaagctcggatgtctgtataccggtggtggcctagcctttcgaggaggcgtgaggctcatgctgctgctcgaggtaccactgctgagggagccatggtggcggggtctgagctcggtaggatggcggggcctaagcatcctgcggtcgaagcgagggagggctcttcgagggccgaaccggatcttaccgaagtgcggccatcggggcgcgatgttgaaggacctttgtctgggttctcgacagaaggtgaggctcgtgctccttcatcctag

SEQ ID NO: 26507 - DNA, 513 bp, Zea mays
  Peptide Sequence Number=SeqID_69882
atgggaggtcagagaggtcgtgggtgcaaggaatcgaagaatggctctcctggtgacccaatctacgcgcggtggcgggtgaccgaagtccggcaagggtggtcctgcttctccggtgaggcaaagcctcggctcaagcttggagaagcttcacagcctgtcggggaagccgtccgggggctagggcggggctgggggttgttgggaagagctggccacggtggccgtgctcgggcagggatagcgggcggtggagagctcaccgaagctagagtttttggctcgggcgcgcggcgaagtgaagagcggactgctgagcaccagagggagttgtcacatcgccaaaaggccagtgtcacacgatcgagtcccgaggaaaatctgtgccaagatcgtgtcaaacgtttgaaatttgtttccaaacttcgccaaggcgtgttcagggaaatttggcgccactttgttatttggaccaagtggattcaagtttttgaattaggagaacacaactga

SEQ ID NO: 26508 - DNA, 471 bp, Zea mays
  Peptide Sequence Number=SeqID_69883
atgggaggtcagagaggtcgtgggtgcaaggaatcgaagaatggctcacctggtggcccagtctacgcgcagtggcgggtgaccgaagtccggcgagggtggtcctgcttctccggtgaggcaaagcctcagctcaagcttggagaagcttcacaacctctcggggaagccgtccgggggctagggcggagctgggggttgtcgggaagagctggccacggtggtcgtgcttgggcagggatggcgggcggtggagagctcgccggagctggagtttttggctcgggcgcgcgacgaagtgaagagcagactgttgagcaccaaagggagttgtcacgtcgccaaaacgccagtgtcacacggccgagtcccgatgaaaatctgcgccaagatcgtgtcaaacgtttgagatttgtttccaaacttcatcagggcgtgttcagggaaatttggcgccactttgttatttag

SEQ ID NO: 26509 - DNA, 162 bp, Zea mays
  Peptide Sequence Number=SeqID_69884
atgaacacctcaccgtggccagctctctcagaaaacgatgaagaagtagttaaagaggaagttgcaccaccgactgaaattccacctgtcggggaaagtttctactttgacatttgtggaacagatcctgagtccccaacgacacaaggtgataggagttga

SEQ ID NO: 26510 - DNA, 720 bp, Zea mays
  Peptide Sequence Number=SeqID_69885
atgacttcccacggatcctcagacgacgggaatgccctgtctcacactgacggacttgcacgagagggctttccccgcattttgtgggaggtacttcagggggccggatatacgacaccccctcagtacgcggtgcagcagttcgagaagcaccgagtgccccgctgtagggtgaggatgactctggagcctcatcccctgcagcccggctggcgctctttggactccgagtcttttggataccaagcggaggacacgatcgaggcgattgctctgcatggattgaccactttctgcggattccatcctttggagttggctacacaccccattggcttgttccccgccgagagggaggacgacccaatgtggaaggatcgggtggagcatgccaaggatatctgggccatctacccaggacagactgcacacttgaccgtacggtggagcagctatccactgatatcccaagagttggaagaactagtgggcaccagggagaacaccatcgaagttctcaaggatcaactcattaacacccagcagcagcttgccgaggctaatgagcacttggacatgcatcatcaggagatccaggacatggaggccaacgaagacgtcgacatcgagggaggagaggagcctgcctctagtgtggacactgctggctcagggagaccaccttcccctgagtcgagtgttgcctcattcgctcactag

SEQ ID NO: 26511 - DNA, 633 bp, Zea mays
  Peptide Sequence Number=SeqID_69886
atggcgatttttaatctgccgatgcatctgtttctctcctggccgctggataaagacctgattaaccacgtcactcacggcatggtgatcaaatcactggccacacagcaacttagcccgtttgaagtgcgccgctggcagcaggaattaaacagtccgaacgagcaaattcgccagctcgccattgatgaaattggcctgatgctcaagcgatttagcctctctggctgggaaccgattctggtcaataaaacctcgcgcacacacaaaaacagcgtctcgcgccatgcgcaattttatgttagccagatgctgggctttattgccgaaaactatgatcaggcgctgaccatcaacgatgtggctgagcacgtcaaacttaacgccaactatgcaatggggatattccagcgggtcatgcaattgacgatgaaacagtacattaccgcgatgcgcatcaaccacgttcgcgcgttactgagcgataccgataaaagtattctcgatattgccctgacggcaggctttcgttcaagtagtcgtttttacagcacgttcggcaaatatgtcggcatgtcgccgcaacaataccgcaaacttagccaacagcgccgccagacgtttcccggctaa

SEQ ID NO: 26512 - DNA, 324 bp, Zea mays
  Peptide Sequence Number=SeqID_69887
atggtcggcggcaagggcagcaaaggcaagcgtggccagaaagatgggaggcagaagcgtcccccgactcctccttcagaggactttggtgactccgagttctcggaggagcgttctcctctgaggcgagaagggctcgagggatcaaacgactcggaggaggaagactccaaggaggagggcggtggtggcgatgatgggagcggcggcaatgggagcggcaagggaaacaatggcgatgtcggtggctacgacggctacaacgagggcggcgggggcaggggcggcagcgataacgtcggtggcggggtgccatcgatgtaa

SEQ ID NO: 26513 - DNA, 192 bp, Zea mays
  Peptide Sequence Number=SeqID_69888
atgaagacgaataagttgatcgatactcaagtcaattcaaagctcgggggctacacccattgggtgcacggtgcacccaacagatacaagaatggaacaaaaatgccttcaaaaagcttttgtaagcgcgtgaggagccaagcattcggcgataactcggacaagaaggtgatcaaggctctagatatatag

SEQ ID NO: 26514 - DNA, 408 bp, Zea mays
  Peptide Sequence Number=SeqID_69889
atggcggttccatcctcaaaatggcttcaatcttctccggatagccttgatcactcgatggttaatgatgaatccgagaagcttcctggctggatataccctcagttggtgcttggccagctctcttgtgactccgggaatgtccatgggttgtcatgcgaatatgtctcggttgtcatgcagaacctggacgagcgcgctttcctatttggcagtgatgctagaaccgatgattgttgtcttgcgctcatcggagaatccaaggttagccctcttggtttcttcggtcagccgcattgtggtagctgtaatgcttcgtttgtggggattgtgaggtcatcccctgttggtgtgttgtcactcgacgccgtaattgccatagagggtccgaccacaagggtcgtctga

SEQ ID NO: 26515 - DNA, 153 bp, Zea mays
  Peptide Sequence Number=SeqID_69890
atggcgatcattcgacggatgggtgagggcaagaagatggttcgctttctgtgtgaggacctgtcgatagccttctgcatctggggtgcatggcaagctgttggcgatttgagccaggactcccctacttcactcggcgtattcagtgcttga

SEQ ID NO: 26516 - DNA, 1194 bp, Zea mays
  Peptide Sequence Number=SeqID_69891
atggaggacttgagtacaatgaccccgaccattgtgattggaaaaatcaaggcctttgagatgtcgctaaaaatgtgtcagggagaggagccaacttcttcaagcccatatgcttttgcatgtgatgaaatgaagggtaaaaagaaggctcccactccaatttcctcaagtgaagaagaggaggaagaagaaagtgatgatgatgaagataatcaaccatcaacatcatcctccaaggacgaagaaataatccgacgcgtcggaaaggtcgaggatcttctctttaacattgacaggaaaaagcatagaaagagaggatgcttcgcatgcggggagaacgaccactttagagacagctgtccaactatggccgaacccaaaaagaggaggagcaaaggcaatgcgctaacaagtgtcaaaacttgggatgattcttcaagtgaagatgaacctccaaggacgcgtagccaccaatactcatcacgctcatcacggtcatcacgcaagtgccttatggcaagaggtaaaatgagtattccatcctctagtgatgatagcagtagtgatgatgaagttgagggaaagccctccgtagatgagcttgcggaagccgttaaatgttttcaggatgttggcactaagcaaaaggctcaacttaaaaccttgaaaaataagttgattagctcccaaaatgattataaaggtttgctagaaaattttgaaacatttgcaaatttaaattgtgagctatcaactaaaattgagcaattagagtctagtgctctatccactgctaccaatgatgaccttattaaaaagaatgtaaaacttaaggcgaagttagctagctcccaagaagctattgaaaatttgctagggaaaatggaaattcttagcatacacaataatgagctaactactaagctagaaaacattggtagcaccctaggggcatctttagttgaaattactaaaattattaagaaagatgcttctacttcttactttgatttaattgatgattctaacccctgcaaccaagttcttgttgagaatattgttgtagaaacatgttcagatgaggttgcaaaagaaaatgagcaattaagacaagaagtggctcaccctgggaaggccttgtacgacaagaaaggcaaatccaacctccacaagataacaccactgtgggagtga

SEQ ID NO: 26517 - DNA, 51 bp, Zea mays
  Peptide Sequence Number=SeqID_69892
atggcgccgtcgcggctagcgtgcgcgccgtcggctcgaaaattcatatga

SEQ ID NO: 26518 - DNA, 450 bp, Zea mays
  Peptide Sequence Number=SeqID_69893
atgcccgacgtgccccctgttggggcgccggcgccgtcaacttgctcgacagccgacgagggccgcctcctgcttggccttggttgccccgcctcctcctccgttggcgggggagagggcgggcctgactctgtcgagcggcacagcagtcggagcggcgcaggcgacgctgtccttctgtcaggccggtcagtggagcggcgaagtgactgcggtcacttcggctctgtcgactggaggacgcgtgtcaggataaaggtgtcaggccacctttgcattaaatgctcctgcgatctggtcggttggcgcggcgatttggtcagggttgcttcttggcgaagacagggcctcgggcgagccctttatgctgatgggggttaccagctgagaattaggagacttgaggtctatgactggagcagtaggggtgagaatggagtcaagagctga

SEQ ID NO: 26519 - DNA, 954 bp, Zea mays
  Peptide Sequence Number=SeqID_69894
atgggcgcaggcgttctgcgtaagaaaattcaggatgcaggtctgtcgcagatttctgttactaacagcgcgatcaacaacctgccgccagatgtggacctcgtcatcactcaccgtgacctgaccgaacgcgctatgcgccaggttccgcaggcacagcatatttcgctgaccaacttcctcgacagcggcctgtacaccagcctgaccgaacgtctggttgctgcccaacgccacacggcaaacgaagagaaagtaaaagacagcctgaaagacagctttgacgattccagtgctaacctgttcaagctaggcgcggagaacatcttcctcggtcgcaaagcggcaaccaaagaagaagcgattcgttttgctggcgagcagctggtgaaaggcggttacgttgagccggaatacgttcaggcgatgctggatcgtgaaaaactgaccccgacttatctgggtgagtctatcgcggtgccacacggtacggttgaagcgaaagatcgcgtactgaaaacgggcgtcgtgttctgccagtacccggaaggcgtgcgcttcggtgaagaagaagatgacattgcccgtctggtgattggtattgctgcccgtaacaacgagcacattcaggttatcaccagcctgaccaatgcactggatgatgagtccgtcatcgagcgtctggcacacaccaccagcgtggatgaagtgctggaactgctggcaggtcgccggataaggcgcttacgccgcatccgggcgctgcccctctcctcacggagagggttgggtgagggaaaagcctcaccccagccctctcgggttgatttagtcactaccgccgttggcccggttgtgctggaacgtattgctccggcaatcgccaaagggcaggtgaaacgtaaagaacaaggtaatgaatccccgctgaacatcatcgcctgtgaaaacatg

SEQ ID NO: 26520 - DNA, 1288 bp, Zea mays
  Peptide Sequence Number=SeqID_69895
ctctcctctctggcgaccacctcctcgccggcggccgtgctcctgtggaagtgctcctgctcggcctctcttcccctctgtcgtcagcagcagcagccgctgagcaggccgagctaggagatcagccacagactccttcagatcagattgcgtaccgagttcgtcgcctcgcctcccggcctcgctcctccactcccaccactgcttccactccaccaccaactttgcctactcccgtcacccctgctgcgccatccatcacctccactacaccagcttccactgctcctcctcccactcccgtttccgctcctcctatcccacctgctcgcttcagggagcgtgatgagactgaggtgcgacctctggctgcagatcccatgttgtttgaccttcagcgtgctatagcggtacgggtacgtcggttcagatacgtacccgtggagtcttggttaccggctcatagggaccctgctgtagttgacctcttcagcacccgtattcaggagtcctttttcagagctcagatgtctgcacagattgatctgcgagtgcaccgacttctggaccttcctgcatttctgcttgccgctggtgctgactctgaggtacacctctcctatctgcctggccttctcactcttttgactaccagcggcagatatgttgaggaatgggtccgagttttctatgctactatatggatctaccctgatcaccactggatgagattccgttttgatcgagaggatgtcactattcatgccagccagattcaccagctatttggatttcacgagtcatcgactcgtcttcacagcttatgctatggcacctctgaccctcctcatcgccctcacggcggtgttgctcctggtacaactcacgtcgcggctctgttccgaccgcccttctcagatgggtcgcgacgctctccggacgcagcagttgatgatgatgatgatgattttgggattccacctccgcctccacctcttcaggctcctgttgtgccagcgattcagccaggaccccctcttcctacagttggtccttcttcctctccgctccggccggtcaccctggctttcacgtcaccagtctttagctccgtctgccctcagccgccagtgccaccagcttctgctgttaccactgctgcggtggcggtgtctgtgaccacttcacatccggcagctcctgcagcgcagcctcagtccgagtcagtaccagctccaacttctacagcagatcctggatccgagactgactctgatccccagctggc

SEQ ID NO: 26521 - DNA, 531 bp, Zea mays
  Peptide Sequence Number=SeqID_69896
atgggagaaggagtcggtccagcgattggtggaatgatagcccattatattcattggtcctatcttctactcattcctatgataacaattatcactgttccgtttcttatgaaattattaaagaaagaagtaaggataaaagggaaaaatataccttttatgattggagttctttgtgggggaattatatttggaacagtagcagggtttgtctctatggttccttatatgatgaaagatgttcaccagctaagtactgccgaaatcggaagtgtaattattttccctggaacaatgagtgtcattattttcggctacattggtgggatacttgttgatagaagaggtgggctttcgttcaccaaaacagttatatcaacaattgtttcaagtagcttgaaacagcaggaagctggtgctggaatgagtttgcttaactttaccagctttttatcagagggaacaggaatcattgtcattagttggctggttaccttgaatgtatataaacattctcaaagggatttctaa

SEQ ID NO: 26522 - DNA, 705 bp, Zea mays
  Peptide Sequence Number=SeqID_69897
atggtctcccattccggttatggtgggtacaagtgcggtcactgcacgacggcaatcggggtcagtgaggcattgtacgccaaggcgggagctggttacacgacgcctccccagtacgtggtgcagctgtttgagaagcaccgagtgccttgctgtagggtgaggatgaccctggagcctcatcccctacagccaggctggcgatcgttggattccgagtcttttggatacagggctgaggatactatcgaggcgattgctcttcacggactgaccaccttctgtggtttccaccccttggagctatccactcaccccattggtttgttccccgcggagaaggaggacgacccaatgtggaaggacagagtggagcatgccaaggatatatgggctatctacccaggtcagactgctcacttgacggctaccaagatcaccttggataacagggaggaacttgtggtagacttgtccactgagatggtggaaaaagacttacaagtggaacaattgtcaaatgagatccaagagcttgaggagctagtgggaaccagggagaacaccatcgaggagatccaggacatggaggccaacgaggatgtcgacatcaagggaggagaggagcctgcctccagcttggacactgctggcttagggagaccaccttcccccgagtcgagtgttgcctcgtttgctcactag

SEQ ID NO: 26523 - DNA, 680 bp, Zea mays
  Peptide Sequence Number=SeqID_69898
ccgcggtggagaagaacgagggctcggtctctacggtggagaagaacgagggggcggcgccaccgcctccgcattaccgggtcccttccccggtgaagaagaacaaggcgatagcgtctctgcggtggagaaggcgattccgggtctctgcggtggagaaggcagccgcggtggagaagaagcagacgacggcgattgagctagggtacggccgccgcgagcgttacggggtcgtcgatccaccaccgctcacgcctagggaagcccgcgcgtcgtcaccggccgtgggacgccagcaggcgccactctgggacgcgtgcctccgagaagctgacggcgtgtgcctcccagatttgccgtcgcgggcgcgcctcctagatcctcgatcctgggggagcgtcgtcgtcgctcgatcctatgggagcgccgccattcctagatcctgggggaggtcgctcgatccttcggaaacgtcaccgtcgctcgatccttcggaattgtcgccgtcaatcactctcctcgaggcgccaccgccactagcccctgagatcgtcgctgctcgcacgcccgaggaaacagctgccaccactcgctcgcccgagggaaccgccgccccgctaaaacctaatccttggcggtctaagggtgtttttatagccgtccgaatctggtgcggctaa

SEQ ID NO: 26524 - DNA, 228 bp, Zea mays
  Peptide Sequence Number=SeqID_69899
atggggggtgctgagggggcgtggtgtgcttgcgctaatgctggaactagcggcactaatcaaatctctgttcgctgcatgacacatcatgtggggaatcctactgctctcggcttgatcttctgctcaatttctccgaaatcatacccaaaaacaaaaacaaaaacaaaaacaaaaattggaggagctcatgagttcctacgaaaacgttttgtcaggaggcagtag

SEQ ID NO: 26525 - DNA, 291 bp, Zea mays
  Peptide Sequence Number=SeqID_69900
atggggattggttgtctacgagacgaaaattggaataaggatcaaagcagactttgcccctcacgcgacctgagacgtggtctcccattccggttatggtgggtacaagtgcggtcactgcacgacgacagtcgagataggtacacatttagtcttaagagagtcacactaaatcttgaaaaaggttctctggaggacatggttgctggagtggcttggccgcccatcttgccaccgggttggacagtcgtgtgggaccctacctcggctgaggaggagcatgaggagtga

SEQ ID NO: 26526 - DNA, 804 bp, Zea mays
  Peptide Sequence Number=SeqID_69901
atgacctctcacggatcctcagaaggagggaacacacattcccacacggacggacttgcacgagagggctttccccacatcttgttggaggtgctgcagggagcaggttacacgacgcctccccagtatacggtgcagctgttcgagaagcaccgggtgccccgctgtaggccaggttggcgttcgttggactccgagtctttcggataccggactgaggatactatcgaggccattgctctccacgggctgaccaccttctgtggttttcaccccttggagctgtccactcaccccattggtttgttccccacggagaaggaggacgacccaaagtggaaggatcgagtggaacatgccaaggatgtgtgggccctatacccagggcagactgctcacctcacggtgcgatgcatgaatgccctgtatctgtatcgtctgcaagtgatgcggggagaggcaatgtcccagctaatggcatcgttggaggctaccaagatcaccctagataacagagaggaacttgtggtggacctgtccactgagatggagcttgaggagctagtgggagccagggagaacaccattgaagttctcgaggatcagctgatcaacactcaacaacaactcgaggaggctaaccagcatttggatatgcaccatcaggagattcaggacatggaggccaatgaggatgttgacatcgagggaggagtggagccggaggccgcatctagcctggacactgctggctcagggagacccccttcccccgagtcaagcgttgcctcgtttgttcattaa

SEQ ID NO: 26527 - DNA, 255 bp, Zea mays
  Peptide Sequence Number=SeqID_69902
atggtgcatttcctcagcggcttcgtcgatcttcttctaaagcttctggcttctcagagagagatcgtctcctggtttgtgtccagtggttgcagtgcagcccctgtcactattgtcttcttcggcggcatgatgatggttgttgctttgccgaagattgtggaagtgagtacaccggaggtgggcgccaatgttggtcacttgttctcaaatgctatagatcaagaacaaggcaacacaattgtcaatgattaa

SEQ ID NO: 26528 - DNA, 1038 bp, Zea mays
  Peptide Sequence Number=SeqID_69903
atgcctgccccgcctcctcctctgtcagcggggaaggtgacgggacagacccggatgttgctcttccgtcacgcggggaagacgtcgtcgattccgccaccggcgggcgggctgacggccgccattgtcgttgtcgcgcggcggaggaaggagtatcatgtcgtagctgccgtcgagggacatgaactcaagactcccgaaacggagcaccatcccgggttggagaggttgctggagactacccatctggagcttgacgggaagctgttcgttaacacgcagcaggcccctacctggcgcgccaactgtcggcgtttcgaccccggggggtaccttgaccgacgagtaaattgtcgcggcgtgtcccagcccagatgggtcggcgcgagacggaacacaaggggggaaaacacaaaggggagccagagccctatgtacatgccgtcgtggctgtcggagaggttttggcgccctgttcatgtgatgtcgtggccgtcggaggagcgcttgagccccgtggaacccgaggtcgggcgaggcggaggctcctcctgggtcgaggctgagtccaggcccgagggtcgggcgaggcggagaccgtcgtccgaggtcgaggttgagtccgagccctggggtcgggcgaggcggagaccatcgtccgaggtcgaggttgagtccgagccctggggtcgggcgaggcatagaccgtcgtccgaggtcgaggttgagtccgagccctggggtcgggcgaggcggagaccgccttccggagtcgaggttgagtccgagctcaggggtcaggcgaggcggagtccgtcgtccgaggtcgaggttgagtccgagctctggggtcgggcgaggcggagctttctatggtgcctgaggccggtcttggcggctgtcagcctcaccctgacgggtggcacagcagtcggagcagtgcaggcggcgctattttcctgtcaggccagccagtggaggggcaaagtgactgcggtcacttcggccttgtcgactgaggagcgtgcgtcaggataa

SEQ ID NO: 26529 - DNA, 294 bp, Zea mays
  Peptide Sequence Number=SeqID_69904
atgtccccgatctcctggtccaactcctcctcttggagtgttggactagtggcctttcttttctggctccgagcttctcagagagaaagggtttcttggtttgggtccagcggatggagtgcagcggtttctggtgctgaagccttcttcagcggcatgacgacgcttcgaagtaacgacaaccttcgtcacggtcgtgcctctctcatcgtatatgcctttgatcctgaatctgaagatgtggatgttgttgatgcggtgttgatcaataatgaacatgacaagcgtctgtga

SEQ ID NO: 26530 - DNA, 69 bp, Zea mays
  Peptide Sequence Number=SeqID_69905
atggggaagcatgtcccatcactcctcatgctccttctctgccgagtgggttactatttgtcactgtag

SEQ ID NO: 26531 - DNA, 417 bp, Zea mays
  Peptide Sequence Number=SeqID_69906
atgggaactcacatacaagagacagccctaggtgctaggaggaggcctacgccggatttttgccaagattcgcacgcttgcgatctcggcaagctgttgaacgagggcagaagaacacttccacgtgttcgacgcgcactgaacgtgccagagcacgcccagcgcctgaccccgcgcgccccgcgccgcgccaagccgtgcccgtgtctcctgcccgcgcccgcgcctataaagcccaccaaagcttcaaccgtactccctcgcgtgctctcgacctcaccggagccagggatcaccggcgtttgccctgcgcacggcgtgaccgcggccacccgatcccccgccaccgtagaccggccagcacagcctctcccaaccccatctgaccctcagaatagaccctgcgtgcctcggtga

SEQ ID NO: 26532 - DNA, 307 bp, Zea mays
  Peptide Sequence Number=SeqID_69907
atggggggagagggtgagtgcgagtggggctcggggcacaagtggccgagggcgaggtggggcgagtcccacgcgcgacgtgggcgcggggaaggcgggcgcgagcagctcggcggcggttacgcggggacgacggggctgacaagccgggcccgcaacgcagatagagagaagaaagcgggtgcgggcgcgagagaaacggggctgatgggtttgggcccacgggcagatagagagcgagggagccggcgcactcggggaagcggcatcttcgactggtggggccggctagcattgatagatggag

SEQ ID NO: 26533 - DNA, 138 bp, Zea mays
  Peptide Sequence Number=SeqID_69908
atgcggcttcatatccttagaggtatgaaggcagaagtcattcttgcatttgcagacatttgcactcatgagtttgatattattttacttgctgagatgtgtcatctcactcttgcattactcaatgcaggtgcataa

SEQ ID NO: 26534 - DNA, 180 bp, Zea mays
  Peptide Sequence Number=SeqID_69909
atgacccagctcttcgagttctacaaggctgaagatcctgagcatctgtttggtgaaggcaaagatgtttggtttacagatgatgatgaggatggttatgatcatgcttatggtaatggtaaagaaggcgtcgaggcagatctccaggagttccaggacgtcgacgagttcgaggattag

SEQ ID NO: 26535 - DNA, 162 bp, Zea mays
  Peptide Sequence Number=SeqID_69910
atgccatgggatggtgcttatggaagaatgctttacaaatccgaatataagttcagtacgatagtgcaaatagagagcatcagctgttcatgctatcggtttggaaagaacatgtggaaagccaatctcggatcttgcttccttcaggtatgttgtgtatga

SEQ ID NO: 26536 - DNA, 714 bp, Zea mays
  Peptide Sequence Number=SeqID_69911
atgggcgtgcacccttcgtctcgttaccatgtgggcccagggcggacagacgcatcgtcgcgcgccgcgcacctgacctcctcgcgcccgctgtcgggtggggcgtccacagtgcaccatgttctgcctccgcgtccgattcccccgacaccgcctcgcccgcaatctacgccgccgcggtgcccacgcccgcgacatccaccacctcgacctcacccccgcccgcggaaatctcgcccgcgagatccctctgcccacacaccgccccctctgctctccgtcgatggaagggcgccattaacacaccgcgatcctcgctaccgcccccacgaggccataccatgccctcgccccctcccagatcttcgaagaggccgccaccccgcccctgttcttggcccctcgtcggcgtcggcctcatcgcggcacgggctgcactccttcgccccgctcacggccgcggtgcttggccacctctgggcctccggggtggcggtgctcccgggcctgacagagctagagttggtgcgcaccaaggctgagatgtggtttgcgttcccgcccgacctccgtgccgtcctcgccgcgggcctgccgtcggggcccgggttcccggactggcagtcgcgcgtggggctgcggtccgcattcgacctgcccatcgcggcggcgtcgctacagatcgcgcggggcgagctgtggccgcgctgctag

SEQ ID NO: 26537 - DNA, 336 bp, Zea mays
  Peptide Sequence Number=SeqID_69912
atggtgcaggtccaagtgctggtttgccccctcgagctgctgctaggtgttctggagctgttcttccagaacctcaatggtgttgtccctgacttccacttgatcctcgagctcgtggatgtgtgtcatcggcccggtaaccgaaagattccgagtccagcgaacgccatcctggctgcaggggatgaggctccagagtcatcctcaccctacagcgaggtacccggtgctcctcgaatagctgcacctcgtactggggagtggtacaagctccgataccagttttcgcggaaccgaccgaattattccaacttaagtgcccaagtcccaccataa

SEQ ID NO: 26538 - DNA, 222 bp, Zea mays
  Peptide Sequence Number=SeqID_69913
atgggtgagcaaagacgccgagtggcgcagagaagcaaggacgcgtcgagtcgcagagaggagggagagaagagcagggtcagtgccagtggaactcaaggtactaaaggttcaacacaaaccaatataaagatcaagttagggttcaaaaagaaaggagcaaaagaaaccgaagagaaccctggtctggcgcaccggactgtccggtgtgccaccggatag

SEQ ID NO: 26539 - DNA, 1521 bp, Zea mays
  Peptide Sequence Number=SeqID_69914
atggacgcctttcaagggggtcaccctccttttaaaggcgactctccctacttgcgtccccagccgtcatgggctaagtcttctccaacacactccaaggtcctccccctatggcacgggggctgggtcccacgcgtcatgcaagctggcccagagcagaagaagccaaaccgccacgcgcggtgcatgcaaccgcccagcggttacaagcattcctccactttcgcccagaccagtgggcccacgcgtcatgcaaccggcgcactggttgctacgtgcgagcaactgcaccgccactcgcaccactaccacgcctcctcgactgcggaaccagcgggcaagagcagcggtcacgtcgtcagccaagcttacgtcccatccaggggcagcgagagaaccctctctcacggcgtgaagacggcgcgcccgtcttctgttcctcgaacggctcgcgcacgcgcaacggccgcctcacgaaccgcctgccccgtcacattaactccgcggcgggacaggcggcgcctctggcaggagaagcgagcgacgcttcgccttcgccataatgaccgcgttagaaaagggaccgggaaaggggataccctgaaaagggtccttctccgtgaaggaaacaggccccgagcctcactactgatcagaggttcgaaggctggcccctcggaggggttcaacagccgcctcagagcgcttgggttctgcgcccactactggtcagaggttcgaaggccggccccccggaagggttcaacggccgcctcaggccactcgggctccgcgcccactactgatcaggggttcgtaggctggcccccgaaggcggccaagcccggccctaggcgccatgggaaactccgctccgcccgaccccatggctcggactcgggctcagccccggaagacggcgaactccgctccgcccgaccccagggctcggactcgggctcagtcctggaagacggcgaactccgctccgcccgaccccagggctcggactcgagctcagccccgaaagacggcgaactccgctccgcccgaccccagggctcgaactcaggctcagtcccggaagacgacgaactccgctccgcccgaccccagggctcaggctcgggctcagccccggaagacggcgaactccgctccgcccgaccccagggctcggactcgggctcagccccggaagacgacaaactccgctccgcccgaccccagggctcggactcggtctcagccccgaagaacgacgaactccacttcgcccgacctcagggctcggactcagccctggcctcagccgacggtctctgcctcgcccgacccgggggctcggacttgacctcggcctcgaagacagactcgaccacgacctcggaggagcctccacatcgcccaacccagggcacggaccgaccacatcaacaggaggcgccatcgttaccctaccccaagctgactcaggctacggggaacaagaccggcgtcccatctggctcgctccgctag

SEQ ID NO: 26540 - DNA, 99 bp, Zea mays
  Peptide Sequence Number=SeqID_69915
atgggctctcggaaatatcaacttctctcgacggctatgtacgaggccgtggacataagattatatcgacggctggcagtttccaatgttgttatttaa

SEQ ID NO: 26541 - DNA, 435 bp, Zea mays
  Peptide Sequence Number=SeqID_69916
atgagcaccaaagtaggaggaggaggtggtaacgacgatggcgatgctagtgacggcaagcatggcagagtgacgccgttgagcgttgcatcggcaccactcatgaacaccggcggtggtccgagggtcgctctagaactactcatcaacaccaatggcaatgcacttgaaggcaacgtcacttctgagcctggatctagcaaggacaacaggtttgttctccctattaccatctcaacagtgttattgctgcgatcttacaagccctgcaaggtcattgtggcccaacttcctttagtgaagtttgagtatgctaaacctgttcctaggaagtttatggattatcttattcaagatttcgtggattttgcagcattttacactaagaaattacatttaaggaatactttaccaatgctaggaggaaaattttga

SEQ ID NO: 26542 - DNA, 213 bp, Zea mays
  Peptide Sequence Number=SeqID_69917
atggcttcaacgttatgcggcatcgagataatggcgttcgaggaggtgctcgatagactgaaggcattcgacgagtgttctcggcggcgcactcatgccagtgccaaatggtgcgacgaccagctccttctcatagaggccgagtggaaggctcaacgaaagaaaaagtcatcgattgggaagtgcttcaacttcgcaatcatcgtgacttag

SEQ ID NO: 26543 - DNA, 405 bp, Zea mays
  Peptide Sequence Number=SeqID_69918
atggccaaagggcacatttccgtttcagctagttgttcctgtccttggaagactcgaacacgagacacacaccaccaacaacacgcaaacatgtgcgctaaacaacacaacacactcactcggcctccacacacacatgacgctggatttattactaacatagcagttgtcaacgagatgtcccgatgcttcaagaaactccttgcgcatgaaatggttgaagtcgtgcttgtggcctactctggggtattcctaatgagcatacagagtggtgagcctgtgtacaaggagtctggctccttacatttggggcaggtgcagcaaccaatcacacggcacaagaccaagcacgagcagggcaagcattggaggggtgatgaggtggacttattgaaagttgcctag

SEQ ID NO: 26544 - DNA, 384 bp, Zea mays
  Peptide Sequence Number=SeqID_69919
atgggggacacccgcaatccttccgccttgtcgttggaggagcgcaactccgtggaagttggcacctttcagccatcgttcggcttcaaggattttcatcacttcaaggatgttcatcatcctcgctggggcggaggccgggctgagccggagctctacctcccgcgcgggttcgtgggtcagcctctccttcagcgttcgagggagagggcgctcactggccctgcgagaggggcggacttcgacaacgcggggctggtcgacggcgggcgtcgtcagcttcagcgcgttgggctcgccggcttggctcccggtgccccctcctcccgcaagggcggttgccgcgcacacgggaggaccgcccaagacgtcgcgcgctgctag

SEQ ID NO: 26545 - DNA, 1088 bp, Zea mays
  Peptide Sequence Number=SeqID_69920
atgaacataaagaccgacattcaaggtgccattacaaacggaaccccggttccacctccgcaggtacaaacaaccccacgcgattggggggcctgcggagcaacagaagaccgacgggtggctcaccgtcgcccgctccggcagcagcgacaacgacccccgctccgggtggccgaactgcagcagcgatggcctcagggcggacgccgctacaaccttgccctcgcccacgccggcgctcgaggggcgaggacaagtacaaagagccggaggctcagagcacggatggtggcggtgatcccgtcggcgacggggacttctcgagccgcctccgcctcggcaccaacgacaggggccgacagcccctcggcagatccccactcagatcctcccggacgagcggagctgaaagggaaatgtgcccttgggccatttctaagtattttggtgattgagtgccaactcaagtgcttaaaatgtgaatttatgcaatggatgaacaaagtgcaaatcaagagcaaagccaaggggctgtttcagtctggggcaccggactgtccggtggtgcaccggacagtgtccggtgcgccaggctgcctcggccgaacaggccgctctcgggaattcgccgacggcgtacggctaaaattcaccggactgtccggagcaccgacctccgcgcggagacgccgtaccggtgcaaaggcaggacagccccagaacacgaacgccgccctagcagcgcgcgacgtcttgggcggtcctcccgtgtgcgcggcaaccgcccttgcgggaggagggggcaccgggagccaagccggcgagcccaacgcgctgaagctgacgacgcccgccgtcgaccagccccgcgttgtcgaagtccgcccctctcgcagggccagtgagcgccctctccctcgaacgctgaaggagaggctgacccacgaacccgcgcgggaggtagagctccggctcagcccggcctccgccccagcgaggatgatgaacatccttgaagctgagggcgggaccaagatcgcagcccggcttgcttctccccacccaggggctggtggtcaccgtcttgg

SEQ ID NO: 26546 - DNA, 81 bp, Zea mays
  Peptide Sequence Number=SeqID_69921
atggcaaaggcccagcaaggatggcagaacggctgggcaacggcggtggtggcgctgcgagctgggaatacttatcattga

SEQ ID NO: 26547 - DNA, 594 bp, Zea mays
  Peptide Sequence Number=SeqID_69922
atgaagcatgtggcagatgtgagggcggtgaacgcaaagaacgctgagagcttaagagtcagattcagcttggcagttggtccatgcaggaagagtatgtcggtaattaagcgggagcatggagaggtggtgttgggtgtatatgacgagctgacgtgtctcggagaaaggggtgtcaaccgccagccgcgtaactgcgtcggcgcgtcgcgtaatcgcatccagccgccagcccgccagcggagcaactcagcagcgtcgaagtggagacgaaaacaggaactaccgaagtggaaacgagcaggaagcgtcgaagctgagcagcacggagacaagcggaacagcgctgcgtccagtggcagatctgaattttgcttcatcctggtctccaggaagccaagcaccagccaccaggccagggttttggatctggccgaccgacagactcaagttgttcctgttcgttctataaagatcgaggaaggacctagcgagatgggcaacggcggcagagccgcatgcagcttccactctccgctagcttccactctcctcccccagccagccctccgctaccttttacctccgttatga

SEQ ID NO: 26548 - DNA, 150 bp, Zea mays
  Peptide Sequence Number=SeqID_69923
atgggcgggggcctcctggcatcagcatccgccctgaggtcagtgtcgctgctgttcggccccccggagcagaagtcgtcgtcgtcgccgctgctggagcagggatgtttgtgcgagcgaaagtcgcttctcgcggaaggcgatgagtga

SEQ ID NO: 26549 - DNA, 399 bp, Zea mays
  Peptide Sequence Number=SeqID_69924
atgcagaccggctccgagcagaagaagccaaaccaccgcgcgtggggttgcgtctctggcagcagcaacgggcgacgcttcgccctcgccaaaacaaccgcaccaaaaaagggaccgggaaagggggatcccccgaaagggatccttccccgtgaaggaaccaggctccgagcctccttactgatcaggggttcgaaggctggcccccgaagggttcaacagccgcctcagatcgcgtgggccctacacccactactggtcagaggttcgaaggccggccccccgaagggttccacggccgcctcaggctactcgggctccgtgcccattactgatcaggggttcgaaggctggcccccgaagggttcacagtcgcctcagacgccgagcgagggatga

SEQ ID NO: 26550 - DNA, 1128 bp, Zea mays
  Peptide Sequence Number=SeqID_69925
atgcaggcggcatgcaaccgcaccaaggggggcgcaccctttcgacttcgacgtgtccagcatggaggcccaggcccacacgtcatggaccgggaaaggggataccccgaaagggatccttctccgcgaaggaagcgagccccgagccccctactgatcagaggttcgaaggctggcccctcggaggggttcaacagccgcctcagagcgctcgggctccgcgcccactactggtcagaggttcgaaggccggcccctcggaagggttcaacgcccgcctcaggccactcgggctccgcgcccactactgatcaggggttcgtaggctggccctcgaagggttcgacagtcgcctcagacgcagagcgagggatgaccctggggctcggcctcggcctcggccccggaagacgacgaactccgcctcgcccgaccccagggctcggactcgacctcgacctcggaagacagactcgacctcgacctcggtggagcctccgcctcgccctacctagggctcggaccgaccacgtcacaggaggggccatcattaccctacccgtagctagctctggctacggggaacaagaccggcgtcccatctggctcgccccggtaaaacaaataaagatggcgccccgcgtgctccatgacgacggcggctctcagcccccttatagaagcaaggagacgtcagcaaggactcgacagccccggcagctgtccttctgcaaggctccagcgctcctccgacggccacgacatcacacgaacagggtgccaaaacctctccggctgccacgacggcatggccctcttacagaaggttggccgcgcggggaaggacgggacggcgcgcgcataggcctctcgctccctccagcgcggacgcttgtaaccccctactgcaagcgcacccgacctgggcgcgggacaaacacgaaggccgcggggacccccggggtcgaaacgccgacagggccgaccgacgccatggatgtgctcatggcacggcgagcttctccagtaccggcctccgtctcacatgcaccttcccctagcgtgctcggctccagccatggcgtgtggacgctcaggttcggccctcctctggcctctgctcccatg

SEQ ID NO: 26551 - DNA, 537 bp, Zea mays
  Peptide Sequence Number=SeqID_69926
atggccaccacccacgacgactgcgtctccctctgtctcatggcgctcgcagccgcgggaggcggaggaatgacgacgcagtcgtacgctccgagcacggctgcctggacgacgcaagagtgcgagctccgcttccggtgctccgtctgtggcaaggccttcgcgtcgcaccaggcgctgggcgggcacaaggccagccaccgcaagccgacgcacctacagacacagcaggcgtcgtcgtcgtcggtgacgacctcgtcggccggcagcggcggcgggcaggggaggcacaggtgctcggtgtgccatcggagcttcgcgacagggcaggcgctcggtgggcacaagaggtgccattactgggacgggctctcggtgtcgctcaccgcgtcggggtccgggtcgaccgtcaagggtttcgatctgaatttgatgccggcgacgaggtggggagaggaggaagaggtgcagagccccttgccgatcaagaagaggcggctgtccggcccgtccttggaccttagtttaacgatttag

SEQ ID NO: 26552 - DNA, 243 bp, Zea mays
  Peptide Sequence Number=SeqID_69927
atgggggcccaggtcggccgcccctcccgccctacctcaggcacggccctgtctttgttctatcgtatcgtcataggaaattgcgcatcagtttccttatatggtttctacaccgcacgccacaagttccagtgtgcacgggctttctttgttatatcatatcgtgataagatattgcatatcggctttcatccatggttccacaccagggatggaaaaacaactcaaaacctgtggttttaa

SEQ ID NO: 26553 - DNA, 729 bp, Zea mays
  Peptide Sequence Number=SeqID_69928
atgcatcgcgtccttccaccttccgagcccccggatggggagcgcccgcgttgctttcgtcttgctgtcgttggaggagcgcaacttcgcggaagttggtacctttcagccatcggttggcttcaaggattttcatcaggcagcccggctgcttcccctcgccgatggtcacccaagacggtgaccaccagtttgatggtggggagaagcaagccgggctgcagcctctgccccaccctcagcttcaaggatcttcatcatccttgctggggtggagggcgagctgagccggagctctacctcccgtacgggccggtgggccacctcctccttcagcattcaggggagagggcgctcgccggcttagcggaaggggcggacttcgacaacgcggggccgatcagccgcaagcgtcgtcagctccagcatgcctggttcgctggctcagctggctctggcgcagcttccggtgccacctcccaccgctgggcagagtgcggctatctgcccaccgtacgggcggctgttgcgccgtgcgcgctgggggaccgcccaagacgtcgcgcgctgctagggcggcgttcgtgttcttgggctgtgctgcctttgcgccggtacgacgcctccgcgcggaggtcgatgctcgcctgtccgggaggacccgagtggggatctgctggtgggcagatggctgccgttgtcggtgctgaggtggtggcggctgaataa

SEQ ID NO: 26554 - DNA, 845 bp, Zea mays
  Peptide Sequence Number=SeqID_69929
atggagactacccatctagagcttgacgggaagctgttcatcagcacgcagcaggcccctacctggcgcaccaactatcggcgtttcgaccccgggggtccctggaccgacgatagggggttacaagcgtttgcgagggagagagagagcctgtgcgtcagcccgtcctcccgcgcggccaccttttcgtacgagggccctggaccttccctttatagatgtaaggagaaggcccaggtcgaggttgagtccgagccctgggttcgggcgaggcggagactgtcgttcaaggtcaaggttgagtccgagccctggggtcgggcgaggcggagaccgtcttccgaggtcgaggtggagtccgagccttggggtcgggcgaggcggagaccatcctccggtgtcgaggttgagtccgagccctggggtcgggcgaggcagagactgtcttccggtgtcgaggtggagtccgagccctggggtcgggcgaggcggagcttcctgtggcgcccgaggctggacttggctgctgtcagcctcaccctgacgggtggcacagcagtcggagcagcgcaggcggcgctgttttcctgtcaggcgatccttgcattgaatgctcctgcgatccggtcggctggcgaggcgatctggccaaggttgcttctccgcgaagcctgcccgagctgggcctcgggcgagttgaaggcgtgcccgttgcttgaggggaccctcgggcgaggcgtgaatctgcctgggcctttgcagctttgtgctgatgggggttaccagctgagattaggagtcttgggggtacccctaattatggtccccgacaaggtccaacaagg

SEQ ID NO: 26555 - DNA, 615 bp, Zea mays
  Peptide Sequence Number=SeqID_69930
atggcccagttatcatcatttgctagaggtgagaccttcgctccagggagccgcatcaccttcggcaccctcaacttctttgccacctccaccgacaagctcagcctcgtcgtccgcaacgtgcccgtcaccatgggcacgcaacccacacactctaccaggagcaaggcggagaagcgacgcctaaaaaggcgttccaccgtcctaaggcggcgcctcaatagacacaccaggacaaaggtggtggaagccctgtcttcgactctagtggcagtcatcaatcaccgaccgacatccgttctcgacttggtcaaagatgtttcgagccatggcttgaccggggctaacttcaacgccgaagaagcgccggaaagagcttgcttcgtagcgacgcccccaccaaacgataacggtggaggggataaggaggagaagctcgacgccctcgtgcaaaagctcgactgcctttacgatgatgtcgagcaaaggcaccttgaagccaaaaggtcccgaccaaggaaggtggcacccggagagaagaccaccggactgtccggtggcacaccggactgtccggtgtggaaagcctgcggcaccaacgatcacctgctctga

SEQ ID NO: 26556 - DNA, 225 bp, Zea mays
  Peptide Sequence Number=SeqID_69931
atggcgtgtggacacgtggtggctggggcaagcaggggtgagggtcggtgggtggcgcttctcgccgccgtaggcatctgcgtaatttctgggggcgccaacgcgactgggcattcaggtggggaagatgatgccacggccgctggatccgtaacagacgactgggatcgctcttggcataccggttcggtcggggtggctttgtggccatcgatcggtggatag

SEQ ID NO: 26557 - DNA, 510 bp, Zea mays
  Peptide Sequence Number=SeqID_69932
atgagcagtagagaggtcgcgcttgcgcgccgtggcgagttcctagcggatctaaatgccccgcgccttggaggaggaggcatacttcttctcgagggaatcccacacagccttagcagatgtggcgtcccagacatcctagagaacctcagaagtcatggacgaaagcaaaccgctgagcagctgttgctcttggccatactagcgctcgtagtcgggattgggggcatccatcatgccggccgacgtgataatcggcttggtcttgagaggagcggcattggatccatcgaggaaatcgagaagcttcgaactgcgaagatatggcaggagctgtgcacgctaaaggagatagtttgtttttgtgagcttgatggtgataacttggtggatgggaattggtggagaggaggacgatggcgtggtggttatggcaacgtacaggaagagaggcagcgagagatagatggaggagaggaggcggtggagaaaattgtggagattgattaa

SEQ ID NO: 26558 - DNA, 729 bp, Zea mays
  Peptide Sequence Number=SeqID_69933
atggaaaagactcacctaacctacgctgtgggccaaaatcaccaccgacccaccaaatctggccacctgcgtagctcaaattggtgttgcctgctttacgctgacgactggggctcatctgtgattgtctcacgggcactgcacatcttcccccaacaaccttctgctgtgcctgctccggggtcggctcaactaaccccgccggacgccgtggttcgctcggctggcgcatggacccgccttgactgcggcaccttctccgcgaattcgttgcaacagcgcacgcaatcgtcggggtctggtgggattctccctcctcgcatccggatccgacggagttccccttggttggttgttgctccggccgatctcttcgcaggaattacaattaagaaccggccacgacaagaaatcaaagcgcgagaggaccaggattcagtcgagatgggtctgcgagatcacaacgatgcttcggtggacatccgagggcgtgggagcaaccagaaccatgggaaattccgcatcacgggagcacacagccgcggagcatcgctcgccgtagctagcgttcaaccctgcctcaagtgcggtaagaagacctctgccgagtttgctgctatctcttctacgcatagcgctagggaatcgagaattgaatgttgtgggcactggattgggaacgcgccggcgatgccccgccgtggtgtgctctgcgccgccagttggtag

SEQ ID NO: 26559 - DNA, 204 bp, Zea mays
  Peptide Sequence Number=SeqID_69934
atgcgggcactggtacggctggcgctggcgtcttgccggctggccgtggccaagccgcagccggccaactaccgcccaaccctaaggcatgggaaggaccaggcaccgctacgtccagccacggaactgcagaggttcccgccggtcctaactcctaagaggttgtggactcaaacaataatactgttgtttatgctgatctaa

SEQ ID NO: 26560 - DNA, 156 bp, Zea mays
  Peptide Sequence Number=SeqID_69935
atggcgccgtcgtgtggagacctggccaccgcgcgttggggagtcaggcgagggagagagtctccgggccgttcgtctaggatcgagcagcatggattaggtgcagctggacgatcttctttaattcctagaaaattcatactaactcctttttag

SEQ ID NO: 26561 - DNA, 303 bp, Zea mays
  Peptide Sequence Number=SeqID_69936
atggcgcctcctgttgacgtggctggcctgcgccctaggttgggcgatgtggaggctcctccgcagccgaggtcgagtctgtcttccatggccgaggccgagtccgagcccctgggtcgggcgaggcgcaggtcgtcggctgaggccagggcggagtccgagccctggggtcgggcgaagcggagacttagcccgagtccgagccctgggtcgggcggagcggagttcgccgtcttccgggacttagcccgagtccgagccctgggtcgggcggagcggagttcgccgtcttccgggacttag

SEQ ID NO: 26562 - DNA, 864 bp, Zea mays
  Peptide Sequence Number=SeqID_69937
atggctcgtcttagacacaccgcacggaagtctatcatcctcttcttaccctctcgcctcgtgaagcgtccgcttcgccgtcccgtggccggtcagtccagtcacttgcagaggctgcaccaccgcctgcatgaggagcaggaacgtcgacgacaggagcagcagggctcttctttctcgctccagcaggagatagagtctgagccggaaggatggattgctcgacccatcactcgtgacgctgctcgcaggtgtcacttccatgacgcgctcgacaccctgctacgtcgggcacttgaccggcgtacttggtccatcgagtatcactgtgtggtctaccagcatagtcgcggggtctacccggaccgctgggaggcgacctacttggtgcgccgtctggagaatagtatctggggtgctgaggtctgctcggagcactattccatctctgagcgggactcagccgaggcggccatgcaagatgctgcatggcgtgcgctttcgcactactgctcagtactcggtggggtagctgatggtctcaacctgaagtactacccccgccgtccatctggcagcacaggaggcgtgattgtctcacctgttggtgaggacaatcctaggttgagcagcacagtcaacctagccgccgtgctaaacacggagctggaccatgcattagacgagctgagtagggctcgtgctgagatcgcccagatgcgggctgagcgcgcggaacgttgtcacctggatgatggttcccccgctcccgttgggactcagcacccgtaccgctcacctcggcgtggacaccagccttatggcaaccccgactgcaagaccaagatagacttagaaccatag

SEQ ID NO: 26563 - DNA, 537 bp, Zea mays
  Peptide Sequence Number=SeqID_69938
atgtccaagtccaacgggtctgaatctactggggaagcgttgatggacgctgcaatcaagagttgcacagggatcttgattacctatgaggtgtccgtggcgtcgacggcgtgggcgtccagggatggcgcacaggaccagcagtcgcgagacaggaccgggacagcgaaggtgacgggcctgggtggccacgcttggaaagacactgcaggttttcggcgagcccgcgcgctccgtgtgctacaacagtcgcatcatcaccggggacttataagatcgcctctccaatggcttcggcagttgagcattagacgagctgagaactgtcttcgtgtgggcgacggggctggccggccgacggagatggtgtggaggcagagggcggtgaacatggtaacatggcgttgggacttgggacttgggagggaagcaaagggggacgacgacgatggagacatcactaggagagaggcagagggcgctgttatcgcgaccaattcttcagctggagtgtcgaatgttctagattcgcagtag

SEQ ID NO: 26564 - DNA, 360 bp, Zea mays
  Peptide Sequence Number=SeqID_69939
atgcaccgacagatgctcgaggcagccttggtgacggttgacctcggcacacgggggcacgacctcgccctgtcggacggccatcagcagcagtaccgggccgcaatctccaagtgtgagcatggtacatgtcccgcgggcgatgaacttcaactctacggcagcggcggtaggaaaggcactcccctcggcatcggcaagggcgtactatttagtgccaccacattccgctactggccgccacaagggcgcctccgctggttattgctgcgatctactccagaggccccccagccgacgttcctgtccatcgatacctctctccaatccctcaccgatctagcgaccataacactataa

SEQ ID NO: 26565 - DNA, 1128 bp, Zea mays
  Peptide Sequence Number=SeqID_69940
atgagctggagctgggggtggacacggtctgtcggcgcagtcagggagctcagtgatgagctcgccggcgtgcctgagcattccttccagagcgtggccctcgtcgttggctccaccggcatagtaggcgcctccctcgtggacatcctcccacggtcggacacccccggcgggccatggaaggtatacgcgctctcccgccgtccaccaccgccctggtccctgccgtcatcctcctcgctgacacacatacacgtcgatctcaccgacttcgccgccgtcgccgaggccctcacgccgctcaccgacatcacgcacgtcttctacgtcgcctggtccccgcgcgccactgaggcggagaaccaggaggccaactccgccatgctccgcaacgtcctctccgtcgtcgtccccaactgccccgccctcgcccacgtctcgctccagacgggcaccaagcactacctgggaccgttcgagctcattggcaagatccccactccggacccgccctacaccgaggacgtgccgcgcctggactgcccaaacttctactacgaccaagaggacgtcctcttcgccgcagtctcccggcgcggcggcgccgtgagctggtccgtgcaccgccccaacctcatcctcggcttctctccgcggagcttcttcaacgtcgtgtgcagcctgtgcgtcacgctccgacgcggacctcatcgccgagcagcacatctgggcggccgtcgaccccatggtcagatccaggcgttcaacagcaacaacggagacctttacaactggaagacgctgtggccggtactcgccgctcgtttcgggctggagtggaccgggtacgacggcgaggagaagcagttcaaggtgtcggaggccatggccgggaaagaggcggtgtgggcggagattgtcagggagaacgggctcgtggagacacgcctccgcgacgttgccgattggtggcttatcgacgtcgtggtctatgagcatggcgccaactggaagcttttggatagcatgaacaagagcaaggagcacggattcctcggcttccgcgacacagtgaagtccttcaacaagtggattgacaagatgaaggcctgcaagattgttccttga

SEQ ID NO: 26566 - DNA, 675 bp, Zea mays
  Peptide Sequence Number=SeqID_69941
atggatcacatcacaagttatctagatcgtctcgcgcttcacaagcaataccatggcagcgactccgttcaagtcggcaatggcgcaggtgccaaaggttcaacacaaaccaatcaaaagaacaagttaggtctcaaaagaaaggagcaagaaggaaccgaaggcagccctggtctggcgcaccggactgtccggtgtgccaccggacagtgtctggtgccccagggtgcttcatctcgaactcttcaccttcgggtttcccaggcgcagctccgctataattcatcggacagtgtccggtgcacaccggactgtcccggcgcgccagcggagcatcgagaatctgcgcgcaacggtcgactctgcaaagtgaaacagtggaatcagatgtcagagcagacggtcagaggggcaccggactgtccggtgtcgcaccggactatccgttgccgcatgaggacaaaagcctccaacggtcgaccggctccgagccctaacgggaagatgacgtggcggcacaccggacactgtccggtggcgcaccggactgtccgatgcgcccatcgccagcagctttctccaacggctacaatttggttggtggctataaataccaccccaaccggccacttcaatgtgagggagcccaagcaacattccaagtcatctagttga

SEQ ID NO: 26567 - DNA, 402 bp, Zea mays
  Peptide Sequence Number=SeqID_69942
atgggcaagaacaacaaacgcaagcgtgagccgactcctccatcagaggacttcggtgattcggagtactcagaggaggagttctcctctgagtccgaggggtctccggctcccatccctctgcgtgagtcgtctgacgattcagacgactcccaggggcttgcggcggaggggtcggatgagtcggagtactcctcggacgaggaggactcgtccaagggcggtggtggcgatggcgacgacgacgatgatgacgacgacgacgacgaaggcggtggcggcaatgacggtgacggcggcgatgacggtgatggcggcggcaacaaggatggcgacggcggcagcagcaggggcagcaacaggggcggcagcggcagaggcagcaacagggccagtggctag

SEQ ID NO: 26568 - DNA, 228 bp, Zea mays
  Peptide Sequence Number=SeqID_69943
atggatcagagcttcatactcggctgcattgttggaggctggaaacagcaactggagggcatatttgaggtgctcgcctccagtgcgaggtcgaaattcgatgtcatgagatcccagttcacaggcccacttggctattcggccaacggcttccttgttgtgaagaatatcccctattggaaaaccagtgactactatgactttgtggtcgtcaaagtagtgacgtag

SEQ ID NO: 26569 - DNA, 345 bp, Zea mays
  Peptide Sequence Number=SeqID_69944
atggctcaccggagagctcgatccacgcgtgggggcgggcgaccgaagtccggcgagggtgatctcgggcttccggtgaagttctgccgggtccgaggacttggaaagcttcacaagctaatggtgaagctaaccgaagcgctggcgcgacttgggggtgacttgagtgggctggccacggtggctgaggctctggcggcaatggcgggcggaaaggagctcgccggagctaaggaggggcgtctggctggcgatggatttgagttagggatcaaggtgaacacgcttgatctttggctcaaggtctacaaatttgatgtggtgacccagggcaaaaaaccttag

SEQ ID NO: 26570 - DNA, 1074 bp, Zea mays
  Peptide Sequence Number=SeqID_69945
atggaacaggcagtaaaatctgcgtggctgctgcgcacgcccccgtcctcgaccgtgagttccatttcctcggccctgggggggatactcctggcagcgaggggcctcaccagcggggggctggttggcgatgttgtgcacctgctgctgattgcggccgtcccggccggagtctatctgcgagggcctcgtccaagtgcggctggactgcggagggtctttgggcttcctctgagactcgactttgcgctggtggagatcttcggatctagcatatttctcaaacagctgatacagctcctggaggttcctaggcgggtccctgatgcagtggctatagaggacaccgacccgaaggccactgatggcgtagtggatggcaatctgagtgagagttcagccaaggcgtcggtgtctgggcggtacccttggaagttgagcaagaatttgtcctggagacttctccaggagtcgatggacaatgggggcaacctggtgtaccaggtgaggtgccaggggacttcgctcgtcaaggtagttgacgccttggaaagccgtggcgtgagggatggtgtgttcgcactgagggatgaacaggtcttcgatttgtgcgcgctgctggaggggtgggccgtgttgcaggccgagttggccttcgctctgcatgagcgcgatctcttgttcaagcttctgtgccttatgctcttcgtcgcggcgcgcagctgtagctgctcttcggctgaaacgccgatgacttcgccgtcctcggtggcgtccgcgccctctggtggagcgaagcctgggggaggctgttgtggtcccccggagctgcagagtgttgtcaacgagggccttgcctttttctcggccagcagtgccaccttcgcggcttcgtcagccttcgacgagcgagactggcgaaggcatcgagcggagggtagcgtctatgccatcgccccaacatggggcaacactgctgtcatggcgaaatccttcgtcatggtgcctacagtgcccaatgagattgtcattgaggccatgatcagggggctcagaccaggaccaatgacgtaa

SEQ ID NO: 26571 - DNA, 471 bp, Zea mays
  Peptide Sequence Number=SeqID_69946
atggtggccctggcaaagtatgtttgggcgacgacttcgtacgacgggcagccatcggtcgaagtcttcgcgaagcactattctctgcattggcagaaaaggaaaatcggaaataagattgctcaatttggatcttgcacatttacgccgaagaccggcatgacttcgatggaagtcgtggagttggttccctggacccgcaataagtggggcaactggtgggaattttggttctacgttgccgaaggcacagtcgaaggccaactagggcttcccgtggccgtcatgtgttcgcattattacgtggcgtacccgcagtttgaggtagcggaggaggatgaaaacgagggggcccttcggtgcgcggcccgcatgagtagcgagcgcgacctcgttgaggaatttgtcgggtatggggctggctcgagcgaagtggccgctctcgggaattcaccggcgacgtacggctaa

SEQ ID NO: 26572 - DNA, 885 bp, Zea mays
  Peptide Sequence Number=SeqID_69947
atggcgcctcctgttgacgtggctggtctatgccctaggttgggcgatgtggaagctcctccgaagccgaggtcgagtctgtcttccgtggccgaggtcgagtccgagcccctgggtcgggcgaggcggaagccgtcggctgaggctagggcggagtccgagccctggggtcgggcggagcggagttcgtcgtcttctggggctgagcccaagtccgagccctgggtcgggcggagcggagttcgtcgtcttctggggctgagcccaagtctgagccctgggtcgggcagagctgagtttgccgtcttccgggacttagcccgtgtccgagccctgggtcgggcggagcggagttcgccgtcttctggggctgagcccgagtccgagccctgggtcgggcggagcgtagttcgccgtcttccgggacttagcccgtgtccgagccctgggtcgggcggagcggagcttcctatggtgccttcggcagggcctgactgcctgtcagtctcactctgtcaagtggcaccgcagacggagtggcgcaggcggcgctgtccttctgtcaggccgctttatgctgatgggggttaccagctgagaattaggagccttgagggtacccctaattatggtccccgacagttctcttcttgccttgtgctgtttataattggaccccgcctgagggtgcttgacagtttcatgtatgacaatgatcctattagatttggaggtggtcctccttcagttggagatggccctaatgcttttcctttcaagcccttagatctgaaatcctcacactacactgctgaagcaatgaagagggagaagcagctgaaggacaagagtctctacgccaagggacatgcagctgaaggataa

SEQ ID NO: 26573 - DNA, 891 bp, Zea mays
  Peptide Sequence Number=SeqID_69948
atggcggcgacaacccacgccgcctccatgtcgttcctcctctcccacccccagtcgcgctctgccaccccaagctgccacctcccgctccatctggcagcccgccgcgtccgggaggcggcgcggcacccggccctgaagcagggcctgtcggcgtggtacgagcccttcccgccggccccgaacggcgaccccaacgagcgctactccctggacgagatcgtgtaccgctccagctcggggggcctcctcgacgtgtggcacgacatggaggcgctggcccgcttctcgggcgcctactggcgcgacctctttgactcccgcatcgggcgcaccacctggccgtacgggtccggcgtgtggtccaagaaggagttcgtgctccccgagatcgagcccgaccacatcgtctccctgttcgagggcaactcgaacctgttctgggccgagcggctggggcgcgaccaccaaggcaggatgaacgacctgtgggtgaagcactgtggcatctcccacatgggctcgttcaaggacctcggcatgaccgtgctggtcagccaggtgaaccgcctccgccgcgcgccgctgtcgcgccccatcgccggcgtcgggtgcgcgtccatgggggacacctccgccgcgctctccgcctactgcgccgctgcggggatcccgaccatcgttttcctccccaccaaccgcatctcgctggagcagctcatccagcccattgccaacggcgccaccgtgctctcgctcgacaccgacttcgacgggtgcatgcggctcatcagggaggtgaccgccgagctgctatcatcatctttatgcattattttcactgtaagagatatatttatgtatcttatcctcatatttaggcatttctag

SEQ ID NO: 26574 - DNA, 387 bp, Zea mays
  Peptide Sequence Number=SeqID_69949
atgaagaacttgcatctcgggggtgcccaactcttcctgattctatcagctggttcaaaaggtgttgtgccaactagaaatctattgtatgctgtctttgaagagtataagccggaaacacacggtaaccagcgctttgatttcccattcaccccgacaaagtatattccattctatggaggagcagaataccatgactatcatcattatgtaggaggccagagccaaagcaattttgcttctgttttcacttactgtgattacttatatggcactgacaaaggttacagattccacaaaacatacctagcaaagctgaaggatctggggcataatgatggccagaaaggagacggcagcggacccagctatgtgaaactggattag

SEQ ID NO: 26575 - DNA, 708 bp, Zea mays
  Peptide Sequence Number=SeqID_69950
atgacgcccgccgaggcgctgtggttccggtacaccgcgggggtgtccgactaccacctctactgctgcaacatcctcttcctcttcgtcgtcttcacggtggccccgcttcccatcgcgctcctcgagctccgggccccggccgcggtctcgccgtacaaactgcagccgcgggtgcggctctccagggccgagttcgtccggtgctacaaggacgtcctccgcatcttcttcctcgtcatcggcccgctccagctcgtctcctacccggcggtcaagtttgtgggaattcacacgaagttgcctttgccgtcccttgcggagttggcagcacagctactggtgtacttccttgttgaggactacctcaattactggatccacaggtttctccacggggagtgggggtaccagaatatccaccgtgttcaccatgagttcactgcgccaataggattcgcagctccatatgcacactgggctgaggtgctgatactcggcatcccctccttcgtcgggccagccattgttccaggccacatgatcacattctggctctggattatactccgtcaggtggaggctatcgagacacatagcgggattgccttgagagttcttagctggctgtttactgttaaaggtttttttactctatacttctttggggtatttcctggtaatgaaggaataatacacatggattag

SEQ ID NO: 26576 - DNA, 420 bp, Zea mays
  Peptide Sequence Number=SeqID_69951
atggctcaccggagagctcggtccacgcgtgggggcgggcgaccgaagtccggcgagggtgatcttgggcttccggtgaagttctgccgggtccgaggacctggaaagcttcacaagctaatggcgaagctaaccgaagcgctggcgcgacttgggggtgactggagtgggctggccacggtggccgaggctctggcggcaatggcgtgcggaaaggagctcgccggagctaaggaggggcgtctggccggcgatgcgtcgagcacgaggcagcacagagagaggtcaagttcaagcgcggattggctccaaatctttgagattatggccatgatcccgttgagagatctcttcctctcaggttcctttgtcgtttctgtgtggaggttagcaggtttggccgactggattaagagatag

SEQ ID NO: 26577 - DNA, 279 bp, Zea mays
  Peptide Sequence Number=SeqID_69952
atggggaggcttgaaccctgggcagaatgggaatcacggcttgtgggtaaagtgtgcaacctctgtagagtattagaaactgttgcagacaccgaggcggaactcaccgaggcaaagggcactgcgacacctcaacggtggcagcagaacgggtgctcggacatggtgaacggcggcggtgctccaagctcggggaagggacaacgcacgagcgagggcaggctgggagttgtctgcaagtggaggaaatggccgagcggccgggaggggtttgagtag

SEQ ID NO: 26578 - DNA, 396 bp, Zea mays
  Peptide Sequence Number=SeqID_69953
atggctggcgcaccagacagtgtccggtggcgcaccgaactgtccggtgcacccatcgacagacagcctccccaacagttgaattggtggttgggggctataaataccccacaaccaccaccactccaaccatccaagcattcacaacagtgcattcaatacaagagcaaaacacaacactgcaagacacaaatcaaagattctgatccaatcaaagtccacaattcagctctaataaccctaaatgctatcaaatttgctaggataaatgatctaaccgttggtgactaccataatctaatgatggacaccattgatgaggtgaccgataagaggatgatggctctaagggagatcaagaacgacaaggtcatagccgccaaggcctataactaa

SEQ ID NO: 26579 - DNA, 312 bp, Zea mays
  Peptide Sequence Number=SeqID_69954
atggaacaacagggcaacggtggtggcgcagggacgcgacggacgacggtggcggagctccggctgtgcgagaatcactccgggtgcggggctcaaaaggggcgcgagggctcggacgtggccagagaacgtgcggtcgtgggcgcgtccacggtggggagatcgtgggcaagagccggagagccgccaccgtcgacccaagccctcgtcgtgtccctgtcactgttcaagggtcctggaatctcctctcaaggaggagatgcagacaacatggaggactttgaggagttccaggactacgatgaattctag

SEQ ID NO: 26580 - DNA, 633 bp, Zea mays
  Peptide Sequence Number=SeqID_69955
atgagcagaggaaaaacgtgcgaccgccatggatccggccggtttctctgctaccagcaaagtccggttcaacggaatccgcgatttgacctccgaaccccgtccgggatcctcgtggagctgcctataaaacctagttgtgcgcccttcctgctaaccacttggggccgcgccgtttccgccgtgaacgcagaaagaagcagacgtcgccgccgtcaggtgctctcgttgttccctgctagccgggacccctctgtaggcacggggttattcacggacgtccttcgaagctatgcatggcatcggcgggtcgagtgtgtcctcggcactgctctaatggctcaccggagcacggcagtcaccgtgggatcggtcctcgccgttggcaggcttactcactacacgattcacggtaaggtttccctcaaactgttcacctccatccatagatcgcatagcaacagttggagtggggatagagcatcggggcaccgcaggggggacagctccggcgggtgcgccgccgcaattgcgccgcccggttcgggtccgtggggagaaggtggcctcctggccgttggatcgtcccctacggtggagattagacgactgtgcaccgattcgcaggaatag

SEQ ID NO: 26581 - DNA, 591 bp, Zea mays
  Peptide Sequence Number=SeqID_69956
atgagcagaggaaaaacgtgcgaccgccatggatccggtcggtttctctgctaccagcaaagtctggttcaacggaatccgcgatttgacctccgaaccccgtccgagatcctcgcggagctgcctataaaacctagttgtgcgcccttcctgctgaccacctggggccgtgccgtttccgccgtgaacgcagaaagaagcagacgtcggcgccgtcaagtgctctcgttgttccctgctagccgggacccctctgtaggcacggggttattcacggacgtccttcgaagctatgcatggcatcggcgggtcgagtgtgtcctcggcactgctctaatggctcaccggagcacggcagtcaccgtgggatcggtcctcgccgttggcaggcttactcactacacgattcacggtaaggtttccctcaaactgttcacctccatccatagatcgcatagcaacagttggagtggggatagagcatcgaggcaccgcaggggggacagctccggcgggcgcgccgcccggttcaggtccgtggggagaaggtggcctcctggccgttggatcgtcccctacggtggagattag

SEQ ID NO: 26582 - DNA, 483 bp, Zea mays
  Peptide Sequence Number=SeqID_69957
atggggaggctagaaccctgggcagaatgggaatcacggcttgtgggtaaagtgtgcaacctctgcagagtgttagaaactgatatatcagtcgtgctcatgatggcccgtatcaggtgcactgcacgtaagtctgtgatccctttttgccttctcgactggcggagtgtcccctgcgtcgcacggtgtcaggtcagtctagtcacttggagagactgcatcgtcgcctacatgaggagcaggagcgccgacgccaggagcaggagcaggactaggagcagcaggactcttccccctcgcctcaatgggagctggagtctgagaggcctccttcccctgcgcctcagccagagatgccccctgcaccaccacagggcatcccggctgctggaggagaccccgacggagatggagatgatgacgacgccggtggcagttcagacgagccggagccggagggggtggatcgcaagacccatctga

SEQ ID NO: 26583 - DNA, 1140 bp, Zea mays
  Peptide Sequence Number=SeqID_69958
atggagctgtcgatgagtggcagctccctgcgaacgttcggccggtgcgtgaccttcctcgcgcgcgttgcctccgagctcgtgctccaggcgcaccccgccaagctggagatgcacacgcttaacagctcgcggtcggcgtacgcttcgatctccctagcgcgcgacttcttcgaccagtatcacctcgacgccgcggcttcggcaccgtcttccacgccgctgcagtgcagcgtcctcctcaagtccctgctcgccgtcctccgcacgccgcacgccgcgctcgaccgactcgccgtatccctcccagaacccgacgcacccaagctccagatcaccctccactgcctcaatggtgtgaggaagacgtactggatcgtgtgcagcgcagagcccgaggtgcagtcgctgtcgctagaccggggacggttcccgagccgcctagccattcggccgcgggagctggcgcggctgttgtccaacttccagtcctcgctgcaggagctcacaatcatcgctacagatcctgcttcagggttacctgatgctagcggtgacgtcgggggcaaggctgttgagctccggagctacaatgacccgacaaaagatgactgtgacactagactgcacacacaactgtggatcgaccctgccgaggagttcgtggagtttgttcatgctggtgatccggtggatgtcacctttggggtaaaagaactgaaggcttttttaacattttgtgaaggatgtgaggttgacatcctcctattctttgagaagactggcgaacctgttcttttggtcccgagattcggattggatgatggagcagcttctgattttgaagctactctagttctggctactatgactgtatcacaattatctgacagcgatgatgcccaacaaccagctacatcagcacaaaacgcgggagaaccaggggctgctgcaccaacactagttcctgaaaatgtctcgaaccatactaaaatatggtcggagctttcagaaggtatcagtggtattcctcgatcacaacaccacccgagcaactgggtcggtgctgatgataacgacgatgacaatgaagacgacgaggagcttttagtccagacaacaccctactatatggactga

SEQ ID NO: 26584 - DNA, 312 bp, Zea mays
  Peptide Sequence Number=SeqID_69959
atgacgcatttctctgggcggaggttggcccgcccattcctgcccgacgtcccggcggatcggctcaagcgctcctgctccctcgtcgagcctgtcctacaacatgggtcgggcgaggcggagaccgtcggctggggccagggcccgagtccgagccctgggtcgggcggatcggtgttcgccgtcttccggggcttagcccgagtccgagccctgggtcacgcggagcggaagttcgccgtcttccggggcttagcccgagtccgagccctgggtcgggcggagcggagttcgccgtctttcggggcttag

SEQ ID NO: 26585 - DNA, 1053 bp, Zea mays
  Peptide Sequence Number=SeqID_69960
atggcaccctcgcatgcccactctcgctccgtgccgctcctcctcctcgtgataggagtttgttgctgctgcagtggagcatcatcgcccgtcgtcggtcgtctcgacgacgacccgacctgtcctcgggagccgacggcggcggtggcagccgtgtcgtcagctgagtctagctacgtcgagccacgccggtgccagccgccggcgccgcacatcgcggtggccgtgttcccctacgacgtcgacccgatgcagttcgcgctgaacctggagtacaccgaggccgagttcttcctgcacggcgcgtacggcgtggggctcgaccacctcgcgccgaggctggcgctgggcggcccgcctccggtgggcgcccggaaggccaacctcgacgaggtgacgaggcgcatcgtcgcggagtttggcctgcaggaagttggccacatcagcgcacggtcggcgggattcctcggcccgttgatagacctcagcgcccacaacttcgctagggtgatggacgaggcgttcgggacccgcctggaccctcccttcgatccctacgtcaacagcctcaacttcctgctggcctcgtacgtcatcccctacctcggcatcaacggctacgtcggcaccaaccccatcgtcgacggctaccagacaaagaagcttctggcagggctgctgggggtggaggcggcgcaggacgcggtgttccgggcacgcctcttcgagcgcctcggcgaggccgtgccaccgtacgggaacatcacggtggccgagttcacggaccgcgtgtcggcgctgcgcaaccggctggggcggtgcggggtcaaggacgaggggctcacggtgccccgccggctcggcgccgagggcgccatctgcaccaacgtgctctccgcggacagggactcgctctcctacgcccggacgcccgccgagctgctcagcatcctctacctcaccggcgacgagcgcgtgcccggcgggttctatccggagggtgccaacgggaggatcgccaggtcctttcttggcaagccacatggaaactag

SEQ ID NO: 26586 - DNA, 699 bp, Zea mays
  Peptide Sequence Number=SeqID_69961
atgtggattgggaaaaagggcaatgtgtttcttcaaataaggtctcttttcaaaaagttatgcgatgaagggtactcaccctcatcaccttgggagtgggatgatcaaggactccctggtttaggggagggcctaagcctcctaggactagtaattgtatcacatttgagtcccaaaggatcgggacgcttcatgacacgggtggccactgatgcggtgggtggcgccaagttgggcgcgcgggtaggcgtgaaggcggggactagagcggtcgcgatcgtggcgggccgtggggtgcggtgccacgcaagactatttgagtccgacggcaggcggttggtggacttggtggcacccgaggagggcgggtggcacacggtgctttggcgaagcagccacaacggttgtgcctcggccgtgttggcaaggattgggtccacaccttcagcgaatggtgggcgagcccgctgcgagggttcatgcgcgggcatgaggatggccttcgcaggctgtccgtgccgtggggctttgccccacgcccgccatcatgcttctccctggcatgatttatgcgattgtgtgcttccttggccttgcatcgctggttccactggagggagtagtgttcgacacagctttgcggctgttgtggcagtcggcgtgtctgtgaggaaaatggaccccgggccttttggctaa

SEQ ID NO: 26587 - DNA, 780 bp, Zea mays
  Peptide Sequence Number=SeqID_69962
atggctggctgccgcacccgagacctgcaccgccaggtcgttgcccacgctggagccagcgtggtcgcgccccgcgtcaccgttgacgcgcaccgccgagaaggggccaccgcgccgcaaggggctgcgcttgcactgccggggtggccgcgcgtccgcgccgcccgcacgccggggccgctgcccgcgcgcaatggccgcgccatcgaagccgctgccaacgcgcgggatgggccgctgcgccccgcgccgtcagcgccggggccgcgcagccgcatccgcgcaggggccgacggggcctggccgccgcgccgccgctgtcgcgtgccgcgcccgggccaccgccagtgccccgcccccacgcgcctgccgcaaggggcccgtgtcggccgcgccatgcgccgctggggggccgcaccgcccgcgcgcctgggatggaggggtcgcgtgcccgaacccgcgccggagccatggcctggaccgccatggctgcgtgccggggccgcgacctcgccgagtgccgcgccgccgggtgccgcgcctgtgcgctggggcggggccacttgcccgtgtgccgtggaggccactggggcctggacgagggaaatgcccgccagggccgcgcctatgcctacggggctgcgcgcccaccaccaggaaccgcccccgtcgtgcctgcgccatgccgcggggaagcccgagcctgagagtgacgaggtcgggggcaaccgcgctgtggccgccgtgaccctatggcggctgcagtggatgatgagaacg

SEQ ID NO: 26588 - DNA, 276 bp, Zea mays
  Peptide Sequence Number=SeqID_69963
atggcaatgggtacccgctacccgaaacccgtgggtatgggaaacccgttgggtacccgaaacccgcatgggtatgggtttgggcaaaattttatacccgtcatgggtatgggttttttagcgagcgtatttttccttcgcgggtatgagtttgggcaagtaatacccagcgggtttatacccgttgccatctctagatcggagtgggggaattctctgcacttgggcatgcttggcgttagagatggcaataaagaattttccgtcaggttttag

SEQ ID NO: 26589 - DNA, 66 bp, Zea mays
  Peptide Sequence Number=SeqID_69964
atggactccatgatgtttgaggttgctaaattggatcacgctaacagtaaaagggaagaaacttga

SEQ ID NO: 26590 - DNA, 960 bp, Zea mays
  Peptide Sequence Number=SeqID_69965
atggcgtcaggagctgcggcccctgtcgttcaggtgagcgtccatgcctttctcatctccctccaccccaagcctcaaaccctggtgctgaaggtggccatccactgccatggctgcaagaagaaggtccggaaggtgctcaggagcgtcgaaggcgtgcagaacgtgacggtggacgcctcgcagaacaaggtgactgtggtcggcaccgtggacgccgacacgctcatccagaggttgtacaagtccggcaagaagggggagccctggcagtgccacccgcccgtcaagaagagcgagcccgcgccggaggccccgccggctgcgcatcctgccggtggcggcggcaaggacgctgctactgctgcggccgcggtggacaagaagccggaggagccgatgaagaagccgcagggcgacagctccgaggagaagaagaagaagccggaggaggcggcgaaggagccgcagagcgagaagaagaagccggaggaggcggcgaaggagccgcagagcgagaagaagaagccggaggaggtggtgaaggcgccgcagagcgagaaggaggagccgcagagcgagaagaagaagccggatgaggcggccgagagctccaaggagaaggagaagaaaccagaggagccagtgaaggagccaaaggccgagagctccaaggaggagaagaagaagaagccggaggaggccgtgaaggagccgcagggtgagagctccgaggagaagaagaagaagacggagcaggagggcggggccgcagagaagaagcccgaagcagagtcaaagaagaaggacggcggtgacagcaagggagctgagacgaaggccaagggctcagcagagccggcaaaggaagctgccgccgtccccgcccccgctgccgccgccgctgtcaatgacaaggccgaggcaaagaagagcgagaagcccaaggacgccggttag

SEQ ID NO: 26591 - DNA, 270 bp, Zea mays
  Peptide Sequence Number=SeqID_69966
atggcgagagggccggcggcgacctttccagccgcaggcgtcaaacgccggcctctggtgggcgggcccgacaacgaacagcctctgcattttgctaagcctggcatcggtgtcatgcgcacgcttgcagcggccaggaagccgtctcgcggtttcggacatggaaaggtcgtggacgtgggcggatctcaaacggctggctgggatgatatattagctcagagtccaaaactagccaccggaagcaaaagcagaaaatttgcgtggtag

SEQ ID NO: 26592 - DNA, 198 bp, Zea mays
  Peptide Sequence Number=SeqID_69967
atggcggttggcgggcatgtcctgcctgcttgctttcacagcctacgcagctccatgtcagcgccgtggatctttgcagcgcaaagtcgccacctacctgccaccccttctcgctctggaataaaagctgtccctggagactggagtgatggagacagcgttgttcccggcaaggactgtgcatctccagttaaataa

SEQ ID NO: 26593 - DNA, 321 bp, Zea mays
  Peptide Sequence Number=SeqID_69968
atgtgggtccagggacataaagaatatagtgcttggaacctactaatgtctgttgccgagaccatcttcttgtgccctaacgcccgagatctgcgtatcttcggcgtgcaggggaagcttcttgtagaagagaggatgagtatagcgcgccacttgcttatgtcatgggccacaagcagcgggtctccgcctgagcgggaagtggagggcaaggcccggacacgtgtcagcactggacccctgctcataccagggtcctcctcgttccgggaccccgctgaggttcggacctacccagaggctccggacttatatgtatag

SEQ ID NO: 26594 - DNA, 747 bp, Zea mays
  Peptide Sequence Number=SeqID_69969
atgggcaagggcggcggctgcgtccccagcaagaagcgccagccgccggccgccgcgccttcttcgtcgtccgccgcggcggcggtgccgcgcgaggcgcccgaggaggaggcggccgccgcggtcgggcgaaagctgcggctctacatcgtgttctactcgatgtacgggcacgtggagtccctggcacggcgcgcagcggctggcgccggcgcagtggacggcctggaggccgtgctgcggcgggtccccgagacgctcccgccggaggtgctggagaagatgcaggcgccggtcaaggaccccgcggtccccgtgatcgcgtcggccgcggagctgcaggaggctgacggagtgttgtttggcttcccgacgaggtacggcgccatggctgcgcaaatgaaggccttcttcgactccaccggctcgctctgggaggcgcagaagctcgctgggaagcccgccgggttcttcgtcagcaccggaacgcagggcggggggcaggagaccacggcttggacggccatcacccagctagctcaccatggaatgcttttcgtcccaattggctacacctttggttcaggcatgttcgacatggatggtatcagaggaggcagcccctatggcgcgggggtatttgctggcgatggcagcagacaacccagtgagactgaactcgcccttgcagagcaccagggcaagtacatggcctccatagtgaaaaagctagctctccatgcttga

SEQ ID NO: 26595 - DNA, 219 bp, Zea mays
  Peptide Sequence Number=SeqID_69970
atgcagcatgctggaaagaagaattataagcccaagcagactactcaatttaagaagaatatgatgataaacatggatgaggttgtgtgcttcgtttgtggtgagaatgagcatttcattaagtgtaggaaccgcaaagacaagaagaaccagccagggcaaaagtctgctaatgtgactattggtgatcctagaggatctgggataatatacaaataa

SEQ ID NO: 26596 - DNA, 393 bp, Zea mays
  Peptide Sequence Number=SeqID_69971
atgacgggcgagggagaccttgaacggcaaggacgaccgagccgagggactcatacgcctatgggatacgaatacctcactcttcaccttccgcgagaggtacctcacgctcggataagtgattctgctaccgacgaacaagtcctaatgctcgaaacaacaggaaagaagcacaactttatacccaaatgttcaggcctcagcagccacaaagaacaaacaaacatacttggggtaacaatgagggtaccattacaaacaggactccgggtccattcccacaggaatgaacaacctccacacaagaaggcctgggagataacaaactccaggtggctcgccgacgaccactacaccagcagcgcgacaacgacctccatctcggacggctag

SEQ ID NO: 26597 - DNA, 510 bp, Zea mays
  Peptide Sequence Number=SeqID_69972
atggctgaaaggtaccaactcccgcggagttgcgttcctccaacgatgaggtggaaagacggcgggtatcccccatccgggggcttggaaggtggaaagacacgatgcataagggagtgcgaagacatggtcgccttccaagggggtcaccctccttttaaaggcgactatccctacttgcgtccccagccgtcacgggctaagtcttctccaacacgctccaaggccctcccctgcggcgtgggggctgggtcccacatgccatgcaagccggctcagagcagaagaagccaaaccgccgtgcgcgggaccgggaagggggataccccaaaaaggatccttccctgtgaaggaacctggctccgagccaccctactgatcagaggttcgaaggctggccccccggaagggttcgacagccgcctcagatcgcgtgggccctacaacaactactggtcagaggttcgaaggtcggcccctcggaagggttccacggccgcctcaggctag

SEQ ID NO: 26598 - DNA, 534 bp, Zea mays
  Peptide Sequence Number=SeqID_69973
atggaggtgatcctactgcgacgaggagggagagtgttggaggagaggtacctgaagcagcctctcggggacctaggcttcaagcgctcatgggcggtggaccctgtggctccggaggcagacaccgcggtttcatgcggcgggcaggcagccgtcgagctcgccgatctcagaatgtggcttaacatgttcctggaaggttcaattgtctacacgagggccaccatcgtcttcatgcgccgccccaacggtgacctcatcgtcggcctgcgccacgacgaggaggaggcagttcccaacaccttacccaacatgtgttcgatgatttgcttcatccgcggcctcgacgtcggcagtcacctatgggggaataactctactgctgctgaccacgacacgacaggcttgaggctgctctggtggctcaagaaccagacgtccttccagaggtctggcagctgggaccacttcatcacgttggggcacatcttcatcgatcttgagcctttaagggcacgtttgtttgtgggatag

SEQ ID NO: 26599 - DNA, 309 bp, Zea mays
  Peptide Sequence Number=SeqID_69974
atggccacctcgacttcgactacctcggcatccaggggctatcatcttcttggagtacacaccggtctctactccaaccgcaatattcacaacctcacgacgctgagactgcggggggatttcaacctgtcggctgctacctttggcttctactccagtctcatcatcggcggcgtggagcgcaagcctgcgggcgcaagcggggcgacggggaaggtggaagccgccataggagcgggcatcaaggtgcgggccggctacttcgctgctgatccggaggtgtggtgggatggggacgcggagaagaag

SEQ ID NO: 26600 - DNA, 660 bp, Zea mays
  Peptide Sequence Number=SeqID_69975
atgctagtggctctagatatctcctgcactaacagcaccacaaaaattgcattcaacactgaccattttaatcccttgttcactttgtttgcaataaccttgtaccaatttcctgcaggtgggcttggggatgttgctggagctttgcctaaggctttggccaagagaggtcatcgtgtcatggtagtagttccaaaatacggtgactatgaggaaccacaagagataggagagccaaggagctaccacgttgcagggcaggatatggaagtaaagtattatcatgcatacatagatggtgtggattttgttttcattgacaatcctgtcttccactatgttcaaagtgaaatttatggtggggaccaaactgacatctggaaacgaatggttttgttgtgcaaagcagctgtagaggttcaatggtatgttccatgtggtggcttctgctacggtgatggaaatcttgtgtttattgcaaatgattggcatactgcacttctacctgtttatttaaaggcatactatcgtgacaatggttttatgccatatgcccgttcagttcttgtgatacacaatatagcacatcagggatggcagttaggccagtggtgcatgcaggtcatagtggcccatggttgtacctgccaggcaatttga

SEQ ID NO: 26601 - DNA, 729 bp, Zea mays
  Peptide Sequence Number=SeqID_69976
atgggggctgagcccgcgcctgtggaggccacgacggcaagggacgctctcgtggcagacaggggagcggcggcgacccctacagtggaggcaagctccatggggggaagggaggggagggaagtccggccgacaaggggagatcgacggccggagtctgaatgggttacatttctgtggaaggagctgacagtatcaggaattgagcctggatgggttatatttttgtggaagaagatatcagaaaagaagcagctcatctcaactatactagacagttccattcataatgagcaagagccactcagtggtcagagtgatggttccttatcaaacctgaatgcaattgcaaagggcacagagattggttatgaccatcagacataccataataggtctttacagcaatatgaatttgacaccacttatggagaatccatctacgatcagaacacatactatgaaagttcagaagacgacggcactgatttcagtgagaattatcagtataaaagttttcctagagctactcgtagtgtgtatgaactagaagaagataatggtatgaaacaaggctatgtggtacaactaagtcaagcaagtggacatgagcagtcagttaacgagggaacaaatgacaatgcgtctgaagttgatgttatgaatgtcatattggtagccgcagagtgtgctccttggtccaaaacagggggtgggattgggttgtga

SEQ ID NO: 26602 - DNA, 1407 bp, Zea mays
  Peptide Sequence Number=SeqID_69977
atggggagcgcccgtgttgctttcatcttgtcgtcgttggaggaatgcaacttcgcggaagttggtacctttcagccatcgctcggcttcaaggattttcatcaggcagcccggctgcatcccctcgccggtggggagagggcgctcaccggcctagcggaagggacggacttcggcaacgcagggctggtcggtcgcgagcgtcatcagcttcagcgtgttgggcttgctggctcagctggctctggctcggctcccggtgcccccctcccgccgtcgggcggagcgtggccgcctgcccgccgtacgagcggttgttgcgccgcgcgcaccggaggaccgcccaagacgtcgcgcgctgctagggcggcgttcgtgttcttgggctgtcctgcctttgctccgatggctgccgtcgtcggcgccgaggtggtggcggctgtagaagtcctcgtcgccgacgagatcgccgccaccatccgcgctccgggcctccggctctttggctttgatagcttgtcctcgcccctcgagtggggtcatgggcgagggccttgtcgcagcagcgtctgccctggggtcattgttgctgctgtttggccgcctggagcggaggtcattgtcgctgctgccggagtgggcggcggtgagccacctggggttttgtcgtcccgcaggccctccaatgtggggggttgttcgtacctacgggagtggaaccggagttccgtctgtaatggcaccttgagtgtcggtgtctgttcattgtggctatcggggcctgaacatgagtcccttggctcggtcggccttgccgcccgaggcttctcttgcttagttaaagaaaccctcggccgctctgcgatgagccgaagctggaggcagcggtgtgagcatggacagaggcagagttggctcgaaaagaagcttcgtcggccggagcctggccgggccgtccactggcgggaccgacgccggagtcgggttgccgaggccatgagccgggctgatgtcctcgagggacagctggctgaggctatgaagcggccggtcgagccgtcagctcgggccgggttcccggaggagaccctagcggtgatggcccaggctggtgccgacaggttccttcgaggtggagatcctccgactgtgttgccgttcgaggcctggtcggattccgccgaaggtggagtcaacgccgagggtgctgctgctcccccactgatgtctgatcctgcaggaacagtttatctgtacggaatcgcttatccgagcgtgagttacttatcacagaaggtgatgagtgaggatcccactttcgaagtagtcaaaaagcacgaaagatgttctggcagaaagactttttccgaggaaaattttgacgcagagggggtgccccccttttag

SEQ ID NO: 26603 - DNA, 1017 bp, Zea mays
  Peptide Sequence Number=SeqID_69978
atgcaggcggcatgcaaccgcaccaaggggtcgcaccctttcgactccgacgcgtctagcatgggggcccagacccacacgtcatgtaaccgacgcgccggttactacgtgcgggaaactgcaccgccacttgtgtcagtaccgcgccttctcgactacggaaccggtgccgcgactcgagacaaccctgcgcatggcccaacggtgccaaccgagcacatcgatcacgggtcagtcagccgcgggagaaggcgcgatggtcgatatggccaaaagtgggccggcagtaatggcggcggcaggcgggcggaagcagcggtcaagtcgtctgcaggcacacgtcccctcctgggacagagagagagccctctcccatggtgtgaagacgacgcgcccgtgttccgttcctcaaatggctcggaccgggaaaggggatactccgaaagggatccttctccgcgaaggaagcgggccccgagccctcctactgatcagaggttcgaaggctggcccctcggaagggttcaacagccgcctcagagcactcgggctccgcgcccactactgatcagaggttcgaaggctggcccctcggaagggttcgacagccgtctcagagcactcaggctccgcgcccactactggtcaaaggttcgaaggctggcccctcggaagggttcgacagccgcctcaggccactcgggctccgcgcccattactgatcaggggttcgtaggctggcccccgaagggttcgacagccgcctcagagcacgcagagcgagggatgactctgggtacgtctgatacatggccgaggctcgggctacgctcccatggtaccctaggacatttccgagaccagcagaagcgattctgtaacggaatcccatcagagggaggcatcgagccctcggaccctatcaaacgggaccggacaccatgttcggcgccctccgagggcaacatggcgctctcccccgtcctccttgcggaaaggcgacgcaggggcgtatga

SEQ ID NO: 26604 - DNA, 564 bp, Zea mays
  Peptide Sequence Number=SeqID_69979
atgccctgctcgtttctggtagcagtcggctgtgggttgtggctagggatggcagcgggtcgggttgtgttcgggtctgataatacccgacccgatatcatacccgacccttatacaaatatccatacccaccaagtcaatcgggtaaaaaaatggacccgtacccgtacccaccgggtatccgtcgggtatcgggtatccggtggatatggtactgtaaaatataaatctgcatgcaaattgatgaacaatgttatgaacagctcggggacgccgcagcggggcagcgggctgctgtctgctggattgctgggcgagggcgcggggctggggcctggggcctggccgccgcggcgcctcctgggagcctggacgggggcgcgcggttggggcttggggcctggccgtcgcggcgccgcctgggagcctggacggggactgccgcagtgccgcgtgcccgcgtggccgcgtggggcgctgggtcctgggctcctggcctccacctccagggaaggctgggacgaggacgactgggactctgggagtggcggctgcggtgggtag

SEQ ID NO: 26605 - DNA, 411 bp, Zea mays
  Peptide Sequence Number=SeqID_69980
atggcggacccgcctccccatccgcaccctaaccactcgttcctcgtggcctccaccatccccttcgtgggatccgcatccacggccgggccagcctccctcatcatcggcccctactcggtaccgttccttctccccactcccgcctccgcctcctctcgtcgtgttgtctgcggcgagctctacgccccatcccacgccgcgctcgccgagctcgatgccttcgaggcaagcgcctcgcctcctcgtcaaactcgttccctgtccactgaggacaaaaggatgcaactcctggataaacttaagtacatggagcgagaattggttgcaaccaaagggtgggagagtgcattacaggaacaactactaaaggagttgggtgactataaggggcgtattgtggtcaagtaa

SEQ ID NO: 26606 - DNA, 389 bp, Zea mays
  Peptide Sequence Number=SeqID_69981
ggcatagtggtcaccccgagttaaggcatagtggtcaccccgagttaaggcatagtggtcaccccgagttaaggcatagtggtcaccccgagttaaggcatagtggtcaccccgagttaaggcatagtggtcaccccgagttaaggcatagtggtcaccccgagttaaggcatagtggtcaccccgagttaaggcatagtggtcaccccgagttaaggcatagtggtcaccccgagttaaggcatagtggtcaccccgagttaaggcatagtggtcaccccgagttaaggcatagtggtcaccccgagttaaggcatagtggtcaccctgagttaaggcatagtggtcaccccgagttaagtaagcgtgagcatgttgcaccgccttaa

SEQ ID NO: 26607 - DNA, 393 bp, Zea mays
  Peptide Sequence Number=SeqID_69982
atgcgcgacaactcttgggttgtcggctggttgtgcccgagacatcctgtctctggtggccttcatttccgggcagtctcttgttgggtgcgcgcagtcttcgccgtggaacaagcagtaaaatctgcgcggcttgatatgaccacgccatcaaccaacacgttacaacccctaagtcatactacatcaactcaagtacaaccaacatcatcaccgacccaagtctttgatggaccaattacacgtagccgagctaagaagctacaacaagaggtgcacgcgctactttatgaatttcgattaaacactaatgagaattttatgctacctaagtcgttaaggcagccgacctactttagtgctgactggtcagaaggtcaacagtctgcttga

SEQ ID NO: 26608 - DNA, 336 bp, Zea mays
  Peptide Sequence Number=SeqID_69983
atgtcggacgaccttgttgttcctgtccactttgaagttggccaagaaccttgcttttgcctcctgatcatctgctcctcgaactggagctgttcgtcagccggcaatgtgtcccaagtcggctctatgatgttgctgggggagacttcagagctatctcttgaaccggccattgagggccgatttgataggtctagatgcactgtccccagcggagtcgccaaaaagtatgttgatgcctttttggagcgccaaacacccaacaagaaccgtggcggtgccctctgcacaggggcggacggtccgcgcgcagggaccagacggtctgcggcctag

SEQ ID NO: 26609 - DNA, 305 bp, Zea mays
  Peptide Sequence Number=SeqID_69984
ggcaggcaggtcctctggtgcaggctctggtgctggatctggggctacctcctgagcagctccttgctccggcaggaggacgtctgtccgtcagcaaggctacagtgaatccaaaaccaagatccgccaagagggagatggaaacatacacaagccgcgggaaggctccatcaaaggagtccggcaccaaaggaagggaggactcacctcctcgcgtcaagtcgcaccggagtggcgacaataagaagaaaatgaagaaagtggtctactacgagaccgattcttcgtcactgaaagtcgcctag

SEQ ID NO: 26610 - DNA, 486 bp, Zea mays
  Peptide Sequence Number=SeqID_69985
atgcaggacaggcaggatgcgcttcagcagcagctactccaggatcgggctgagagcagggcattcatggctcttatgctacagcattctggtgtctcagttcccccagttcagtctgctccacctcctccgcttcaggctccagttgtgccagcgattcagaccggaccccctattccttctattggtccctctccgctccggccggtcactttggctttcacctctccggttctcagctctgtctgcccgcagccgccagtgccaccagcatctgctgttaccactactgctatggcagtatctgtgaccacttctgttccggcagctcctgcagtgcggcctcagtccgagtcagtactagctccagcttctaccgcagatcctggatccgagactgactctgaccccccgccggcgttcgctctgctgcctcgaccgcgaccggatgcgcccccgccgcctcctcccgcttcagatgtttag

SEQ ID NO: 26611 - DNA, 171 bp, Zea mays
  Peptide Sequence Number=SeqID_69986
atgggaactggtggaccaggaatagggtttgcttctaggtctaggagtgacactcatcttggcaaggatgaaggcctggagaacacgtggctcatggattctggttgttcatgccacatgaccagaagcgacaaatggttctccagcctcgaacccatgattggtgcataa

SEQ ID NO: 26612 - DNA, 216 bp, Zea mays
  Peptide Sequence Number=SeqID_69987
gcgatccttgcattaaatgctcctgcgatatggtcggtcggcgtggcgatctggccaaggttgcttctcggcgaagactgggcctcgggcgagccgaagctttgtgctgatgggggttaccagctgagattaggagtcttggggggcgccgaacatggtgtctccagtgagttgctaacgggtgatccgagtggacgctcgtgccccattcgttag

SEQ ID NO: 26613 - DNA, 381 bp, Zea mays
  Peptide Sequence Number=SeqID_69988
atggcgctccgcatgagccctcaggctcacacgtcgttcaacccctcactgtcaaaaagtgccatgagctctccaagcagctcttctacacacgcctcacaagaaaggaaaacaactgagataaatcaagttgctactcaagaaaatgaaatcagtcagaatggtagagctacatctaaaacatgcttagaacctattctagcttacaggagtgtgaactcagaccatgtgacagctgatagtaatgtcatggagagacaaattagcgatccttgtactaatggattgatgacgatgcttcactcggggaagcctgatggattgatgatgagatacccaccctggtggttgatccccttcctaaaggccaggatcaggtga

SEQ ID NO: 26614 - DNA, 141 bp, Zea mays
  Peptide Sequence Number=SeqID_69989
atggccatgatgggtacaacatcgaaaaagatgtacctctgtcaggtgaggaagcaaccaacttttgttgcttctgttcaaaggtggtaccaaaggaagaacaccaggagtgaagctgcgggaggaaaggatcctccataa

SEQ ID NO: 26615 - DNA, 258 bp, Zea mays
  Peptide Sequence Number=SeqID_69990
atgggtcacggcgatgcggtggaggtgccaaggcacgtggcacaaggtcgtgaagaggcagtcaccggcgaggttatccgaagtgaccgtggcaggctcggagaacagggatctgatcctccagaattcgtgactccggaagaagggtcggaacccgacctctccgaaatagatctttcgtgccaggagaactttgatgaaggcaagttcattcttcccttgatgcataaattacctactctttctaccactacctaa

SEQ ID NO: 26616 - DNA, 216 bp, Zea mays
  Peptide Sequence Number=SeqID_69991
atgactgcaaaacgtagagtagagtacgccgaaacacggaaaaggggtggcaaaaacagcggcgcggctattgacgtgcgcaagacgaagaggaaggaaaggactacgacccagcttccatataacggcttaaggggggaagaagagtctgcgttgatcgcgagaatcctgacggtagctgcgtcggccgtgcgcgagtgggggtcgaggaagtag

SEQ ID NO: 26617 - DNA, 438 bp, Zea mays
  Peptide Sequence Number=SeqID_69992
atggagaggggcgctgcacttggagccgagcacgcaagcgagcaagatcccggcgaggagtggcgccatggatccaaggagaaatttctcctattcctgcggagaagaagggcgcggcgtcctgcactggtgatgaagtggtggcaggacactgcgtgggggaggagtcgccggacctggggcaactccagagagcagcaccatggggaaacagccttccctgctgctggcgaggtacgccagagaggcagccatgggaggccttgctcctgcgctgagaagggggaaacgctagaagaggcttctgcgctaaggaacagaggagagaatggagtatcggctgaagattggacacagggatttttagccgagttggataaaaatttattagaggacaacacattggagattccacttgagaatacggactcgtattaa

SEQ ID NO: 26618 - DNA, 255 bp, Zea mays
  Peptide Sequence Number=SeqID_69993
atggctcatgaaataatgaagaagagcgaaaaagatattcatgacgctcgggaagcaacgaaagaagctgagaaagctgcagaactcgaaagacggatagctgaactacctcctcctccagagccgttcgacccattggctgacccagaaacgaggaaagcaatagaagtcattaatgtggccgaagctattgtcgacgaagttgttaccaaactgcttaacgaagttgcagagaaagttctgaaggaagaatag

SEQ ID NO: 26619 - DNA, 1197 bp, Zea mays
  Peptide Sequence Number=SeqID_69994
atgcatcgcgcccttcctatttccgagcccccggatggggagcacccgcgttgctttcgtcttgctgctgttggaggagcgcaacctcatggaggttggcacccttcagccatcgctcagcttcaaggattttcatcaggcagcccggctgcattctttcaccaatggtcacgcatgatggtgaccaccggttcgatggtggggagaagcaagctgggctgcggcctctgccccgccctcagcttcaaggatcttcatcacccaagctggggaggagggcggggcaagtcggggcctgcctccgcgtgggctggcgacccgcttcttcctccggcatccgggggagggaaccatcctccagctctgccgaggaggcgtcctccagccatgcaggggaaggcgaactgctgctgcctggccagggtgcagcattccgtcctccgtccgggcgactgtggccgactgcaccggggggtcgcacaacatgtcgtacgccgcgagggcgatactcgtgttctgggacggtcccgttctcgttcttgcggcgaggacggcagtgaggacctgccggtgcgctttggggcagtcgccgctcgcgggcgcggtgttggtaggcaggtggccgccgtcgtcggtgctgaggtggtggtagccggagaaggtttctccgccgatgacaccgtcagcgtcacctgcgctccaggcctctggctctttggctttaatggctggttctcgtcccccaagaggggacacgaacgagagccttccagaggtagcgttcgccctagggccatcgccgctgttgtcttgccgttcgagacggaggtcgttgtcgttgctgcagcagaggtcgccggcgagccacccggagaccctggaggagaccctggctgtgatggcccaagcgcggtgctgacgtcttccttcgaggtggagatccttccgcccgtgtcgccgtctgaggccgggccagatcccgccgaaggtggaaacaacgctgagggtgctgttgttccctctgttgatgacttgttcgtcggtagcagaatcacttatccgagcgagagttacttatcgcggaaggtgatgagtgaggacaccgctatcgaagcaatcgaaaagcgcgaaagatgttctggcaaaaagactttttccgaggaaaattttgatacagagggggttccctccttctag

SEQ ID NO: 26620 - DNA, 459 bp, Zea mays
  Peptide Sequence Number=SeqID_69995
atgcaggtggcgtgcgaccgcaccacggggacacaccccttcgacttcgacgcgtccagcatggaggcccaggcccacacgtcatggaccgggaaaggggatatttcgaaagggatccttctccatgaaggaagcgggccccgagccctcctactgatcaagggttcgaaggctggccactcggaagggggtttgaaggctggcccctcggaagagttcgatagtcgccccagagcacgcagagcgagggatgactctgggtacgtccgatacaaggccgaggctcgggctacgctcccgagaggctcgagggctgctctcgcaaacccggctacggccaaaccgttgacagcgtcaacaaaccagcctgaaaactcagaacctgaccatgcacccggactaccatcagatcgcatgagggaacaaccagaccggctgaggcatcacgaaaggcattaa

SEQ ID NO: 26621 - DNA, 588 bp, Zea mays
  Peptide Sequence Number=SeqID_69996
atggcggcgtgggagcggccgcaaggtccggtcggcactcagcagtcggcacacgcacacagaagcaaggctgagctggacaaggtttggacggacaaagcgaagatcattaaactcagcgacagctggccattgcacagttccatccaactctacagtctgaagatatcaaaggcgttctccggtgaagacgcagcaagagatcttgtcgcctttgagcttcaagtggccaaggagatgcatttgcccgaaggcagtgatcagtgcagcgccgtgtctagtgccaatgagtccgtgcagctccagcgaccggagtttggacatcttgagcagtgggcagttatcttgatcccattcttcttcagtagccatcattcctgtgtgcagttagccaattgtagtttgatatcaggtaaacatctgctattcgacacttctgtacagttcttcaagctgatggtgacccctccagctaccttgccgatgcatgaacgagaagatgagttagactttttcgaaaccctcttcgctagtggaggtatcgaccatcactcgtcacagtaccccgatggcgattggcgatcgtga

SEQ ID NO: 26622 - DNA, 294 bp, Zea mays
  Peptide Sequence Number=SeqID_69997
atggacgagtatgaaaaaggagatcggcctcctgggactagtaattgtatcacatttgagtccccagaggattggggacgcttcagtttgcaagaaccgaacctcgaaaccttttgtgcacagatatgtttaccagagcctagacatccaactagagaaacagctagccaagacatggagaagcacaaggggtcgtacaaccagggaccgagggaggactgggagatcgaactcgccgagcttctatcaaccaaaagaaaatcatgttcctcaacagatagcagaacatcgtag

SEQ ID NO: 26623 - DNA, 393 bp, Zea mays
  Peptide Sequence Number=SeqID_69998
atggatgttctgataattaggtaccttggagaggaccagcaaggacttaggaaaggccaaggtgttgaggaggaggagcaagggcgtccacaacaggaaggagatcaagtccgagaccagtctgcactaaaatggacgcccaagatgcatccggactccgatagcgacggactggatatggttagaaagataacgagattatctaaccaacccaactggttccaccctaaaattcatccggagtcaacaggaatcgtcgaaacaagtcagcgttcagattctgttttggtgctgctgtcggggaccataattaggggtaccctcaagacgcctaattctcagctggtaacccccatcagcatgaagctgcaaaggcctgatgggtgcgattaa

SEQ ID NO: 26624 - DNA, 609 bp, Zea mays
  Peptide Sequence Number=SeqID_69999
atggcgcaccggacagtccggtgcgccaccggtgcgccaacggtgcgccaccggtgcgccaacggtcgtttccaacggctagttctgacagggagccgttggactcatggcgcaccggacagtgaacagtccactgtccggtgcacaccggacagtccggtgcggtgtccggggcctagatgctttcaagttggaatcatgcaatcagccaaaaagggttgggttaaagtaacagactacaatagctatcaaactgtaaaaggatcactcaagttcaaaagaaagggtccagatctcttttatgaacacaccttgtctctgaccgaagctctatgttggttccaatttgttcttacacatctagacaactggcagcttctaataaaatcaattcctggcgaagttgttaaacccggccgattcaaggcgataaacgatgacgggatgtcgatcatgaaggggaagctctacattcatttcacggtggagttccctgactctctggtactggagcagtgcaaggctctcgagtcggtacttccaccaaagctttcgtccaatctgatagacatggagatagatgaatgtgaggagacaaccatgcattaa

SEQ ID NO: 26625 - DNA, 471 bp, Zea mays
  Peptide Sequence Number=SeqID_70000
atgtcgaccccgagagcagtccaattcggcgacggaagatatgcgaatggtcacaagaggagtacaagggacgtcgtctgcgcaggcgaacgacaaaatttgctaaaagtactacctaacaattccaaagagttgagtgttcggagagtttgtgagggctgtggaatgtcgaaggtgaagaacaataatggttatcatggagtcactgagccaatctcgctgagtgggccgactgagaagtaccttatgcagacagctgaggttgaaaagtacctttcagatgcacgactctatgagaggcaagatgaggctatcttgcgagaagaggttttaggcaagctggaccaggttgaacaattttctactgaaatctattatttcgcttcattcaagattttcttttctttggctgctgtggacgagggcacaacatcaagtgcattcgccagtggcaataagcagactgtctag

SEQ ID NO: 26626 - DNA, 996 bp, Zea mays
  Peptide Sequence Number=SeqID_70001
atgcatcgcgcccttccacctttcgagcccccggatggggagcgcccacgttgcttttgtcttgctgttgttggaggagcgcaacttcgaggaagtcggcacctttcagccatcgctcggcttcaaggatttttatcaggcagcccggttgcatcccctcaccaatggtcacccaagacggtgaccaccagttcgatggtggggacaagcaagccgggctgcggcctctgccccgccctcagcttcaaggatcttcatcatccttgctggggcggagggcgagctgagctagagctctacctcccgcacgggtcggtgggccaccttctccttcagcattcaggggagagggcgcccaccggcctagcggagggggcgaacttcgacaacgcggggccggtcggccgcgagcgtcgtcagctccagcgcgttgggctcgctggctcagctggctctggctcagcttccggtgccccctcccgccgttgggcggagtgtggctatctggccgctgtacgggcggctgtcacgccgcgcgtaccgggggaccgtctaagacgtcgcgcgctgctagggtggcgttcgtgttcttgggctgtcctgcccgtgctccggcacgacgcctccgcgcggaggttggcgctcgcccgtccgggaggacttgagtggggatctgccggtaggcaggtggctgccgtcgttggtgctgaggtggtggcagctggagaaagcttccccaccgacaagggcgtcagcgccacccgcggaccgacctccggctctttggctttgatagcttgtcctcgcccctcgagtggggacgtgggcgagggctttgtcgcagcagcgtctgccctgaggtcatcgctgctgttgtttggccgcccggagcggaggtcgttgtcgctgctacaggagtgggtggcggcgagccacctggaaattgtcgtcccgcaggccctccgatgtggagtggaaccggagttccgtttgtaa

SEQ ID NO: 26627 - DNA, 1014 bp, Zea mays
  Peptide Sequence Number=SeqID_70002
atgatcaatcccaagaagctcgctcagttggcgaggaagtggcaaagggtaaaaatagccaccaaagacgacgacagatgctgcaccatttcaccaattgcaggcaggggccactgcaccgtgtacacagtggatgggagcaggttcgaggtcccattagcgtacctccgctcagtggtcttcagtgagcttttgaggatggctgcggaggagtttggtttcacaggtctagtgcatgatgtcaactctctagatgcaatgtgtccaatccaagaactgaaagcgcactatgcctgtctgactccggcatgcaccaaacacttggccccatcagaatctgatccagaacatatgcacgtagcacctcatggccttgtcccttgccaatcatcccacttggctgagcaaccctgcccttcctccatctatatattaatggtcaagtggcctccaaacaccatcacctgcaggctgcagctcctcaaacaaggaattccaaaccgaaaccacacagctccccagcttccagcaagacagagggagaaagaaaccattatgatcagcaccaagaggatctctcagatggtcaagaagtggcagagaatggcagtgttggggagaaagcggctctcctggagggtggaaagggaagtcgaggatcgatcctgcgcctctgtggcgagcaaggaccactgcatgatgtacagtttagacgggaggaggttcgaggtgccgctggcgtaccttggcacgctggtgtttgcggaactcctgtggatgtcctacgaggagtttggcttcgtgagccatgggcggatcacgctcccttgtgatgctgcagccgtagagtatgccatgtgtctcctcaggaaaggctcctcggcagatgtagagaaggcattcctgagcaccatggcagtctcatgccactatgcaagctgtattgctattgcaccatttgttggagttagccatcaagctgttatttgcagctcctggctgactgtaaagtag

SEQ ID NO: 26628 - DNA, 438 bp, Zea mays
  Peptide Sequence Number=SeqID_70003
atggggacatggcatgttggttcaacagtcaggagacttgattcccaggcagatgcagggttcacttcactgcttcggctggagttgtcagttctacagcttcaacatggtttgtcaggtctgccatggggacgcaatgatcgtcaactgctcggcatcctttgctatgctttgtttgtggagctgctgagtggtggtgtttggagaagtcttgaccctgaatatatagctgaatcaaagagtaaggaatcttgtcgagtgggattattggcaagggacaaggtcatgaggacatggatgcagtatgtgcatacatttgatttgagagccctttctctgcttggattgagcacatcctatgcagccatgctgagcggtttagtggggaaggggcacgaggaccccatggccatgtggaacgggagcaacatgaattga

SEQ ID NO: 26629 - DNA, 354 bp, Zea mays
  Peptide Sequence Number=SeqID_70004
atggagcctggcggaaggacagctgttggagcggttgagtccttgctgacgtcctcttgcttccgtaagggggctgagagccgccgccgtcacaaggtcgagtccgagcccctgggtcgggcgaggcggagttcgtcgtcttctagggctgagcccaagtccgagccctgggtcgggcggagcggagttcatcgtcttctggggctgagcccgagtccgagccctgggtcgggcagagcggacccgagtccgagccctgggtcgggcggagcggagttcgccgtcttccgggacttagcccaagtccgagccctgggtcgggcggagcggagttcgccgtcttccgggacttag

SEQ ID NO: 26630 - DNA, 963 bp, Zea mays
  Peptide Sequence Number=SeqID_70005
atgtcttcgcgctcccttatgcatcgtgtctttccaccttccaagcccctggataggggatacccgccgtctttccgcctcctcgttggaggaacgcaactccatgggagttggtaccttttagccatcgttcggcttcaaggattttcatcagccagcccggctgtacccccccgtcggcggtcacccaagacggtgaccaccagcccctgggtggggagaagcaagtcgggctgcgatcttggtcccaccctcagcttcaaggatgttcatcatcctcgctggggtggaggctgggctgagccggagctctacctcccgcgcgggttcgtgggtcaccctctcctgtggcgttcgagggagagggcgctcactggccctgcgggcgggtcggacttcgacaacgcggggctggtcgacggcgggcgtcgtcagccccagcgtgtcgagcttgtcggcttggctcccggtgccccctcctgccagaaggtggctgccgcgccgtgcgcacgggaggaccgcccaagatgtcgcgcgctgctagggcggcgttcgtgttctggggcggtcctgcctttgcaccggtatggcgcctccgcgcggagggatgtttgtgcgagcgagagttgcttctcgcggaaggtgatgagtgaggtatctgtatcccggaggcgtaggagtccctcggctcggtcggccttgccgcttacgcgcactcttacccgtccatggggctctgtcaccgactcagtcgagaaggctcgaaggattgcttcggcagaagaacttccgaacgtgaagacttgttcggtccgcggaatcacttatctgaacgtgagttacttatcgcagaaggtgatgagtgaggtatccgtatcccggaggcgtaggagtccctcggctcggtcagccttggctgcttacgtgtactccgtcgttttcaggatccacttttcgaagtag

SEQ ID NO: 26631 - DNA, 768 bp, Zea mays
  Peptide Sequence Number=SeqID_70006
atggcgaccagctccaaacccgccgcgcccgtggaccccatggtcgtgctcgcccacgagttccccgaggtgtcattcgactacgacgagagggatgtagcgttgtacgcgctcggggttggtgcctgcggcgatgacgccgtcgacgagaaggagcttcacttcgtgtaccacagggatgggcagccacacattaaggtcgttgtaaacagggttaaagtagctggtttgcacgacaaggggaaagcaactattcttgagctcgaaactaccacaagcctcaaagagtcaggggaaattttatgcatgaacaggagtactatctacttgcgtggtgctggagggttttcagactcttcacggccatactcatatgctacctatcctgctaatcaagtttctcgcatttctattccaaattcggcaccttctgcagcattgttatacaggctatctggggattacaatcctttgcattcagacccagatattgcacagcttgctgggttcacccgtccaatcctgcacggcctctgcaccctaggattcgctgctcgcgccgtcataaaatctttctgcaacggcgaaccgactgcggtgaagagcatcttcggccgtttccttctgcacgtctaccccggggaaacgttgtccactgagatgtggcttgacggccagaaggtgcactaccaaacgaaggccaaggagcggaaccgagctgtcctctctggatatgtgttgctccagcacatcccctcgtcattgtaa

SEQ ID NO: 26632 - DNA, 255 bp, Zea mays
  Peptide Sequence Number=SeqID_70007
atgcctccccgccgcccttgtcctccccatgcccgccactcccacccgagatggttagcgcccctcctccttctggtcccttcccctgcctctgctctcaacgtggccggccagccatggagtaaggctaggggattcaccggattcaccaagcgggctctggtggcgaccggcgccgccgtcgtgtcctccattcccgtcaaccccctcgacgtcgccaaggaacaggacggtgcagtggagcagcatctctaa

SEQ ID NO: 26633 - DNA, 1833 bp, Zea mays
  Peptide Sequence Number=SeqID_70008
atggagaagtgcaaaccaatcaagacccccatgcctacaaatggacatctcgacttagatgagggagtgaccttgattgcccgtgtgccgtctcccgtcctgcctggatcgtcacctctcgtacatcagttcaggatgccgcgcacgaagaatgtgtcggcgccagggggaggcgatgatgaggaccctcgtcgccccttcaggcaggtcaagggcaagacagtttacttggagcagcaggaaggccgcaagaagcggcgtacggacagagcagcccgtgcagcagcagcagcagcagccgctgcgcaggccgagcttggagatcagccgcagactccgtcagatcagatcgcatatcgtgttcgtcgtctcgcctcccggcctcgctcctccactcacacctctgcttccactccgccacctactctgcctgctcccgtcactcctgttgcgccatccaccaccacagccatacccgctacctccactacgccagcttccactgctcctcctcctcccgctcctgctttagctcctcctgtccctccacctcgattccgggagcgcgatgagactgaggtgcaaccacttgctgcggatcctagactgtttgaccttcagcgtgctatagcggcacgagtacgtaggttcagatacgtacccgtggagtcttggttaccagctcagagggaccctgcagcagttgacctgttcagcactcgtattcaggagtcatttttcagagctcagatgtctgctcagatagctctgcgagtgcaccggcttttggatcttccagcctttctgcttgcagccggtgctgactctgaggcacacctcacctatctgcctggccttcagacccttttgactaccagcgacaggtatgttgaggagtgggtacgagtcttctatgcctctgtatggattgacccggatcatcactggatgaggtttcgttttgagcgcgaggatgtcaccattactgccagtcagatccgccagctttttggatttcccgagtcgacgactcgtcttcacagcctctgctacggcacttctgaccctcctcgtcgccctcacggcggtgtggctccgggtacaactcacgtcgtggctctgttccgcccgcccttcacagatgggtcgcgacgttcaccggcagattttactacagcagccaagtatttatatgagcttatcagacggactcttctgtcgaggatgggatacagggaggctaccacacatattcagctttggctccttggtgccctggtctctcactctgagttcgacgtcgtggacttccttatttgtgagatcgaggacaccgttttggatgggattcgtgctcgtcggcagttgccctatgctcactacttgtgccacatctttgcgcagctgattcagcctcctcggtttcagggcacacttgaggcctcacgcctcgttttcggatcctaccgtcctgcgcctgagactcctgtgctagcttctgctcctgtttttgactctcaggccgaggatgcaacttttcatcagttcgacactcaggccacaacagctgatgatgatgatgatgatgattttggggttcctcctccgcctcctatgcctccacgctcacatgatcatgaggctgggagttctagtgctgctgtcggtgttttgggtccgaccgcacacctggggttgcccctcgaggttggccttttaatcttgtcccacgccttagaagtcggcattatcttggcttggaatgataatccatggggtgcaccggaggtgcacccaatgggtgtagcccccgacctacaaatggatttttga

SEQ ID NO: 26634 - DNA, 450 bp, Zea mays
  Peptide Sequence Number=SeqID_70009
atgggcaagaacaacaagcgcaagcgtgagccaactcctccatcggaggagtttggtgactcggagtactcagaggaggagttctcctctgagtctgaggggtctccggctcccattcccctgcgtgagtcgtctgatgactcagacgactcccaggggctcgcggcggaggtctggacgtacatctgggccgtcgagcgttccgggctcgagggctcggatgagtcggagtactcctcggatgaggaggactcggacggtggcggcgaggacgaggaggaggacgacgacgacaatgacgacggtggcaacggtggcgacggtgacggcgacggcagtggcaggggcggcaaccggggcggcagcagcaggggcagcaccaggggcggcagcggcgggggcagcaccaggggcagcagcggcggcggcagcaacagggccagtggctag

SEQ ID NO: 26635 - DNA, 132 bp, Zea mays
  Peptide Sequence Number=SeqID_70010
atgacgacgatgtttatgcaccgctgcgacaacgcctcgcacgtaatcgacaaggtatgggagatcagggagacatgtcggtacaggaatactaccaagaacttcagaaaggtatgctacgatgtggggtag

SEQ ID NO: 26636 - DNA, 672 bp, Zea mays
  Peptide Sequence Number=SeqID_70011
atgagaaccaaggagcaatacagagcagtaactaccgccggcgctgcctcctccatcctctcctctgctcacccagccgcccaggaagctgaagcagggactccccatccttttgttgttgccaggatgtcatcggcggcttccaatccatcagctcaaccagcagtggacaagcaaccacttaagcggaatagcgatgacatagggtgggagtatggaactattgtcaatccaaatgattggaatgtcataaaatgcaagttatgtcctatggttgtcaaggctgggatttataggcttaagctgcatattgctggtagaaaagggcaagtccgagcatgccccaatgcaactcttgtagcaaccgatgcaacttttgctcaaggatggatggttgatggtgctgagaaggatgaagaagggtctgatgttgagccggtgaccggtctcacatggaaattgattgctgagacatgtggtgctgaagaggtcacaaaactacgtaggagtgcaagattgactgttgaaagagaggttgaagacacaccgctgtctgaaactgaaagtgaagaagaagcaccacaagaggaagatgttgactttgagtcggatcaagatgatgtgatcacagctggatatgagctagatgcggaggaagacaatgatggctga

SEQ ID NO: 26637 - DNA, 204 bp, Zea mays
  Peptide Sequence Number=SeqID_70012
atggggagtccctgcttcagcttcctgctagcgcgccccctctatccctgggcgtgcgtgcctctcttccactgcagaaccactgctgagatgagaggagaggagaaggaggagccctgggcgagcagaagagaggagggaggagccctacctgggcggctgggaaagagcaacctctctattgcctacattaccaacacataa

SEQ ID NO: 26638 - DNA, 1650 bp, Zea mays
  Peptide Sequence Number=SeqID_70013
atggcgccaaccgccgccaccgccggcgcatccgacgagggcgccagcgcgctgctcgggctcctgcagcgggtgcagtcggaggcgctgcgcacgctggggcctcacgacttcgaccccaagttctacgtcgacctgccgctggcgaccgacgagcgcgccgcggcggccgcccttgcggcgctgccgcgcccgtcgccgtcgcgggcggagctagacgacttcctgtcccgctacttcggggaccccgggtccgatctcgtggcggacgtcccaccggatttcgagcccgagccgcgcgggttcctgccccacgtccacagccccgaggcgcgggcgtgggcgctggaggtgcacgcgctgtggaagcgcctggcgcggcgggtggcgcccgacgtcgcggcgcggccggaccggcacacgctgatgccgctgcccggcagggccgtcgtgccgggatccaggttccgggaggtatactactgggactcctattgggtcatcagaggattgctggtgagcaaaatgtacgacacggcaaagactattgtgcttaaccttgtatacctgttggaaaaatatggtttcgttccaaatggtgcaagatcctactacactaaccgaagccaaccaccacttttgagctccatggttttagaaatatacagggcaactggtgatgtggagtttgttaggacagtattccactctctgcttaaagagcatagcttctggatgtcagtggcagtgcaaagttttaccattaaaggaccaactaatatagttttcttctttaaggatgaggaactggcttcgaagttgaattctatggcagctaaggaaaaactgtactgcgaaattgcttcaacggcagaatcgggatgggatttcagctctcgatggatgaggaattctactgacatgacaacattggcaaccacttacataatacctgtggacttgaacacatttctttttaagatggagctggatattggtgccttggctaaagtcgtaggagataatgcgacttcagaattttttttaaatgcttcgaaagcacgtcatattgcaattgactctattttgtggaactctgagatggaacagtggcttgactattggcttcctggtgatgcagactgtcaggaagtacacgaatggaagcctaactcacagaaccgcaacatatttgcttccaacttcgttccgctgtggctaaatgcataccattccgaattcgtacgctttgctgatgaggcaaaatcaaacagagtcatggcgagcctcaaggcatctggattacttcatgccgcagggatagcaacttccctgacaaacacgagccaacaatgggatttcccgaatggatgggccccactgcagcatcttatagctgaggggctgctgcattctggatcagaggccaaaaaactagctgaggacattgctacgaggtgggtgagaacgaactacgccgcttacaaagcaacgggtgcgatgcatgagaagtacgatgttgaggcttgtggagaatctggaggcggtggagaatacaagccccagactggttttggctggtccaatggcgtggtgttgtcattcttggaagaattcgggtggccagagggcaaggaaatagcttgttga

SEQ ID NO: 26639 - DNA, 435 bp, Zea mays
  Peptide Sequence Number=SeqID_70014
atgggcaagagcaagaagagcggaagtttgtcgcaccactctggtgacaagcggaagcgcgagccaacccctccctcggaggatttcggtgattctgagtactcggaggaggagttctcctctgagtccgagggatctccagtctacacctcgcccccagcatcatctgaagactcggacaattcccaggggatcgccgccgaggtgtggacatatatccgggccgtcgagcgctccgagctcgagggctcggatgagtcggaggtctcctcggacgaggaggactcctctgactcgtccgaggaggggagcggcgatgatggcgacggcgacgacggcaagggcgacggtagcaagggcgacgacaagggcgacggcatgggcggaaacggtagcggcagtggcaaggccagtggcaaagcgccactggcttaa

SEQ ID NO: 26640 - DNA, 156 bp, Zea mays
  Peptide Sequence Number=SeqID_70015
atgacccccactaagaaagaagacaaacaacaagcgtcatgtcaggttaagcgacacttctgctacatgtgtggtgagcatggtcatctatccaaggctcttttggatgatcgttatggacccatcccgagatgggtaccaaactgtaccaactag

SEQ ID NO: 26641 - DNA, 438 bp, Zea mays
  Peptide Sequence Number=SeqID_70016
atggcaaaaagcgtaccaaatgagctcgtggtaccttcgggctcggatcagaaccatagtatgaagaagcacaaagaatacgaagcatttgagaacaagtctccaacagaagcccctagtcatttcagaaaacctgtaggcttcttaccttctctagcgaaaatcattatcagcccggatgtattcatccatcttctgaaggagcttctccagggtctaagggggtttcctggcaaaatattgggccgtaggtcctggccgaagccctttgatcatggccccaatgacagtttcattgggcactatgggcgcttgtgctctcagacgcaagaaccttcgaacatatgcctggaggtattcttcgtggtcttgcgtgcactggaacagagcctgagcagtgaccgacttcatttgaaatccttagaaactggtgattag

SEQ ID NO: 26642 - DNA, 396 bp, Zea mays
  Peptide Sequence Number=SeqID_70017
atggctaatactgccataggcccacctgccattgctatgctcaaaaacacttgtattatggatcactacgttgtattggcagttttctgttactggacctcatcaaacatattcaccctgttatatggtcttgttatccggcgaccagctgtgaggaagtggtttgatcttcctgctttggaaaatacgcgttcgctcacggcaaagccagtattcaatatgtttggtggatccaaggcaataccagccgcacagtcaccagtagcgatcgcaggagcccagcaatctggtctggaccaacctgatgcttctgctcttggctataaggtcaaaaatcttgagaagaaagtgaaatccaggggtaaatctcggaaacacaggggggggcgggggtga

SEQ ID NO: 26643 - DNA, 432 bp, Zea mays
  Peptide Sequence Number=SeqID_70018
atgaagaactatagacgcagcaacgtagcacgcagtggagttgaacatgccgcccacagtcgcggggtttacccggatcgctgggaggtgacctacttggtgcgccgtccggagaacagtctccgaggtgcggagatctgctcagagcactattcaatctctgagcgggactcagctgaggcggccatgcaagatgccgcacggcgtgcgctttcgcactactgttcagtgctcggtgggatgtcagaaaacaggtgcagaggaggaaggcgtgctcagcaggagcatgcagccccgcaggatgaggcaccccagcaacagcagctgccacccccgcccccgatgtccttcgagcagatgttcctcatgcagactcaggcagttccagccatcggtcagactctggccgccattcagcagcagcagcagtag

SEQ ID NO: 26644 - DNA, 318 bp, Zea mays
  Peptide Sequence Number=SeqID_70019
atggcctaccagaccgagttacttcttccaatcttcaacgatcagggacatcggtctaagctccaagaaattcgtggagttataactgattgtacaattgagttatcttgtgcgcctagagtccacgagctccatgtctccatgagctcagacgggtactcttctcgatcaccactcaactgctcatcagaggctcccagtgtgtttgcctatggcgccgaggtaacacagctcggcgtcataggcatggcgccgagatttttagggatatacggaaaacgggacggaaacgggatgtgttattacaaaaacggtacg

SEQ ID NO: 26645 - DNA, 141 bp, Zea mays
  Peptide Sequence Number=SeqID_70020
atggccgttgccttctccctgctcaggatcgtgctcgcgagttctctctgggcccatggccgttgccttctccctgctcaggatcgtgctcgcgactttctcaaagcattaggaaaggacattaaagcatcatcagactag

SEQ ID NO: 26646 - DNA, 1212 bp, Zea mays
  Peptide Sequence Number=SeqID_70021
atggcgttcgccgcgcggaggagcatcgccacccggctctctcaccatctcacgcgacgcctccatccctgcgttccacattcgcgtacctccgactccctcgacgagcaggcgtcgagaccctcgccaccgctcccgctcccgctcccaccacttcacgtccagctcaagcaacgttctagagaagtccaaatcctaggcttcctccctttctcgctccgcctcgcggggccaacccgccgcaccttctcgtcctcagcccccgcccccaacctcgaggcggcaccagccgccgaggtcgatgccgcgggcgtgcttgcggatgcagcggaggcggcggcgtcagtgccagcgccgttcccaggggaggtagccgccgcggctgcggactcattcccccctgttgccgcacttcagcacattatcgacgctatccatacctttaccgggctgaactggtgggtgtgcatcgcgctgacaacatttattatccggatcgccacagtcccgttgctcgtgaaccagttgaaggccacgacgaagctaagagtaaacaatggtgctcgtcgccctggaggacgttgggcgtggacggcaatggtgctcgacaccggttccagcaggctagccgccctggagaagaactctccgctcttgctgccgtccacgcccaaccgagtctccgccctggagaaggagaataaggcggtggaggaggtggaaacggtgcactcttactcgtctgaagccaaggcatggagtgacaggtcaagcaagtgggggcgaggtgaagagggcggtgaatgggagctgtggggtgaatccgtgattggattcatgtgtggctgggctttggtcgatggtctgctgcattttcttgccttcaatcttcagaaacaagagaatgatcacaattcgttcatccttgttcagcactggaaccagaaacttgtatcatataacatggatactcaggaactgcatggtctctgcactcttgaaaatggctatgtggacaacatggatttaccaagtggaagtgcgaggagacagcagggagaactcgcgagcacgatcctgagcagggagaaggcaacggccatgggcccagagagaactcgcgagcacgatcctgagcagggagaaggcaacggccatgggcagaggcatgcgacgacgggagcagacgcggctggactaaatccgagctga

SEQ ID NO: 26647 - DNA, 384 bp, Zea mays
  Peptide Sequence Number=SeqID_70022
atggctacggcggccgccgcgttgccatggggaggcggttccccggcgtggatcgacgtgcctgagcggagcaagagcgcgttcatggagctgaagcggaggaaggtccaccggtatgtgatcttcaagatcgacgacagtagagaggaggtcgtcgtcgacaagatcggcgcgcccggggagagctacgacgacttcacggcgtcgctaccgaccgatgattgccggtctccttcagattctcgcatccgtgccaagaccatatatgccgtgtcaaggaaccaattccgtcatgagcttgacggagtgcacttcgagatccaagccaccgatcccgatgacatgaatctagaagttctcagggggcgtgctaacagaacctga

SEQ ID NO: 26648 - DNA, 183 bp, Zea mays
  Peptide Sequence Number=SeqID_70023
atggcgtggatcaggatggtcctcgcggcggaagccacccgagacagccacataccccagcactcacccccgcctcacccgcttgatctgatgtgggttaggatcttaacccttaatgcttcatacttcttgaagaacgatagccacttcgtcatttcaatcaagcggttgtctgaaggatag

SEQ ID NO: 26649 - DNA, 513 bp, Zea mays
  Peptide Sequence Number=SeqID_70024
atgcgctgtcgtctccttgctctggcacatcgttgtgtggagctgctgaacgccgccgtctctagctcctacatcgtcgtgccggcgctcggctccccaacatcgttgttgcctactgggcctgctgctctctctgcaacagctcgccggctccctagaaattccccaaccgtcgcctgcctcctcgctgacattctccctcgtcgcgtccgcagcgctaccgcgagttcaacatcgcccaggcgcccccgtactcggtttcaggccattacaccagacgcacatctccaaagtgccatcaagtttcatctcaccttaccgtggccagggatcctcgaaggtttcctcgaccgtgtggcgcttgttctgtgctcacttaagggagcaaatgtgagcaccaaaaattgtgaaaacttgcggagagtcttgttatcagaagataaactcttggtaaaagtttggggctgtttggaagacatttgctcagaaatccttatagtgtccctaatttga

SEQ ID NO: 26650 - DNA, 1989 bp, Zea mays
  Peptide Sequence Number=SeqID_70025
atgccatcctcttcttcttccgccaacgccacgccgccggccgccgcctcgtctgaggagacgttgagtaacgtgatggtggaggagttgcgcaccggcgactctgttgaatttggtgtgtcacggatgacgtcagcccgtattgaagatatgcagcggttgggctactttggcggcggagtcgctcgtgctccggggacggaggaagtccccgagccggagggcgagttggttgttttcgaggcgttcttcgtcgccggactccgcttgcctgcgcaccgggtcttcgaattaaatcaactgccgtacgacggctaccctggtcaagacgaagcagaccgccgtgggaagaaaccggcggtggagactggaagcgaccctgcgctggtggccgccgcctcctcgaaaaagagaaaattagtgatggacaaggatcgccaaggggcggcgcgaaaacgccaggcgactgtgagggttcacgaagctcggccgaagaggcagcggggaacggcaaaggctgaggcctccggcggaggcaagccgccgctgccggcgaaggctggcgcctctgcgcctggcaaggcgccggaggtgacggtgggcgccggaggccccaagctgacgaaggtggtgccgtctgccagcggagcggcggaggctgcgaaggcggcccgaacgttgccgccgcctggcaaacgcgttgccgacttcggcaccgagattaatgtggaggattatcttggggggtcggacgagggcccgcttgctctagttgtgcctggcgcggcgatcgcgacggctgcgccagcgccgaaggcggggggagatttccttggcgtcggaggcgaggtgtcggccctcgcgctggtcagggacgaggcgggcgtggcgacccgccggctgaagggagcgacggaggcgctgagtcaggtggctgacttcaccagccgcactgcgtcgggggcccttacggcagctttgtctgccgaggtcgagagacttcggacgcaacatgctgacgctgtccgtgagaagtcggcctccgacagcaagtgccgcaaactggcggagaaggtggccgcccttgagaaggagaaggctgacctccggcgccagctggcggaggagaggagggaggccaacgaagccatcgccaaagagcaggctgcgcaggcggaggccaggctggcgcgggcggaaggcaatatcgctaaggagctcgccggagagctgcagcggcggcttgctgccctggagagccgcgcggagggggccgaggccgcgatgcgagcggaggccgaacggacgcgcacgcagctcatgacttcatatcgcgagctgggtgtgcggacgggtgacttcgaggtgccggagcgagaggccggacttcgctgtctggaatgggtgcaggaggaactgcaggagctccccactgtcttggcggggttgatgtcgttcacctccctggtcacctgcgaggcagcgatgaacgcgctctctcgcgaaggctgccggcactatgaggccctcgaccaggtggatgaggattttgggcgagatatctttgaggtcgaagaccccgtggtgaaggagtccgccggggccctctatgaccggatgtggggttcatacggtcgtgaggtggtccgggcgcgggccgaggccgcgagggctcaggcggagcgcggcgagcgggtggacgacttcggggcgctgaacagcgcgctgcctgagccggagacgacccctgcggaggccgcgactggagtcgccccgggaccgaccccagagactgtggaagatgcaccaggcgcccctgcacctgctgcggtcggcgaagaccttcccccaacggtggccgaaggcgcacctgatgcccccgcagctgctgtgcggagcgctgaagatccagtggaggtgggggcggaggcaacggcggaggcgtcggcggaggctgccgcggcggcagggccttcgcaggtggcatag

SEQ ID NO: 26651 - DNA, 363 bp, Zea mays
  Peptide Sequence Number=SeqID_70026
atgggggccgcgagtcagtcagcttcggaatcaaatatggcagttggcgtgaccggaggcggattgacgccttgggcgactaccctgggccagcaacagcgtccgaccccaccacgtggacggttccggggccgccacgtggccagagaagatgatatactccaaggtatcaacagcggtgaccagtccattccacaggcgacgtgcctgtccattccattggtaggcagtacatccatactgctgcgtgcactatgcgcatcatcactcgcgcgttaccaaggaagcaaccgcagcatatcaatcctgcatggactacggatatcatggcgccaggagattgctcaggcgtactcgcattag

SEQ ID NO: 26652 - DNA, 264 bp, Zea mays
  Peptide Sequence Number=SeqID_70027
atggaggtgcgaccgaaacttggatggccaagtcgccgcatggagatgatccgccagtgcgatgtagcccacgccggccaatgggacacccgcctagatccaggcgcccgttggagtttgcggtgcgaccgcagtgaagtcgtagtcgaggttgcgaccctcgatgttctaccggcgctcaagcgccctctccagagagactcgggcatcctcgcccgtatgcctacggttgagttctgcccacaggtcatcaggtctctctag

SEQ ID NO: 26653 - DNA, 810 bp, Zea mays
  Peptide Sequence Number=SeqID_70028
atgaaaagcataaccaaggatagagttaaggcaagactcgcgaagtggcggagtggagaaaacaatcaaggccgtccgatacgcacgctctcacccccacgcatcgccccgcccccaccacggatcccgcatcccccacggatcccgcagccgcgccgcagccgctccctcccgtgctcccttcgcgcccgcccatggatctccaacaacgagcgccgccgccgccgcctcgcctcgacaaacccggctccagggcgacagctcccgccggtgggacctcatgttcagcgtcgtgaagctgttcgtgatccagctgcggggcccactaaggtcagcgtcttcatcgccagcaacgacgccgagcaggcctgcgacttcaagatcaccggcatctaccatgacggtacaaaccttgcaccttcttcgactcttcccgtccgatttgactatctaaaactgttgtttctgattcggtgcgctggcgatctggtcgcccgcagggagttcgtgaagaagaactatggtgacatcaaggcccgcaacccctccctccccttccttgtccgcgagtgctccggtgtccagccccagctctgggcgcgctacgcgagtggtgtgatggcaactcttcttgtattcctgtccgttggtttagttggtgctactgatggcccgctcgtccgccacccatggcaagggatccaggcttgggcgcctcgccaccatcgcacctcaaccaacaccacctctcgaggccacatggagagcaactactttgatctctccgtgtccttcctctctactctctag

SEQ ID NO: 26654 - DNA, 195 bp, Zea mays
  Peptide Sequence Number=SeqID_70029
atggacgggacatgcaatggtggggaggtggccgacgaaggcggagatggtggcggcattggcaggccgcgcgcgggtggtgacgcggccgcacggaacacaaatgacttcctgagtcctatcgtggtccccacggatggtgttcccctgcgactggccgccacgtaccgcggtcggaatcttgggtgggtctga

SEQ ID NO: 26655 - DNA, 165 bp, Zea mays
  Peptide Sequence Number=SeqID_70030
atggattctcaggcgccaacgaactcagatggtgaccaaggaagttatcccttaattgaggatggggacccaatggggacccgaaacccgaatggggatgggtatgggatgagttttacacccatgatgggtatggggatgggtatggggatggatcaaacatga

SEQ ID NO: 26656 - DNA, 384 bp, Zea mays
  Peptide Sequence Number=SeqID_70031
atggctcccagcgcccccgccgcgcccctccgccccttggataagggcaaaggggctgcaggcagttcctccgccccaggtggcaccgggatgtcggaggaagagaggcgtcatcggctgcgccacgctgacgggtcatttgttttggacccccagaagcgtcaaaggactgctggtggggccgaggaggccggctctcaggcccagggcacgaagaggcgcgtcagtcctccgccaccaccaccatcgggtccgccgccaccacaaccaccaccaccgtcgggtccgccgccgccaccacgacctgggggtaacctcccccaggggcaccatcagcagcagcaacgacaacagcagcaacagcagcggtcgccccgcttctag

SEQ ID NO: 26657 - DNA, 201 bp, Zea mays
  Peptide Sequence Number=SeqID_70032
atgcctcttgcctcctatgagactcatgaggacatctcagttgacctcggtcctcggattataaattggcccatggacctcctttgccatggcggtgtactcattgaggcggctgtggacggcgaggttgttgacgtgcggtgcaccaataaggaatcatctacaaaaaccaagtacatgacatatcagaagaaaagttaa

SEQ ID NO: 26658 - DNA, 312 bp, Zea mays
  Peptide Sequence Number=SeqID_70033
atgcgtttggacggcagggcgcgaatggatggtgaactgcgtacggcgcacaggcacgagcggagctccggcgatcggcggatggacgcggactatccggcgacgagcttcacggcggcgagctgggcacggcgtgagcaggggctcaacggcggtcggagtcaaggcgtcgggtcgtcgcgcttcgggcgtggtgcacagggcgcagggctacgcggcatggcgactgcgtgcgtgtgggtgccaggcagcggtggcggccaaagggaggaggaagggtggcgcctacgggtggggcccgtgcgcgagtga

SEQ ID NO: 26659 - DNA, 300 bp, Zea mays
  Peptide Sequence Number=SeqID_70034
atgtgggacgtgatcagcaacgacatcgcctgcaacgtggcccgccaatgcctggaggacgggaacccgcctcccgccgaccccactgcgggaggaggaggaggagctccggccgccggcgtagtcgtcgtcgccgcccgcgaggccgagccccggtgcctccgcgccgcctcgctcctggccaggctcgccatcggcagggagacacaggataacgggcggcggaaggtcgccggcggcgtctggatctcgctcccgggagggaccccgtcgggaggaaagatcctaggagttgtctag

SEQ ID NO: 26660 - DNA, 174 bp, Zea mays
  Peptide Sequence Number=SeqID_70035
atggggagtagctctctccgggcagaatgggaatcacggcttgtgggtggttatgagattgatggttttggttatgactatggtgctggttgtcagcattgcaaccactgctcaggcgaagatgaagctgaggaaggagacttccaggagttccaagactacgacgagttctag

SEQ ID NO: 26661 - DNA, 237 bp, Zea mays
  Peptide Sequence Number=SeqID_70036
atggcgccaaagaacatggagcaagtaggcatcgcttccaagcacgggaagcaactgcaacagaggcaattcctcgccggcgttgcagatggtcgcaatgccgctgcgtgtagtcgtcgggattatatactgggtgattctcgatgttgcagcctagatttgatcaatcgggtaccgcttcgttcgggcgaagctgggctgtcgatcgtcaagtgggctcgcgaccgtcagatttag

SEQ ID NO: 26662 - DNA, 690 bp, Zea mays
  Peptide Sequence Number=SeqID_70037
atgcagaagctgcagcaagagcttgagggcaaggcccgtgacgccggcctcaccgaggaggagcttaaagcgaaaggagagtccttggacaggcgggagatgaacctcgccaggcgggagaaggatctcgccttcaaggaggaaatgcttgaaaggcgggagaagttgctggccgagcatgagctcgaggaggagaaggagcagacgctggaggagtgggtctgccagttcgaagcggcgcaggcggcaccgggtccccaggtggcggaggctgccaagaaggccctagaagatctccaggcagaacaccgcgctggggtccagcagatagctgagtgggccggcgaggcaagcacggcgctggtgccactggggataagtcccatcccagtgtcgaggccgccagcgtcgatctccgacgccctcccggtgctggactctaccaccgaacgcctccgttgcctagaccagatcctcggcgcccgcatggaggcagagagcagcgggctttgccgggtggtggtggattacgtgctgacgtgcttccggagccacgacccggccatgtccttggcgccagtgctcgacggtccggtggccgccacagaagacaccgcccgggagagcgtccaagacgccgtggagacggtggccgcgcgcttccagcgcgaccctgctggtgccgagtag

SEQ ID NO: 26663 - DNA, 372 bp, Zea mays
  Peptide Sequence Number=SeqID_70038
atgtcgaggaagacgaccctctcctcaaaagggcccgagaagggagatgtgtgcacaacaaagaaccagcaggtgtcaacgatcaacttagagggccagatcaggaaagggcttcgctcccaagcaagaaagcctccgctcgactccaagaagtcgcacaaggctcgggggctgctattgagtacccagaaatggggtaccgatagtaaggcccaaaacctctctgacccatttgttgagcaagtctgcaaggcggggcgaatgaccaagcccccgccgagcaaatctgtgaggcggcacaaactaccaagtccccaacgagaaagcctgcgatgcaaggggagcgtccaggcctctgccgagcaagtatga

SEQ ID NO: 26664 - DNA, 1323 bp, Zea mays
  Peptide Sequence Number=SeqID_70039
atggccagcgccggcgtcaacgtgcccggcggcgacgaggtacggaacccgaccgctgcgtccgcgtccaccccagaatgccggatgcgcaggcgccaccgcctcgagccccaaggatccggcgacgccgccgccgctgcggcgccgggcccgagctgggtgcgccgtctccgtcctgcggcctcccggttctcgccgtcgccgtcgccatcgctgtcgccgtcgtcgtcccagagctctgcggacaggcccaacgacgaggagcaggaagagctcgaccatgaggtggaggtggagctcgcgccggcggggccgcagctcgagcccggcgaggctgaaggtgaacctgaagccgaggccgtcgccgtcgccccgcaggtgtggcccgtggccttcggctccctgtccatggcggggcggatgcggatgatggaggacgccgtctcgctccatccggacttgtgcacctgggccgccgacggctcgcccatgcacttcttcggcgtctttgacggccacggcggctcccatgtgtccgcgttatgccgggaccggatgcacgaggtggtggcggaggagctggccagggagggagccaccttcctgcggcggcggcaggagtcggcggcgtcgggcagcgccgcctggtcggagcgggcggaggaggagcgcgcgtggcgcgcggcgctgcagcggggcttccggcgggtggacgatatggcggcgctggcgtgcgcgtgcgggcgcgtggcgcggccaagctgcagctgcccgctcgccggcacctcctccggcatcgtcggctccaccgccgtggtggccctcctcgtccgcggccgcctcgtcgtcgccaactgcggcgactcccgcgccgtgctctgccgcgggcccgccgggacgccgcccgtcccgctctcctccgaccacaaggaaggcagcgggcgctgctgctgcagcacggatatcaaagcaggccatgcagtggcagtcccgtggatagctcggaactttcagggcggtcgctgtgcgccgtcgctgtcgccggttggacacgtggcgggaacggcgggggattccgagggtgaggggggggggcacgtgtcggtggatgctggggcacgtggggagacccgagtggtcgccggctggtgggcccttgtacctcaaagctgtggggccggggctgcactctccactcgctgggtcgctgtcgcctgtgcggcggggcccgccggagaggaaaagggtgtggtggccggaggcgccacctgcccgtctctgcgtgcccgcagcagagagaagaggagagaatcgatggaatga

SEQ ID NO: 26665 - DNA, 567 bp, Zea mays
  Peptide Sequence Number=SeqID_70040
atggggaagaagaaaagcgatccaagcgcaagagctcaaaagaacacaacaaaactctctcttctagtcactattgctttgagtggaattgggacttggagagattttgattcactctatttgtgtcttgtattgaatgcactagctcttgtattgaatgtgttggctgaaaacttggatgccttaaagtgttggtggttggggggaacgttggagagaaccagcaaggacttgggaaaggccaaggtgttgaggaggagtagcaagggtgcccacaacaggaaggagatcaagtccgactcggctgcgagcctgcgactccatctcggggtccaggaccagtctgcactaaaatggacgcccaagatgcatccggacttcgattgcgacgaacttgatatggttggaaagataaagagattatctaaccaaatcaactggttctaccttaaaattcatccagagtcaatgggaatcgtcgaaacaattcagcgttcagattctgttttggtgctgcgacaccgtctgttgggccattgggccgtgtatcgcgttggagcccattag

SEQ ID NO: 26666 - DNA, 444 bp, Zea mays
  Peptide Sequence Number=SeqID_70041
atggtccagatcgtcgagcaccatgactttgatcccaaagactttccgatggaggaagaagctgcgtcttccacgccacgggcctctagccgccctgcgcctgaggcgcttcgctataattcaccggactgtccggtgtaccaccggacagtgtccggtgccccagaggagagcgactctgaactcgccagcttcgggaatccgctccgctataattcaccagacatgtccggcgcattgaatgcgcgccagcgcgcgcagaagtcagagcacgcgcgggtggcacaccggacagtctacaggacttgtccggtgcaccaccggacagccaggcgggcccacaagtcagagctccaacggtcggaacccaacggcctagtgacgtggctggcgcaccggactgtccggtgcgccatgcgacagcagcctccaccaaacgactag

SEQ ID NO: 26667 - DNA, 840 bp, Zea mays
  Peptide Sequence Number=SeqID_70042
atggggttccgctgtggccgtgcctcctcttcgctgctgtgtgaagaggacgtggccggcatgtttggatgcaatgggcacgacgacgaagaggtggggcttctggtgttggggatggacacgacttttgctgcgctgccatcacagagcgacgaggtcgtagcatccctgatggagaaggagaaggagcagctgcatagcgttgcgacgggggattacctccagaggctgagcagtggaggactggagtcatcttgtaggattgccgccattgattggataaaaaaggcccaggcttatcacgactttggaccgttgtctgcttatcttgctgttaactaccttgatagggtcctctccacaaatcaagtcccagtgagttctacaaatgctgatgctgaccaccagccctggatgccacagctgctgtccgttgcttgcctaaccattgcagccaagatggaggagaccgtggttcctcgccgtctggacatccatcagaatcaggttctcagcgagaagtacagattcgatttagatgctattcagaggatggagatttacattctagactctctgaattggaggatgcaagctgtgacgccattctcttacatcaactatttcgtggacaagttcactgatgggaagccgctaagttgcggattcatttctcggtgcaccgagatcatacttggcagtcttgaagcaacgaagctcctacagttcaggccttctgagatggcagcagcagtggttctgtcagcagctgctgagtctcaagtcattgccttcagcggcgctcttttagcttctaatatccttgtcaataaggtgtag

SEQ ID NO: 26668 - DNA, 510 bp, Zea mays
  Peptide Sequence Number=SeqID_70043
atggaggatgtcgggagggacctcatgctggggcttgggatgggggtcggggtgcggagggaggaggaagcgcagagagggaggagggacagggaggtgaggcgggagctagagttcacgacgaggagcgcccggtcgtcgccggagccggcggtgggactcaccctcctgcacggcctcggcctcccgtggccgccgccgccatcgtccgagaccaaccggcacctggaggcgtcggcgcgtggcttcgacgtgaacagggcgtcgtcgctgtccgcggccggtgccgccgcggaggaggacgaggagcaggacgaggcgggggcggcggcggcggcatcgtcgtcgcccaacaacagcgcgagctccttcccgacggacttctccgcgcagggccagcgacgaggacgacgacggctccacgcgaagaagctgcgcctctccaaggagcagtctgtgttcctggaggacagcttcaaggagcacgccacgctgaacccgagcgtgtaa

SEQ ID NO: 26669 - DNA, 1185 bp, Zea mays
  Peptide Sequence Number=SeqID_70044
atggcggttgtggaggcgtgcgaccccgcaaggatcgacatctcgtccaagacagcagccccctcagagcggacgacgcagcttatctctggtggaaggcacgtagccacgcccccactccctcctcgtgctcccgccgacgcctgcctcgcgctcctcgtcgaccgtctctccctctcctccgtcgttgcatctcgcctctcgcgcacgcacaaagatgccccaaatgtgctgaacttaagctatcgcgtgagaacacaactttctgcttctactttaattgatctcaatggggcatttgggtggctagcaattcacattgataatttaaaagtgaatttcaggtgtacatttgatggcctccgatatggtgctgccttcaattctctacaatgcgcgagaatgctgctcaggaggatggctgaaaaactccgagtgctgctacgctaccagagtcttcatgtgcatacttacttcaagaactcaagcgagaagctcaaagaaggggaagacatctacatctatcagggtgacaaatccttttgcagcatggagtgcagagaaaatttcatggtagacgagatggaaggcaagggaggctggaagcaccttttttgcatgggagctgcatggagagaacttattggtagaaaacaaactttgaccagattcttgaatgtgccaagggaaaaaggtattaattgggaccttctatttatacaagggaaaaaggcgcggacgtacgatggcgccctcgcgcgggatatcgggctgagtgatgagacgctgctgccattggggttccaggcgcgcctgaccgctcccactcctaggcccggcatgtctctccgacgctacctaccggtgctggtgaaacgcaaacttaaaatcgtgcattgcaagatgttgccttctctttatgtctcctctactctacgcctacgagctttctttgtttataactttttctgtggtttcgctttcaacaagctcaagcggtcaacagatcaacttagacaaaatgcagatgcagtggaaatattaaggaagaccagattccctcatgttcatggagcaggtgaaaagaagtcaccagagacaattctggatcatgagactatgagaggactttggcaacaaatgttcggtttggacttctctgggtggttctatgatactttataa

SEQ ID NO: 26670 - DNA, 249 bp, Zea mays
  Peptide Sequence Number=SeqID_70045
atgtcccacgaatccaacacctcttccactgatttggagatccacaccgatctggctggcctctgcgtctcttaccgctcgctcactcctccgcttcttgcccgccgcggccacggccaactggttccttgtcacacggcaacaagtttgggaacaatgagcctctgcttggcgcccatcgccacttctgttgtcaggagacctcccctcgaccaggtccagtacgcgcaagtgcaaaaaatgtcgtag

SEQ ID NO: 26671 - DNA, 48 bp, Zea mays
  Peptide Sequence Number=SeqID_70046
atggcccctcccaaggctacgacggttataggattatggagccattaa

SEQ ID NO: 26672 - DNA, 1008 bp, Zea mays
  Peptide Sequence Number=SeqID_70047
atggaggcccaggcccacgcgtcatgcaaccggcgcgccgactgcttcgtgcatgcaactgcaccgccacttgcgccaccaccgcacctcctcgattgcagaaccaataccgcgactcgaggcgacccaacgcacgacccagcagcgccagcctggcgcggcggtcaatgcagccaaaagcggcgcctctggcaggagaagcgggcgacgcttcgccttcgccataatgaccgcgtcagtaaagggaccgggaaagggggataccccgaaaagaatccttccccaggaaggaaccaggctccgagcctccctactgatcagaggttcgaaggctggccccccgaagggttcgacagccgcctcagatcgcgtgggccctacacccactactggtcagaggttcgagggccggccccccgaagggttccacggccgcctcaggctactcgggctccgcgcccattactgatcaggggttcgaaggctggcccccgaagggttcacggccgcctcagacgccgagcgagggatgaccatgggtatgttcgatacataaccaaggctcgggctgcgctcccgaggctcgggggctgctctcgcaaacccggctccggccgaaccgttaacagcgtcaacataccagcccgagaacttgggacccgaccgtacacccgggctacggccagctcgcatgagggaacaaccagaccagccgaagcattgcgcaaggcattaagacctcgaaggagtgaaaccactcctccgaggcctcgggggctacacccggcgggtgcgctcacgcgcacccaccggaacaaaatgcaaccgagaaaggctggtccccttgcaaaaaagtgcgacgaaagcctccaagcgagtgctaacactcccttcgaggctcgggggctactgtcggggaccataattaggggtaccctcaagactcctaattctcagctggtaacccccatcagcataaagctgcttaggcctgatgggtgtgattaa

SEQ ID NO: 26673 - DNA, 2067 bp, Zea mays
  Peptide Sequence Number=SeqID_70048
atgccgtcctcttcttcttccgctgccactacaccgccggccgccgcctcgtctgaggagacgttgagtagcttgatggtggaggagttgcgcgccggcgactctgttgattttggtgtgtcgcggatgacgtcagcccgcgttgaagatatgcatcggttgggctactttggcggcggagttgctcgtgctccggggacggaggaagtccccgagccggaggtggcagaggaggatgcagacgaaggggcccttcggtgcgccgccggtcagagcagtgggcgtgatttagttgaagagttcgtggcgtacggggtgtggcccttggcgcatggctgggcgttgggcgaagtgtgccctcgccagatgccttttcacggaggaagggtggtgcgaagtcctaccttcgcactgaatctgcgaaaccgcgacccgaccgcctttgtgcgcgatgcggaggacggggtggtgcggctcgtgggacgttacgtgccgaggacggaaggccagcgcagctttgatatccgcgggtcaaatgaccgtttgaatagggtcttcgaattgaatcaattgccgtacgacggctatcctggtcaagacgaagcggaccgccgtgggaagaagccggcggctgcggccaccggcggaggcaagccgccgctggcggcgaaggcgggcgcctctgcacctagcaaggcgccggaggcaacggcgggcgccggaggctccaagtcaacgaaggtggtgccgccggccagcggagtggcggaggcttcgaaggcggcccgagcgttgccgttgtcgggcaaacgtgttgccgacttcggcaccgatattactgtggacgactatcttggtgggtcggacgagggccagcttgctatagttgcgcctggcgcggcgatcgcgacggctgccatagtgccgaaggcgaggagcgaggctcttggcgccggaggcgaggtgtcggccctcgcggtggtcagggacgaggcgggcgcagcgacccgccggctgaagggagtgacggaggcgctgagtcaggcgacggacgagctgagtcaggtggctaacttcaccagccgtactgcgtcgggggcccttacggcagctttgtctgccgaagtcgagagacttcggacgcaacatgctgatgctgtccgtgaaaaatcggcctccgacagcaagtgccgtaaactggcggagaaggtggccgccctggagaaggagaaggctgacctccggcgccagctggcgggggagaggagggaggccaacgaagccatcgccaaagagcaggctgcgcaggcggaggccaagctggcgcgggcggaaggcaatattgccaaggagctcgccggacatctgcaggagcggctcaccgccctggagagccgcacgaagggggccgaggccgcgatgcgtgcggaggccgaacggacgcgcacacagcttatggatacatatcgtgagctgggaggagctgcaggaactccccgctgtcgtggggggtttatgtcgtacgcctccctggtcacctgcgagggggcggtgaacgcactctcccgcgaagggtgccggcacttcgaggtctttgaccaggcagatgaagattttgagcgagatgtctataaggtcgaagaccccgttgtgaaggaatccgccggggccctctacgaccggatgtggggtccgcacggtcgtgaggtggtcagggagcgggccgagactgcgagggctcaggcggcgcgtggcgagcgggtggacgacttcggggctctgaacagcgcgctgccacacccggagccgacccctgcggaggctgtgactggggtcgccctggagccaaccccggagaccgcagcgatcgcgacggctgcccccacatctgttgcggtcggcgaagacctgcccccaaaggtggccgaaggcgcccctgatgcccccgcagctgctgtgccgagtgttgaagatcccgtggcggtggcggtggaaacaacggtggaagcagcggcggagccaacggcggaggctcccgcagcgtcatggccttcgcaggtggcgtag

SEQ ID NO: 26674 - DNA, 1152 bp, Zea mays
  Peptide Sequence Number=SeqID_70049
atggggggggggcctgcggagcaacagaagaccgacgggcggctcgccgtcgcccgctccagcagcaacaacgacgacccccgctccaggtggccgaactgcagcagcgatggcctcagggcggacgctgctgcaaccttgccctcgcctacgccgacgctcgaggggcgaggacaagggccgtcagccctccgacagatccccactcagatccttccggacgagtggggcaccgacctccgcgtggaggcgccgcaccggtgcaaaggcaggaccgccccagaacacgaacgccgccctggcagcgcgcgacatcttgggcggtcctcccgtgcgcacggcgcgacaaccgccttcgcggcaggagggggcaccgggagccaagccggcgagtccaacgcgccgaggctgacgacgcccgccgttgaccagccccgcgttgtcgaagtccgcctctctcgcagggccagtgagcgccctctccctcgaacgatgaaggagaggctgacccacgaaaccgcgcgggagatagagctccggctcagcccggcctccaccccagcgaggatgatgaacatccttgaagctgagggtgggaccaagatcgcagcccgactcgcttctccccacccaggggctggtgaccagcgggcgagagggcgggcagccatgcaggcggcatgcaaccgcgccaagtgggcgcacctctccgacttccagcgcgcccagcatggaggtccagacccacgcgtcatgcaaccggcgcgccggatgctacgtgcgagcaactgcaccgccactcgcgccactgccacgcctcctcgactgcggaaccagtaccgcgactcgaggcaaccctacgcacgacccagtagtgccagcctggcgcgatggggaagcgagcgacgtttcgccttcgccataatgtccgcgtcaaaaaaggctccgagcctccctactgatcagaggttcgaaggctggcccctcgaagggttcaacaaccgcctcagagcgagtgggctccacacccactactggtcagaggttcgaaggtcggcccctcggaagggttcaacgaccgcctcaggctactcgggctccacgcccactactgatcaggggttcgaaggctggccctcgaagggttcatag

SEQ ID NO: 26675 - DNA, 546 bp, Zea mays
  Peptide Sequence Number=SeqID_70050
atggggcgtatgcacagccgcgggaaagggtatctcttcatcggcgctgccgtacaagaggactcctccgatctggctcaagacagctaccaccgaggcgatgcaggttgtcgattgacgcgctcgcatggtatggatcggcaggtggaggagatgattaccaaggctgcgaagaagggccagatgccgtcgcagattggtgttctgctccgtgaccagcacggcatcccgcttgtcaagagcgtgactggtagcaagatcctccgcatcctcaaggcccatgggttggcgccggagatcccggaggatctctacttcctcattaagaaggccgtggcgattaggaagcatctggagaggaacaggaaggacaaggactccaaattcagactcattcttgttgagagcaggatccaccgccttgcccgctactacaagcgtaccaagaagctcccacccacctggaagtacttaggagctgtcttagatcagttagtgcgagtcaaccacggcgagcactctggtggcctaagtgatatcctctga

SEQ ID NO: 26676 - DNA, 3429 bp, Zea mays
  Peptide Sequence Number=SeqID_70051
atgttcggacttcaggcgagcggcgcggcggcctcgtgggtggtggggcggatgggcaccgacgcgcatctctacgacgaccccgacgacgcctccatccccgagctcctcgactcccgcttcgacgccgacaaggtcgacgccctcaagcgcctcctcgccctcatcgcgcagggcgtcgacgtcgcgcacctcttcccgcaggttgtcaagaatgtggcgtcgcagtcgctcgaggtcaagaagctcgtctacctctacctcctccactacgccgacaagcgccaaaacgaagcccttctttctattaacatcttccagaaggatttatcggatataaacccactggtgagggcttgggccttgcgcactatggctggcattagactacacgttgttgctccgcttgtgttggttgctatcaagaaatgtgccagggatccgtctgcgtatgtaaggaaatgtgctgcctacgcactttgtaagctgtgcgacttgattccagacgaaaatgcggctttggaggaggttttgtctagtataacccacaccttcttctctatgcagcaactctgcattccatatacgtatctcaagcctgccctgttgatgttgttgcagatcgtggacaccttgttcagcgacaattcccctggagtagtaggagctgccgctgttgcatttaagtcggtctgtccaagttgtttaccgttagtatcaaaacatttccggaggctatgtgagaccctccctgatatcgaggaatggactcagatcgtcctcatcgagatcctcttgcgttatgtaatagccagacatgggttggtcaaggattctttactctttgcttcagatttaccgacagagattcatggcgttacagattcagatgctgttgctagcgtgcccacccaatctgattctatcgtcaatggggtttctgatactatatcaagcatcatgctgttccggcactacatcgaacaatgctcaggttcctctgatagagaaggcaataatttagaattatcgtctgtcaccgcaaacaacaacgatgatgtcacaattcttttgaaatgtacatcacctcttctatggagtcgaaatagtggagttgtacttgcagcagcaagtgtgcattggatcatggctcctattggggacatgaagaaaattgttggcccaattttgtttactctacggtcatctcctgatgcagcatatgtgatgcttggcaacatagtagtttttgtcaagacaatgccatcattgtttgccccgttttatgaggacttctttgtaaacacttcagatccgtaccagacgagggctttgaagcttgaaatactgaccactattgccacagagtcatctattccggccatttttgaagaatttcaggattacattaaagatccagataggaaatttgtagcagataccgttgcggctattgcattgtgtgcccagaaacttccctctattgccacttcttgcctcgagggacttttggcacttgtattttatgaatcttttattagtaactcagttcacttagatggagaagatgctgttttggttcaagcaatcttgtcaatcaaagcaatagtgaaaatggatccagtatcccacgaaaaggtatgttgtaatgttcaatcatgcattagagctgtaattgtccgcttggttcgtggtttggacaaactcaaggaacctgcagcacgatccttgatcatttggatgtttggagagtatagcttcatgggggatctcactacaaagattgttcctcctgttctcaagtatcttgcgtggtccttcgttgctgaagtggtggaaacaaagcttcaaatcctaaattcttctgccaaggttataatgcgttgtacagaagaagacatggaagaattcaaaagcatagttgcatatgtcattgagttggctacgtgtgacttgaattatgatgttcgtgatcgtgctcgtttactatcaagactcttgccgtgctacatgactcaccaagggtcctcacatcaacctcagaatggtgatatctataaagagctagccaatcatatatttaatgggaagttgcagccaacatctcatccagcaagcaactatcgcatatatcttccaggttcactttcgcaggttgttcttcatgcagcccctggttatgcaccacttccaaagcctcaaagtatggaattaaaccataatgtcacggcagcaattagaggcaaggccaaactttctggaagtgactccgatgctgaatctggatcttcaacatatgagagcagctctgtttatgattcggagagtgaaggtgctggcctatcggacagggatactgttgaatcccatcaggctcaagaagataaccaggatgctccactggtacagatatatgatgctagtatacagcaaggccaggcaggtcaaaatactgaggaaaatttggcagatcttatcagtaccgatttgactgagttgatgtctaagtcagccttggaatcatggcttgatgaggctcctgctgagccagttgttcagaatttgacacagacatcgtctgccagagtttcttttacaaaccgcaactttgagcgaaaacctaaactgcacacattgttagacccatctggcagtaatggattaagcgttctatatgccttctcgcctgaggtttcacccagatcacgtttgctagtatgtgtagacctatattttgagaatgtcactacacagcagctaacagatataaccattgaatctgaagaggcttctagcagtgtggattttatagaccaaacatcagaaggatattcgggtgtccctactatcgttcctgtggaagggatacattcgttggccccacaacaaatggcaaagttggttcttcaggtccattttcatcaccatatcttgcctctaaagctgtctgtgttttgcaatgggaaaagacatccagcaaaacttcatcctgacattgcttatttcgttcgtccactacccatggacctaaatactttcctatgcaaggaaaaccaattgaggggaatgtttgagtatgcgaggaggtgcgctttcaaagatcatcttcagaagctaggtcacgaggacagtgcagagcacatcgataagaaccttcaggtggcccagagtgttgcttcaaaaatactgagcaatgctaatattcaccttgtctcaatggatatgccagtaaccttcagtgtcgatgacgcctctggcttgtgttggagattcagcggtgaaatcctgagcacttcaaaaccttgcctgattaccatcctggcggaagggcgtgcctctggtccgctggaccttgctgtgaaggtgaattctgaagatacggtgttcgccctgaatctcctgaacagagttgtggcgatcatagattga

SEQ ID NO: 26677 - DNA, 912 bp, Zea mays
  Peptide Sequence Number=SeqID_70052
atgtgcccttgggccatttctaagtattttggtgattgggtgcaaacacaagtgcttaaatgtgaaaatatgctcatgggtgaacaaagtgcaaatcacaatgttagaaacaggaaaaagaaaaagaagtggagagtggctgtgtacagccaaaggctgcttcaggctggggcaccggactgtccgggaccgggaaagggggataccccgaaaaggatccttctccgtgaaggaaccaggctccgagcctccctactgatcagaggttcgaaggctggcccctcggaggggttcaacagccgcctcagagcgcgtgggctccacacccactactggtcagaggttcgaaggccggcccctcggaagggttcaacgaccgcctcaggctacttgggctctgcgcccactactgatcaggggttcgtaggctggcccttgaagggttcacagttgcctcagacacagagcgagggattaccatggaggctcgggggctgctctcgcaaacccggctccggccaaaccgttgacagcgtcaacataccagcccgagaacttggaacccgaccgtgcacccgggctacggctagctcgcatgagggaacgaccagaccagccgaagcattacgcgagacatttagacctcggaggagtcaaaccactcctccgaggcctcgggggctacacccggcgggtgcgctcgcgcgcacccaccggaacaaaacgcaaccgagaaaggctggtccccttgcaaaaaagtgcgacgaaagcctccaagcgagtgctaacactcccttcgaggctcgggggctactgtcggggaccataattaggggtaccctcaaggctcctaattatcagctggtaacccccatcagcacaaagctgcaaaggcctgatgggtgcgattaa

SEQ ID NO: 26678 - DNA, 1080 bp, Zea mays
  Peptide Sequence Number=SeqID_70053
atgatggccgcggcggcgctgaggccgcacaagtcttcgccggcgcgggtgcccacgcggtgcgtggccgcgctctgcgccgcctgcttcctcgtcggcgtcggcgtcgtcaacaggtactggcctgttcctgagcctcatcccggttgcccagacaaggctggccctgaccactcgagggccgtgttgaaccaagcgtcacagactcgcgaagtcgtcatggcgttggacaagacgatatccgacatcgagatgcgcctggctgcggctagagccgcccaggcgatgagccagggcatgtcaccgggcgactcggactcggagggcgaccagggaaccgcgcggcgtgatcagttgcgaagattggaagacaagggcgttgttatccgttttgttgttggacgcagtgcaaatccaaacctggaaaatgaggtcgaccatgcaattgatatggaggatgaagaatacagtgatatcttgagaattaatcatgtggaaggctatggagggctccctatgaaggttcagatgttcctttcgactgctcttacaatgtgggacgctgatttctatgtaaaagccgacgataatgtccatgtcaacattggtatcaccagatcgattttggcgcgacacaggatgaaacctcgggtgtacattggctgcatgaaatctggacctgttgttgctaagaatgactccaagtattatgagccagaccattggaagtttgggactgagggtaacaactactttaggcatgcaacacgtcagttgtatgctgtaaccagggatttagcaacttacatatcagcaaaccggcatatcctgcacaagtattcaaatgaagatgtatcatttggctcttggttgatcgggttggaagttgagcatgttgatgagagaagcctttgctgtggtactcccccagactgcgaatggaaagggcaggccgggaacccatgtgcggcgtccttcgactggaactgcactggcatctgcaatccggtggagaggatgacagagatgtgcagcaatggcatcgtttcctggccagttcgcgtgcggaaactggggtag

SEQ ID NO: 26679 - DNA, 456 bp, Zea mays
  Peptide Sequence Number=SeqID_70054
atggccagcaacagccaacaactcaacgaagatccacggaagccagcaactagcacgaacgccagtcgccaacgtgcccagcagctgctgcccctgcgcggtgacgcggtgctgctgcccctgcgggcctgcgcggtgctgctgccctgtgcggtgtcgtggagcctgggactggcgcctgcgcggtgctgtggagcctgggactggcgctggccgactgcgcgcggtgcctgcgcggttgctgcttgctggcctgctgggagcctgggaggaggaggacgccgtcggccgcgctggaagctagggtttcgacttgcctgggactgggaggaccggaggaggatgccctcggccgcctgggaggctgggatagggagtaggcactgcgctgcgctgttgggcttgggctgcctagcggctagcgctcagcctggcccgtggcggcgtgctgcctaa

SEQ ID NO: 26680 - DNA, 213 bp, Zea mays
  Peptide Sequence Number=SeqID_70055
atggggacaacctggggtggggtggcgtgtaaagcaaggcctgggttgtatagacccgatcttcactaccaaggtgaatggccagggatacactacgtagcctttacaaagactcccctggtccttacggagaggtactcaggaaaaaggcctgagccccctagagtatcacaagatcatcaacataatcaggataacagtatcgtatcataa

SEQ ID NO: 26681 - DNA, 246 bp, Zea mays
  Peptide Sequence Number=SeqID_70056
atgctggacggggtcgcaagacgagacgacctcgtcacaggtcttcgtccggtggcgtatgaggcgaaggcgaggactgcgaaggcctcgagcgaagggtggcgtcttcgccttcgcccccaacatttgccctccgagggaccagttcgactaagtcatctggtgccgaagacgtcgctagatggcggagacgctgccctcgctcgaagtggttccgcggggttttttgacatgaccgttgattga

SEQ ID NO: 26682 - DNA, 1536 bp, Zea mays
  Peptide Sequence Number=SeqID_70057
atgtgctcgcattattactcagcatacccgcagtttgaagtggcggaggaggatgcagacgaaggggccctgcggtgcgcggccggcctgagtagcgggcacgatttggttgaggagtttgtggcctatggggtgtggcctttggcgcatggctgggcgctgggcgaagtatgccctcgccagatgccttcccgtggtgggatgctggtgcgaagtcccgccttcgcactggatttgcatagccgcgatcccgccgcattcgtgcgtgaggcggaggatggggcggtgcggattgttagccggtacgtgccgaagacggagggccagcgtagctgggatatacgcgggtccaacgatcgcttgaacagggtcttcgagttgaaccgtctgccgtatggcggttatcccgggcaagacgatgtggatcgtcgcgggaagaaaccggcggcagagactggagacgaccccgcgccggcagccgccccatcctctaagaagaggaagctaggtactgctacgggaggactgggggtttccgatggttttgctatggaattgatgaggacatgcgcggcccccgggggaaggatgtcttcgcccgagctccgggagtcttcggcacggatgctgaaggttaccgggggttggtggcctaagaatgttcctatcccccacgcggccggcgaagacttttttacatctcgcatggttcgtgagtggagagtttttccttatggacggaatattgctgctgttgtgtcggcagtgatggacaaggaccgtcaaggagctgtgcagaagcgccaggcggtcgtcaggctgcctgaggctaggccgaagaggtcgcgggggactgcgaaggctgctgcccccggcggcagccagccgacgctggcggcaaagtcggccgcccctgggtccagcagggtgccggaggctgcgaaggcggccgccgccggcgcaaccaagtctgtcccggccggagtcgcaaaggcccgagaattgcctccgccgggcaagcgcgttgctgacttcgccaccgatattagcgtggaggattatctcgttgggtcaggcgaggggcaacttgttgttgttccgcctgcggtggcgaccgcggcggctgccgtggtgcctggggcgaggggtagcgctgtcagcgccggtggtgagattccggcactcactgccgtcaaggacaaggcgggcgctgtgtcccgccggctgaaggaggcattaagtcaggcggctgacttcgctgaccgcgtggcgtcgggggcccttatggcggttgtgtctgccgaagttgagagacttcgggcgcaacatgctgacgccgtccgggaaaagtcggccgccgacagcaagtgccgcaagctggcggagaaggtggccgcgctggagggcgagaggactgacctccggtgccaactggcagaggagagaagggaggctaatgaggccttcgccaaggcgcagtctgcgcaggcggaggccaatttggcgcgagtggccgtcgtgggttcgagcccctga

SEQ ID NO: 26683 - DNA, 597 bp, Zea mays
  Peptide Sequence Number=SeqID_70058
atgggcgctgataggcaagccaggggtgcagggcgcgcgtgcgcgaagcggtatccgcaatctgggtcgtgcgatcaagatcggacgggggagatcagaccgagggagggcgaatggctacgggcggcgctgctcatctccgcggcggtgaggtcgccggagttgaggcaggcacgagctagggtggctccggggtcgccgggattgggcagagaggaagagaacgccatggcacactcaatggcggggaaaagccatgaatccacagtcagagggggaagaacggcggggagaaggtctcaggcggaccggaagaactccggcgaggcattccggccacggggaggtgacttgaggcgcgctaaggcttgggaaagcttcagcagaggcaggtgtgacacaggagcctacaccgggaaactagaccaggctaaattggtcggccaccgcgcgagcacggcggaccgccacggccgagctccggcgatgccaaaattggccgagcacagagcggaactagggaaattaagcatgggcaaaggtgtctcacctcggggcggagctcgaggtgacttgacacagtctccggcgagctag

SEQ ID NO: 26684 - DNA, 1041 bp, Zea mays
  Peptide Sequence Number=SeqID_70059
atgtccaactatgtaatcactgtgtacgtgagttctgatcctggcacagcgtccactgcgtcgcacggtgacaggtcagtccgatcacctggagagactgcatcatcgcctgcacgaggagcaggagcaccgacgccaggagcaggagcagtaggactcttccccttgcctcagcaggaggtggagtctgagaggccgccttcccctgcacctcagctagagatgccccctgcaccaccacagggcatcctggctgctggaggagaccctgacggagacgaagacgatgacgaaaccgatggcagttcgagccacgacacggagctcttggaggagccagagccaaagggatggatcgctagacccatcactcatgacgccgctcgcgggtgtcacttccacgacgctctcgacaccctgctgcgtcgggccttcgatcgacacacttggtccatcgagtatcgttgtgtagtctaccagcatcgtcgcgagttatactcggaccagtgggaggctacttgcttggtgcaccatccggacgatgatctccagggtgcagaggccttctcagagcactattctattaacgagagggatactacagaggcagccatgcaagatgcagcacgacgagcactttctcagtattgcttgttgtttagcggggtagctgatggcctcgacctgaagtactaccctcgtcgttcgaccggcagtgctggaggtgtgattgcctcgccagttggtgagggcaatcctaggctaaatagcatggtcaacttggctgtcgtgctcaacacagagttggaccacgcccttgacgagttgggcaaggttcgggcggaggttgcggaattgcgtgttgagtgcgcaacacaccactatctagatggtggttctcccacccctgtcgggattcaacacctttaccgttcaccgcccgtggtcgcttcgactatgatgtctaagaacaggcgcaaaggtgcgaggcgtgctcagccagaacaacaggcaccccaagaggagacagccccacagtag

SEQ ID NO: 26685 - DNA, 135 bp, Zea mays
  Peptide Sequence Number=SeqID_70060
atgctggacggggtcgcaagacgagatgacctcgtcacaggtcttcgtccggtggcgtatgaggtgaaggcgaggactgcgaaggcctcgagcgaagggtggcgtcttcgccttcgccccaacagaagattttaa

SEQ ID NO: 26686 - DNA, 1377 bp, Zea mays
  Peptide Sequence Number=SeqID_70061
atgtccaacgtgaccgtgtgcgtgcggttccgaccgctgagccacaaggagaggaaggccaacggcgacaacgtctgcttcaagaggctggactcggagtcttttgttctcaaggatgagagggaagaggatgtcgtattcagtttcgacaaggtgttctatgaagatgcccaacagtctgacgtctacaacttccttgcagtccccattgtttcagatgccatcaatggaataaatgggactataattacttacggtcagaccggggcaggaaagacgtacagcatggaggtggagatatatttggaaaaggtgagggaccttcttgacttgtccaaagacaacctgcagatcaaggaaagtaaaacccaaggaatttacatttctggagcaacagagatatctatcctcaacagttcagatgccttggagaacctttctcaaggaattgccaacagagctgttggggaaacacaaatgaacctggctagcagtagaagtcactgcttatacattttctcagtacaatatggatgcacttcagatgagagggtaacaacagggaagattatacttgttgacttggctggttctgagaaagttgagaaaactggtgctgaaggacgggttcttgatgaggcaaagacaatcaacaaatccctctcagctctaggaaatgtcatcaatgccttaacgactggtaaacagaatcatgtgcctttccgtgactcaaaacttacgcgcattcttcaagattcgttgggtggcaactcaagagcggcattgctgtgttgctgttctccgagcccatcgaatgcagcagagagtctgtccacgcttcgctttggaaccaggcatgccagtcaaccagtttcacacctgtaccgcattgttgtaattcattgctctctatggatactgagcaaggtctgtagcaatgaacccgaggtgatcggttatattttagccttcatttctcgttgccagcatcttactctgaaccaaacttgtgttcagctaaggttgagcctgaaggaggaggatgtggatttgttagaagaactgttcgtgcaggaaggcatcatcttcgatgccagttccgtcgtggacatcgactcggtgttccgggacactgcaagcgaggagatctcgttgctgatgcaagccgtcgaggagctcaaagaaactgtggaagaggcgttgcagctcacggacgagaacgaaaagctaagacgtagcctccaagtcgcacaggagatgaccactcaggcccagctcgccgccgccgccgccgtcgctggagctgcccggagccgtactctgcttgatttcgtgccggcagtcctcttccggccatttgggtttgtaccagagtga

SEQ ID NO: 26687 - DNA, 1197 bp, Zea mays
  Peptide Sequence Number=SeqID_70062
atgaacaaaaacactggcattcaaagtgccactacaaacggaactccggttccacctccgcagcaacgacaacgacccccgctccgggtggccgaactgcagcagcgagggcctcagggcagacgctgctacgaccttgccctcgcccacgctgacgctcgaggggtgaggacaagtacaaagagccggaggcccgaagcgcggatggtggcggtgatcccgtcggcaacggggacttctcgagccgcctccacctcggcaccgacgacaggggccatcagccctccggcagatccccacttagatcctcccggacgagtggggcaccgacctccgcgtggaggcgtcgtaccggtgcaaaggcaggaccgccccagaacacgaacgccgccctggcagcgcgcgatatcttgggcggtcctcccgtgcacacggcgcggcaaccgccttccggcaggagggggcaccgggggccaagccgacgagcccgacacgctgaggctaacgacgcccgctgtcgaccagccccgcgttgtcgaagtccgacccgcccacagggccagtgagcgccctctccctcgaacgccgaaggagaggccgacccacgaacccgcgcgggaggtagagctccggctcagcccggtctccaccccagcgaggatgatgaacatccttgaagctgagggtgggaccaagatcgcaacccggctcgctcctccccacccaggggctggtggtcaccgtctcggtcgtcgtgggctgagtcttctccaacacgctccaaggtcctccccctacggcgcggggctgggccccacacgtcatgcaagccggcccagagcagaagaagccaaaccgccgcgcgcggtgcatgcaaccgcccagcggttacaagcggccctccacttttgcccagaccagcgggcgaaagggcgggtagccatgcaggcggcatgcaaccgcgccaagtgggcgcacttctccgacttccaacacgcccagcatggaggcccaggcccacacgtcatgcgaccggcgcgccggatgctacgtgcgagcaactgcaccgccacttgcgccactgccacgcctcctcgactgcggaaccagtaccgcgactcgaggcaaccctacgcacgacccagcagcgccagcctggcgcgacggtcaatgcggccaaaaatgggccggcagtaa

SEQ ID NO: 26688 - DNA, 198 bp, Zea mays
  Peptide Sequence Number=SeqID_70063
atggcggatcaggagcgcggcgcgaaggaggattgggggcggatgatggagacgttggaagcagtgtgtgcgcggctgaaggatgtggagcgcgcacagcaacagttgatgtgtgccagctgctatgtgggtttcagttgcatcgatgaatttggaacatactgcgacacaatggtggcggtttcacaaaatgtgtaa

SEQ ID NO: 26689 - DNA, 603 bp, Zea mays
  Peptide Sequence Number=SeqID_70064
atgggcgataccctgccgatgccaaccaagtttgcaatcggcatggtgatgtgttctggtgcgttcctgattctgccgctgggtgcgaaattcgcgtctgacgctggtatcgtgtctcgtctgatgggcttcattatgggtagctggttcctgaccactgccggtgcaaacctgattggtggttatgttgcgggcgtagcgattatgcagtatcttgccgacagcgtccccgaccgccagttgctggcaccggtaaacagtatttcccgctataaaaccatcgaatggctgaattacatcgccaccgagctgcataaaggtttcacacctctgtttcgccctgatacaccggaagagtacaaaccgacagttcgcgcgcagctggagaagaagctgcaatatgtgaacgaggcactgaaggatgagcactggatctgcgggcaaagatttacaattgctgatgcctatctgtttacggttctgcgctgggcatacgcggtgaaactgaatctggaaagggtagagcacattgcagcatttatgcaacgtatggctgaacgtccggaagtacaagacgcgctgtcagcggaaggcttaaagtaa

SEQ ID NO: 26690 - DNA, 315 bp, Zea mays
  Peptide Sequence Number=SeqID_70065
atgtgcttcaacaaagaaagatcaaagagaagcgatagaaggtgctatggatgcaaggagaaggatcatgaaattgattcatgcccctacatgaagaatcaagaccttgcacgatcaagaaagatgaccatcaaaaggatgaaagcagaagacaaatgcattgcaaggacaagcaccacatttgttacaattgccgtgaaaagggtcatctattcaaggagacccaaatttgactcttgtgctagaaaggtgatgagttcaccacattctaggaccaaggtacctagagatgatatgaagctttggggtgcttga

SEQ ID NO: 26691 - DNA, 426 bp, Zea mays
  Peptide Sequence Number=SeqID_70066
atggacaatctctttgtcccatttttcttctccacaaataacattgggcggcccaaggcgagtgacctgatgacaaacacttcctctcctgacgaggacactaacttcacagtcctcttgtcacagctaaggcttgctcgaaatttgttacaaaagaatgcgttgctccagtatcaaataacacatttgcagaatgggattcgactgagaatgtacctagtgccactcctggggtcccctggactgtgtcggcctccatgtggttcacctttccatactgggcatgaggctgcccacagttgttgcctccttgctgaggaaggcgaggtgcctggttgttctggcggtactgttgctgctgagggaactatctctggtactgctgctggtgctgacgctgatgttgatgctggtggccttgcttga

SEQ ID NO: 26692 - DNA, 306 bp, Zea mays
  Peptide Sequence Number=SeqID_70067
atgcgcaggtgtgcacggctcggggatcagctgcagcccgcgtaccaggagaaggccgccctcgaggaggagatcgagaccctgaagggttccgccactgccgagggcaagggcgtggaagagggatgtgattctgttgctgctagggccgggacgcctaaggatcagggcgtggtgcctcccgcactgtattattatgcatctgatggtatggtattgtctctgatagatccatttgctgaggctaatgctgaggagtctggtgttgatcttggaacgaaggattatgtgcatatgcgcatctaa

SEQ ID NO: 26693 - DNA, 1368 bp, Zea mays
  Peptide Sequence Number=SeqID_70068
atggaaaaggatcgtcaagatgcggcgcagaagagccggatggtcgttcggatcggtgaccccttccgcgaggcaaagaaggcgcggggaggcgcgaagtctgccacccctggcagcagcaaaccaccaccggctgcgaagccggcctccctagggtctagcaagccttcggcagggtcggatgcggggcaactggctgttgtcccggctcaggtggcggccacttcgccaacgacggcggttggggcaaagggttcttcgcaggactcgtggtccaccttctgcatgggcggcgagattttgtcggccgctgacgccaaagatgtggcgggtttcgtgtcccggcagctgcggcatgtggccgacttcaccgaccgtgtcgcatcgggtgccctgaccgtggagtttgctgccgaagtcgagcgtctccgggcgcagcatacagatgctgtccgggagaagtcggctgcggaaaacaaaagccgcaggctgacggagaggttggccactgcggaggctgagaagggggatctccggcgccagctgatggaggagaggagggacgcgaacaaggccattgttgatgcgcaggctgcgcaagccgaggccaaacttgcgcgggcggaggccagcctcgcccgccaacgcgccgaggagctggaggcgaggctcaagagcctgcgcaaccgcgtagacaaagccgaggcctcgacgcgcgcggaggtcgagcggacgcatgcgcagttcgtggacacgtaccgagagctgggagcgcggaccgtcgccttcgaagcgcccggccaagaagcgagcctctgcttccttgaatggttgcaggaggaggtgggggtgctcctgacgattgtgacgggtctcatgtcctttgcctccctcgtcacatgtgagggggctgtgaatgctttgtccctcgaggggtgcaggcattttgaggtcttcgaccaatcggacgaaaactttgaacgtgaaatcttcaaggtcgaggaccctgtgctaaagcagtcggcggggacgctgttcgactggatgtggggcctgcacggccgagagacggtccgggagcggtccgaccgggcaatagatcagatggcgcatgccgaaggggtcgaggaccttggagatctggacggcacgctgcccgacagcacactgctcgaggcctcgggggtggatctggcgccgccatccgatgccggcgagggcccctcggcgacccccgcgtcgattgttgctggcaaagaccccatgccaacccctgtgctgacgggcgaggacacctcgaaggcgatgggtggaccagctgccgaagacccagcgacgacggccgggccttcgcaggtggcggaatag

SEQ ID NO: 26694 - DNA, 363 bp, Zea mays
  Peptide Sequence Number=SeqID_70069
atgggcaagctggagagtgtcgtgccccctgcgcgccgatgtggccgagcaggagaggggcgtcgagctgctggtcggccatgggaggaaaacagcaggggagtgaaggacgccatggctagggagcttacgcttggggccatgaatgttttgatgattaggaactttggagaggaccagcaaggacttgggaaaggcctaggtgttgaggaggagcagcaagggcgccacaacaggaaggagatcaagtccgactcggctgcgactccatctcggggcgacgacgaggaagcaaggatcccttacagattttcgatgaatgtgttagccgccaagatcttgaggcaacaacaagcttcctga

SEQ ID NO: 26695 - DNA, 493 bp, Zea mays
  Peptide Sequence Number=SeqID_70070
atggccgctgctgcaagtgcgggggcacgaaccgatggaggagcacgtgaggaggagctcggcgagctcagtccaggcgctagggcgcggatggcaagagcagagcggacaggaacagcgtccagcagcacagggacagtggtcggagcagagggaggcggcctgggaaagatctgggcacctgctgcacttggggaaacatccatggagctgagatttgcagcctccatggctaggcgctgcaagatggggatgggtgccaaacgccatgggcagaaagtgcctgcgccgacccgccgccatggaggagcaagggacgtcgaccacgacaagagcagggaaagggcgcagtcatggggacgcccagcctgctgcttgaggttgagttcagccatggggaaaggggtgcccgcgcctagaacctgcagggggagactggtcgagatctccaccaacgatgagaacttcggccaccaatgcggccagggcagag

SEQ ID NO: 26696 - DNA, 363 bp, Zea mays
  Peptide Sequence Number=SeqID_70071
atggcagagggaaggaccgagctcggcgttgggggctggggcgccatgggaatgagcttgaggaggagagggtgtggggagctgccggcggcgcagcaggggcaaggtccaacgagtggcagcgaaggaggaccgctagagctcgacgccggacaagctcgccagagagagggactgggtgagcgtagcagcaaggcgagatgggaaggaagaggagctcgaccgctgcttgaggaagagagggagcagagccgacaccatggatgggaggagcagaggcgcggtccggtggagcccgagtgcggccccgcgagggagctcgactacgacaggaagggcgcgtggaggggctcagctgggtga

SEQ ID NO: 26697 - DNA, 1236 bp, Zea mays
  Peptide Sequence Number=SeqID_70072
atgccgccgccccaaatcccttcctcggctagctgccccacaggcaaagctcaccgcgccaccgccaaggtcactagcaacatcgcgcccgatctggacgtgctcatcgtcaaggccaccagccacgacgacgaaccggccggggagcgccacatccgcaagatcctccaccttacgtccggatcccacgcccacgttgctgctgccgtggtagggtgctcccgcaggctctcccggacccgcgactatgtggtcgcgctcaagtcgctcatgctcgtgcaccgcctccttgtcgatggtgactcgtccttccaccgcgagctcctccatggcacacggcggggtacccgcctgctgaacctctccgatttttgggacgaggcgcactctggatcgtgggatcactctgcctttgtgcgcacctatgcgctctaccttgaccagcgcctcgagttcttcctccatgagcgcaagcaggggttccttgacaggttctttgacatggagtatgcggagtgcgtgaaggcttttgaggcatatgctagtgctgcaaagcagattgatgagctctctgcattctatgcatggtgcaaagatagtggagttgcaaggtcatctgagtacccagaggtgcagcatgtcactgataagttgctggagacgctagaaaagttcatgagggaccgggcaaagaggcctaagagcccaccacgggagcctgaacctgagcctgttaaggaagaacctgagccggatatgaacagcatcaaggcgcttccagcaccagaagattataaggagcctgaacctatgaaaggtggaggaagagatgagcaaggtaataggcttgctctagcactcttccaagggccacccgctgctagtggaaacaatggttcatgggaggctttcccttcaaatggtggcaacgagatgtatagtgctcagatgggatctcaaatgggaccccagttcacccgtccgtcacaatctggacagaccccaaacactaatgaaacacagggttctgagaccggacaaggaaacccacagatggacatacagtggtcgatgccccctagaggacagattcttcctccacaaccagtttcctgtagtgagaggttgctctccatggacgacggcggctcgctgcggctgctgttctgtggggaagaggggaggagcaggggcctaggcggcattgctcctgctgctgtccatggaaaaaaatag

SEQ ID NO: 26698 - DNA, 456 bp, Zea mays
  Peptide Sequence Number=SeqID_70073
atggcatactggcgaagcccacaaatgataatggcaaaattgccaatggctgggccccatcacgccggcgacttcgtcgttaaatcccgaccgcagcaatgcttgctggagccgatggtggtggtggagggaccatcgatcgtggtgttagatgccattatccaagttgggataacaattgcgggtacatggggtgccaaaggttcaacacaaaccaataaaaaggtccaagatagggttcaaaagaaaggagcaaaagaaaccgaaggctaccctggtctggcgtaccggactgtccagtgcaccagggtggatcaactcgaactcgccaccttcgggtttctggaaaagccacttcgctataattcaccggactgtccagtgtgccaccggactgtccagtgtgccagcggagcaacagctacagcgcaacggtcgactccaacggaaacctga

SEQ ID NO: 26699 - DNA, 237 bp, Zea mays
  Peptide Sequence Number=SeqID_70074
aggctacttgacaaggccctagctattgaacacaagtgtgttcagttgggggatatgaagaggaaggcgaccaccaagggtcaggggagcagcaatattcatcctcgctatgttccaccccagggtacaccggctcgcactggaggaggtcagcgcccagctcagtacacatcacaggggactccaccgactcgtcaggctgccctcactggcactactagaaatatgcttatttaa

SEQ ID NO: 26700 - DNA, 189 bp, Zea mays
  Peptide Sequence Number=SeqID_70075
atgagctttgaggaatcgacgatcaagcatggcgaccaagtgatcgaactcttcgagttctacgagatcgaagaccctgagcatctgtttgatgatgaggatggttatgatcatgcttatggtaatggtaaagaaggcgtcgaggcggatctccaggagttccaggacgtcgacgagttcgaggattag

SEQ ID NO: 26701 - DNA, 774 bp, Zea mays
  Peptide Sequence Number=SeqID_70076
atgttggtgcagggaataggggtgaagggctggttggcgactgctggcaggttgtggcaggcgcttggacgccgtggtcgcaggttgaaggaggaaaactggaggcgcagtgacttttggtccagtctctgtgtccagtttcctcttgctgtgactgtgggcaggacttcctcagcagttatggtgtatcgtgaggcagtttcagctgggctactaccctcaagtgatgttttatctcaagtgttgggatgtctgaggcttcctcatggcagttctctgaagagtactttcattgaaaacatgggagaggctgcttcattaggagcagttgcaagcatttccataaaagaaacccggattgttattgatgctagaaagttaaagatcttcacagccgaggtatctcttcttagaaccttaagatctttgaagcatcgattggctgcaggttcaaggttaccaaacgtgacaatcttgttacctacagaaaagaaacaagttgacattgatgaaaaggagaaaacacttaaacttgctggaagaattggtcaagcagttggctctctcctgaggcgattaggaatttcataccagggggaggaatctcatgggaggatgaggatcaatggcctcacgataaggaggtggttcaatccaaaactgaatagcaaatcctctgctgccggcccagctgacttgcttccactaccttcgcggttagccaaagggattgctggtcagcaacgcgatattagaaacctttcactcgagtag

SEQ ID NO: 26702 - DNA, 942 bp, Zea mays
  Peptide Sequence Number=SeqID_70077
atgaagggggggatggtgttgctggtggtaatggcggtgggtgcgctggaaagggggcatggggtggtgatagtgcacatggaggcagggcacgcgtgcggggagcacgagggcagtgctttgattctcatggtcggtgctggaatcttcttcatggtgaggggctcaaacaactctggcaggggatcttgggaggactcgggagaccgggtgaccttcaagaatttgggggtcttcagctctccttggttgaaactgggttggatggagcgggctcttggatccgcagggctctacgttggttatggggcttcaaacagcaatgacttcacgactttccaaggcagctacatgggcttgagctgtggtgaggtccacatggagcttacggttgcgcttctctgcatcttctgctcgggcaatcatctgacggtggtgccgagccaagaaatcatactgcgtatccagggtgagcaggtatgcagtgaggtacacgactgtggcgtcatcctcaagcagctgctgctcttccaacgcacgcatcctggccatccaaacggggcggtttctctgaaagggcgaaaagaatctgagtggggtatcggccacttcttcttcatagatctgacacagggccctcaatgccttgcgagcgacgacttggcaggtgtctttgaatctgtgcccagcagcagtgacactccattccacatggtgcggactggatccaatgtacacagtcacgacacatttctctgtgtcgtgctcgacgaattcacgaccatcatactctggttggctcctgattccgaggcgaactgtgcatgctctcagcaacttggggaaaccatcttcattctggcacaagttggtttggcagcggacctccatctgacttctgagagaaggaaaggggaaagcatttttgaaatgaagggatga

SEQ ID NO: 26703 - DNA, 111 bp, Zea mays
  Peptide Sequence Number=SeqID_70078
atggcggtggcggcggcggcggcggcttcggatccggccttggcgctggccgacggcgagcttctggtggtggctccggttctcctccatatagtactcgaagttatttaa

SEQ ID NO: 26704 - DNA, 180 bp, Zea mays
  Peptide Sequence Number=SeqID_70079
atggagctgtgcgtggggccaggccgtgactcaccccagcttcgagtgactactctgggccagcaacagcacccgaccccaccacgtggacggctccgggaccgccacgtggccagagaagatgatatactccaaggcggagatccgatgctgcagcgtggcctactacacgtgacgtaa

SEQ ID NO: 26705 - DNA, 624 bp, Zea mays
  Peptide Sequence Number=SeqID_70080
atggcgaacaacggggaaccgaactccgacgagcttataccgaccggatcactcgatgaccgggagcatgaacagacctggagtatgctgaccacggcgagggctctaccacggtggcggaaaacagaattggaggaaatgggaaattggagagttgtggtggctaatcggaggcaggagcgggtgctcaggcttggtgatgacctaacgcagcagaccgtgctgtcaatttatagcggcgctaagcggtggccagtgaatttggtttggcgtggtggcggttggagaagaaaggagtcactggcgcacgagattagtggctgcaaccgtggcaacctcaccagcgatctctggataggtcagtacgagtcacgacgctcacagggggcacgatttactgggggcagagacacggggctagagtggcatgattatagtgcatcccaagccgagaagcgccaaggaagaatcacacgagcaggcaaggtgtgcactgggagcgtcgtcgttgataccgtcgtgtcggggaacgtggctgttggggagaagaaggacgtgagcaggcgaggttggtttacaactccttttggagttgctctaagaccatctcccagcattccctaa

SEQ ID NO: 26706 - DNA, 384 bp, Zea mays
  Peptide Sequence Number=SeqID_70081
atgcgccgtacgctgaagcagacgccttctcctgtcttcgtcctccgccaccacggcggccgcggccgcgcaatcatctgtttgcaagcattctttggtactacttcaagcgccgatatggcctcccgcccaaagctgtctggtattcagaagcaggttttggcgctgtacaggggattccttcgaacagcacgtcttaaggcccctgaagagcgccacaggatcgagtccgttgtcttggcagagttccgtgacaaggcaaagagtgttgaccgtaggaactttatacatatcgagtacttgttgaggagtgggaagaagcagcttgagcagctcaagaatcctgatattactggacttgctacccttgtagtaaagaaatga

SEQ ID NO: 26707 - DNA, 429 bp, Zea mays
  Peptide Sequence Number=SeqID_70082
atggataccccattatatggagcagcacaatatttgaaccctggaaaattctacaacatcaaagcagaagactttgattgggacaatgaatgggttgatccattagctaattcttctcatgttagcaatgctcttggagatgatttcaatttatcatgggaccaagttgatgaagctattgtggcttctgcacatctcagaagtcgtaattttcctaggagagctgttggtggctgggtgagaaggaatgaagaccttgaggaagaggagactaatctagcaaatgaagatgacgaggatgaggaatatattcttgatgatcttgatgtggaagatgaaattgaaggaagcaaaagtggaaaagatggtgatgatcaaggcgtggatgctcatggtcttaatattgatgagttcgatgatggttattga

SEQ ID NO: 26708 - DNA, 240 bp, Zea mays
  Peptide Sequence Number=SeqID_70083
atggaatcctgtctgcaaagctatatcaggccaaaggaactagccatggaggttcacgggggtcccttgggctctggtcagggcctcaccaagtggattggatgcctgtggtattcggaattgctcaacggaaagtatggccaccaccatgctacgggtcctcgtggtcttgatcctcggatgctccaatccttaggtaaggtccccagacatcttcgctattatcgaagcaccatttag

SEQ ID NO: 26709 - DNA, 642 bp, Zea mays
  Peptide Sequence Number=SeqID_70084
caggaggtagagtctgtgaggagctgctctcctgtgcccccgctggaggcgccccctgcaccaccactgggcgtctcgaccgttggagtagctgttggaggagacctcgacgacgaaggtggcgacagcagctcgagtcatagcatcgacctttcagaggagcaggagccagagggatgggttgctcgacccatcactcgtgacgcacccgcggcacagtcgccgagtttacccggaccgctgggaggcgacttgtttggtgtgtcgtccggagaacagtctccggggtgcggagggctcggtggggtggccaatggtctcgacctgaggtattacccccgtcgttcatctggcagcacaggaggtgtggttgtctcacctgttggtgaggacaatcctaggttgagcagcacagtcaacctagccgtcgtgctaaacacggagctggaccatactttagatgagctgtgtagggctcgtgctgagatcgcccagttgcgggctgagcgcgcggagcgccgtcacctggaggatggctctcccgcccccgtcgggactcagcacccgtaccgctcacctcagcgtggacaccatgcttatggtaaccccgactgcaggaccaggataaatttagaaccatag

SEQ ID NO: 26710 - DNA, 435 bp, Zea mays
  Peptide Sequence Number=SeqID_70085
atgacggaggtgtttggcatcacggcgcatccaaaggagaagatcatgctggacccgcagaacccgccaggacaggccgaggacgccaaccgtacggaggcccgctcgacccccttcgctctcggcaggttccaacatttggcggccaccgttcgtacgacgaaacaacaacccacgatggcctccaagagagcaacttcgaaggctaccgcatccatcgacgacgcagcaaaggcagcactcctggcggaaaagaaaggcaaggccctcgcggacaccacccctaggaggccttcgaagatgacgatgtcaacagcaagagacagcgccaagaccaccccaccctcgacggcactgtacgcacctgcagttccgaaggcacaccacaagtaccaccaccaggcttcgctccaccagagggcgaagacaccatag

SEQ ID NO: 26711 - DNA, 471 bp, Zea mays
  Peptide Sequence Number=SeqID_70086
gtatttggagattcgtcccatgggcagaacaacaagcgcaagcgtgagccaactcctccatcggaagattttggtgactcggagtactcagaggaggagttttcctctgagtttgaggggtctccggctcccatccccctgcgtgagtcgtctgacgactcagacgactcccaggggctcgcggcggaggtctggacgtacatccgggccgtcgagcgttccgggctcgagggctcggatgagtcggagtactcctcggatgaggaggattcggacggtggcggtgaggacaaggacggcgacgacgatgacgacgacgacgaaggcggtggcggcggtgacggtgacggcagcggcaggggcggcagcagcggcagcaaggacggtgacggcggcggcagcaggggcggcagcagcaggggcaggaacaggggcggcagcggcggcggcagcaacagggcctgtggctag

SEQ ID NO: 26712 - DNA, 745 bp, Zea mays
  Peptide Sequence Number=SeqID_70087
atggagcacgaaggggggcaagaagggaggacgggcgtaaaggggaaacccgcggccttcgtgttgtcctgcgtccaggtcgggcgtaaggagagggcccaggcgaggcggagttcatcgtcttccggggccgaggccgagtctgagccctggggtcgggcgaggcggagttcgtcgtcttccggggccgaggctgagtccgagccctggggtcgggcgaggcggagaccatcatctgaggccaaggtcgagtccgagccctggggtcgggcgaggcggagttcgtcgtcttccggggccgaggccgagtccgagccctggggtcgggcgaggcggagcttcctatggcgcccgaggccggacttagctactatcagcctcactctatcgagtggcacaacagtcggagcggcgcaggcggcgctgtcttcttgtcaggctggtcagtggagcggcgaagccatccttgcattaaatactcctgcgatacggtcggacggtgtggtgatccggccaaggttgcttctcggtgaagactgggcctcgggcgagccgaagctttgtgctgatgggggttaccagctgagattaggagtcttgagggccatccttgcattaaatgctcctgtgatacggtcggtcggtgtggcgatccggccaaggttgcttctcggcgaagactgggcctcgggcgagccgaagctttgtgctgatgggggttaccagctggcggactcgccaaaaa

SEQ ID NO: 26713 - DNA, 573 bp, Zea mays
  Peptide Sequence Number=SeqID_70088
atgtcgactgggaaacgccacctagatcagatcgaactcctcagtgttaggcggctcctcctgaaccacctgatcatctcctgtggggggtttatgggaagatccagtaaagggttcctggctgaccgccatcgcagcaaaatcaaccagggacctccccgcactgacctctcccctactgcccttgcccctttcggtaagcggcggccaacgcgaatcaaggggaagtatccatacctcgagtcatgcgcccaatgtccctggccacggaacacagcagccctacggcggcaaaatagcgacggcgagaaattctttggtccagggcgacgcttacgccagatagcaagctcgcgcacgatcctcggtcactggttatcgcctccgaccaccacccggaagcccgacgccatcacacgtgctcccatcgcggcagcactctcgccttccctgctttctcaccctctctgtttctgctatgacgcgggtacttgcactcggcacaaggggaggagttggagtccatcaacggcaagggccgccagttgcggccaaaggcggatggggaggtga

SEQ ID NO: 26714 - DNA, 708 bp, Zea mays
  Peptide Sequence Number=SeqID_70089
gattggaataaatgctacgtaggatgtgaatttggtttttctgcgagtaagacacctgatgctacatttggaattgcaccagatccttctgtagatggtatcctcagatcaatggaatcatctcaatattattcagagaataatattgatgtggctcgagggtggatgaaaaacgggtgttcgtcaaagagagggtacaagattgtgatgacaaccagcctttcttcagacgtaccagttggctacttttcatgggctgaatatgatatcatggcacctgtgcctccaaagactgaagaagctcttgctgcagcctttatttctaactgtggtgcacgaaactttcgtttgcaagcccttgagatgcttgaaaacttggatgtcaaaatagattcatatggtagttgtcatcgtaaccgtgacggcaaagtggacaaagtggacactttgaagcgctacagattcagcttggcatttgagaattctaatgaggaggattatgtaactgaaaagttttttcagtcactagtagcaggttctattccggttgttgttggtgctccaaatattcaagagttttctccgggagaaggcgcaatattacatattaaggagcttgatgatgttgcttcagttgctaagacaatgaaaaatattgcttcaaaccctgatgccttcaatcaatctttgagattacaacaacagtag

SEQ ID NO: 26715 - DNA, 783 bp, Zea mays
  Peptide Sequence Number=SeqID_70090
atggcccttcaaaagttgttgccgaagttatcgacttcggctagcacctttacacttgcgcgcataggcggcgcttctttgtttgctgcctcactaaaggctatgctcaaagctgagatgtcagttatgcctgaggaaattcctcttgtaggaactgaagaggcaaagattgaggatgttatcgctctaatagcccaaaaggtcattcctttgaagccgctttcaaaaagcgaggaagaggaagaacagataactctagtaatgagctcgttctttgatatcgaggaaggggttggtgacacctttggcaattatggtaccgaagagaaaattggctcttcaaatcccgcaacagtagaggataagggcaaggggcctataaggaatgatgaggccaagaaggccattgaaggagacacgcctcttagtgaagagccctttgatcaagaatttggttgccgaaagtacagggttcatcaagcggctaggaaatctatgggtgccaagcagctagctgaacctattggctttgctgaacaacttggcatggaaactggatcatgtcgctacatggcgaacaatattggtttcccgaagctggaggccatgcttttaaccatgtcatccgaagatttctctgattgcttggcttacacgcatctgaaggctctgaagaacaagagaaacgttgagggcaaggttgcccataaagagatagttaagcttaggttcaaagtatatgggctttggttcaattgcgaagagaaggagaaaattttttag

SEQ ID NO: 26716 - DNA, 213 bp, Zea mays
  Peptide Sequence Number=SeqID_70091
atgacgaacttcaccatgactactgagttaccaccatacgaggatatggttgatagccttcctcttttggtttcttgcctccccgaggagagcttcgtccccttggttggtgtccaaggtcctgaggagggagccggtttttgttgccttgttcgacgacatggtgtgagttgttgtggtcgtgagatcatcggaggtgggcaccaatgctga

SEQ ID NO: 26717 - DNA, 255 bp, Zea mays
  Peptide Sequence Number=SeqID_70092
atgaggatcaagctcaaattgatgaagataaagatcaaaaagatgagccacctcaagaagaggactttgatcaagggggagatgaagataataaagacaaggaagatgatcaagaaattagggatcaaagaccgccacacccaagagtccaccaagcaattcaaagagatccccccgttaactccattcttggtgacattcacaaggggtggttgccatgctgacaacctggggatggaggtgtttggtgtgtag

SEQ ID NO: 26718 - DNA, 195 bp, Zea mays
  Peptide Sequence Number=SeqID_70093
atggcgcggcctgcctcaccggccatggcgcttgcgcccgccctccccggcgcgacccgcgaccccggtggtgatgaggatgatggttttggttgtgactctggtaatggttgtcagcatggcaaccactgctcaggagaagatgaagccgtggaaggagactttcaggagttccaagattacgacgagttctag

SEQ ID NO: 26719 - DNA, 297 bp, Zea mays
  Peptide Sequence Number=SeqID_70094
atgtcgttcggcttgagcgacggcggcggtaccgtcgagggaggattgagcggcggtggaggaggcggccgatgcggcggcgagtactggcagttggagacgcagcctgctggatctgctcctccgaatgagccggcgaactccctcggcggcagattcccccaaatgcaggtgaatgacagcggagaactcgacctcgacggcggagggaggagttctgtgcatcctttcgacctaggggctaaaggtatgaagctttgtggtgacagtgaattggctgtgcatttccttgcttag

SEQ ID NO: 26720 - DNA, 297 bp, Zea mays
  Peptide Sequence Number=SeqID_70095
atgggtcgcgctcccgtgcagccgggggcacgcgcccgtgcactaggcgccgcgccccgcatcggacggggcggcttcccctcgtcgccagctcaccgcactggacggggacgtcgtgccgccgctcatgcggaggttctccgccgccaagtgctcgacgaggagctcggcaagctgccgtccggcgtcaccagcatcctccccaacatcaacccggtgctcctgcccaagaagaccgctgagccaaccgataggcagatgcaacattggggtggagggcgagttgcttcctggtag

SEQ ID NO: 26721 - DNA, 1197 bp, Zea mays
  Peptide Sequence Number=SeqID_70096
atggccagcctcacgccggcggcgcacgcggcggggctgcgccgcctttccacgcgcgccgcggcgagcccgtcctcggcgtcggcctccccgcggcaggggctgcactccttcgccccgctcgcggctgcggtgctgggccacctccgggcctccggggtggcggtgctcccgggcctcacggagctcgagctggcgcacgccgaggccgagatggggttcgcgttcccgcccgacctccgcgccgtcctcgccgcgggcctcccgtcgggacccgggttcgctgactggcgctcgtgcgcggggctccgctccgcgttcgacatgcccatcgtggcggcgtcgctgcagatcgcacggggcgcgctgtggccgcgctgctgggggccacgccccgccgaccccgaccgcgcgctgcggctcgcgcgctccgccatccgccgcgcgccgctgctcgtgccgctcttcgaccgctgcttcctgccctgccgcccctgcctcgccggcaacccggtgttcttcgtcaccgacgaccgcgtcctctgctgcggcctcgacatcctccacttcgtcacccgcgactcctgcttccagccgccggatctgcgggcgccgccgcctccggtggcgcagcagcagcagtacgccggggaggccgtcgccacgccgtgcacgcgccgcagcctcgacgcggcctgccgcggtaaggcgccgcgctggatagaattctggagcgacgcggcgtccgaccatcgccgccgcaactcgtcgttctcggatgcatccacagcgtcgtcgctgtcctcagggtgcgcatcgccaccgcctgctaggtggcccaggaacccgcactgggtcgacagctaccttgaccggctgggccacgtgctgaggcagggcgggtggagggacacggaggtgacggagatggtcgaggtggcggcctccggggtgttcgacggtgaggaggcggcggtccccgtggtggactcagacgcagtgctcgatgcgctcctgctcaaggccgaccagtgctccgactcgctccggcgggccggatggagctcggaggacgtatcggacgcgctcgggctggacctccgctggtgcaaggagcggccgcgccccgccatgctggtaccacaagagattgccgtcaaggtcgagcggcttgcgcagtcagtggcgcgcccctga

SEQ ID NO: 26722 - DNA, 510 bp, Zea mays
  Peptide Sequence Number=SeqID_70097
atggcacccaagaaagttaactcgaaggctgacgaggctgcgaaggcagcactgctggccgcaaaaaaaggcaaggccctcgccctcacccactccacccaccatgaggctactgaagacgacggcgcggacctcaccgaggacggcgaggtcctcggcgtctcggcggaagaacagctacagctgcgcgccctacgcctcaagaaccgcaatctccagaggcagaaagagatactggaggccaagcaccagcgcgtgtccgcactagccaaggtgcggcaaatgatacgcgacgaagagcagaaggcccaggacctcgagcgggagatcgcgctgatgcagcgcgaaggacacctcgggcctgcagcatgggccaccccctgcaacagcgcgcacaaccggaagacccgcgtttcccccagcgcgaccacaccttcctgcacgccgcgccattccaaggggtcaactacctcgacgagcgaagtcccctggcgccacatctgcaagtga

SEQ ID NO: 26723 - DNA, 294 bp, Zea mays
  Peptide Sequence Number=SeqID_70098
atggtcttaaacaagagagaagatatcaaggagattattcagaggcccattatgtctcattttggtataaagatgctggcaattgtaatgactgaagaagctcaagcttgtcttgtggcttttaacgccgtgtgcagctacatcggtactaggattactccttcccggcagatggatgtttttaccatggttttatttctgatatatgaggaggagaaggacactgaggaagaagttgttgaggtgcttattaaagatgaggcgcctttagctagcttgcagcctgagctgtag

SEQ ID NO: 26724 - DNA, 210 bp, Zea mays
  Peptide Sequence Number=SeqID_70099
atggagcttgaggcttgccacgaaatgatggacataatggatgggctatctgctatgccgaaggaccaactcatggattgcttggcttacaataatttaaagatagaacttcgtcgattgattttcggatttaatcttcataatatacagggacttgttgtgagtaaagctctaaaggctaacaaggatgctgaagatgaaagcacttga

SEQ ID NO: 26725 - DNA, 645 bp, Zea mays
  Peptide Sequence Number=SeqID_70100
atggcgctctcctcctccggcaattcgtacaaacattgtcaggacctgctttcacatggtatacccattactgaaccagaagcggtacgaatgtgcatgaacaacttgagccctgacatggccatatatttgcaaggggtgcgtccaatcaccttcgaagagttagcatcaaaggcaactgatatagagaactatatgcaacatatctctaggcaggcaagaccatataataagcctgtgatggaaagaaatggaccacgggataaagttcccagtaaaccaaaacagatgcaggccatggaggctacagtagtccctcgaaaattgcaaactaggggcgtcattgaaagaaatcaacacagaggtgatgcatcagctcctagaaggccaactttgagtgagcgacaaaatcaaacatattccttccctgtggaagaagtagatgatctttttataggcttaagagagttaggcctcatagaactccctaagcccaaaaggccagaagaggcctctaagttcaaggaaccgaatttttgccactatcatcgtatcttgggtcatacccttaaagattgctttgtggtgaaaaacatcatacagaaattgatagatgaagacactcataaaaaaatatatgggtga

SEQ ID NO: 26726 - DNA, 432 bp, Zea mays
  Peptide Sequence Number=SeqID_70101
atggcgagcctgcagaacctggtctgctccgtatccaaacaagatttcgacttcttgggtcatgattctgcgttcaaagaccgcaacctggcccttcagtgtgttcgtgtggggttcattcctaccgagaaaacagacatccgcgacctaggaccgatggatgaggccatcttcaacctggtaaacaacgtctacgctgccccgaaccaaataccgtcgatttacgacatgcaagagcgcaccgtggacggcaagaactactggacgtttgagtacgatctggaggctccgggctacagcgtttctgcgtttgcgacggtcgccattggaaacgttcggcttaccgcctcactgatcatgagctggacttcccgcggatggcgctttctgcagaacacgttgatggacgtgccctgctccttcgacatatag

SEQ ID NO: 26727 - DNA, 1233 bp, Zea mays
  Peptide Sequence Number=SeqID_70102
ggattgagaaggaatcttgcttctgttcaagcaatgtcaaagcaatcaattgatttctttgaagatataaggatacatgtgtctcagctcatgacacttatggagcagaatcaaatggaaaggtcctccaagcttgttaaatttgagaatgagtttaaggaaacttgtgttaaagacgagcaagctgctctgaataagattgctgcaattttatcagagttgaccgccaagaaaactacaatggtttcatcatatatgggacagcttaatgagaggtatagtgaagatcagaagaacctgaaactggagatatccaacctacaacagaatgatgcagagtttcatggcattacatctgacgtgctgactgtttcaaagaattccctcttactggatcatgaaacttgcaagatggtagagactaacactaccattttctcggatcatctggaactgctgaatgaaaagcacagcgaaggcgtggaatctacaagaaacatgatgagtgattgtcttgaaaaggattacatgaacaacacagaggagcagggccttctgagggaagatcacgtttcatcgaccagcgatgcagaggagcgcagagttctggaggagcaacttggctgggccagactggagcggcaaaagatcctcgctttgtctgcggaggctgacgatgcaatctggcatctggccacgctcgcacggaggaggatgcaagaaagggacgaggccaggaaccaggcgaggatgctgctcgcggacctccaggcaaggaacgcccggatgaaggcggcggttcccggagcatcgtgctccagagtcgcgcggcctgacgcgttcgccgccaccggctacgagcacatccaggcccaggcccaggcccaggcccaggcactcgctcctgccgcgttcgggccgcgggggcagcgtgcccgtgcgggaactggctactactgcgttgcgtcgtccagcggcttcggccacaggagcatcgactcgtctctggacacctgcgccgttcagccgtcgctgcttggcttcgcttcctcgagctcgagccaggagcatttcgaccctgacatgttcttggtggacgtcgcagaatcgccgcaggatgtcgttccggttccggccaccgcagactcaagccaggggagaagctccggctccggctccggcacttatggtcatagtttggcgagcaaaaggccttgcagtgaaaggaagtaa

SEQ ID NO: 26728 - DNA, 582 bp, Zea mays
  Peptide Sequence Number=SeqID_70103
atgacggaaaatatgtcacatataatacttgggaagaaaccactttcttacgtggcacagagtcaaatttatgctccaagaaatagtgatgcagccaacccagtgataataaatcgtgaactaaaaattggagaactggataatagtactcgtggatggagatctcagccaaccatttctggaatttgtttttatccatatgcgcccacgaaacaacctgagcaagcattcactttggggaacagaatgatatcgcacggtttaggatgggagaattatgatattgagtatattcctattccttctggttatgcggaatggggtacaataattcttgcaaaacattcttttaatttaagaggagatggagaagtggatggggaattttatgaggagtatgtcccttcacatcatgagcgtgaaccatccatgttattatatcccaagtgcttatcacaacttttggaggtttgggatgaattacaagtggggggagaagtatcgctgcaagaatggtgtgactgttttcataacggaccaaggggactttcacactctgatgatatgcaaatgtcattttga

SEQ ID NO: 26729 - DNA, 1917 bp, Zea mays
  Peptide Sequence Number=SeqID_70104
atggatagttccgtagaggtatcttgctggattctcactggggaacggcagactgctgtcatcagatcaaaatatgttcaggttttgctaaatcaagacatgagtttttttgatacatatggtaacaacggagatattgttagtcaagtgctcagtgatgtattgctcattcagtcagctataagcgagaaagttgggaactacatacataatatggctacatttgttgttggtctcattgttggccttctgaattgttggcaaatagcacttctaactcttgccactggacccttgattgttgcagcaggaggaatatctaacatattccttcataggctggccgaaaacattcaagatgcatatgcagaagcggctagcattgctgaacaggccatcttatacatcaggactctgtatgcttttacaaatgagactcttgcaaagtactcctatgccacctcacttcaagccacacttagatatggaattttgattagccttgtccaaggaattggtcttggatttacatatggactcgccatttgctcttgtgctttgcaactttgggttggaagacatctgatccatcgtggaaaagctgatggtggtgaagttgtggtagctttattctctgtaattctgagcggccttggtttgaatcaagcagctacaaacttctattcattcgagcaaggacgcattgctgcttatagactatatgagatgattagtcgttcaacctccagcaccaatcaagaaggggcaaccttaccccaggtgcaggggaatattgaatttcgaaatgtgtactttagctacctgtctcgccctgagatcccaatattaagtggattcttcctcactgtaccggcgagaaaaactgtggcacttgttggtagaaatggctccgggaaaagcagtataattcctcttatggagagattctatgacccaacattaggtgaagttcttttggatggggaaaacataaaaaatttgaaagtagaatggttaagaagccaaattggtctggtgacacaagaaccagccttattgagtttgagcattcgggaaaacattgcttatggaagatctggtacctttgaccagatagaagaggcagcaaaaacagcccatgcccatgggttcatcagttcacttgaaaaggggtatgaaacccaggttggtctagctggtgtagccctcactgatgaacagaaaatcaaaatttctattgctcgtgctgtgctttcgaatccatccattctgttgcttgatgaggtcacgggaggacttgattttgaagctgaaaaggctgtacaagaagcattagatgttctcatgttgggaaggtcaaccattataattgctagacgtctttgcctcattaaaaatgctgattatatagctgtaatggaggagggtcatcttgttgaaatgggaacacatgatgaacttttaaacttggatggcctttatgctgaacttttaaggtgtgaggaagcaacaaaacttcccaaaaggatgcctaccaagaatagcagggagcgtaagtcgcttcaagcggaggacacatcgcggcagtcatctaagaattcagatcctgactcacccatatctcctcttttgacttctgatcctaaaaacgagcgttcacattcacagacttttagcagaccccagagtgaacgggatgatacgagttctgaacacagtgaactcgatgaggttcagcaccagaaaccgccatctttttggcgtcttgcaacacttagtattgctgagtggccttatgctcttttaggtacaattggtgctgctgtatttggctcatttaatccactgcttgcttacacaatagcacttattgtttcttcatactatcaaattgaaatccgtgatatgcgccatgaa

SEQ ID NO: 26730 - DNA, 771 bp, Zea mays
  Peptide Sequence Number=SeqID_70105
atggtgccgagtgggttgttcgggtgggcgtcgccccatgtacagccgctcacacccgtatccgaggtctccgagccgccggagtcgccgtcgccgtacggggacgggccggcgggggatgccggcgtggggacgagggagggggaaggcgctggcgccggagaggaggaagtggaggacgacgaggtcgagccgccgcccgcggcggtgtcattctggaggctttttgagtttgccgatggggtcgactgggcccttatggctgctggggcgcttgctgctgctgcgcatggcgcggcgctggttgtgtaccttcactacttcgggagggctctgaatttgctcgactctgagcgggttgggtcgtctctctatggacgcggcgaggaactgctccaccggtttaaggagagcacgttatgggaggatgagagcagggaggagactgtagcaggtggcgcaataggcggcgttgagcaggggactcggggccgagcgcgagcagggaggcagggccgccgccgtgggggatcaggggacttgaggctgcgagcccgcgacacagggaggcagcgccaagcgcgggcagggaggcagcgtcgcgccgctgcgggggagcaggggactcgagcagcaacgcatggaggaggggagggaggcggcgagctcaggcatggtggcttactgacagcgaagcccagggaggcgacgaaggcgccgcgacggctggctcaacatgcagaggctgtgggtgtgacacaaaagatgtag

SEQ ID NO: 26731 - DNA, 378 bp, Zea mays
  Peptide Sequence Number=SeqID_70106
atgtcggacgaccttgttgttcctgtccactttgaagttgcccaagaattttgctttcgcctcctggatcatccgctccttgtgctcctcaaactggagctgctcgtcagccgacaagatatgtatctccccagcggagtcgccaaaaagtatgttgacgccttttcggagcgccaaatactcaagaagaaccggcgggcggtgccctctgcacaggggcggacggtccgcgcccggggccggacggtccgcggcctggtgcgaggcgcggtggggcggcggaagatcgccgacggcgcctggatctcgctcccgggagggaccccgtcggggaggagagatcctaggagttgtctaggctcgggcaggccgacctag

SEQ ID NO: 26732 - DNA, 960 bp, Zea mays
  Peptide Sequence Number=SeqID_70107
atgccgcagcggcactcaaagaacaacaacgacctcgccttcttcacgtacgaggagaagcggaagctcgggtacggcacgcagcgggagcgcctggggaaggactccatcaagcccttcgacgcctgctgcctctgcctcaagccgctcatcgacccgctctgctgccccaagggccataccttctgcaaggagtgcatccttgagtgcctcctcgcccagaagaaggacatcaagcgtctactgaacagagtactgagggtttactcttattcttccagtaagctagcagctcacgaggcccagaagaagcaagagaaggaagaggaggaggaaaagctaattctgcagaaggctaaggagttggatgcctttgatcagcagaatcatggggctgttccccagtaccatgatcgcagtggttcccaaggcaagaatgggtttcatggagcgaacagtgtgaaggtcacttcttttgaagaggaagccctccgtaacatgaaggcattctggcttccttcagctactcctgaagctacggtcaaggtagatgcaccctccgccgacactgtctgccctgaggggcaggagaagctcaagttgaaatcgctcttccctatctcatttatggaggaaactgctgatccgaagaggaagaaggcaatggaaaagagctatatgtgccctagttgcaaatccactctcacaaatacaatgtccctcgtggcggtcagcgcctgtggccacgtcttctgcaagaagtgctctgacaagtttctagtaaaggataaagtttgcttagagtgcagcaaatcattcaaggagaggaatctggttccattagagaaaggaggaactgggtttgcggcacatgatgaacgcttggaggcaagggatttcaagcatttgggcagcggttctgggttaggactagtgaagcctgcaccaaaagcttactag

SEQ ID NO: 26733 - DNA, 423 bp, Zea mays
  Peptide Sequence Number=SeqID_70108
atgacggatgagaagaacttagccataagaagacgattggagtctctgcctcggtgcgattgcggagatcgcgatgtgatatgtgaggacactacgaagtacttcatgtcccattgggcggaagagtggaagtttgatcccgtactctacaaatgtgagtgcccgcgagatgcccgctatcctacccacgcgacattgagggagatggtggcgggcagtagggcttcaatcctgataaaggcgcggcgcacagtcgtgtacatcaaggagatcgtcggcgaccacaccgacgaggaggtctacgcgcgctcaaaggctcttcccctgctcgcggtgccgaactccccaccgtgcttgggcgaggtggtggcaacgacgtctagagagatggcggcgagcaatcctagcaggggcgtggcgtag

SEQ ID NO: 26734 - DNA, 306 bp, Zea mays
  Peptide Sequence Number=SeqID_70109
atggcgcgacggcggcccagggcgacggtggcggacctccgcggctgcacggaggacggcggcgaggggaaggtgagagagaggggtctgctggtgcgcaaaagagggagggggcgagtggggttctgggctcaagtggatgggggcgggggggttgcgagctccacgcgcgacgtgggcgcggagtccgcggcagcgcgcagctcgggcggcagttacgcggagacgacggggctgacaggccgggcccgcgagcagagagagaggggaaagcgggtgcggccgcgcggaaggcggccgcgctga

SEQ ID NO: 26735 - DNA, 339 bp, Zea mays
  Peptide Sequence Number=SeqID_70110
atgtcgaacgtgacttgctcacttcgtgcattgggtgctacaccaaaggagaggggtagctctatttttccgacaggaaaggtcccagcctgccacgctgcagttgataaccatggcgtcgatgtggggtgcgctgcgcaggtcgacgtctcggccgtcgaaggtcaatggcacatgggaccactttgtctgcacgactggaccagtgacggcgacgtggttgatgttgcagtagtggtccctcttctgtcgctttgtgttgaagtcggcgctggaccccccagtgatcatgtgaatgactccgcgatacggctgatcggcgaagtcttcttgttttag

SEQ ID NO: 26736 - DNA, 321 bp, Zea mays
  Peptide Sequence Number=SeqID_70111
atgtccggtgcacaccggacagtgtccggtgctccagaggagagcgactctgaactcgccagcttcgggaatccgctccgctataattcatcggacatgtccggtgcacaccggactgtcccggtgagccagcggagcaacgactactttgcgccaacaggtcgtctgcaacgcattaaatgcgcgccagcacgtgcagaggagcagagcacgcgcgagtggcacaccggacagtctacaggacttgtccggtcgaagcatcacttagacccaacgaccagccaatcagcccaccaagcaaaccagccatcccaccaatag

SEQ ID NO: 26737 - DNA, 1620 bp, Zea mays
  Peptide Sequence Number=SeqID_70112
atgtttgttatgctggtatcagcaagtcgaccgtccccaaataaccccaagcgtataacaatccagtcaagccaggagtgcttcagtgttgacattccctctgcagaacagcctaatccatgtccagaagttgaaaatcctccaaatgctgacagtcaaaatgtgaccaatgaaacagttcagattgattctgatgaagatgacttcatgccagctctgaagaagcgtaatgtttctgaaagccacacaagagtgttaagaaaagtcgtgacaaagaggattaaacatgaggagctaccccgacagaggcttaatgtgaggtgcaaccctcaagatgtcattgcaagcattaacattttgaatgaaagacaacgtgaggctataagacgtaaaggtttctcttccattcttgatatgacagtagatgcgctgtgcagtagatcacacctccaatggttgatggacaagctagaccccaaggatatgacaatacgtcctggtccaggaaaggaactcaagattacaaaggacattgttcatcttattcttggcgtgccaaatcatggaggtgataaacctttgggtattgatgaagcagttgcagcaagcaacttgagggcagagcttggtgtggccaaagatgagttcaatgtggcatttctacaggatcgtttaaggaaaggcgaggatgatgacctttcaatcagatgtttcttcctcattctattcaaccgtttgctgtttccaactgctagctggggcatcacatatcatgaggtgcttctcacagaagaaatgcaccgtttccatgagatcgactggtgccagttgatttttaatgatctatgtgaagctgccaagaagtggcacaaccggatcaccacaaatgtctccacgactatatatggatgctccattgttgtccttttgtattacttggatcacctgcatacagccgctgccccccataataagagtggcacacctcgcattaaattttttgataagaatagcataaaagctttgaccaaagctgacaagaggaaggttcgccatggggctgaatctttcggacactgtgaaccggagtgcaggaccaatatttttgatgcaccgcgccctggccccatgcctcggccaacttttaacatcaaacttccatctatcaaagagatgatgtcaagtaagatcaacgatctcccacatcgtcatcgatctaaattcacagatattcttgctgcatatgacttggaggttgacaagtcatgcgtagccataaaagacagcattgacaaaattattgagaagcaatacgacatagcagacaagtttatagaattgatagacgaggacacactgttgatgccacccagcccacacccgatatgccatccccaagcttcgcagcttgagacccaactgggtggtactcagtttgaagaaattcacgaaagacaacagcatatccatagagtccttgagacctttcccgacgaattggatgtggtttcagatcaacagagaggtgcaatggcaacagaggaaatggaacacaatgtctgtgggccagtttttgaccagaccccaactcctcatgtcagtaggattacatacatataa

SEQ ID NO: 26738 - DNA, 411 bp, Zea mays
  Peptide Sequence Number=SeqID_70113
atggactaccaattggagcggtacccgttgacgacggcgaatgttgaggatggcggagaacgtggaagcagtcgggtcggcggagagcgaaggagcagaagcgtcgccggagaaggtagggttttctccggtcgccggacgcagcggcgcgaatattggagcgaggattggggacaccgagggcgcgccgctcaaatgccgcttgcgactggatcgacagcgagcggcgaggggttggaagagtcgtcggaaaggggagcggagtcgccgggatggaagaatcggcggagattcctggagtcgtgccggggttggggttttgcggttatggaaactgagccgggagcaaaggagctaatcgcaggatcacgtaggtatttatatggaaaccgaaaggtcagtcggctgtga

SEQ ID NO: 26739 - DNA, 543 bp, Zea mays
  Peptide Sequence Number=SeqID_70114
atgaactggcaggaaaggagcaaacctaacagcaaggaatttgatattcgagaaaaaatgcagaggaagaggatggtcgtacctatgcggaaacaggaagatgaagaacacgcgtgtaaagaggaagagaaggctgccgcaacagctaccgcttctgattcgtgcccgctcgccattctcctccacgcgacgcttgatgcggacgcactggccctcggcggtggtggcccatccaccggcagcctgatggtggaccatcctcaagcgcgccaggtgggccgtcttactccacgcgagcaaccgccggcttttgctattggggtgcgcagggcgtgcagccgagctgccatcgctgcggttatctacttgtgtggggtggcggagaggacagagaggacaaaacggcggagagagcgaggacgaagaggacttgcagcgcgggagcaaaaggaggcaatgaaggagaaagtaccgacaagaaggttcgaggggcgtcgagaaccaaagaggttcgcgatgcgtgaaaagatgatcatgacgtag

SEQ ID NO: 26740 - DNA, 1485 bp, Zea mays
  Peptide Sequence Number=SeqID_70115
atggagctggtgactatggtgacgctgacgctgctggcgtactcggcggcgatgctggcgcggcttctggtggcgcgcgcgcagcggcgtcggtgctacctgctggactacgtgtgctacaaggcgacggacgaccggaagctgccgacggacctgtgcggcgagatcatccagcggaacaagctgctggggctggaggagtacaagttcctgctgaaggtgatcgtgaactcgggcatcggcgaggagacgtacggcccgcgcaacatgatcgagggcggggaggcccggccggaccgcctccgcgagggcatggaggagatggacgagaccttccacgccgtcctcgacgagctcttcgcccggtcggcggcgcccggcggcgtcggcatccgccccgccgacgtcgacgtgctcgtcgtcaacgtgtccatgttctcgccggcgccgtccctgtcggcgcgcgtcgtgcggcgctacggcctccgcgaggacgccaaggtgtacaacctcacgggcatgggctgcagcgccacgctcatcgcgctcgacctcgtcaacggctacttcaggtcctacattaatattgaagagttaaccactataaagatccatatatcatggatgctggattacgtgtggttggttgcttgcaggacgcacgccgggcaggtggctctggtgatgacgtcggagtcgatcgcgcccaactggtacgcgggcaacaagcgcaccttcatgctgggcaactgcctgttccgctccggcggctgcgcctacttcctgaccaacgacccgcggctccggccgcacgccaagctccgtctccgccacgtggtgcgcacccacacgggcgcctccgacgaggcctacaactgcgcgctccagatggaggacgaggccggccgcccggggttccacctgggcaaggagctgccgcgcgccgcggtgcacgccttcgtgcacaacctccgcgtgctggcgccccgcgtgctgccgctcccggagctgctccgcctcgcctgcgccaccctctcggcgcgcctggcgcgcaagaagcggcagcgcggcgcgggccatggccacggccacctcaccatccgcatgaaggccggcgtcgaccacttctgcgtgcacacgggcggcgccgccgtcatcgacggcgtcggcaagggactcacgctcacggagcacgacctggagccctcccgcatgacgctgcaccgcttcggcaacacctccgccagcagcgtctggtacgtgctcgcctacatggaggccaagggccgcctgcgccagggcgaccgcgtcctcatgctcaccttcggcgccggattcaagtgcaacagctgcgtctggaccgtcgagaggcccgccaccgacgccggcgtctggaaggaccgcatccaccactacccgctcaaggacgtctccaacccattcatggacaagtacggattcgtcaaggacctcatagacttgtga

SEQ ID NO: 26741 - DNA, 702 bp, Zea mays
  Peptide Sequence Number=SeqID_70116
atgcaggcggcatgcaaccgcgccaagtgggcgcaccccttcgactccaacgcacccagcatggaggcccaggcccacacgtcatgcaaccggcgcgccggttgctacgtgcgagcaactgcaccgccactcgcgccactaccgtgcctcctcgactgcggaaccagtaccacgactcgaggcaaccctgcgtatgacccaatagtgccagtcaggcgcatcgatcacgggacaggcggcacctttggcgagagaagcgggcaacgcttcgccttcgccataatgaccgcgtcaaaaaagggaccaggaaagggggataccccgaaagggatccttctccgcgaaggaaacgggccccgagccccccttactgatcagaggtccggaggctggccccctcggaggggttcaacagccgcctcagagcgctcaggctccgcgcccactactggtcaaagcacaaagctgcaaaggcctgacggggtacaattaagccaaggttcggtccactcaagggacacgatctcgcctcgcccgagcccagcctcgggcaagggcagccgactccggaggattcacgtcttgcccgagggccccctcaagcaatggacacaccttcggctcgcccgaggcccagtcttcgccaagaagcaaccttggcccgatcgccacgccgaccgaccgtatcgcaggagcatttaa

SEQ ID NO: 26742 - DNA, 1098 bp, Zea mays
  Peptide Sequence Number=SeqID_70117
atgaacggcagtgggcacatgggcgccgggcgtccggccctgcggctctggatgacacacgcgccggccgcacggcgcggcaggccggcctgcgtgaaagtcgccttctcctcctcctcgtctaatcagagcttcgagagcacgtctcgtcctactactggttggttggccaccaccgccctacttacagaggtcgtcatcgtgggctcgactacggacggcgaatacgtggctccggcgaactccggcgacgaacggcacactccggcgaactccacgggctccggcgacgaacggcaacgtcgagcagtgtactgggagcaggagggagagaaagagtctaccagggagagaaagagggcatcggcgtcatcactggccattgatggcgttgcagtttcgtctcggcatcaatgggctcggcaacgtcttggcgggtcgctcgcgcggctggagggcgcggctcggcggatgcaggcgctcgcgcgcggctggatgcacgctcggcgcggcgagcagcggcagtcgggctcggccgctgagcagctggggtcatgcgcggggtggggccgggcgctcagccgctcgggctcggtgtcgcggcagcggctggctcgatctcctgtgcacgcgcacggctcggactcaggctcagccccggaagacgacggactccgcctcgcccgaccaagggctcggactcgggctcagccccggaagacgacgaactccgcctcgttcgacccagggctcggactcgggctcagccccagaagacgacgaactccgccctcgcccgacccagggctcggactcgacctcggaagacagactcaacctcgacctcggaggagcctccacctcgccctacccagggctcggaccgaccacgccacaggaggagccatcattaccctacccctagctgactctggctacggggaacaagaccggcgtcccatctggctcgccccgcgctcctccgactgccacgacatcacacgaatagggcgccaagacctctccggctgccacgacggcatggccctcttagagagggttggccgcgcggggaaggacgggacggcgctcgcgtaa

SEQ ID NO: 26743 - DNA, 609 bp, Zea mays
  Peptide Sequence Number=SeqID_70118
atggtgacctccggcttgatggtgggggaaagcgagccgggctgcggcctctacccctccctcagcctcaaggattttcatcaccagggctggggaggagagagtgccgagttgggctgcagcgtgcccggctttcggacgcgagtggcttcggagccgctcgcggcgccggcgtctgccacggcagctggaagaggttcctacgccgacgagatagccagggccgcccacggaccgacctccgactctacggccttctgcccgtccttgcctcacaagtttgggcatgggcgggggcctcctagcagcagcgcccgccctgaggtcagtgctgccgctgttcggccccccggagcagaagtcgtcgtcgtcgccgctgctggagcaggtgacggcgcgccgttcgtcggtcttctgttgctccgcaggccttcccccatggagtggggttactcgcctgttgattatctgaaccgcttcaccaagcatgagtcgccccgtgtcaaggtgacgagtgagagcctagccgggttgtccgttagtgggaccaacgccggagttgacaagccgaggcctcgggtcgagctggcgcccttggaagatgattag

SEQ ID NO: 26744 - DNA, 513 bp, Zea mays
  Peptide Sequence Number=SeqID_70119
atgcaggcggcatgcaaccgcgccaagtggacgtgcttctccgactcccaacacgccagcatggaggcccaggcccacgcgtcacgcaaccggcgcgccggatgctgcatgcaagcaactgcaccgccacttgcgccaccaccgcacctcttcggttgcggaaccaataccgcgactcgaggcggcccagcgcacgaccaagcagcgccagcctggcgcgacggcggcgcttctggcgggagaagcgggcgacgcttcgccttcgccgtaataaccgcgccaaaaaagggaccgggaaagggggataccccgaaaaggatccttccctgtgaaggaaccgggctccgagcctccctactgatcagaggttcgaaggctggccccccgaggggttcaacagccgcctcagatcgcgtgggccctacacccactactggtcagaggttcgaaggccggccccccgaagggctccacggccgcctcaggctactcgggctccgcgcccattactga

SEQ ID NO: 26745 - DNA, 396 bp, Zea mays
  Peptide Sequence Number=SeqID_70120
atgggctgtcagacaagttttaaactgaatctgagcactgtgcatcggaattacagaaaaggcctcgctggcgataaggatgccaccgcggctcgggatgggtcgtcggcggccacggtaaaagacttttgcgacgtggcgttaaagcggggaggtggcaagccccggttaaacggtagccaccgtgccatcaccgtggttctgccgcgcgcatttgagaacaagtccccaacagccccattgatgaaattgtttgaggggaaatgctcgggaggggtccaattcagtgtttgtcgcatgagagtcccagccgttgcgaggtccggccagcatgagctcattgcagaacggccgaacgctgtctaccgtcggggaccccatcctgtgaagaaataa

SEQ ID NO: 26746 - DNA, 249 bp, Zea mays
  Peptide Sequence Number=SeqID_70121
atgggctgtcagacaagttttaaactgaatctgagcactgttcatcggaattacagaaaaggcctcgccggcgataaggatgccaccgcggttcgggatgggtcatcggcggccacggtaaaagacttttgcgatgtggcgttaaagcggggaggtggcaagccccggttaaacggcggccatcgtgccatcaccgtggttctgccgcgcggtcaaatgggaaattttggagcatttaaaatggcctaa

SEQ ID NO: 26747 - DNA, 501 bp, Zea mays
  Peptide Sequence Number=SeqID_70122
atgacgcatgcaaccactgttcccgcacgccgtctgccaaccccgatgggacgtacaatacgacaagaagtcaggctagccctcgggcacaaactctgccctcccaaagtcgaccttggcctcgggacaaactccacctcgcccgagctcggccttggctacctgctcctcgcgaatcctgcaggaggccactccttcaactatggcgcacacgtcttcgaatcctggaacgggctcggtcgcctcgagcggacttccgcctcacccgagcctagtcctaacctcgatatccgcaacggaaaggcacccaacgttaccatatacttcagagttgacgtattacttaggagcgttttgccatactcattactgtgtcaaccactacggcatgtgcaaccctcttgtcaggggggctcggggtgccttgatttcaaggaggaggatggtcctggtcttggtctagacttctctgggctttgcgaccctaaggccatgctgtag

SEQ ID NO: 26748 - DNA, 1095 bp, Zea mays
  Peptide Sequence Number=SeqID_70123
atgggctcggacgaggcggagactggcgttttggggaaaggggacctcagccgggacgaggattcttctgagaacacaccctgtctgtgggcaggctcaagcgacgcggagttatgctcctcccccctcgccctggcccacgtcccgcgccctggcccagtcggctgtggccggctcgctcagccccagcggccgcgcgaaacggaaaccgcctccaagacctcgcccaacgcgctcctctcgcccagctccggccacccgcgcagtgcgtctacccttgcctcatcctgccccagccccaggtcccggtgtcctggcgtccagccggcgtggcccgcggcgagcagccagcgtggccagcgcggcgcggcccgtgcagtgcagccagcgtggctcgcctgcgcggcggcccggcgcggctcgccagcgcggatgcctcgccgacacttccccgcgcgcgcccgatcgttgcgtggaggagctgcgcagcctcgccatcagcacgccgaccatgctccaccatgcacggacgtcgtcatcaggaggagagacgcgacgagcctgcgtagcaccttcgccgtgcgtccgagcctcgccatcttcgagctcgtcgacgccttcgccctctcgccatcgaggagggagccacaccaccttcggcaacccgtgaagtgcgtctacccctgcctcgtcctgccccagccccaggtcccggcgtcctggcgtccagccggcgctgcccgcggcgagcagccagcgtggccagcgcggcgcgcagccggtgcggcccgcggcgtgcagccagcgtggctagcgcggctcgcctgcgcggcggcccggcgtggccagccagtgcggctagcccaacgtggtggcccgcgcggctcgctagcacggatgcctcgccgacgcttccccgcgggcgcccggtcgttgcgtggaggagctgtgcagcctcgccatcggcacgccgaccatgccccaccatgcacggacgtcgtcatcaggaggagagacgcggcgagcctgcgcagcaccttcgtcgtgcgtccgagcctcgccatcgccgagctcgtcgacgccttcaccctctag

SEQ ID NO: 26749 - DNA, 93 bp, Zea mays
  Peptide Sequence Number=SeqID_70124
atgaagccgctcgacgccgtcgccaggtgtctctgcgccctaatcatcgaacccagaccatggatctatgatccggtggacacgaatgagtag

SEQ ID NO: 26750 - DNA, 219 bp, Zea mays
  Peptide Sequence Number=SeqID_70125
atggtgaaagtacgttcttccaaggcagtagaagtattggaggcatatgaggtaacactggaagatgattatcctctagagaatgagcgatatgaacacaatgaaatgctgctgtataagtacaaccgccacttcaccgccaagtacgagctggggaaggaggtgggccgcggccatttcggccacacctgctcgcgcccgcccgcaagggagacatga

SEQ ID NO: 26751 - DNA, 774 bp, Zea mays
  Peptide Sequence Number=SeqID_70126
atgacggagggaacacatttcccatacaaacggtctcgcacgagagggatttcccctcatcttgtgggaggtactgcagggagcgggttacaccacacctcccagtacgcggtacagttgttcgaggagcaccaggtacctcactgtagggtgaggatgactctggagcctcatcccctgcagccaggatggcgttcgctggactcggagtctttcggtttccgggccgatgacactatagagcccacaaccatgcacgtgctgacaaccttctatggatttcaccctctggagatgtcgacccacccaatcggcttgttccccgccgaaaaagaggatgacccgatgtggaaggatcaggttgatcacgccaaggatgtgtgggctctctaccctaggcataccactcacttgacggttcgttcccgagaagttcaaggagatattcgccagacacgagaggagtgtccccaacgccctgacctcggacgagatcgaccagctgctctaagcgaacagagagcccggggactacagtgggtgcatcagctctcactcactccgtttttttcggtcctcgcttgcgcacaaatcgaaagggctggcgcggaagcagagtggaagatcctgtacagtctcagcaagaacggggacggcctcctccgcaaggacgtcgcgaggagcgtctacgacgggactctgttcagccggctcgcgcctagatggaaatctctcgatagggagaagctgataagcatggtccgggagaactga

SEQ ID NO: 26752 - DNA, 396 bp, Zea mays
  Peptide Sequence Number=SeqID_70127
atgaacagtactcccgtactgttcacgcggacttgtcattttgcttttggtgtcacgcttgtactctccaccttctctcaggaccgaagaaatgattctttggtgatgcttatatcatatttcatgctttatgtgagtccttcgtcattacttgtcatgtttacgaaggttgaagatcttctctttaacattgagaagaaaaagcaaagaaaaagaggatgcttcgcatgtggggagaagggccactttagggacaactatccaactatggccgaaccaaaaaaggagaggaccaaaggcaaggcgctaacaagtgtcaaaacttgggacaactcttctagcgaagatgaacctccaaggacgcgcaaccaccgatcctcatcacgctcatcatga

SEQ ID NO: 26753 - DNA, 459 bp, Zea mays
  Peptide Sequence Number=SeqID_70128
atggagaagcttcttcaaaagatggatgaatacattcgggctaataatgatttccgccagagaagggaagaagcctacagcctcaaaggccacaacacaactcccaatcttcagggcaacaaccaagctctttcaggccaccagccccaaggggcagaggcagcatgggcttcagaggaaggtacggggatcagcccagaaggctatattgtttattctgtggagaagataagggccacaccacaagaacatgccaagtcacaatacagaagcaaaagaagattgccaaagctgaagcacgacagaatcagccgaagcaggttttacatactgcctcatgctactctccctatgtaccagaaagggcaccagcacgctcaacagcagcgcaacttccgggaggagtccgaagctcgtacagtcaacaacactatgccagaatctaagcatatctactga

SEQ ID NO: 26754 - DNA, 507 bp, Zea mays
  Peptide Sequence Number=SeqID_70129
atggaggacttgagtaccatgaccccgaccattgtgattgggaaatatacggcctttgagatgtcacgaaaaatgtgtcggggagaggagccaacttcctcaaggccatatgcttttgcatgtgatgaaatgaagggtaaaaagaaggctcccactccaagttcctcaagtgaagaagaggaagaagaagaaagtgatgatgatgaagataatcaaccatgcacatcatcctccaaggacgaagaaacaatccaacgcgtcggaaaggtattttcggattcagaattatggatatggagcacgaccaggacgaaggctaagccaggcgaaggtcgaaggcagccgaagctgtacgcagggaagcttcggcgcgatagcacaagggggaaccgacttaaagataaaaagacttcggggtcctcaatagatttccataaaccgttaacaaatgtaatggacatggatgtaattttacgagggctgcgtcccgcgtctataaatagatga

SEQ ID NO: 26755 - DNA, 255 bp, Zea mays
  Peptide Sequence Number=SeqID_70130
atggctcacgaaattataaagaaaagtgaaaaggatacccatgaagcccgagcagaagcaaggcaagctgaagaagctgcaaagcgcaaaaaacgtatagctgaattatcttcgccgccggaaccgttcgaccccctggtggatccagaagtgaaggaagcgctagacattataaacttggctgaatccattgttgatgaagttgttaacaaactactgcacgaagttgcagagaaagtccttaaagaggattag

SEQ ID NO: 26756 - DNA, 2313 bp, Zea mays
  Peptide Sequence Number=SeqID_70131
atggcggaggatcctgccgcggaacaggagacgcggcagctagaggaccggctcagggatgtcggggaacggctgcaggcgccttccgacgacgcggaggacctgctcaacctcctcatcgaagttgaggaatgtttaattaaagtagagcagtcacctcgcgaaagcatatcaaatgctcttcgcccagcaactgaagctctggtcaagaaagagctgctgggccatgctgattcaaatgttagacttgctgtggcatcatgcatatctgagatcacacggatcacggcgcctgatgctccatatgatgatgatgcaatgaaggatgtattctctttaattgtgggggcctttgagcatctggatgacatagagagccccttctttggaaggagaacttcaattcttgatactgtggcaaaagttcggtcctgcgtggtgatgctagatcttgaatgtgatgatttgataaatgatatgttccatcacttcttgaggactgctaattctggacattcagaagccatcatatcctgcatggaaacaataatgagattggtaattgaggagagtgaggatgtccaaccacagattgcttcatgtctactccaaaatgttagaaaagaagaaaaggaatcttcaccttcctttgagcttgctgaaaaagtgataggtacatgtcgtgaaaaacttaagccagtctttctgcaatcactaaaaggcacttccttgagcgaatacagccaaatcgtcgcatcagtttgtgaagaggtttcagatgacagggaagataacaatgctaatccttctgggaaggacatggtggatgatggcaagctctctgaaaggactatttctgatgaattacctcaggaatcttcaaagatggagcaagatgttagccgtcctgaacaagacggtacttctatgaatggtgatacagttactgctattagcagtggtgctactccgccagatactagtgagtctgatcaaggaccaccttccacaaatgagaagattgaacaaccatgctatgcccaaaacatagcagatgctatgcagttgaaatctgaccacaatgaaggtgctgagtccaatgctgcaaagcccaataagaaagctacccttggttcagtaaaaaatactaagctcaaaccgtccgataaatgtgaaccaactgtgcattctgatgctgacactaaaaagcaagatcttgtagcatctgcagagggatccaatggagcagccgatgatacatcaagacctgctgatagtacacctaaacccaagcgaggtcgtcctcctggtccaaagtcattgcagaaggctcctgggaaggatcaatctccaggtttggatttgaaaaaggtcaatgatgattcagctgggaagctggcgaaacgatcagctaaggatgagaagccttctgcaaaaaacactggtgaaggagaaccatctaagaagactcaaaagaacaatttaaaacagcataagggtgaaactctttctgaggatgatcctgccaaggatctgagcttaaaggaaatgatatcgctgaaatcttcgaccaagggcccaggtagaaccaaagggcaaaccacagagaatagcacacctaagttgaagcaagaacaagaaactgatgagcctccacgttcaaggaaaaacaaaggccttgatagaagtctagttggtgcaaggatcaaagtttggtggccagatgataagatgttctacaatggtattgtggagtcatttgatgctgtttctaagaggcacaaggagaaggaagcttctatggcatctgaaacgccacgaggcagaaaaagaaaagcggatgcattgaaggaagaaaatacagaaacacctaaaagtgatgctgtggatcctccaaagaaaagaggacgtccaaaaggtgtgggatccagcaatgggacacccagtacctcagctactccgagcacaaaggggaaaactgccggcaaggttaccaaagaaacacctaaaactggccccaaccttaaaaaagaacttgagaagaactccaaggacaaggctaatgtttcaactgggacaaaagatgataagagtgtgagcaaacctaaggaggctattatcaaaggcaaggattcaaaagacgaaggcaagtccactgaaggaaaagctaagcctggtcggaaaccaaaaaatgctggtactcctgcgggtgattctgacaaagagaagcaggaggtagaagtcaaggcagctgaaatagaggaggcatcaggaaatgcttccacagggaagaagcgtaggaggaaggcttga

SEQ ID NO: 26757 - DNA, 279 bp, Zea mays
  Peptide Sequence Number=SeqID_70132
atggttaaatttttcagcagcacaacagtgcaatggtgtgaaggtgaatcgtcaagtcgcccacacccgctcaacagtcacctgcacccactgaacggtggaccacgatgcgtggaagatgaatcaccagatcattgcaacctcactgatggagagtacgtgctcatccctgagcaaggagttgcccaagatgaagtccaggagctagctccagaacctgcccccgaggatcttcccgcagcctcagcttttgaaggcaagccccgattttatgcataa

SEQ ID NO: 26758 - DNA, 270 bp, Zea mays
  Peptide Sequence Number=SeqID_70133
atgttcccgctcgcgctcttgagcgtggcggcgatcacggcggtgggaattgcggcgtccttggtgtgttctttcgtcgggggttttccccatctcaaaaactttgtctcgagagacaggctgggctggatcgcgctctccagctttgtggtgacgccgtacattacggcgcctattttgtcatcgtcgcgcatcgcgctgggggctcctcccccagcacggtggcttcgtcattggagatgggcgctgtttccactctcccctgaatga

SEQ ID NO: 26759 - DNA, 471 bp, Zea mays
  Peptide Sequence Number=SeqID_70134
atggtgggaattcaccgccaaaattgggggaagctgttgcccacctcggccacctcgcgtctatatggggtccccaaaaccgtggctgacccgttcatcctgtctttggagactcgcttcgccgaatatcatgtcgccgtcgtagcaccgagtggggaggggagagcgccgtcgcggcctacccttggctacgtcgtcgttggggtcttggggaagggtcgtggagcttcgccgcatcaccaggaggacgtccctgctagtatttggcggaattggtcctcggggcggcctcaattcgtcgccgcacatcaacctccgccgcggaaccgcattgccgcgtgggcagagaagtcaccgctccgattcgaggtttgtttgggaggggtgttgagcaccgatggtcctcactggggaatcgtcgacacgttttcacccggcacaggggcggcgccgccatcgcctatgagctga

SEQ ID NO: 26760 - DNA, 1206 bp, Zea mays
  Peptide Sequence Number=SeqID_70135
atgggctttgctggctgggtatccatgctgctcttcctcctggtcgccggtgctgtagcaaatgaccagatcttcaccacttcaggtgtgccatttgggcggagttcgcgtgagccaagttaccgcgtcgaattccatcctgttgattcaccattccatccagagaatggtcaagaatcggtaccaatggctagtcatgatgggaaacgttataaatgctttctaccagttgaagaaactaaaaccatgaagtcaatgcttccgcaaaatgcaactaatgttataatagaaagtgaaaggagaattaagccaaaggagccagatgagttacttgaggttctcaaggaccagtgcttctacaggcatgaaggttggtggtcgtatgaattctgttatcatgggaaaatcagacaggtccatgtagacgacgataagtcggcggccagggggcataacccagccgacggggtacagcggcgtgcgggtataaccctgctggcggccacggaccgtgactacgatcttcgtagtcgaggccctgctaccttgggccccgaggtccttgacaacctggtatcacgagtccggcgatctgcgtctcaatcccaatccgccaccgcatacacaccctctgtccacccaccgcacccacctccttccccatcgtcctccattgcatcgtcggccatgggagatcagcccacccttgccgatgtcatgaagaagctgctggacttgaccgcaaacatgacggccatgaaggccgacatggcgggcatgaaggaacaggccacctcgtcgtcaccagttagcggcggccacaccgagggccagcgcgatctcgatcgtccactcaagttccagaggctcggttttccccgctacaatggcaagactgatcccatgctcttcatcagtggagctgatggagctcgacagggtggcagctacaccggccaaggccgctccgcgcgcgctactatccccgccagcaccgcggccgacaccccaggccttcgtgctcccgtctctgcctgcaccacagccggcgcttccagctctgccagccaggggcaggggtcaacaggcgaaaacgtctctctccagaagagcaggcggaacgacgacgccttggcttgtgctacaattgcaatgagccctattccagaggccacaatcgtgtgtgccgccgtaccttctacatag

SEQ ID NO: 26761 - DNA, 912 bp, Zea mays
  Peptide Sequence Number=SeqID_70136
gacctccccacgacggagttccaccggcgtgcagccgattcgacgcccaggtacctaatcctcccaccggaagcgagcaacacgcagagcagaggacagggaacatcctggggcgactactcaccgagaaggagctacgacgtagttggccacggaaacaggcggaaccacggcgacgacgtatccatggcaagcgattccaagagctccgtccacgatgaggccacggcggaggaaattgagcgtgcatcaggacccacctgcagacccatggtcgcgcctggaataaggagattttgggcttacactgccagggttcaaatggacaggaccttggaggttgttaaggagaaagaaaatgaaaacacagagttgcaggagaagctgcagcagcttgaatctcagctaatggaacttactaatgcaaaatatggcatgataaatagtaacaccaaggaaggagataatgagaaggggggcactgaagaggacgatgaacctgttgtagtagttgccaaaatgtgggagaacaacaagtttgttgactatgattcatctaaggagaaggagaatgatggtgactcacaggttgatttggaatcaaacaagggggatgcaggtcttgacagcaacgggttgcactcaactaaagagaacagtggcagggcatcaccaactaaacagcaccagcaagatgctgaaagccaacttactattgagagtactatgaaacctcctgcgcagtgtgaaataaatgacagaaatgaagtgcgtgttggtgttggtgttggagacaccaacataactggtgatgaagatatgatggtgaacttgatggatgctagtctagtgacacccccggtcatcttcctgtggaaaaatgtccatgttttgttgtactttgatgaataa

SEQ ID NO: 26762 - DNA, 194 bp, Zea mays
  Peptide Sequence Number=SeqID_70137
atggacctcatcctctggtgcccctaccccagtccatcccccaccattgggttccccgcacccttccccatcttcctagaccatcccaacagctctaagaccccggagcagacgagggtggtgccacctctggtggctagaggaaagggccgaagtcggctacccaatccccgtcattcaccccagatccaaag

SEQ ID NO: 26763 - DNA, 2817 bp, Zea mays
  Peptide Sequence Number=SeqID_70138
atgggtcggcgcgagacgaagcgcgaaggggggaagaagccggagggagaccggcgtaaaaggggaaacccgcggccttcgtgtttgtcccgcgcccaggtcgggcgtaaggagaggatccagggtaatgatggcgcctcctgtgacgtggtcggtccgagccctgggttgggcgaggtggaggctcctccgaggtcgaggttgagtctgtcttccaaggcagaggtcgagtccgagcccctgggtcgggcgaggcggagaccatcggctgaggccagggctgagtccgagccctggggccgggtgaagcggagttcgtcgtcttccggggctgagcccgagtccgagccctggggtcgagccctggggtcgggcgatgcggaggctgagcccgagtccgagccctggggtcgggcgaagtggagtttgtcgtcttccggggctgagcccgagtccgagcccttggtcgggcgaggcggagcttcctatggcgctcgaggccggacttggctgctgtcagccgcactctgccgagtggcgcagcagtcggagcgacgcaggcggcgctgtcctcttgtcaggccggccacctttgcattgaatgctcctgcgattcggtcggtcggcgcggcgatcgtgccaaggttgcttcttggcgaagactgggcctcgggcgagccgaggctttgtgctgatgggggttaccagctgagattaggagtcttgggggtacccctaattatggtccccgacagctacctcgtctccgagttctctactcgctcgtcgattgccgcgcctgcacgacgtcattgtcgtgtcgtgctgctgtgctgcttctccatcaacgccctgctgtctgtgaattttcctcactggagcactgtcggtgaagccacgccgtcatcgttgctcttcatcaccgcgcccgagctcacgcagcgacctcgtcgtcacccgctccctgctcgtcaacgcaccgtcagcttctatgccccgacgttgccggaattttgcttgctagatgcgaacctcttccgcctcccctccttcaacgccgacggcgggggcgtggggatgcaggaggaggcgccaaatcccccactggaggtttctaccggggaggagcggcccaggtgcgttgtatctaccaacctctccagtgatctcctcctcgagaatagggctcatgttggagaggatggacggtcgtcatgcgtcacagcaactccgccctcgaggtggatccccgcggacagtggcggtggatcctcgccgtctgacggtggtttcgtttcttggttggagcacagatctggctccgccgaggcgaagagcaacgacaaaccggacaaggagaagaagggcggcggaggcggcacgccgccaacacccaaggacagcaagccgcgcaagtcggccgtgcccaaggcgagcgccgccggccatggcacgccacgcactgctgacaagtcccccagctcggggtcggccgaccgcaaggcgccaatgcccaaggccgccgcctctcgcctcgctacgactccagagaaggggaagcccacgaagccaccgcaggagcagcaggcgcaacttgccacaatccgagaagagctcatgaacgccaaggagcagttggtggagaacgagaaggagaagtgcaaagttcttgctgagctggagcgtgccaagaaagtggctgatgaggccaataccaagctgcaggatgtgcttgatgtgcaaaggagggctattgaggtgcaggaggcagacaaactccctgccagagaatcggagcaggcaagcatccatggccagcaggaggctgatgacgctgtgctgcggtcgactgtggagcagctggagaaggccagggcttctgtggtgaaggctcaggaagttgagcatctcactgcagaggttacacacctcaaagggcagcttgattccaaggtggatggcaacaggaagaagactgcagagaggattcagaatcttgaagaagagaactttgcattgaagcttgagcttgagaaaaataaggctgctgaagaaaagacagttcgattggagcgcatgattgatgaacttaagagtgatgttgatgatgctaggaatcttggttccaagtcaaagcagttagctgacgaatggcagaagaaggcaatggagggtctagcctcagccttacaggaaatgtcagctgaatccagagaggtgcaagaaaagtaccttctgaaacaagatgagatagggcacgctcaggcacaggtagaggagcttaacttgagtctgaagaatattaaggagaactatgagctactgcttgatgaggcaaactatgagaaggtttgccttacaaaagcagatgaaagactggaagcagaagctaagagggcacatgaggaatggcagtccaaagagctaagttttgtcaactctattaagaattcagaagaagagatagtcgctgtctgtcacacccgggtttcggggcaccaagacccgggcgcgaacataatcaccagaggttgcgcatctttacccacaagtcatgttacccatctgccaagggatcgcgacttcccatacacctctactgaggaggcgaggcaggggatccctcgcatgatcaccatcgcagcaaaatcatcccaaggacctccctacactgaccactcccctactgcccttgcccctttcggccgattcgacgcccaggtacctaatcctcccaccggaagcgagcaacacgcagagcagaggacagggaacatcctgggggcgactactcaccgagaaggagctgcgacgtag

SEQ ID NO: 26764 - DNA, 1236 bp, Zea mays
  Peptide Sequence Number=SeqID_70139
atgaacaagacaccggcactcaaggtgccattacaaacggaactccggttccacctccggaggtacgaacaaccccacacaattggggggcctacggagcaacagaaggccgacgggtggctcgccgccgcccgctccaacaacgacgacgacgacttctgctccgaggggccgaacaacagcagcgatgaccacagggcggatgctgctgccatagggccctcgcccacttcctcactcgagaggcaaggacgagcaaaaggccgtagagttggaggtcagttcgtgggcggcaccggctatctcgtcggcggagaaacctcttccggttgccgtggaggaaggcggcaccggaagcggctccgaagccgctcgggtcagagagccgggcacgcggcagctgccagcgccacgaacggcgaacacccttccccccgatcactgagggaaggagcgggccgctgcccgcgcagagaccgaccccaactcggtgcactcccctccccagcactgatgatgaacatccttgaagctgagggagaggcagaggccgcagcccggcttgcatcgcccgacccaggagctggtggtcaccgtcttggggcagaagaagccaaaccgccgcgcgcggtgcatgcaactgcccagcggttacaagcgttcctccactttcacccagaccagcgggtgaaagggcggacagccatgcagtcggcatgcaaccgcgccaagtgggcgcaccccttcgactccaacgcgcccagcatggaggcccaggcccacacgtcatgcaactggcgcgccggttgctacgtgcgagcaactgcaccgcccctcgcgccactaccgcgcctcctcgactgcggaaccagtaccgcgactcgaggcaaccctgcgcatgacccaacagtgccagccaggcgcatcggtcacgggccagtcagccgcgggagaaggcgcgacggtcgatgcggccaaaaatgggccgacagtaatggtggtggcagacgggcggaagcagcggtcacgtcgtcagccaagctcacgtcccctcatgggataggagagaaccctctcccacggcgtgaagacggcgcgcccgtgttccgttcctcgaacggctcgcgcacgcgcaacggctgccccgcgaaccactcgccccgtcgcattaactctgcggcaggacatgcagcacctttggcaggagaagcgggcgacgcttcgcctttgccataa

SEQ ID NO: 26765 - DNA, 210 bp, Zea mays
  Peptide Sequence Number=SeqID_70140
atggcgcccaagagaaaaactgcgaactcgtcagctgcggtgatccccgcaatcgaccccaacagtcagttacctttcgcagaacattcagccactgaaagacagggcccatccaacatatctgtatcaagggttagccgactcaactcgggttaccaacaagagaatcccttcagcagacttggtgagccgtctagaaatgatccttag

SEQ ID NO: 26766 - DNA, 186 bp, Zea mays
  Peptide Sequence Number=SeqID_70141
atggcgcccaagaggaagaccgcgaactcgtctgctgcagtgatccccgccatcgatcccaacagtcagttacccttcgcagcccccgagggtgtcgccggggaggactcagctcaggtgaggagcgtaggccactacccagcccccgagggtgttgccgggggtgacccgggctcaagtgggtag

SEQ ID NO: 26767 - DNA, 429 bp, Zea mays
  Peptide Sequence Number=SeqID_70142
atgggcaagaacaacaagcgcaagcgtgagccgactcctccatcggaggagtttggtgactcggaatactcggaggaggagttctcctccgagtccgaggggtctccggctcccgtctctcccccggcgtcgtccgatgactcggacgactcccaggggatagccgcggaggtctggacgtacatccgggccgtcgagcgtgccgggctcgaaggctcggatgagtcggagtgctcctcggatgaggaggactcggacggcggcgacgagggtgaagacgacgacgacgacgacgacgacgacgacggcggcggtggcggcagtggcagtggcaggggcggtggcgacggcagcagggacagcaccaagggcgacagcaggggcagcaccaagggcggcggcggcggcaggggcagggccagtggctag

SEQ ID NO: 26768 - DNA, 477 bp, Zea mays
  Peptide Sequence Number=SeqID_70143
atggagtcaacaccaaatgagcacttggacctcttgacaaagagtcggtgctggcgcagggtgttgaggacgacgcggaggtgccggaggtggtccgcccatgaggtgttgtatatcaagatgtcgtcaaagaagacaagcacaaaccggcggaggaaaaatccaattgaaaatgccttgctcgagcagccaaagtatgctcagtctgggagcaccggactgtccggtggtgcaccggacagtgtccggtgcgccaggctggctctagcgaacaggctgctctcgggacttcgacggcggtgtacgactataattcaccggactgtccggtggtgcaccggactgtccggtgggccgttcacaggcgaactcgtcgctctcgggaattcgtcggcgacgtacggctataattcaccggactgtccgtgtaagggcgagaggctccaagttgtggagattcctcgcaaacgggattga

SEQ ID NO: 26769 - DNA, 582 bp, Zea mays
  Peptide Sequence Number=SeqID_70144
atggcagctgtaagcagcttgaattcagggggaatttctagtgaccaccagattaaagatggtaccaataacatttcaagaaaggcttcacgtggttttaacctgatcgaatgccactccttgccaatttcacagctactgaaatcacttgggaattcattaaacgaaaatgattttgaatgccagaaggatgtttatgtatgttataagctgccttgtagaggttcctctaaacttgatctggtatgtagaaaagaggattcccttgaactaaatgacattgaggcttcgaacaaatacaatatcgacactactggactagtatttcatgtgtatggtcatgttcctggcatctttcaactgctgtctgttagtacctgccaggaactcaggaagatgatgacactgaccaacacagttcaagacgatgacactgaacaacaagatgatgcagcttctcaggaagacgatgaagaagaagaacatccactacaatctgacggaagatcaatggaaggggaagaatctgtcctaggtggtgttggcgggtcagctactgctgatgcattccatttggattag

SEQ ID NO: 26770 - DNA, 468 bp, Zea mays
  Peptide Sequence Number=SeqID_70145
atgcaggcggcatgcaaccgcgccaagtgggcgcacctctccaacttccaacgcgcccagcatggaggtccaggcccacgcgtcatgcaaccgggaccgggaaagggggataccccaaaaaggacccttctccgtgaaggaaacaggctccgagcctccctactgatcagaggctcgggctacgctcccgaggtacccaaggacatttccgagaccagcgggagcgatcttgtaacggaatcccatcagagggaggcatcgagccctcggaccccgtcgataggggaccgggtccggcagatcacccacagaggctcgggggctgctctcgcaaacccggctccagccagaccgttgacagcgtcaacataccagcccgagaacttgggacccgaccgtgcactcgggctacggccagctcgcatgagggaacaactagaccagtcgaagtgttgcgaagcgtcctaa

SEQ ID NO: 26771 - DNA, 564 bp, Zea mays
  Peptide Sequence Number=SeqID_70146
atgaccctgggtacgtccgttacatggccgaggctcaggctacgctctcgaggtaccctaggacatttccgagaccagcaggaacgatttgtaatggaatcccaccggagggaggcacccgagccctcggaacccctatcgaatgagtctgggtccagcgaatcacctgcagggccgcggccaagccgcatgaaagaacaacaaggccgaccaaggaatcacaggaagagtgtcaagacctcagaggagtcaaaccactcctccgaggcctcgggggctacacccgacgggataacaacactattcacccccgttccgaccactatgccaaccaccaagcctcgggcgcaacagggagttccgcctcgcccgaccccagcctcggcctcgggaggaattgtcaccatacccgagcacgggctcagcctcgggatggatctccgcctcgcccgacctaggccttggcctcagcctcggtctcgggaggagatctacgcctcgcccgacccaggcctcggcctcatcctcggcctcgagaagagatcttcgcctcacccgacttag

SEQ ID NO: 26772 - DNA, 935 bp, Zea mays
  Peptide Sequence Number=SeqID_70147
gagggagggccgcgacattcacgttcgtgaacaggtgcgcggcgacggtgtggccgggcatccagtcgaacgcggggagctcgaggctggacccgacgggcttcgcgctgcccgcgggcgcgtcgcgcgcggtgccggcgccgtcggggtggtccggccgggtctgggcgcgcacgggctgcgcgcaggacgccgctagcgggaaggtggcgtgcgccacgggcgactgcggctcggggtccctggagtgcgacgggcggaacgcggcgacgccggcgacgctggccgagttcacgctggaccccgccggcggcaacgacttctacgacgtcagcctcgtggacggctacaacctgccggtcgtggtggagcccgcagggggcggcggcggcggcgccacgacgacgtgcgccgcggccgggtgcgcggcggacctgagcgagcggtgccccgcggagctgcgcgccgagggcggcgccggctgccgcagcgcgtgcgacgccttcggcaggcccgagtactgctgcagcggcgcctacgccagccccagcacctgccgccccaccgcctactcgcagctgttcaagtccgcgtgcctcaggtcgtacagctacgcctacgacgaccccaccagcaccttcacctgcgccggcggccgcgactacaccatcaccttctgtcccgtcgcgccaccaagcctgaaatcgtcgagcggccctggagcaacggcggcggcaccggcaggcccgacgccgcagatgccgcggctggcaggtgggcaaggcggcggcccggacgggcagggcgtgatgctgggcgacagctcctggctcgccagcctcgccacgggcgccgcgccgccggggccggcgctccgggcctcgcccctcgtgccgctcctgctcggagtcggcggcctgctgctggtgctgtag

SEQ ID NO: 26773 - DNA, 402 bp, Zea mays
  Peptide Sequence Number=SeqID_70148
atggggaagcctgtcccatcactcctcgtgctcctcctcagccgaggcagggtcccactcgacagtccaacccggtgtacaatggatcaagcagtctcattagctgcgagaagcagacgattcgaatcgagttttttaaaccttgcaagcagatcagggctcaccgccttggcgtacaatgcctcactgaccccgactggccgtcgtgcagtgaccgcacttgtacccaccataaccggaatgggagaccacgtctcaggtcgcgtgaggggatatgtccgctggcaggttatgcataaaccggggcttgccttccaaagctgtggcaggcagatcctctggtgcagactcgggtgctggatctggggctacctcctgagcagctccttgctccggatttaa

SEQ ID NO: 26774 - DNA, 705 bp, Zea mays
  Peptide Sequence Number=SeqID_70149
atgctcgggaggctcattgctggtttggaggctaggggaatgtttgaggatgtgaacattatattggtaggtgaccatggtatggttgggacctgcgataggaagcttgtgtttctcgaagagttggctccatggatcgagttgaagtcagattgggttctgttaatgacgccattgctggcaatcaggtcgccagatggtgtgtcgccaactgagattgtggccaagatgaatgaggggcttggatctgggaaggtgaagaatggggaatatttgaagatgtacttaaaagaggagttgcctactcgcctgcattattcagagagttacaggatcccgccaatcatcgggctggttggggaagggtataagatcgagatgaagcgctccaagagaaatgagtgtggaggagcccatgggagagcacaaccaaatgcagcccattatgctcttgtgtctctagaaaggactggccgtgttcactcaatggctacccaaaatgtggataggttgcatcatcgtgctgggagtaatccatttgagctgcatgggagtgtatatgaggtgatttgtttagaatgtggtacatccatcagccgagaatcattccaggaggaagtgaagaacctaaacccaaagtgggctcaagctatcgatagtttggaagtaggacaaccaggttcaggcaaaagttttggaatgtag

SEQ ID NO: 26775 - DNA, 1602 bp, Zea mays
  Peptide Sequence Number=SeqID_70150
atgaagaagacatcggcactcaaggcggctcaccgacgcccgaagagcagcagcgacaacgacctctgcttcgagcggccgaacagcagcagcgatgacctcagggcggatgctgctgccataaggccctcgctcacgtccccactcgaggggcgaggacaagcagaaggccgtagagttggaggtcagtccgcgggcggcaccgactacctcgttggcggagaaacctctttcggctgcctcggcgggaggtggcaccggaagcggcaccgaagccgctcgggccggagagccagacacgcggcagctgccagcgccacaaacggcgaacacccttccccccgatcactgagggaaggagcgggccgctgcccgcgcggagacaggccccaactcggcgcactcccctccccagcactgatgatgaacatccttgaagctgagggaggggcagaggccgcagcccggcttgcttctccccaccttggaactggtggtcaccgtcttgggacagaagaagccaaactgccacgtgcggtgcgcgcaactgcccagtggttacgagcattcctccactttcgcccagaccagcgggtgaaagggcgggccgccatgcaggcggcatgcaaccgcaccaagggggtgcaccctttcggcttcgacgcgtccagcatggaggcccaggcccacacgtcatgtaaccggcgcgccggttactatgtgcgagaaactgcaccgccacttgcgccagtaccgcgcctcctcgactgcggaaccagtgccacgactcgaggcgaccctgcgcatggcccaacagtgccaaccgagcacatcggtcacggggatcgggaaaggggatactccgaaagggatccttctccgcgaaggaagcgggccccgagccccctactgatcagaggttcgaaggctggcccctcggaaggtttcaacagccgcctcagagcactcgggctgtgcgcccactacgggtcagaggttcgaaggccggcccctcggaagggttcaacggccgcctcaggccactcaggctccgcgcccactactgatcaggggttttgtaggctggcccccgaagggttcgatagccgcctcagacgcagagcaagagatgaccctgggtacgttcgatacataaccaaggctcgggctacgctcccgagggtgaggctgacagcagccaagtctggcctcgggcgccataggaagctccgcctcgcccgaccccagggctcggcccccgtctcggcctcggacgacgaactccgcctcgcccaaccccagggctcggactcggcctcggctccggaagatgacgaactccgcctcgcccgaccacagggctcggactcaacctcggctctgaaagacgacgaactccgcctcgcccgaccccagggctcgaactcggcctcgcctccggaagacgacgaactccgcctcgtccaaccccggggctcgaactcagccttggcctcagacgatggtctccgcctcgcccgacccggggctcggactcgacctcgacctcggaagatagactcgacctcaacctcggaggagcctccgcctcgcccgacctag

SEQ ID NO: 26776 - DNA, 605 bp, Zea mays
  Peptide Sequence Number=SeqID_70151
atggatgctcaatgggatgtgactcaagaatggcttgatagggtgaagatagcaaggaaagggcttcgaggaactaagcgaagcaaagggaggattagggttgaaagagacctggctctttgtgggcgcctcaacgaggaagtagggcaccttggtgatgttgatcctagggcaatagatcttgccatgagaatcgccgaaaggatgttcctcaaaatgaaggaagatgaggctaagaacaagattgaagaagaagaaaatgatcgatggagaccaaacgacgaatccacctcttcacaaggttcgtctttcaaatccacttctcatatgtgctttgtcgctaatgggagtgacagtgaaagcgaaagtgaggatgaggaggagcatgaaagtgatagtgaagatgagggtgatctccaacaattcttcgctcaactaagcaagaaaaatcgaatgaggctgctcaaactcatgaaaagatcagaagaacaaaaagaaatgcttcataagcaagaagatttcctcatcagaaaaattgaagatttagaaaagttgaccaaagagcatgagaagctaaagtgctctcatgatgatttggtccgaag

SEQ ID NO: 26777 - DNA, 418 bp, Zea mays
  Peptide Sequence Number=SeqID_70152
atgtccggtgcaccagaggactcagaattcaaactcgtcaccttcgggaatttccagaggcgactccgctataattcaccggactgtccggtgtacaccagacatgtccggtgctccaaggaagagtcgcctctggaactcgccaacctcgggttttcactccagccgctccgctataattcaccggactgtccggtgtacaccggactgtccggtgcaacagcgggacaacggctatttcggcgccaacggctacctgcgacgcatttaaggtcaggcacgcccatgctggcgcaccggacactcaacagtacatgtccggtgcgccaccggacatctaggcgggcccagaagacagagctccaacggtcgaccccaacggcttttggtgacgtggctgtcgcaccggacatgtccg

SEQ ID NO: 26778 - DNA, 447 bp, Zea mays
  Peptide Sequence Number=SeqID_70153
atgaggatcaagagtccaagacgacgcgatgcatcgggcctcgggccactaacgcacacggcagtacggcacataccttgggacctgggggcgtggagcttgggcagtcccgataagcacgcatcgacctttgcatctcggtcgccgtggcccgtggggagatcaggagatggccgctggggagatggccactgggctgacgcttgggaagatggcgcttggggagatggccgctgggcgcctggggagatccggagatggccgctgggcgcctgcctgggcgtgcgtgcctgcgcagtgcacatcgtggccgtgggcgcgtggcccgacaggcagggccgctgggcgtgcgcgagcgcgcctggggagaccgggagatggccgctcgccactgggcgcctagggagatggccgctgcccgctggtgcgcattgtggcgtgggctag

SEQ ID NO: 26779 - DNA, 411 bp, Zea mays
  Peptide Sequence Number=SeqID_70154
atgggaaggaagagggcagctgttaagaagtcttctgttagtagcaatcctccccaactcttcccaatcataggaaatgctgctttggatagtactggtactgaatctgctgatagggttcatgttgaagctgaatcctttgtggccagtgcctcctccccagcaaatgttgatggtgatcatgtgccagtgccactaccccgaaaatctaaaacctctgtttccagggcagagtgttggaatcatatggataagcaggaaattgttgagaatgattctgctggtggaactggacatttgaatcgtcacttcaaagcatgtttgaagaaggtagggcaaactgttggtggaggtgtgcaaacccaattgaacttcgctgtcgatggcactgtgccaaaggttcacacttag

SEQ ID NO: 26780 - DNA, 417 bp, Zea mays
  Peptide Sequence Number=SeqID_70155
aggcgactccgctataattcaccggactgtccggtgtacaccagacatgtccggtgctccaaggaagagtcgcctctggaactcgccaacctcgggttttcactccagccgctccgctataattcaccggactgtccggtgtacaccggactgtccggtgcaacagcgggacaacggctatttcggcgccaacggctacctgcgacgcatttaaggtcaggcacgcccatgctggcgcaccggacactcaacagtacatgtccggtgcgccaccggacatctaggcgggcccagaagacagagctccaacggtcgaccccaacggcttttggtgacgtggctgtcgcaccggacatgtccggtgtgcaccggactgtccggtgcgccatcgaacagacagcctcaccaaacggctag

SEQ ID NO: 26781 - DNA, 534 bp, Zea mays
  Peptide Sequence Number=SeqID_70156
atggccgtcagttgtagacgcctgctgacagtcctttgccgagcgccgtcgttcgccgagtgcttggtgctcggcaaagttgtctttgccgagtgtctttctttgctgagagtcctgctctcgacagggccggccctgggggtggcagccggtgccaccgcaccgggccccacgaagctggtgggcccccaccccataaacaatattctacaggccacagcgacaattgcagatttgcagcctgctacgccagaggcccagagtccagacgctaatccaattgcctacgcggctacgcctattcctctactcgccgcctgcatgcgcctgttcgcctgccctgatcgcgctgcctgttactgctgtctctgcggctctgcctggcgactggcgttcgctcgccgcaccgctcgccgctcggccacggccgacgcccgctccggcgaccggcgctcctcgctcccgcctggcgtgcctcccacagtcccgtcccgtgaccgcgttcggtctcctcctggcgctggcaaatttaag

SEQ ID NO: 26782 - DNA, 339 bp, Zea mays
  Peptide Sequence Number=SeqID_70157
atgaagctgatggacgtgtgttggttcgacgcgcacggaagaaggcgtggtttctatgatgatgagtcacaagaagaagatcgatatcgacggagagtggcaagaactgccatagactccatcagaaccggctctgagggtatgcaggcctatggcgccgaggtaacacagcttggcgccataggctatgatgccgagatttttcgtttatggctcatgttaaagagtgccgagattttcttgatcgcagggatgcgatgcatcggtgctgatacaagcgacattgtcgtcctcgccgcaagagatgctgttgtatttatttttcgtttatgtcactaa

SEQ ID NO: 26783 - DNA, 1902 bp, Zea mays
  Peptide Sequence Number=SeqID_70158
atgccggaggcgccggtcgtcacaatgcgagacacggcggcggcggcgccgcccgcgactcaccgcgacctgctcgagtacatcgagcgcgtgacggcgggggcggcccaggtgcagcgccgcgtcctgtcggagatcctggcgcagaacgcgccggcggagtacctgcggcggctgggcgtctcgggcgccgcgccgggcgccgtggaggcgttccgccgcgccgcgccgctcgtcacctacgaggacatcctgcccgacgtgctgcgcatcgccaacggggacacgtcgcccatcctctccggcaagcccatccgcgagttcctcaccagctccggcacgtccggaggggagcgcaagctgatgccggcgatagccgacgagatggaccggcggtcgctgctgtacagcctgctgatgccggtgatgagccaggccgtgccggggctggacaggggcaggtgcatgtacctctacttcgtgaaggcggagtcgcgcacgccgggcggccacccggcgcgccccgtgctgacgagcttctaccggagccgccacttcctggagcgcccgcacgacccctacaccgtgcacaccagccccgacgaggccgtcctctgcgtggacgcgtaccagagcatgtacgcgcagctgctgtgcggcctggtgcaccgcgccgacgtgctccgcgtgggcgccgtcttcgcgtcgggcttcctccgcgccatccgcttcctggagaagcactggcagcgcctgtgccgggacctccgcaggggcgcgctcggtgccgaggtgaccgaccgctccgtgcgcgccgccgtggcgcgggtgctccgcgccgacccggcgctcgccgacgccgtcgaggccgagtgcgccaggccgtcgtggcaggggatcatccggagggtgtggcccggcaccaagtacatcgacgtcatcgtcaccggcgccatggcgcagtacatccccacgctcgagttctacggcggcgggctgccgctcacctgcaccatgtacgcgtcctccgagagctacttcggcatcaacctcaaccccatgtgcaagcccagcgaggtcgcgtacaccctcatccccacaatgtgctacttcgagttcctgcccttgccacagcccggccccggcggcaccgacgacgccgatcccgaccatcgcgacctcgtggacctcgtcgacgtcaagctcgggcacgagtacgagctcgtcgtcaccacctactcaggtctgtaccgctaccgcgtgggcgacgtgctgcgcgtggccgggttcaagaaccaggcgcccatgttcaagttcctgcggcggaagaacgtggtgctgagcatcgactccgacaagaccgacgaggcggagcttcacgcggcggtgagcggcgcggtgcagcacctggcgccgttcggcgcgtcgctggtggagtacacgagctacgcggacgcggggaccatcccgggccactacgtgctgttctgggagctgcggctccgcgcgggggacgtgccggtgccggtgccggcgtcggtgttcgaggactgctgcctggccgtggaggaggccctgaacagcgtgtaccggcagggccgcgccgccgaccgctccatcgggccgctggagatccgggtggtgtcggacggcacgttcgacaggctcatggactacgcgctcgcccgcggcgcctccatcaaccagtacaaggtgccgcggtgcgtgcacccgggccccgtggtggagctgctggacgggcgggtgcaggccagctacgtgagccccaagtgccccaagtggagccccggcggcggtaagcagtggagcagcgacgccgccgccaagaagcccgccgccgccgccggcagcaataatggaggaggggcggtcgtcgcctga

SEQ ID NO: 26784 - DNA, 276 bp, Zea mays
  Peptide Sequence Number=SeqID_70159
atgtccttgggccgaacgccacccccaactcggcccagttctcctgtgctctcggccaacttcctgatgctgacgccgacagaatctagggcaaaaggagctgggaggaaggtggagtgcgctcgtgtgggctacacgcgaagggagcctgtgatcgagtctggattcctcattgtcgatgaacgccgcggcgcgctgcagagcgaccttctcctggtcgtggaatcagattggccatggccgtacccgtttgcccgggtgcttgaaagccgttag

SEQ ID NO: 26785 - DNA, 514 bp, Zea mays
  Peptide Sequence Number=SeqID_70160
atgactgtggacaatgatcttgcactgaaaatatacataaaggctagggcaacccctaaagttgttgctgcttttgctgaaaggagggagtttgacaagacactgatatactcaaagcaggttttggagataaacttagtgacttacccaaatgttgttgatgccattcttgctaatggtatgttcagtcattatgatcgccctcgtattgcttacctgtgtgaaaaggctgggttgtacttgcgagccctccagctgtcggcgtttcgagacaggggggtccctaagccgacgagtgagtgtgctgcgtgccccagcccagatgggtcgagcgcgtgggcgagcgcggaggggggagaggcgaggcggccggagccgagcgtgagagaggtggaagtcccgcggccttcgtgttcgtcccgcgcccaggtcagttgtaaggagaggatccaggtgtacaatggggatgtagcagagtgctacgtgtctagcggagggagagctagtgccctag

SEQ ID NO: 26786 - DNA, 930 bp, Zea mays
  Peptide Sequence Number=SeqID_70161
atggctcgacttagacacactgcacgtaagtccgtcatccccttcttaccctcccgccttgctgagcgtccgcttcgccgtcctgtggccggacagtccagccacttggagagactgcaccaccgcctgcatgaggagcaggaacgtcgacgacaggagcaggagcagcaggactcttctttctcgctccagcaggagatagagtctgtgaggagctgctcccctgtgcttcccctggaggcgccccctgcaccaccacagggcgccccagcccctggagtagctgctggaggagacccagacgacagaggtggcgacgacagctcgagccacgacaccgacttctctgctaaccatgagctggaaggatggtttgctcgatccatcactcgcgacgctgctcgcgggtgtcacttccacgatgcgctcgataccctgctacgtcgggcacttaaccggcatacttggtccatcgagtatcgctgtgtggtctaccagcactgtcgcgggatctacccggaccgctgggaggcaacctgcttggtgcgccgtccggagaacagtctccagggtgcagaggcctgctcagagcactattctatctctgagcgggactcagctgaggcagccatgcaagatgctgcacggcgaggcgtgattgtctcacctgtcggtgagggcaatcctaggttgagcagcacagtcaacctagccgccgtgctaaacacggagctggaccatgcactggacgagctgagtagggctcgtgctgagatcgcccggctgcgggctgagcgcgcggaacgtcgtcacctggaggatggttcccccgctcccgtcgggactcagcatctgtaccgctcacctcagcgtggacaccagtcttatggcaaccccgactgcaagaccaagataactctagaaccatag

SEQ ID NO: 26787 - DNA, 117 bp, Zea mays
  Peptide Sequence Number=SeqID_70162
atgagggtggaatggggtggttatgagatcgatggttctggttatgactatggtgctggcgaagatgaagctgtggaaggagacttccaggagttccaagactacgacgagttctag

SEQ ID NO: 26788 - DNA, 357 bp, Zea mays
  Peptide Sequence Number=SeqID_70163
atgaacgacaatggttcagcgcactgtagtagaggatcgtcggcgagctgggcgagctccagtgggcaagctgaatgcggcatggagaggcgtgcggtgtggcgaggcaatgcgcgagagcaggaagccggcacacgggagaagatgaacggcgacacgtggatagcagcagcagggcttggtgtgagggacctcggccgtccacggctgcagagacagacgaaggaccaagtctcccaccgcaaaggacccgtgtcgcacgactttatcgtgatagcgcctcaagctatgttttcgaaaaccaacctcggtgtcccaaatattaggtcggtgggcagcactgcctctgacccgtaa

SEQ ID NO: 26789 - DNA, 495 bp, Zea mays
  Peptide Sequence Number=SeqID_70164
atggtggaggccccctgggtgaggtaccttagccaagaatacatccccatgttaacgtgggctgccaacacctaccgctccccctcttgcccatatttcaggaacaaagcccttgcactctcaaaaggagtggaacaaatatgggggattggtgttgatttgggatggggaacgagatggaggttggggttcgtgttgatttgcgtgggagttggtgttgaactgttgattatgattggggaaaggagaaaagcgttttgggctggacataactctgaggtgggtggtggaggaggagagcgagggaggacgacgaggctgcctgaccgagccacgaggggaagtccattcagcaaaccttggcgctcctcacctatcgcaacctcttcggcattgccatcagacttcctgtcatgctgctccgagataggcgtgcctgattttccgacagaatatcttggaacaaagtgcaacgcttgtgtgcagcctggttag

SEQ ID NO: 26790 - DNA, 2169 bp, Zea mays
  Peptide Sequence Number=SeqID_70165
atgactgtggacaatgatcttgcactgaaaatatacataaaggctagggcaacccctaaagttgttgctgcttttgctgaaaggagggagtttgacaagacactgatatactcaaagcaggttgggtacactccagattatctcttcctcctccagaccatcttgcgtacagatccacaagtgattgattgtttaaacataatcgtcattatgatcgccctcgtattgcttagctgtgtgaaaaggctgggttgtacttgcgagccctccagctgtcggcgtttcgagacaggggggtccctaagccgacgagcagggcgacgtggggtttcctccgaagccgaggttgagtcttgccttcagttgccgtggccgagcccgagccagggggtcgggcgaggcggaagtcgtccggccgaggccagggcggagtccgagccctggggtcgggcgaggcggagtttcgtcgtcttccgggtcttagcccgagtccgagccctggggtcgggcggagcggagttcgccgtcttccgggtcttagcccgagtccgagccctggggtcgggcggagcggagttcgccgtcttccgggtcttagcccgagtccgagccctggggtcgggcggagcggagttcgccgtcttccgggtcctagcccgagtccgagccctggggtcgggcggagcggagttcgccgtcttccgggtcttagcccgagtccgagccctggggtcgggcggagcggagttcgccgtcttccgggtcttagcccgagtccgagccctggggtcgggcggagcggagttcgccgtggcgcctttggcaaggcctaattgcctgtcagactcactctgtcgagtggcactgcagtcggagtggcgcaggcggcgctgtccttctgtcagactggccagtggagcgctttatgctgatgggggttaccagctgagaattaggcgtcttgagggtacccctaattatggtccccgacagcagcattactcagagttgcctgatatcaagcgtgccattgcaaatacccatcccattaacaacttccttggacaggcacttgttgagttctttggcacattgtcaagagagtgggctttggaatgcatgaaagaccttctactggttaatctgaggggaaatcttcagattgttgtgcaggccacgaaagaatactctgagcagctaggggttgatgcttgcatcaaattatttgagcaattcaaatcttatgaggacctttactttttcttgggatcttatctgagctccagcgaggacccagatatccatttcaagtacatagaagcagcagcaaggactggacaaatcaaagaagttgaacgtgtaaccagagagtcaaacttctatgatgctgagaagataatgaactttttgatggaagcaaaattacctaatgcccgtccactgattaatgtttgtgatcgctttggttttgtgccagatctcactcactatctgtacacaaacaacatgcttcgatatatcgaaggctatgttcagaaggtgaatcccgggaatgctccattggtagtggggcaattacttgatgatgaatgccctaaagattttatcaagggtttgatcctatttgttcgttctctcctccctgttgagcctttggttgatgaatgtgagaagagacgtgggcagtgtgacgatgaacttattaacgtcactaacaagaattcgttattcaagctgcaagctaggtatgtggttgagagaatggatggtgatctatgggataaagttcttcagcccgagaatgaatatagaaggcaactcattgaccaagtggtttcgactgcattacctgagagcaagagccccgagcaagtgtctgctgctgttaaggctttcatgactgctgacctgccacatgaactgattgagcttcttgaaaagattattcttcagaattctgctttcagtggaaatttcaatctgcagaacctgctcatcttgactgccaaagcccagttacgtgaaggtctggtcagtgaagcaattgagtccttcattcgtgtagatgatgctgcacacttccttgatgttatccgtgcagccgaggaagctaatgtgtacaatgatttagtgaagtacctagatcaactcacttgttatgattgttga

SEQ ID NO: 26791 - DNA, 222 bp, Zea mays
  Peptide Sequence Number=SeqID_70166
atggagaggcgtgcggtgtggcgaggcaatgcgcgagagcagggagccggcacactggagaagatgaacggcgacacgtggatagcagcagcagggcttgagacagagtacggaagctacagcgagacctcggcaccggcgaagggagctgagcgagatgatagtacggctagtggcgggcagtacatagggaagtcacggcatcgacaagacaaggagtag

SEQ ID NO: 26792 - DNA, 396 bp, Zea mays
  Peptide Sequence Number=SeqID_70167
atggccttactcgagtccatcagagaaaaaatactccattacctatacccgctacctaccatgggtacaaaattaccctatacttccacccatgttgacaaaatacccatagtcaacaatgttctagggaagaacctccccaacgagaagctcggcgatgaaggaacagacaccggaatattcgacgacatcatgaagttggggagcggaacccagcgcagtccgtatctcgagatgaagtctcgaaagtgggagaaactcccgatgagcggatatacagagaaaggaggaattctcgccgacgtgaccgccgacaatctcaagatcgagatagagaacaagctgaacatggtgcaaggttacaccgagagaaccctctctttgcttgaaacctga

SEQ ID NO: 26793 - DNA, 312 bp, Zea mays
  Peptide Sequence Number=SeqID_70168
atggcccgacgccccgacggccaacgccgacggcccgacgccaggagccccggagcaccgccgacgcccgactgggtggctgatggtatcgtggactgtaactcaatggttcgtgcgagatgcacgagaggcgatacacgattttctacaggttcaggccgctttgagatgcgtaacaccctacttcctagcgtggatctttatgtgggcgctgcgcgcgggaaagtcgagcagatgcttcagatagcgctcaagctacttgggcctgagcctgcttccttcaattcttacgtcgacccattccaccagtag

SEQ ID NO: 26794 - DNA, 186 bp, Zea mays
  Peptide Sequence Number=SeqID_70169
atgtcgtgcgcgtttgacgactactatatcaaggactatgacgtcatcttggcaccagagataaacctattaattgaaacgagcgaacagctgctacaagcctacaaggtcaagaacgagcagtgtgtacatgtcaattctcgatatacggaaattatctatgaggatgaggacattcgagcttga

SEQ ID NO: 26795 - DNA, 1074 bp, Zea mays
  Peptide Sequence Number=SeqID_70170
atgggaatcacaaggtcttgtactgtaattattgagttatctcacatttttgtattccatggccagattgaacaacatgaatctctagagaacatctttagctctattcttgaaactactgctcaggcttatggtgaagatgacaacattcaaccttcttcgggatgtacggatgctggccagctctgtcatcacccagtccaggagctcgacaccgagcgggcctccgcggagacggcagccagatccggctcgaccctcttcgccttattcgagctcctcgcgctcccgaccttctccaagcgagaagctcaaagaaggggaagacatctacatctatcagtttccgctgtggcaattaatctctggcgcgctggcagagcccccaagaattcatctctggcgtggccgctggtgctacccatcttcaacggcgcggcctacatctacgaggcgcacgtccggcactacttcaagatcggcaactacgtgagccccagctacagcgagcaccaccgccgggtgctgcagatgacgagcctcgacgtgtgcagttttagttgtgttaatttggagctgctgcaggagcacgttgtcacggcgctttcagtggagagctactacaggtttaattatgccaaagatcaaataaaaacatgtgttgagtttccagagtgttttgtatcgaaaacagtaggggaagccctaaacaaaccagttcttgggcatttggcaatgcaaaaactatcaggaacaattcaagtcgttttggaattttttgttgagattcagtttgatgcaaatgggaagatatcaggagctgctataagggcctatcttgttgaaagatcccgtgtctgtcaaatatctgatccagaaagaaactaccactgcttttgcatgctctgttctgcaccatcagaatttgatgcaaatgggaagatatcaggagctgctataagggcctatcttgttgaaagatcctgtgtctgtcaaatatctgatccagaaagaacctaccactgcttttgcatgctctgttctgcaccatcagaaacctcaatggtggcctaa

SEQ ID NO: 26796 - DNA, 1525 bp, Zea mays
  Peptide Sequence Number=SeqID_70171
atggctgcaatacctcgggcatcggaggtcttggagagatcggagtccgtgcgtgttggatctgagccgccttccaacctccagatgcatcagtcgaggatgaatcctgggattttgcggaaggatcacagaagagggtgtcttgaggaaaagtgtaagtcggtggtcaagaaaactgaagaagttgaggggctttggggaaaaatacctgaatcaggtatatcgcggattgggaacgccgaatcggctcatttgtgttcccctccaaaccctaaatcgcatacctacatctcttcccccgtgcacgcttcaaaaccacaaatcgaaagatttgttgggcatttctgggggagatctcagaagtattatgctagtgtggtgaaagctaagagggctccgatcgttgctgtgaagatgcagccaagaggaacaggtcggcgtggagctgcgcgcggatatggtcgtggttctggccgcgaccacgtctggaggagaattgaagatggagctgtacaaaatcaaagaggtggtcgcaatattgaggaggcggacttgggagaggagggtgataccttgaatcaaggtaacccatctccctgggaaggtcaagctaatagatctgaagaaaagaatgaagatagttggaaaggaaatccccatcctatgggagaagatggccccaaagattctcacgtgaaaaaagaggtaacccgcaattttaatctagatagatctggttgtgctttctgtcactttaagaaccatcttactaaggattgtcgacatcactttccttgtgacatttgtggttgtgatgatcatgttgtgtttgattgcaaaaaatgcttgccttggaattttggtccggatctttgtgctgcacaagttgaggatcagagttttttctatattgaagaaaaagtggataataggatgattaaagaaaaatccagcactgctattatcacggttgttcaagggaatgttggagaaaaacaaattgaattggaattcatgagcatgttaggcaagaacttatggagatggtctgctagatctgtggaggacaataagtttgtaatgagatttctagatcctaagatgataggggatcttggatactttagacctttgggcatgagaacagctaaagctcagatcacaattgatccttggacacctgcagtcaatgctaaaggctgcttgcaaaaaggttggttcaggattagtggcattcctatggagcaaaggtctctggtgacaattgcaaaagttggtgggctcgtgggtaaggtgatcgaaattgatgaaagaaccagactcagaaatgaatatgtgagagctagaattgcttgcagggatgtcacggctgttcctggagttgtggaaagttctcttggattgtttttgtatgattttttctttgaaagggaaatacactcggaagaggatgaacaatctttagagactaggattagagttgatgactcttaccagaaagctgcaaaaagatccaaatatgaag

SEQ ID NO: 26797 - DNA, 210 bp, Zea mays
  Peptide Sequence Number=SeqID_70172
atgaagaaaatatacaaatacatgaagaaggtgatgtgtggcagcctcgacgtcttctttgtgcgcctcctcgcagctcctgatggctgcgaactcgaaggggaagatctagtgttggaggcgacggacgggtgtctgaaggcaagcaacagagagggtctgacatatcccatcctcagtaagaagcttgaatacccatttaccgagtag

SEQ ID NO: 26798 - DNA, 96 bp, Zea mays
  Peptide Sequence Number=SeqID_70173
atggcggcgcaaaatctttgcggagtggtgaagtacgaacgcaagggtaaaggggaggggtctgtgttcatgccttataatccgatgcagatgtaa

SEQ ID NO: 26799 - DNA, 390 bp, Zea mays
  Peptide Sequence Number=SeqID_70174
atggagcagcgatgctatcacagagctagcaccaccaccggagttaaaggatttaaggatggcatcagtggtgcacaagtcaatggcaacgactgcaacggtggcctgcagcttgcaaaggcatcacgacttaggtgggccttcgtcgcgcagcgagctcgtacgaacagggcaaggagagggcagaagccaccgccagcgatctatcctgggggcgactctctggccccgtcgagtggtttaggagcgtcgcaggatcctgccgcgcgtatatgtggcctcgtcgggcgtgaaccacgaccgaagaaccggagatttctcgccgacgcatcggcgccgccgaggagccgcaccccgcagcgagcggggttccctactgcaccagcaccg

SEQ ID NO: 26800 - DNA, 339 bp, Zea mays
  Peptide Sequence Number=SeqID_70175
atgggccagatcgcacgtgggcctcagaagcaggacgaggccgcgctgcggggagacgtcaccgcaggccttcgtctggtgctgaatgaagcgaagggtgtccctgcccgttttgtctctgtcagaccagcgactgcagcgaaaggcgatgagcgaagggtggcgtctttgccttcgccccaacacaagtactacccaaaaatattgagtggtaaaacaagccgcagcatccggccagaggagatctcggccctctttgttgctgcagattccgaactgaacgggtcccacctaccagcgacgaacgcggcgtgcggctgttgctccattctgttttag

SEQ ID NO: 26801 - DNA, 1149 bp, Zea mays
  Peptide Sequence Number=SeqID_70176
atggacaaggatcgccaaggtgcggcgcaaaaacgccaggcgactgtcaggctgcatgaagctaggccgaagaggcagcggggggctccgaaggctgcggcctccggcggaggcaagccgccgctggcggcgaaggcgggcgtctctgcacctagcaaggcgccggaggcaacggcgggcgctggaggctccaagtcaacgaaggtggtgccgccggccagcggagtggcggaggcctcgaaggcggcccgagcgttgccgttgtcgggcaagcgcgttgccgacttcggcactgatattactgtagacgactatcttggtggcgaggtgtcggccctcgcggtggttagggacgaggcgagcgcagcgacccgccggctgaagggggtgacggaggcgctgagtcaggcgacggaggcgctgagtcaggtggctgacttcgccagccgtactgcatcgggggccctcacggcagctgtgtctgccgaagtcgagagacttcggacacaacatgctgacgctgtccgtgagaagtcggcctccgacagcaagtgccgtaagctgacggacagggtggccgccctggagagggagaaggctgacctccggcgccagctggcggcggagaggagggaagccaacgaggccgtcgccaaggggcaggctgcgcaggcggaggccaagctggcgcgggcggagggcaatcttgccaaggagctcgccgaacatctgcaggagcggctcaccgccctggagagccgcgcgaaggaggccgaggccgcgatgcatgcggaggccgaatggacgcgcacgcagcttatggatacatatcgtgagctgggtgcgcggaccggtgacttcgaggtgccggaccgagagcccgggcttcgctgcctgcagtgggtgcaggaggagctgctggaatttccagccgtcgcggggggggttgatgtcgcagagcgcggcgagcgggtggacgacttcggggctctgaacagcgcgctgccagacccggagccgaccctcgcggaggctgtgactggggtcgccctggagccaaccctggagactgcagcgatcgcgacggctgccctcacatccgccgtggtcggcgaagacctgcccctgaatgttcggctgcgcccttag

SEQ ID NO: 26802 - DNA, 207 bp, Zea mays
  Peptide Sequence Number=SeqID_70177
atgtcctcttcctccctgtccctgctcaattcccatggccggtgctctgctcagattctgcccgccaagctcccagccgagtctcctcccatggcttcagcctccctgttgctcgcgtcgtggcctagccccagctccggcccgtcgcggctcctatggcgctcggccatctctgcgcccgtccatggtggttccctgcgcgcctga

SEQ ID NO: 26803 - DNA, 750 bp, Zea mays
  Peptide Sequence Number=SeqID_70178
atggtccttaatcgacttagacggagacactacaccgagactcctttctcgtgcaagtcacccgaccggtctcagcttaatcatttcaaacccaaagtctggtacctggcagaggcaatttgtcgagcgcttgaggaatatcgtgctgctagcttcgtcttcgtccgattcttgggatttcttgataacgcacggaacgacgacgagatcgagtttggagcgagctggcgagatggaatccgagcagggttgacgattggcgaccactacagacaggagttggggcgaactgcgtgcagaggagcgggtcggactcggcggccgagcagacccgacccagtagcgagaacaaatagagggggcgagctggagtatggacagagccgagctgggcgactgggtgagatccgggctaggggaaagctctggccatgggaattccgagcagaagcagaggcgagcaaaatggatggcgagctcgcgcacgcaggaagcaggaaacaaccgcgcgagatccgggaatccaggggcgcgcgagatccgggaatccagggtgctgggcgtgcgcaaggagacacgcgcgcgcaggaaaattcacggcgcggcgatcagggagctcgaccgggcgagcagcagggagcaaggcgagctagagacggccgagccaggcgcgcggcgctgggcagttcggcacagcgagctgagcagggagatgaaaagcggctgcgcgcaggactgaatccgagctag

SEQ ID NO: 26804 - DNA, 972 bp, Zea mays
  Peptide Sequence Number=SeqID_70179
atggagagatcgaggtcacatctcttctaccttcgtttcaaatctccaattgaccactggatatgcatcatcatttatcctaaggatggaaaggtgctggtgctcgactccttgaactacgacccttcgacctatgcaaaattactcaacattttagagttgcaggaaacaatggcaagtggccatgactccatgagtcctgcagcagctcgtttgatcgatgaaaaggctcaaaagcatctgctttatggagatgatgacatgagtggccatcaccgcatttcgagttcgccaaggcatttgatgggtcctgagacagactcaccacggtcacagggaggacgaggggggtacatgacggaatctcttggtttgcaacccaacggcaaacaagattttgaaaaggatagcaggctggcgaggcaaattactctctttctgcagccaggccgctctctccgatccaaggcgacaccacttctcggtgaaagaacaacgatatccgcacgctcgacgttggtttttggcgagaagataatgagatctggtggatccgctcacgcgctccaggtggccaatgattcggtggcgataaacagcgagattcgcttgatcgcaatcagtttttgcctgcccgaccgcgtttcccacaggaaacaacctcatatgcgcgtgctcggcgggatagtgagatttgctctaatctcgatggtgaaatatcggacctaccgtgggagcattgggtctggttccaggtgcaagcattgtcgtgaagcgaagagtgatggcagtgctacttgtttgaagaattatttagcacaccgaggcaaggatgatgtgaagaattgtccatctgttcctcttgaagtaaagtcattgtttgctggtgagttagacaagacaaaagaaaaagaagagacagaatttggcagaggcaacagatatatgaagcaacaagaactcattatgtga

SEQ ID NO: 26805 - DNA, 771 bp, Zea mays
  Peptide Sequence Number=SeqID_70180
atgtggacagaagatatgaccctgaggaaatttactggcttccccagaagtatagagcccctgcccggacgaggagctccgtcgccaccactcgagctccgcctcctcccggacctccgccagcaccatcgatccgccgccgccgcacgctcccgctttgctccgacgcccctgctcctccacgctgctcaatccgccggatccagcgcagcacgcccgcggggctcgtcgtccgcggaacgcggggacatcgtcgtccttcgaggtgccagcgtgccgccgactcgtacctcctcgccgccgcttccttcgaggatcgaggtgcaggtgcggcgtgccgccgactcgacggactcgtacctccccgtcgcgggcttcctttactgctccgagctccatcacgacgcatggtcgaagtggaccaacagctgtcatgctgagagtctaaagcatgcatcgatcacgctggcattacgttacctaacccaactgaaggtggatcaactcgaactcgccaccttcgggtttctggaaaagtcactctgctataattcaccggactgtcctgtatgccagcggagcaacggctacagcgcaaaggtcgactccaacagaaacctgaaaagcgctacagtgcacggacagttcgcgcagagtcagagaaggccccagaaggcgcaccagacagtgaacagtggctgtccggtggaccaccggactgtccggtggcccaggctgtcagagctccaacggtcgaaccctaacggttag

SEQ ID NO: 26806 - DNA, 1734 bp, Zea mays
  Peptide Sequence Number=SeqID_70181
atggcgagctctggactcgcctaccccgaccgcttctacgccgccgcagcctacgcggggttcggcgctggtggggccacctcctcctctacggcctgcacagcaggccacagttggtccgtgcaatgtgcccaagccaagggcgtggaaccccgtggagcagagcaaatgggccagattatggaatccccaacctggatagctggagtggaaaattctcagaaaataccgtttaccattgagttgcatttgcatgtcctgaaaacaatactcatttcttatatgatctgtgtttttagttggcacggacttggaagcatgccatcggctgaggcgatgcgtctttttgtcaaaatcttggaggaggaagatcctggatggtactcaagggttcctgagttcaactctgagcccattgtagatattcaaatgcataaaccaaaagaagagccacagattgtaccggcttcaacgaatggaacatcaatttcagaaccaaaaatcatttctgaaaatggaagttctgtggaaacacaggacatagatgttattttggaaggccttagtactgttagttctcttgacgaatggacaccattagctatcagtggccatcgtccgaagcctcgttatgagcatggagcaactgtgttgcaggataagatgtatatatttggcggaaaccataacgggtgttaccttagtgacctccaggctttggatctgaagaatttgacttggtcaaagattgatgccaaattggaagcagaatcttctgattcagcaaaaacctcacaaattgctccttgtgctggccattcattgtttttctccattgctgggcataccaaagatccatctgaaggtgttacagttaaggaatttgatccgcatacttgtacctggtctattgtcaggacttatggaaaatcaccggtttctcgcggaggtcagacagtgactcttgttggaacaacactagttttgttcggtggtgaagatgcaaaacggtgcctcttgaatgacttgcacattcttgatcttgaaaccatgacatgggatgatgtggatgcaataggcacccctcctccgagatcggatcatgctgctgcttgccatgctgaccgctatcttttgatttttggtgggggatctcatgcgacatgtttcaacgacctacatgtccttgatttgcagacgatggagtggtcaagacccaaacaacaaggcctgacgccaagcccaagagctggccatgctggtgcaactgtcggggagaactggtacatagttgggggtggcaataataaaagtggtgtctctgatactcttgttcttaacatgtcaactctgacatggtcagtggttagcactgcggaaggacgagttccccttgccagtgagggcatgactctagtgcatagcaattacaatggatacgattatctcatctcatttggaggatacaatggacgatacagcaatgaggaacttcaagccgtccgtggccaacttgctgctgagcagtcaagatgtttcaaacttgaggtcgatgttgcggaactacgacagaagcttcaaagtatggatgcattggaaaaggaggtcgagctgcttcgacgacacagagccgcgtcagagcaagcagcgctggacgcaaagcagcggcaaagttctgggggcatgtggagctggctcgttggtacccctcctgatgataaatctgaatcgtga

SEQ ID NO: 26807 - DNA, 501 bp, Zea mays
  Peptide Sequence Number=SeqID_70182
atggccgaggctcaggctatgctcccgaggtaccctaagacatttccgagaccagcaggagcgatttgtaacggaatctcatcagaggaaggcatcgagccctcggaccctatcgaacgggaccgggtccagcaaatcacctgcaggaaaacagcgcagctcgcccctctccgactgttgcgccacccgccaggggtgaggctgacagcagctgagtccagcctcaggcgcagtaggaagctccgccccgcccgaccttgggcctcgacctcaggaggaagtctccgcctcgcccgaccccagggctcggcctcggaagatggtctccgcctcgcccgaccacagggcccggcctcaacctcgacctcggaaggaggtctccgcctcgcccgaccccagggtccggcctcaacctcgacctcggaaggtggtctccgcctcgcccgaccccagggcccggcctcgacctcggatggtggtctccgcctcgcccgaccctag

SEQ ID NO: 26808 - DNA, 519 bp, Zea mays
  Peptide Sequence Number=SeqID_70183
atggcggtggagctccggctgcaaggtgaggaagccggtgagcacagaccgggtgaactagaggggctagaggcaaactggaagttgtcccacgttgctggcgaagaggtggagctcaccaaggcaatgggcgacaacgacaagtaccccctggcagctagatccacaccccatgaggatgtcaccgatggagaggatgttggcattgaggagaagcctgaggagtacgtgcggacgccagagctggaggaggagtgcacgcgccagatccgcgtcctgcttcatttctacgcacctattggcatcctcgcggacactagcggttgggcggttccctctcctgtgatttacctcgacggcggcaatggttgcggctgctcccataggtactaccgcctccttccccttgtcatcctcctctcagatccatccatctggagttcagaaagctcaactgtagttgaaaaagctcaattgcagttgaagaagttcaactcagttgaagttcagctcagctga

SEQ ID NO: 26809 - DNA, 624 bp, Zea mays
  Peptide Sequence Number=SeqID_70184
atggggaagacgtcgttgattccgccaccggcgggcgggctgtcggccgccattgtcgtcgtcacgcggcggaggaaggagtatcatgtcgtagctgccgtcgagggacatgaactcaagactcccgaaacagagcatcgtcccgggctagaaaggttgctggagactacccatctggagcttgacgggaagctgttcgtcaacatgcagcaggcccctacctggcgcgccaactgtcggcgtttcgaccccggggggtccctggaccgacgagtaaattatcgccgcatgtcccagcccagatgggtcggcgcgagacggagcatgaaggggggcaagaagggagacaggcaaaaggagaaactcgcggccttcatgttgtcctacgcccaggtcggggcgcgcgtcaggataaggtgtcaggccatccttgcattaaatgctcctgcgatacggtcggtcggtgtggcgatctggccaaggttgcttctcggtgaagactgggcctcgggcgagccgaagctttgtgctgatggtggttaccagctgagattaggagtcttgggggtacccctaattatggtccccgacagtagccattacaaagactcccctggtgcatag

SEQ ID NO: 26810 - DNA, 837 bp, Zea mays
  Peptide Sequence Number=SeqID_70185
atgtcgtcctcctcttcttccactgccgctacgccgccggtcgattcctcgccgccgaccgccgcctcgtcggaggagacgctgagtagtttgatggcggctttgcgcgccggcgattctgtcgatttcggcgtgtcgcgaatgtcgtcggcccgcgtggaggatatgcagcggttgggctacttcggcggcggagttggtcgtgccctggggacggaggaagtccccgagccggaggcgagttggttgttttcgaggcgttcttcgccgccggtctccgcttgcctgcacaccggcgacgacttcgtacggcggacagccatcggtcgaagttttgcgaagcattattgtttacactggcagaagaggatgattggggacgaagttgctcagtttgggtcatgcactttcacgccgaagaccggcaagaccacaatgcaagtagtggagttggttccatgcgcccgcaataagtggggcaactggaatgaattttggttttacgttgccgagggtaccgtcgaaggccatgagggactccccgtgtccgagatgtgctctcatttctactcagcgtacccgccctttgaagtggcagaggaggatgtggacgaaggggcccttcgggtagtgcggagtcctgccttcgcactgaatctgcgaaaccgcgacccggccgcctttgtgcgtgaggcggaggatgtggcggtgcggcttgttggacgttatgtgccgaggacagagggcccgcgcagctgggagatccgcgggtcgaatgaccgtctgaacagggtcttcgaattgaaccaactgtcatatgacggctatcctggataa

SEQ ID NO: 26811 - DNA, 1485 bp, Zea mays
  Peptide Sequence Number=SeqID_70186
atggacaaggatcgccagggggctgcacaaaagcggcaggcgactatcaggattgttgaagccaggccaaagaggcaaaagcgggggtcggcgacggctgcggcccccggtggaggcaagccgccgctggcggtgaagtctggcgtccctgcatctagcaaggcgccagaggcagcggcgggcgctggaggctccaaaccggcgaaggctgtgtcgccgctcagcagggtggcggaggctgcgaaggcggcccgagcgttgccgtcggcaggcaagcgtgtcgccgacttcgccaccgacatttgtgtggaggactatcttggtgggtcggacgagggccagcttgctacagttgcgcctgcctcggcgatcgcgacggctgccatagtgccgaaggcgaggggcgaggcccttggctctggaggcgaggtgtcggccctcgcggttgttagggacgaggcggacgcagcgacccgccggctgaaggaggtgacggaggcgctgagtcaggtggctgacttcgccagccgtgctgcgtcgggggccctcacggcagctgtgtctgccgaagtcaagagacttcagacgcaacatgctgacgctgtccgtgagaagtccgcctccgacagcaagtgtcgtaaactgacgaacaaggtggccgcattggagagggagaaggctgacctccggcgccaactggcggcggagaggagggaggccaacgaggccatcgccaaggagcaggttgcgcaggcggaggccaagctggcgcgggcggagggcaatcttgccaaggagctcgccgaacatctgcaagagcggctcaccgccctggagagccgcgcgaagggggccgaggccgcgatgcgtgcggaggccgaacggacgcgcacgcagcttatggatacatatcgtgagctgggtgcgcagaccggtgacttcgaggtgccggaccgagagcccgggcttcgttgcctgcaatgggtgcaggaggagctgctggaactccccgctgtcgtgggggggtttatgtcgtacgcctccctggttacctgcgagggggcgatgaacgcgctctcccgcgaagggtgccggcacttcgaggtcttcgaccaggcggatgaagattttgatcgagatgtctataaggttgaagacatcgtggtgaaggattctgccggggccctttacgaccggatgtggggtccgcacggtcgcgaggtgttcagggagcgggcggagacggcgatggctcaggcgttgcgtggcgagcgggtggacgacctcggggcgttgaacagcgcgctgcctgacccggagccgacccctgcggaggccgtgtccggggtcgccctggagccaaccccggagaccgcggcgatcgcgacggctgcccccacatctgctgcggccggcgaagacctgcccccaaaggtggccgaaggcgaaccgggatgcccccgcggctgctgtgccgagtgctga

SEQ ID NO: 26812 - DNA, 312 bp, Zea mays
  Peptide Sequence Number=SeqID_70187
atgggtcgcgcgtccgacgattattttaatcgtttctcgccaacgagctcagggaagatcaaactaaagaacatgttgtaccgcacagctaggataaactccctggcttggtcaccggacagtcgattggttgccactggctcactggacacctgtgcaattgtctacgagatagacaagccagtagccagtcgcatcactatcaagggagctcatctgggtggagttcatggtttaaccttcctggagaatgatactctggtgactgccggcgaggatgcttgcattcgtgttcggaaggtggtggagtaa

SEQ ID NO: 26813 - DNA, 939 bp, Zea mays
  Peptide Sequence Number=SeqID_70188
atgaagcgcgcctacgcccgcggctgcgacctggtggccatcttcgacgccgacttccagccggagccggacttcctgtggcgcgccgtgccgttccttctccacaacccggacctcgcgctcgtccaggcgcgctggaagttcgtgaacgcagacgaatgcctgatgacaaggatgcaggagatgtccctggactaccacttcgcagtggagcaggaagtcggctcctccacctacgccttcttcggcttcaacggaaccgctggcgtgtggcgcatatccgctttgaacgaggccggagggtggaaggacaggaccacggtggaggacatggatctggcagtccgagcaagcctcaaagggtggaagtttgtatacatcggtgacctcatgaaggtgacgctctggaagaaaatccacgtcatctacaacttcttcctcgtgcgcaagatcgtagcgcacgccgtgacgttcgtgttttactgcatcgtgatccccacgacggtcctggttcctgaggttcaagtgccaaagtggggttccgtctatatcccaaccgtaataacccttctcagtgctgttgccactccaaggtcagctcacttagttgtcttctggaccctcttcgagaatgtgatgtcgctgcatagaaccaaggccactttcatcggcctactggaggcaggcagggtgaacgagtgggtggtgacagaaaaactcggtgatgctctcaggaccaaagtgccaggcaagaaaccccgcatgaggataggagacaggttgcacgttctggagctcggtgtcgcagcttacctcctcttctgtggatgctatgacattgcgttcgggaacaaccgctactacatattcttgttcctccaatccatcgctttcttcatcgtcggcattggctatgtcggaacattcgtccctcactag

SEQ ID NO: 26814 - DNA, 1137 bp, Zea mays
  Peptide Sequence Number=SeqID_70189
atgcatgcctgcatctggggcaccaccctcctccccaacgtccatggaccacgtttgcagacaatgcctaacgcacccatgacccaccaaaggaacggtagatcgagcaatgaatcagtaaaatctacggggcagatgcaccgtgcgcatagaccagggcgtcgccaatccggctcgatccgccggtttaagtctggcgaaatcatgatcagggttccgatggagacctcggaggcggcggccgcgcatccgcagaaggacagtgtgaaggtggccgtcaacataaggccgctcatcacggtggagctgcaggatggctgcacggattgcgtcaccgtcacgccgggcgaacctcaggttcaaattgggccccacgtattcacctttgatcacgtctatggcagctcgggcccttcatcatcattaatatttgagcaatgcgtgcaccccttgatcgatgcattgttcagcggatacaatgccactgttctagcatatggccagaccggttctggcaagacatacacaatgggtactgactatagtggtgaagggaactgcggagggataattcctcaagttatggatacaatatttagaaaagttgacacctcaaaggatggctcagagtttttaattagagtatcttttattgagatattcaaggaagatgtttttgatttgctcgatgcaaatcaagctgctgtaagacttgatgcaggttctatggcaaaagcatcagcacctggcagagtgccgattcaaatccgagagactgcaactggaggcataacccttgctggtgtcacagaggctgaggtgaagtcaaaagaagaaatggcatcatatttgacacgtgggtcgtcgtcgcgtgcaacagcaagcacaaacatgaataggcagtcgagtcgctctcatgccatctttacaatatgcgttgaacaaaagagaacatctggtacatccgacaagtcagccaacggtgactatgatatactatcgtcaaagtttcatctagttgatcttgctggttctgaaagggctaaacgtactggagccgatggacataggcttaaagaagggatacacataaataaaggccttctagctcttggcttttttaagtgcattaggtga

SEQ ID NO: 26815 - DNA, 1220 bp, Zea mays
  Peptide Sequence Number=SeqID_70190
ggatactgctgttgcttttctccccaggtcttgaaatagtcggtaataactggcttcgttgtggtgatactcaggacaagattgcagttgcaacagctacatctgtggttgcggcttctataatgcctggtgggagaactgcacattcacgcttcaagataccacttactattgatgatggtgctatatgtaccttcacggaacaaagtgggacatcaaagttgctacagaaagcgttgctcattatttgggacgaggcatcaatggctaagagacaatcaattgaagcgttcgacaacaacatgtgtgatatcatgggatgccctggtctaccctttggtgggaagactattgtgtttgggggagattctcaatcaagggctgccttcccttcgtctgctcacgccccgctaccgcggggacctctccaggcttcgctccacgccgcgaccgaggtcgtggctaatatctacacatccgcgctgttggaggaggagaccatcgagaacggcaccctcgagcatacggtctccaacctcgaaaaactggagaagccttgcctcttttaccctccgccccgtcgtcgctgtggctgctgctactgcgatgcgcgctcgtgccgccaccggatgagggtctggtccgcttctgcggccgtgccgtcgtggcaattgcctttatcgcaccgcacgctcaccacggcatggtttgcgaggaataggcgaggtcgcccagtcagaggagatagggcgggggtcgcttctctgggaacgggttgctggaaccgcatatgtggcaaaggagatggggagaatgagacgttgttggcgagagacggaaggaaggagacagcggcggcgagcggatcgcaaagcaggtgttggaggcgtcgcgacttcacgagcatggtgtcacctccggcgggcttcgctcaggtgctgggggcatcgcgacttcgcgagcaaggcataatctccggcgggcgtcatgtgtgggcgggcaggcaaaggcaacacgaggtggagcgtggcatccctagcatcgcgggatgcgagagaagcaatggtggctgcacttcgagaattatgggctataagggaggcgggggcggagtgaacggaacggagcgtgactgtgagagcgagataggaacggagcggctccgtccagttgattttttggagcagaatggttccggatctgaggagaatattccctaa

SEQ ID NO: 26816 - DNA, 291 bp, Zea mays
  Peptide Sequence Number=SeqID_70191
atgtcagcagacctgctttgcgatccgctcgccgccgctgtctccttccttccgtctctcgccaacaacgtctcattctccccatctcctttgccacatatgcggttccagcaacccgttcccagagaagcgacccccgccctatctcctctgactgggcgacctcgcctattcctcgcaaaccatgccgtggtgagcgtgcggtgcgataaaggcaattgccacgacggcacggccgcagaagcggaccagaccctcatccggtggcggcacgagcgcgcatcgcagtag

SEQ ID NO: 26817 - DNA, 411 bp, Zea mays
  Peptide Sequence Number=SeqID_70192
atggcgcctcctgttgacgtggctggcctgcgccctaggttgggcgatgtggaagctcctccgaagccgaggtcgagtctgtctaccgtagctgtggtcgggtccgagcccctaggtcgggcgaagcggagttcgtcgttttctggggctgagcccgagttcgagccctgggtcgggcggagcggagttcgccgtctttcgggacttagcccgagtccgagccctgggtcgggcggagcggagttcgccgtcttctgggacttagcccgagtccgagccctgggtcgggcggagttcgccgtcttccgggacttagcccgagtccgagccctgggtcgggtggagttcaccgtcttccgggacttagcccgagtccgagcccttggtcgggcggagttcgccgtcttctag

SEQ ID NO: 26818 - DNA, 528 bp, Zea mays
  Peptide Sequence Number=SeqID_70193
atgttcaagttcctcaaggaggtggtcgcgggatccggatcgggactcaaggacttcccctacaccatcggcgagccctacgcatcggcttggggctcatggaaacaccaccgcggtacctccaaggatgatgggtcgcctgtgtcaattttttctctgtcagggagcaaccctcaggacagacacatggttgctggtcgcaacggtgttaagagattacgaacaagcctgttatgccactttctgaaagctcaaggaactgaatcttggtggtacacagaggttcatggtaatgtatgcttggccagtgttgttgttacacaaaccctggattggaagcttcatgcttttgatgttctgtcagaatttgatgctaataatgaagcctctggtagccccatgttgcaatttgaatggttagttggaacacagtacaagccaatggagctgtcaaagtcagattgggcttcaattagaaaatcacccccatgggccattgattcttggggactaggtgagcgtaaataa

SEQ ID NO: 26819 - DNA, 384 bp, Zea mays
  Peptide Sequence Number=SeqID_70194
atggcgcctcctgttgacgtggctggtctgcgccctaggttgggcgatgtggaagctcctccgaagccgaggtcgagtctgtcttccgtagctgtggtcgggtccgagcccctgggtcaggcgaagcggagttcatcgtcttctggggctgagcccgagtccgagccctgggtcgggcggagcggagttcgccgtctttcgggacttagcccgagtccgagccctgggtcgggcggagcggagttcgccgtcttccgggacttagcccgagtccgagccctgggtcgggcagagtttaccgtcttctgggacttagcccgagtccgagccctgggtcgggcggagttcgccgtcttccagagttcgccatcttccgggacttag

SEQ ID NO: 26820 - DNA, 363 bp, Zea mays
  Peptide Sequence Number=SeqID_70195
atggctgcccaccctttcgcccgctggtctgggcaaaagtggagggtcgcttgtaaccgttgggcggttcccggctgcaccccccccccccccccccgccggcggtcacccaagacggtgaccaccagcccctgggtggggagaagcaagctgggctgcgatcttggtcccaccctctgcttcaaggatgttcatcatcctcgctggggtggaggttgggctgagccggagctctacctcccgcgcgggctcgtgggtcaccctctcctgcggcgttcgagggagagggcgctcgccggccctgcgggtgggtcggacttcgacaacgcggggccggtcgacgacaggcgtcgtctgccctag

SEQ ID NO: 26821 - DNA, 597 bp, Zea mays
  Peptide Sequence Number=SeqID_70196
atggctgaaaggtaccaactcccacggagttgtgttcctccaacgacgaggcggaaagacggcggatatcccccatccgggggcttggaaggcggaaagacgcgacgcataagggagcgcgaagacatggtcgccttccaagggggtcaccctccttttaaaggcggctctccctacttgcgtccccagccgtcatgggctgagtcttctccaacacactctaaggtcctcccctacggcacgggggctgggtcccacgtgtcatgcaagccgactcagagcagaagaagccaaaccgccgcgcgcgggaccgggaaagggggataccccgaaaaggatccttccccgagaagaaaccaggctccaagccccctactgatcagaggttcgaaggctggccccccggaagggttcgacagccacctcagatcgcgtgggccctacacccactactggtcagaggttagaaggccggcccctcggaagggttccacggctgcctcaggctactcgggctccgcgcccattactgatcaggggttcaaaggctggcccccgaagggttcacagccgcctcagacgccgagcgagggatga

SEQ ID NO: 26822 - DNA, 1056 bp, Zea mays
  Peptide Sequence Number=SeqID_70197
atggcaagcccatataaagagcttcgaccttgtataagcccaaggtttccaaatgtgctgacaggttcagaggtcaggtcacatctccagcaaagaaagctttgtaggtttcgtttaattgatgtccgaacgaaggcttttcaggctaccgatcagttcttgcaaatagcaaaacaacaccatgaaaagattcaagggttctggtacttttcatggtttagatcacagcttaatacaggagacaacagtgtggctgaaagtactggtgttaagttaaagcctggaaatgcaggtttacttgggtgggccatgagttctgttacacaaaagggtaaaccttttgaccatgccccaatatctactgcaaatgccaataattctcaagcatcaacaacctcgactgccactccagatctgcaattgagtatatcaattcgattgccagacactcaggcttccacactagcgtatgcaccatccacatccacctcgcttgatcaagctgcatcagcatcagcaaggtcgtcagtagatgggtggggtgagcttgaggatggtaatatccatgaggagaatagtagcgataaagatggatgggatgatgtagacccatttgaggacaagccatccccatctcttctatccaacatacaggctgctcaaaaacgtccagtggtgcaaccaaagcaaccggttgcaaactcatctaaaccaaacccactgaaagcgccaaagtcagaagacgatcctttgtggggtcctatagctgctgcaccacctaaaagtgcagtaaaatctgcagacatcaagccatcaacatcacataatgatgaggatgacctctggggttcaatagcagcacctccaaaatcatctgggaagcctttgaagccagctgtagcgaatagtgacgacttatggggtgccatcgcagcacctccaccagcaaccaaagccagacccttagcctcgtcaggtaggggccgaggaacaaagccagcgcaaccaaaacttggtgctcaaagaataggaagaacatcttcaactggaatgtga

SEQ ID NO: 26823 - DNA, 1368 bp, Zea mays
  Peptide Sequence Number=SeqID_70198
atgcaggccgaggacgtgaggtcgcggttcgggcggtgcccttactgccgcgccatgatctaccaggacctcagcgccgtcatcttctactgcaccaggtgccgcacgcccatccgaggcaggaacccacaacccgccgacgagaccgagtacgcgctcgcgcagctcgagatcctctccgccgacaccgcgtccgtgttctccgacgtcgacgccgaaccgcccaacccgaggtcggcttgggccgtcgaggatgacgacggagaacagagcaggtcagctaccgctacccggagaagctccgcgtcgtcgccctcgtacagagagggagagtttggttcggtcagggcaggtccaacaagcagcggcagcgctctcaactctggcctcaaccgggaccaccgatcggaggccgcgagaagcgcgtcgccgctgcacagtcgcgtgacccagctccggccgtcgtcgcggaggaccaggcgatcgagcagcggcgacgtagatgtgcgcagcgacgcgggatcgaacaccgagtcgtactccgccgcgactgatacatcttacacgcgccggtcgtcgccgctgagctcgcaagaactccaagcgccgacggccttgtcagcagcagcaggattcgagtcagccgaccttacgaggacgccgctcggtgatccggcgttccagaaggacctcctgcaggcgctggacaacctccggaagctcatcgctgtcgtcgatcatccgccgcggagcgtcgacgtcgacgacgggcaccttcaaggcgcgacgcctcggctgagcgcgtcctgcaacaacgggagcagcggcggcaagcgtacgaccacaaggcgcagctcccgactcatgctccgcctggagtcgcagtcgcagctcacgcgggcgttgcccgccgagcgaccgcgccgccgagacgcgaacacgagcacttcgtcctcctcctcggcgtcgagcagccgccggcgcggtggcgccagggcgcgggccccgcagtgccgcccggtgctgggcggcacgccgttcgttgtctgcggcgagtgctcggagatactgcagctgccgcccgccctacccgccggccgagtatgcaggctgcagtgcggcggctgcggcgaagcgttcgagatgacgctgccggcggtcggctcgacgggcctgcccaagaagatcttttccgcgccgcagcctgctgtcagcggcggagaggatgccgaggagtatccgctcgcgagaagcaacctgagcctgagcctgagccgcgagcagccacggccgacgatggagccgctgcaccgcgtgctggggtacagctccgttagctcggtgctacgcagcctgcggtacagctga

SEQ ID NO: 26824 - DNA, 624 bp, Zea mays
  Peptide Sequence Number=SeqID_70199
atgaacgtatgtgagctcactcttgctgtctcacatacaccacaggtcaagaccagaactcctgtgatatataatgttgtgacattcgatcctgtgccactatacatcatatgtgtgagacttggtcccagcatacctggtgtttatgttaaccccgggttttggacccctaaaatccggttatcggttcacgacgcaccaaccgaggccacaggccaccaccattccttccttgttccttccccagctccgcaggctgctcatcgccctccctccgcgcccccgatccagatccagatccaggggcttgtcatggcatccaaacgtatcctcaaggaattaaaggacttgcaaaaggaccctccaacatcatgcagtgcaggtcctgctggtgaggatatgttccactggcaggcaaccatcatgggtcctcctgatagtccatatgctggaggtgttttcttggtgaacattcatttcccgccagactaccccttcaagcctccaaagtctgcgaatgggcctcagcttagttggttaagaccgtgtctagcagttcacctatatggtcatccaaacactgttttgcactgtagactgtacttttcgcagagtggagtttga

SEQ ID NO: 26825 - DNA, 437 bp, Zea mays
  Peptide Sequence Number=SeqID_70200
acccgcccacggagaagagcggattcacggtggagcttgctcgacgacgagcaattccttgcgtcacggtggcgcccaacccgaattggaggcgcggacagcttccccgggcgaagacgatactccctgacccaactccaagagcggagaccctccaaccacgacgttccacggcggcggcgctcctctccggcggatacgggaggggaggcgagcttggtgagcttttatacccggagcaaagtccgagcgagggggaggcggtgaccggtaggagcgcgatactcggcggcgagcgcgcggctccgtcaagctcgggattccgttgcgaggagggagacgtcctgacaagcggggcccgcgcgccagtggaacagcgtaggaaggcacgaggtggagcaaatggcaagtgggtccgtgttgtcggcgccagctga

SEQ ID NO: 26826 - DNA, 282 bp, Zea mays
  Peptide Sequence Number=SeqID_70201
atgaggatgcaacacctcaaaagaagacataaaaaggtgcataggagtccaatactcaagaacaaaagaagcccaaagaaatctgcgaagaaacccaagaagcgggctgtcagccagcgcctggtggcacatcggacagtgctgtccggtgtggcaccggacagtctgcgcagagaggccacagacaggcgctctctagctgtagcaccggtttatgcatccgggggctcaagttggatcatcgacagcgggtgcacaaaccatatgactggggagaaatga

SEQ ID NO: 26827 - DNA, 210 bp, Zea mays
  Peptide Sequence Number=SeqID_70202
atggagcctggcggagggacagctgtcggagcggttgaatccttgctgacgtcttcttgcttccgtaagggggctgagagccgccgtcgtcacagagttgggcgatgtggaagctcctccgaagccgaggtcgagtctgtcttccgtagctgtggtcgggtccgagcccctgggtcaggcgaagcggagttcatcgtcttctggggctga

SEQ ID NO: 26828 - DNA, 1356 bp, Zea mays
  Peptide Sequence Number=SeqID_70203
atggtcgccttccaagggggtcaccctccttttaaaggcggctctccctacttgcgtccccagccgtcatgggctgagtcttctccaacacactctaaggtcctcccctacggcacgggggctgggtcccacgcgtcatgcaagccgactcagagcagaagaagccaaaccgccgcgcgcggtgcgtacaaccgcccaacggttacaagcgaccctccacttttgcccagaccagcgggcgaaagggtgggcagccatgcaggcggcatgcaacgcgccaagtgggcgcacttctccgactcccaacacgcccggcatggaggcccaggcccacgcgtcatgcaaccggcgcgccgaatgcttcgtgcatgcaactgcaccgccacttgcgccaccactgcgcctcctcgactgcggaaccaatgccgcgactcgaggcggcccagtgcacgacccagcggcgccagcctggcgcgacggacaggcggcgcctctggcaggagaagcgggcggcgcttcgccttcgccataatgaccgcgtcaaaaaaggctggccccccggaagggttcgacagccgcctcagatcgcgtgggccctacacccactactggtcagagcccaccagggaatatccccgcgctgtccacttgaagtttggcgccgacattagggccccaccggtcagtctcacgcgctcaaccacggcttctcccctcgctgctctgcgggacccgcgcgccagccgtctacctcctatcgcgcgtcactgggtgctcgggcccactgaccggccaccgaacgcgctaatctccttcccggtcgcggcggctggtaaaccatcgctccgcgcctaccgccgtgatcctcgcgggcgtgggcaactctcctccatccagtgccagggctcgcgggggataagttggtaccttctacgcccctctccacttctccgtcgacctcgcgacttctctctcgcctcagccgcctgcgcaccgtgctcgttggaggaatcacgggaccgccgtcgtcgtcctcggtgccctccacaaattggcacccggtgcgcggtcgggtgggttcgctttagctggtggactgggtggctgaccgcgcccccaattcgagctgcgcacctcttgagctcgtggaattgctcgccggtggtcaatcaagggcggaaacacatcctttccatggtcgggcgccacctcgtctcggactggcaaatattccacgatgaccgttcgatccagatcgtgcgcgcaggaaatcaatctgagagttttaaatcccaggcgttgatcgtagatcggacgacatacactgcgtaccggttcggatttgagggcttctaa

SEQ ID NO: 26829 - DNA, 420 bp, Zea mays
  Peptide Sequence Number=SeqID_70204
atgtcttcgcgctcccttatgcgtcgcgtctttccgccttccaagcccccggatgggggatatccgccgtctttccgcctcgtcgttggaggaacacaactccgtgggagttgcttcaaggatgttcatcatcctcgctggggtggaggtcgggctgagccggagctctacctccccgcgcgggctcgtgggtcaccctctcctgcggcgttcgagggagagggcgctcgccggccctgcgggtgggtcagacttcgacaacgcggggccggtcgacggcaggcgtcgtctgccccagcgcgtcgggctcgttggcttggcccccagtgccccctcctgccggaaggcggctgccgcgccgtgtgcacgggaggaccgcccaagatgtcccgcgctgctagggcggcgttcgtgttctag

SEQ ID NO: 26830 - DNA, 1769 bp, Zea mays
  Peptide Sequence Number=SeqID_70205
atgagtttgcgttacgatcttatttatacgcccagtgcgttgaaaattgaaagaccccgcttgtcagtgaatgttgctattctagcaaagggaaggtgccaaaggttcacaataaaccaatacaagtcaaaagaaagggttcaaacaaagggagcaaaagataaccgagggcagccctggtctggcgcaccggactgtccggtgtgccaccggacagtgtccggtgcaccagggaactccaactccgaactcgccagtctcgggaattctgggagccactccgctaaaattcaccggacagtccggtgctacaccggactgtccggtgtgccagcggagcaacggctacttcgcaccagcggtcgtctgcaaaccgcatttaatgcgctacagtgcgcgccagagtcagagcagcgccagaaggcgcaccggacagtctacaggacctgtccgatgcaccaccggactgtcctggcacaacatgcggatgctatgcgggagaagtcggctgcgaagagcaaaagccgcaggctgtcggagaaggccaaggccaacgtggtgcgggcgaagggcagtctcacccgccaacgcaccgaggagctggaggcgaggttcaacgccctgtgcagccgcatggacaaggccgaggcctcgacgcgcgtggaggttgagcggacgcacgcgcagttcatggacgcgtaccaggagctgggtgcgtggactgctgacttcgaagtgcctggccaagaagcgagcctttgcttccttgaatggttgcaggaggagctgctggtgctcccgaccattgtgacgggtttcatgtccttcgcctccctcgtcacctgcgagggggtcgtgaatgctttgtcccacgaggggtgcaagcattatgaggtcttcgaccaagcggatgaaaactttgaacgtgaaatcttcaaggtcgaagaccctgtgctgaagcagtcggcgggggcactcttcgataggatgtggggtccgcacggccgagaggcgatggcacatgccgaagacatcgaggaccttggtggtctagacggcgcactgcccgaggccgcggaggtcgatccggtgccgccatctgatgccggtgaaggcccctcggcgacccccgcgccgactgcggttgctgcacaggttctgaggtttgggcctgcgcacgcaaccgctactgacaatgctatttttgtggcaacttcgaccgtggctgctgatgacgattcatttggctctgtgtctaagtgttttgaatctgatgattctgggagatcgattgtgtggacggaggagtcttcagacgaggacttggattattttgcagcgttagatgtggctgcagcggagccttcaccgcgcgcggagggttccgaggagctcccgggcgcgagtactgggtataggcgccgaagggcggtggcgaaacggagagtgagtggattgtcgcgaagcggtaggcgtcatcgtagtgagatggagagtggtcgtcttcacgtggacaagactggtaagcgagaattaatgtcctcgccgattggggtgagtgtaggtgagggggagctgcgaaatctttttgagggtgaagaattaaggataatgctgttcaactatagggagatgggtatcatcccgaaggctgagccaatgctgcgcgccttcgttgatccggccgcgcacgtaggcgacttctgcacggagtcttttgggaacgacttcgatcttcgcgtacttgttgtgctgttcaggccgcgccc

SEQ ID NO: 26831 - DNA, 348 bp, Zea mays
  Peptide Sequence Number=SeqID_70206
atggcgattgctctattaatccagcctctcaagggcacactgtatgggggtatttataggtgcctgagcgcccaaagtcttgatgatatgcagcagttggggtattttggcagcggagttgggcgtgtcccgggggcggaggaggttcccgagcccgagggtgagttggtcgtgtttgaggcgtttttcaccactgcccttcgtctgcctgcacatcgctttatggcggaggtcctgcagagatttgaggtccaggtccaccatctgacacctaacgccgtggtggccctagcgaagtggcagatgatgatgaaaatgaaggagcccttcggtgcgctgcctgcatga

SEQ ID NO: 26832 - DNA, 927 bp, Zea mays
  Peptide Sequence Number=SeqID_70207
atggctcgtagaagatcccgaaagaataagaagacccaggagaacaaggaggtaactcttgatatactactttctgattgttctaattatgattcatggtctactagagtgataaatgcttttagaaccatagatcctcaattagaacaaattttagacaagagtattattcctcctagttatactagggataatgcttccgaggaagatctaagatgtatacgcttaaactatctagcttatgacatcttaagtaaatcccttagcaaagaagattatcatgccttcataataaaatatgataaacctatttgtgatgtgcatgatatttggactagaattaaaagcaaatttgatgagtccaaacatgatgattcattttgtgcctctacttcctttggtatttgtgaaactaaccctttgaaggaagaagaaaatgaacgatggagaccaaatgatgaatccacctctccaaaaggcttgtcttcccatttcgattcccacatatgttgtgtggctaatgaaaatgatagcggaagcacaaatgaggatgaggaggaagaaagaagcttcttgcaactctacgctcgcctaagccaagaagataaggcggtcatgctcaaccttctaaaaagagcgagagagcaaagcgaagctcgtcaaaggctagaagatattctctccataaaaatgctaagctttgacgagttgactaaagaacatgaggagctaaaatgctctcatgttgatttggtccaaagcaaatcttcctttgagctagaatttgcaggaacaaaagatgataaatatcaaaagctcaaagaagaaaatgagaggctaaaaatgagcttgacacaactaaaagggaagtgcattgctcatgttggaacttgctctcctgagcaagatgatccaacgggggagtga

SEQ ID NO: 26833 - DNA, 519 bp, Zea mays
  Peptide Sequence Number=SeqID_70208
atgaccatgattccgagtcgtccaagcggaaggaaggagatagatcttacgattagggcccaagggtcagtgaccgaacgcgggtgggacggtgtcctggatagtggggtcatccgaccgtcctcttgtcagtcgcagtgctcccgcaagattcactcgatgacacgtgaggaccaccgttcggactccccgtggcgtgtgcatggccgtatcacctacacatggggccccctcaccagactcatctccctcgcgcgtaacaacctcaccgtattcgccgccataacaacccggaggataattgtggccatgttactgtcacacccggttttagaaggcaaaccgaatgcgaaccatgtacgtgccaggatcagttattcacgtacacagcagttacataacatggacatcatcacagtgctcaaaatagtattaagaagggaaatagtcgattacatcatacgtctgagacgtccatatagtccttacaataaatcaaagtgcggaaaagaaacgtag

SEQ ID NO: 26834 - DNA, 1047 bp, Zea mays
  Peptide Sequence Number=SeqID_70209
atgaagctttacaacacaacgatgctgaagggagcaacagcaccctcgacgtcaactacaccttcggcgaggtccgacctagcctcggacggcgacgcggttggaggatcccccactccgaaggacgacatcagcatcacgcccgggccatcgctgccagggcctcctccaggaatccggctcgagcagacggctcgggccggtcaccccgaagcctcagccagctgtcccctgaggacatcggctcggtttgtggcctcggcaactcgactccggcgtcggtcccgccagtggacgacccggccaggctccggccgaccaaatcttcttttcgaagccaactctgcctctgttcgtgctgacactgctacctccggcttcggctcatcgaagagcggccgaggggttcctttaactaaccaagagaagcctcggacagcaaggccgaccgagccgagggactcctacgcctccgggatacggatacctcactcgtcaccttcccacgaggcgactcacacttgccacaatgaacaaaagaccggcattcaaggtgccatcacaaacggaactccggttccgtccccgcggcacgaacgcggccaccggaaggctctcgttcgcgtccccgctcaagggacgctaaccagacatcaaagccaaagagccggaggccggcccgtaggcggcgctgacggcgtcgacggtggggaatcttcccccggctgccaccacgtcaacaccgacggcggcgtccgcctctccaccaacgccgcaccggcgaacgcgggccgctccaaagtgcaccggcaggtcctcgctcccgtcctcgccacgaaagcgaggaagaggacggaatgttgcatcctagctgggcaggaacagttcgccttccccggcatggctggaggacgcctcctccgcagagctggaggatggtttccaccaccagaagctggaagaggaggtggccagccgacccgtgcgggaggtagagccccggctcgcctcgctctccgccccagcaaggatgataaacatccttga

SEQ ID NO: 26835 - DNA, 885 bp, Zea mays
  Peptide Sequence Number=SeqID_70210
atggagtcttcaactacggcgacctcgaccactttgtcgccaattgcctcaataagggcaagtctgaggctgacccacgtgaccaccattgcagtcacgtgcaagggaaagcgggagtacaccttcgacaagcacaagtctgagagaggattcgacaaggaggcactcaagaagaagtaccttcagaaggccaagatcaaggagtgtgtcttcctcgcttcccttagcgacgttgaccacgactccgacgacgcatcatcttcctttagtgacgaggagactcacaagcgagtcaaggataagctgaacgaactcttcttcctcaccaacatcgcaggtggtttttgcaccatggcgtttggtgatgatgcagtgggcggccacgaccaggacatcggcgacggctctgcttctgatgtatcacattccaccgacgatctcaccgctgaggcagaggagccaatatcttatttggctagtcaggataagctacttaggcttgctgctcgtgagaggaaagattttaaattcaaatacgagagcacgcttaaggagactgagtctactagagcttcaattgtgatagagctagcagagagagacgctaggatagccttgcttgataaggctagcttagtgtctagtagtgagccccagttgggtatgatggtcagtcggttggtgaggggaactagcgaaccagggttaggctttgctgctaaggatgggagtgctgcatgttttggaaaggttggtgagtggagtggatggaaaccatcagagaaaccttcaagcactcccaagctcatgaaaatcaccccacctaagcctaccaccaatgtgagagatggtgtgattgaggagcctgtgagagcccctccttaa

SEQ ID NO: 26836 - DNA, 369 bp, Zea mays
  Peptide Sequence Number=SeqID_70211
atggaaggtgacgctgatgcaaatgatccatggaaatatactactgtcctcctatataggcatatgatttgtcctgcttccaaggactattattctgtcctaagggtactcgtggcggtgaggaggaacggtcgagcggataaggtgggatcatggtatagcaacctagaaactgatgttgttggttcaacaattactggtggtggggttggcaagtatttaaaagcttggactgctagctctattaatgtgactggaagtgctggagcaactgatgatttgagagagaagagaaaagcgattgcatcaactcgtaccttcaaaaagtcatttatcgttctatggtttcctaacttcaatggcaattaa

SEQ ID NO: 26837 - DNA, 297 bp, Zea mays
  Peptide Sequence Number=SeqID_70212
atggacgggcgctatgcggaggaaggggactgcgggcgtggattgcggcggcggaggcgcggtggggcagagctgcggacgcgcgacgtggtggagaaggccacgaaggacgccgcagcgattagggaggctcaaaggataaaggagcttgaagagggcggaggaggagtcgagtcgaggcgagacgatggggcagcagtcgctgatctacgtgttcgtggcgcacgcaacaagttcacctacaactgcgacagccacaccttcaactacctcatcgaggatgaactcggtgagtag

SEQ ID NO: 26838 - DNA, 195 bp, Zea mays
  Peptide Sequence Number=SeqID_70213
atggcggtcagacgggggattcttgcattgctcttcctagaaattgtagcagcatgcacatcgccgcggattgcattcatcgtgagtccccccttgaagaagagatccaactacgcgtcggagtatgggggaccaagcagtgacccttctagggcatctgagaccaagatatcagaatctgatatgaagcaataa

SEQ ID NO: 26839 - DNA, 279 bp, Zea mays
  Peptide Sequence Number=SeqID_70214
atggggccgtcgttccttgccgtcatcgtcgccttcctggccgccgacctcttcgccttctttgactgggacatctcgtcgagcatcacgcctgggatgatgctgatcctccttgcggggtgcttcatggggaagagaatggtgttcctcaagcagctcaagcccgacctgctcttaagactaggagtgattgcaagtcatggagatacccatgctgttgggtatttgaaacaacacttatttgaaaacctcttgaaacatccagcgttcattggttaa

SEQ ID NO: 26840 - DNA, 159 bp, Zea mays
  Peptide Sequence Number=SeqID_70215
atggactccatggtgtttgaggtttctaaattggatggagtaagagcaactccaacagaagaggtgaaggtcttggcgatcatggattcgctcaactacgagtttctcaccgtggatgagttgttcaacaagctcaagtccatcaagattgaccactaa

SEQ ID NO: 26841 - DNA, 81 bp, Zea mays
  Peptide Sequence Number=SeqID_70216
atgcagcttcatacccttagagatgatgtggttttataccctcagaggtgcttgttgctcatcaaggggagtgggaagtag

SEQ ID NO: 26842 - DNA, 1306 bp, Zea mays
  Peptide Sequence Number=SeqID_70217
atgggcctgcgctgtcagtaccgccccctccgcgctcgctgtggaccggcgcgtgcgcactcgcgcacgtcgccagatttctcggccacgacgcccgcccacgcgcccagctcccttcttagagccccgccagtgccccgcgcacacccctcgcctcattttgcacatattcaccctctctcgcgctctgcccacaccgccagccgccgccggagacccgcgcccgcgttctcggcaattcagctcgccggagaccgctccaagcctccccaagctccaccccaaggtgagacacccgtccccgtgcccaatttcccatattgtgccctgtgttcgaccaatttcacattcgccagtgctcggccgcggcggtccaccgtgctcacgcggtggccggccggtttagcccggtctagttccccggaactgtctggtgtgccaccggactgttcggtgcaccagcggagcaacggctatcagcgcgcaacggttgactctgacagtgaacagtacagaacagtgaacgcggcagaagtcagagcagttggtcacaggggcaccggactgtccggtgtcgcaccggactgtccggtgccacataaggacaaagcctccaacggtcgaccagctccaagccccaacgactggatgacgtggcggcgcaccagacactgtctggtgcgcccatcgctagcagccttccccaacggctacaatttggttggtggctataaataccaccccaaccggccacttcaaggaacaaaagatgatacatatccaaagatcaaagaagaaaatgagaggctaaaaatgagcttgacacaactaaaagggaagtgcattgctcaaccttctcaagataaccgtgatcacatggtgaagaagcttgagacgggaacaactgtggcatgcactaaatcccttgaagaatgtgtcaaggacttgaggattgccaagaggagggaacaaaagaagaaaatcaatacctcttccaaaagcctcaaccatgcctccatagaaggtttcgcctatccaccccctctaggcgactatcagctagcccaagccttagcgcgccttaagtcccctccccgtggccggaatggctcaccggagttactctggcccaccgaggctttctcaccgccgttctcctctctctgcccgtggaatcatggcctcttccccgccattgagttcgccgtggcgccctctccctctctgctcaactccggcgaccccggagccaccctagctcgcgccagcctcaactccggcgacctcaccgccgcagagaggagcg

SEQ ID NO: 26843 - DNA, 195 bp, Zea mays
  Peptide Sequence Number=SeqID_70218
atgcagggctcggcatcgggcggcgcagggtcggctggcgcgctcggcggctgcgcggcagggcccgcatgcggcctgggagagattcggtggttgtcgcaatggcgccatcgcgtcctgcttgcttgcgccgccgctctggtggtcaaaaggaagaagaacgtcgtggtccgttggattgggatggacggctaa

SEQ ID NO: 26844 - DNA, 312 bp, Zea mays
  Peptide Sequence Number=SeqID_70219
atgatgctagtagactacacaatgggtctcctccagcaaccaggatgccttgaggtggtgcagggggcatctctagctgaggtgcaggggaaggcggcctctcagactccacctcctgctgagacgagggggaagagtcctgctgctcctggtcctgctcctgctcctagcgtcggcgctcctgctcctcgtgcaggcaacgatgcagtctgtccaggtgactggactgacatggcagcgtacgacacagtggacgctccgccatgcgagaaggcaaaaaggggatcacagacttacgtgcagtgcacctaa

SEQ ID NO: 26845 - DNA, 486 bp, Zea mays
  Peptide Sequence Number=SeqID_70220
atggcggtggcaggcgggcagaagcagcggtcacgtcgtcagccaagctcacgtcccctcatgggacagcaagagaacctctcccacggcgtgaagacggcgcgcccgtgttccgttcctcgaacggctcgcgtacgcacgacggctgcaccgcgaaccactcgccccgtcgcattaactccgcggcgggacaggcggcacctttggcaggagaagcgagcgacgcttcgccttcgccataatgaccgcgtcaaaaaagggaccgggaaagggggataccccgaaagggatccttctcagcgaaggaaacaggccccgagcccccctactgatcagaggttcgaaggctggcccctcggaggggttcaactgccgcctcagagcgctcgggctccgcgcccactactagtcagaggttcaaaggtcggcccctcggaagggttcaacgaccgcctcaggccactcgggctccgcgcccactactga

SEQ ID NO: 26846 - DNA, 435 bp, Zea mays
  Peptide Sequence Number=SeqID_70221
atgaggatgaggctcaagttgatgaaggagaaaatcaaagagatgagccacctcaagatgacggcaatgatcaagggggagatgcaaatgatcatgataaggaggatgaagaaccaagaccaccacacccaagagtccaccaagcaatccaacgagatcacctcgtcgacaccatcctcggcgacattcataaggggggtagagaaagcactacaagattcggattgggtggtggcgatgcaagaggaactcaacaatttcactaggaacgagaactgccagatgggtcggcacgagacggagcgcaaaggggggaaaaagccggagggagacaggcgtaaaaggggaaacccgcggccttcgtgtttgtcccgcgcccaggtcgggcgtaaggagaggatccaggtgtacaatggaggtgtagcagtgtgctaa

SEQ ID NO: 26847 - DNA, 117 bp, Zea mays
  Peptide Sequence Number=SeqID_70222
atggctaagtttgcagacgtcctctgtgcagttacactacttgtgttgctcccctgctcggatgttgcattggggcagactactgacccttccgaggggctatcaagggacgattag

SEQ ID NO: 26848 - DNA, 840 bp, Zea mays
  Peptide Sequence Number=SeqID_70223
atgcagcccggctgcacccctccaccggcggtcacccaagatggtgacctccagcttgatggtgggggaaagcgagccgggctgcggcctctgcccctccctcagcctcaaggattttcatcactagtgctggggaggggactgcaccgtgcccggctcgctgagccgagcgacttcggagccgctcccggtgccgcctcccgccacggcagctggaagaggttccgccgccgacgagtttgccgacgccacccgcggaccgacctccaactctacggccttctgcccgtccttgcctctcgagttttgggcatgggcgggggcctcctggcagcagcatccgccctgaggtcatcgctgctgctgttcagccccccgggacagaagtcttcatcgtcgccgctgctggggcgggcgacgacaagccgttcgtcggtcttctgttgctccgcaggcctctcccccgtcgagtggggttactcgtctgttgattatctgaatcgcttcaccaagcatgagtcgccccgtgtcaaggtgacgagaccgatgtcggagttgatcagccgaggcctcggaccgggctggcgcccttggaagatggttggccgaggccccaggggtaaccggccgagccgcctgctcgggccggattcccggagaagtccctggcagcgattgcccgggcgtggtgatgacgtcgtccttcggagcggagaacctcggaccgcgtcgccgtccgcggctaggtcgggcctcgccgaaggtgtcatcgataccaagggtgttgctgcccccttccagcgtcaagacccgagcctgcaggatcagattgtcttgtag

SEQ ID NO: 26849 - DNA, 1071 bp, Zea mays
  Peptide Sequence Number=SeqID_70224
gatgagaagaaacctgaagatgcaccacagtctgaggttgagaaggacaaggagggcgcggagaatgaagaagaagaaaaggaacctgaggataaggccatgcaacaactgccagttaaaaaggatggcgatgaagtgtttatcaagctgggctctgacaaggacttgaaaaagaaagaaagtgctgaaagagaagaacggggcaagaaggagtttggggatcaaggagaggactccattatcttgtcaccgtggctgaaggagattagtactcctgaccgccccgctgccctccgtttcctaggggagaagtataataacctcatggagaggtacaagaagcaggtagtcaagtgttccgaggagtgtgaaccaagatataatggcctgaagaagaagtacacagacgagtgtgcagagaggcggcgtctgtacaatgagcttattgagctaagaggtaacattagggtgttctgcagatgcagacctctgagctctgatgaggtcaaccatgggtgtttatctgttgttgagattgacccatcacacgagactgagctgcagtttgtccccagtgaaaaagaaaggaagccctttaagttcgatcacgtttctgggccagaggatgaccaagtatgggaaggtgttcaatttgctattggaacactggcaacttctgtgaactgcaaaacaaatttgtgtcctgttctcgttgtgtcaccaggttctcgtggtgagggtggtatccttagaaatagtgaagggccattgaaggaccacatttatttgcatcaaaaccatctgccgcctgaggtactcaaagaaaggctccctggtatttctgaaactgctgctatttttgctggtgttgacgtcaccaaggagcccattccagttttgcctactgtgcactacaatatgggtggtatcccaacgaactaccataaggaggtagtggatatcaagggtgataatccagatgctgttatccctggtctaatggctgctggtgaagcagcctgtgcagcaccgcgttggtggatgattgatcgtccagttgtatgtgactaa

SEQ ID NO: 26850 - DNA, 66 bp, Zea mays
  Peptide Sequence Number=SeqID_70225
atggctgagctaagctcctccacgcgggctcgagctttggcttcgttagcccagaatcaaccgtag

SEQ ID NO: 26851 - DNA, 90 bp, Zea mays
  Peptide Sequence Number=SeqID_70226
atgtccacggtcgccgtggccatggtaaaccatttggccatagatgaaattgtgttgggggaaatcgtcagggtgataggagttgattga

SEQ ID NO: 26852 - DNA, 687 bp, Zea mays
  Peptide Sequence Number=SeqID_70227
atgagccggagccggaggcagcggtgtcagcatggacagaggcagagtcggctcgaaaaaggggcttcgtcggcccaggagcaggcggcttcccaggccgaggaggtgcagcggcggcgaccggagcctggccgggtcatccgtgagcgagaacatcttcggagttatgctgccaaggccatgagccgggctgatgtcctcgggggacagctggctgaggttacggagcagccggtcgaggtgtttgcccgggccaggaccctggaggagaccctagcggcgatggcccaggcgcggtgccgacatcttccttcgaggtggaggtccttccgcccgtgtcgccgtccgaggccgggccagatcccgccgaaggtggaaacaacaccgagggcgctgctgttccctctgttgatgtctgaacctgtaggaacagacttgtttgtcggtagcagaattacttgtccgagcgagagtgaggattctgttatcgatatagtcgagaaggcacgaaaaatcgttctggcagaaaagttttcgagcgttaagacttgttcggccagcagaattgtttatccgagcgtgagttacttatcgcagaagctgatgagtgaggatcccgctatcgaagcagtcgaaaagcgcgaaaagatgttctggcagaaagactttttccgaggaaaattttaa

SEQ ID NO: 26853 - DNA, 132 bp, Zea mays
  Peptide Sequence Number=SeqID_70228
atgggttcaacatcggaaaaggtgtacctctgccaggtgaggaagcgacaaatttttgttgcttttgctccaaggtggttccaaaggaagaaaaacaagaatgaagtgcaggaggaaaggatcctccattag

SEQ ID NO: 26854 - DNA, 105 bp, Zea mays
  Peptide Sequence Number=SeqID_70229
atggcgccacagccgaagcttccagagtggaaaccgtcgaagctgaaaccggcgaagccgaagctgctggggccgaagccgggaccatggaaggtcattttctga

SEQ ID NO: 26855 - DNA, 267 bp, Zea mays
  Peptide Sequence Number=SeqID_70230
atggactcaaccataggcacgacaccggcgcaggggcaccagagggcgcagaccatggtggagcggcggcgcggacctgctctagcgagcaatcgcatgaaggacagggcaacaaatggggaaataagggcatggggaggttgctcacctcaagtggacaatctggagcaccagagcaatggcggggacgtagggaaacctcgggtcgacggtgacggagctccgcatgcatggttacttcttcctctaagtgatggccccacttga

SEQ ID NO: 26856 - DNA, 717 bp, Zea mays
  Peptide Sequence Number=SeqID_70231
atggctgtatggccagtcactgactggaaagctgcagcggactcaagcttctcccagagaaattattctgccattaagctcctgttcttacaggtgagaagaactgcctgcaaatcattaggagcactgacaaagttttctactcagtacacagagaaggccttggacttgttgatggtcatgatgaatgatgatacagaagcagttaggctgcaggctctagaagcactatttcgtatggcaacatatggatgtttgagtgtgcaggagaagcacatgcatatggtattaactatgaacatactccattcacaaatgcatgactggtccttccagatagataactatcatggatctggaatggttccattggctgacctatatgaggcggagggggtgattctattgcaggaggaggagggagtgattctcctcaaggtggaggaggatgaagtggtgatcgacttcaagccaactccaagtgccatgtcgacctctgcctccgctccctgcacacatccctcccagtcgtcttcaagaacttattcggtgatcttttggcccatctttgctcatactgacaaagtacgcatgctgctgttgtcaagggaagaggtgctggaagcaaggatcagagtgcttgaagtgtgtgaaaaaatgattactcgcatgcacgctagccgttggcgtaacacccagctgatggagagattttag

SEQ ID NO: 26857 - DNA, 483 bp, Zea mays
  Peptide Sequence Number=SeqID_70232
atggtggattacccacttccatcagaatttctcatgcctttagagggccagtccatcggcgtcatcgccaatggcatcgacaagaacggcaagccgcacaaggtcaggctctactccatcgccagcagcgcgatcgacaacttcggcgactccaagacagtctcgctgtgtgtcaagaggctcatctacaccaacgatgccgaagagatcgtaaaaggagtctgctccaacttcttatcgaaacgcatgggcttgaaggagttaaaaatggggtatgaatcatctcagtttgacttttgttttaaatccattttatgttctgtcgtaggagatcttaccattcattttgttggttatgcaggcattgttctcattggtgaaattggaggtatggctgaggaggatgttgcaacattcatccagagaaaattaaattacagttgtaagtggtatcaatggatggaatacaaaccaaagctttag

SEQ ID NO: 26858 - DNA, 564 bp, Zea mays
  Peptide Sequence Number=SeqID_70233
atggacggtgctgacaggtgggtccgcttcgtcagtcgcacgcgcttgcctgcaccttccctttacgctgacttatgggacccagttgaccgcgccacaatctcgcatgcgttttcgctggtgccactgctccgtagggcccaccgggcagtccctcaatccccgtgcatctccgtcttccccgcgcaccaaccaccttcgcgcatgccgcagggccgtaagctccgagcttccgttgcagctgccccgtgcaacacctcgcctacaaatatcggaccccacaacctcgcccactcgtgctccccttttaccgctaccgccactccacaccaacccttccgcagccgcgatctgcacagagacaactcgcccccgccgttgactcgtcctttcgccaccattccggagtcggcaggtggtctgggtgattcgcctgggcacatggaacgtgtccgtggcggattaaggccgggggaagccgcggaggttgggcgaattcctcgccagagttgggatcgaaaccggatccgcagatcaccgtcgaccgacccgctaccgccataa

SEQ ID NO: 26859 - DNA, 333 bp, Zea mays
  Peptide Sequence Number=SeqID_70234
atggccggcgagccccaaatcgaagtccccacgagctatttcttatgcggtttagggcatcacgaggagcagagggaggcaaagctaggggtgggattataccggggtagtaggtcgcgaaggcacccgcccacggcaggatgcagtccagagctgtccgccgagctccgcggggagtccgacctgaggaggaagacgactgacgaagcggacccacatgtaagcgccacacaagaaaaagaaaaggaaagaacgcagagtgggctggcggtggagtggggttttgggcctgaccgtgggattcggcccaagatttctcaagttcaaatttaa

SEQ ID NO: 26860 - DNA, 561 bp, Zea mays
  Peptide Sequence Number=SeqID_70235
atggacccttcggacatgagtcaaaatcataatgcgaagaagcacaagggaaacggaggatggaacagagccgaagctgcgggggagctcgtcggcggcgaggagtctggcctatccagggcacaattgatcaatcaaatggatcagagagcttcaccagggatcaaggaaggtgggcgaccgaagtccggcgaggacgatctcgggcctccgatgaagttctaccgggtccgagagcttgggaagcttcacaagctattggcgaagctagccgagcagctggcgtggcttggaagtgaccggagtgggctggccacggtggccggggctcgggtggcaatggcggacggaagagagctcgccggagctaaggagaagcgtgtggccggcaaagcactgagagaaaccctaggtgacactggggtgtcacacccgctcggcccctcctccatctccggcacggcggcgccagtagccggcgtgcaggtatgtgcatatggctgttggcctgttgctgcccatgtccatgtttgttggttttcagttttacttagatgctga

SEQ ID NO: 26861 - DNA, 180 bp, Zea mays
  Peptide Sequence Number=SeqID_70236
atggctggtggtcttgatgataaaggggattttgaagtatctgatggtttagatgaaactgatgtagatttagaagccatcaatcagttagtgatagataatacccaagagctataccccagggttcgcaacattagacttgctttagctatagatggttttaatccgttcaggccgtag

SEQ ID NO: 26862 - DNA, 177 bp, Zea mays
  Peptide Sequence Number=SeqID_70237
atgacgcaagctgactcggagacagatgagggatgctccttcattacggaagaccatgcagaacatgttaatcccattgccacatcaattgatattactacttctatggatatgcgtctaatgatgaataagatcaaggtgatacacccagggacatgggtagcaacaggccaatag

SEQ ID NO: 26863 - DNA, 261 bp, Zea mays
  Peptide Sequence Number=SeqID_70238
atggcgtggcggaggctgacaagtcggccccgtgctccagaaacgcggacccgcgcaaacgtgggagaaaatgcgctgacgagtgggccccatttagccatgacacggtgtgggcgtgagaaacagctatggtgcgggccccactggtccttcaaaaagaaacagcttcggctgaagctgcttgaacatgatgccgaagacactgttcacgaagcttcggaactacagcatatccgaagacaaagggtcaaaccgacttaa

SEQ ID NO: 26864 - DNA, 777 bp, Zea mays
  Peptide Sequence Number=SeqID_70239
atggagaaaattgaaggaagcaataagcagagcgtacagcaggactgcaggagccgagttgcaaagggaaagagagagagctctcctgtacggctgtacccttgggccttcttggcttcacctgtacgcacgaacgcgccgccttcgcgcctccaagcatccaggtctcgcccaagcgcccgtcctcctcctctagacactgccgcacgaccgcaccgcacggtagcgctccggacgctaccctgctctacaacattgccctggaccggctggacatcgttcgccgagtctagtcccaccccggtcgtcgccctgcctccaaattcaccagctccgcccgatggccggcgtcgagtaccagacggccacgtgagccttcagccacctcccggcggccgatgtccagcttcggctcgcagtgcttctgcggttctgcctagcgcctgcttctgctcgcaatgctcgactatgggctgcccatctctagccttgagacagagagtcggagactctagtgcccctgctagcctgccctctggttttgtggccgcggaagccatctcgggcgtcgagtacgtgacgaggcagatcctgctgggtttgcgcagctcgcggccggatctccgataccacttgatgaaccgagaattcagactgctgcgcgccttcatccccttcccggcggccgacgtccaactccgcctcacagtgcttctgtggttctgcctagcgcctgctcctgctcgtagtgctcgactacgggctgctcttctctag

SEQ ID NO: 26865 - DNA, 615 bp, Zea mays
  Peptide Sequence Number=SeqID_70240
atggaccttcggtccatgacacctggtatcagctccaggttatcctcaccaccaccagccgcccatccctcaccaccaccagccgccgcgccatctgtcgccgcaacgccctcccatccgccctctccaactctagatgcattcactcggctcgaagagaagtgggatcaattcgttgtgatgttccaccgctacaaggagaagacagagaaggaactccatgcagcggtgcggcttcaggcggcagcgcgagggttcctggcacgccgccaggtacagtcccttcgtggggagaagcaccttgctgtggcctccagggccaccccatggccgtcatcacatgagcaggccgtggtgcgcctgcaagccgcagtgcgcggcttccttgttaggcgggcggtgcggaaactgcacttgctgatcagctcatcgctgcaccaactcgcagcctgcgcgcccaaccaccaggtctcgtctatactttttgaaccccctacagaagtcgagatctggctcgaggacgagctggtcctcaagggagggggagatgtcatgggcatcatagggagcgagaggcaacaaccaggctgggataaggctagagaacaagattga

SEQ ID NO: 26866 - DNA, 837 bp, Zea mays
  Peptide Sequence Number=SeqID_70241
atgatgagccaccggaggcgttctcgcgctgccggctcgccgcctagtgacgccagtacgggtacagcccctactcctgagaagtcgggatggatccggccgtgggcagcgacagggtcggaccttaaggtgctggagcttgcgctggcgttccgcgcggccaacgcgttgctcgtgcgcacatacttcaaccccgacgagcactggcagtgccctcgaggtcgcccaccgcgtcgcgttcgggtaacctcgccctcgccttgctgttgctgcctgcttcgctggtatggtcatctcacgtgggagtggaagcggggcctgcgcagttatctccacccgttgatctttgctgctttgtacaagaccctggcgctactccatctggacactccgtgggttatgatgaaatcaaaatgttgctttatccttcttgatgtcattccagtaggggcaattgtccttgctgtaacaacactccttgattggtggatgtatggttcctgggtcatagtgccgcttaattttttgaaattcaacttattgtcttccggaggagactactatggaacacatgtctttcattggtactttacacagggttttccatccatgatttggacattcttaccatttgcattgtgcggcattgtaaagtctcaggaatggaggctttcaggtctaattgcttgggtattaggggtttacagcattcttggacataaagaattcaggtattcaccttttcctgtttgttcttccagtgctacctttagcattgatgttctcaggttactgcttagcttccatgtcacggtccaagggcaaaaatcagcatag

SEQ ID NO: 26867 - DNA, 303 bp, Zea mays
  Peptide Sequence Number=SeqID_70242
atggcggcggaaaggactgggtgggcggattccttttctctggctaatcccccaggtcgcaaaaacctaagaaggagggaccgggaaagggggataccccgaaagggatccttctccgtgaaggaaacgggccccgagccccctactgatcagaggttcgaaggctggcccctcggaggggttcaacaaccgcctcagagcgctcgggctccacgcccgctactggtcagaggttcgagggccggcccctcggaagggttcaacggccgcctcaggccactcgggctccgcgcccactactga

SEQ ID NO: 26868 - DNA, 3438 bp, Zea mays
  Peptide Sequence Number=SeqID_70243
atgggaccaggcggcgtgaacttccctcagtcctccggtccagtgtcgtccttccagggtcagaggaatctgccgctgtccagtggtggaccgcagggcatggttggaggtcagatgcacaaccaggttgcgatgcagcaacagttcctgaagcttgcgatgcagcagcagcagcagcagcagaaggcggcccaggggatgctcctccagcagcaggccaagatgaatatggcgggttcatcatcaagagaccaggacatgcttaacaaccctgccaagatgcaggagcttatggctcttcatcaggcccagatgtataagcggcagtgtgagcagaaagagcaggggcagtcaagtggtagtgagcaaagaagcggtgatatgaggccacctatgcctcctcaaggagtccctggacagcagttgccatcaatgggtatgatcaggcccatgcagccaatacaaggccaggtaggaatgggcagcgctggtgggaacccgataacaccaacacagtttcaagccatccaagcctgggcaaaagagcacaactttgatctgtccaatcctgcaaacataagtgcaatttctcaactcctgcccatctggcagtccaacaggatggcagccatgcagaagcagaacgaggcaaacatggctgcgcagcagcagcaagcattgccctctcaggtgaacagtgataccccagggcatgtcaatgctcccagccagggtgccctactgaagccccggcaaccccttgcccccagctcaatttctggcggggaagaggctaaggtagtgaattcgagcaacttgcagttgcaacaacagttccctgtgcataacagggatggttcaaatgaaagggctgtgaggtcacttatgacagggggcaatggtgcgcaaacgacgcatatcccccaaagttctggacatgtaaataagattcccgagcaacccaatccaaaaaatgtgcttgcaaattccgaagcaatgcagatgcagcatgtgagacagatgcaacagcttaaccaggctgctgcccccacatctaccccaattgaagcaggaggatcacaggtcccaactagtgctcagccacaaacagggcaaacgggtttcaccaaaaatcaacttcatgtactcaaagctcagatattagctttccggcgtttaaagcgtggtgaccgactcccgcctgaagttcttgaattaattgtatctggtcggccacctgattcacaaggacagcagcaagtttcgggaccccaggtaacacataaccgtgaaagacctactgtaagcaatgctgatgaacatggaaagcagatggagagtggtggtaaagctcctgaaaaacctgcattgttgaaaggaccctgtttaccaaaggtggaggtttctacttcagaagacaaagctagtcctgccagtggtcctggtcccgcgcaagtgatgaaagcttcaccaaaagagcctcttaaaattggaccagtgtctgtaccagaacattgtaacactactgtgattaaatctgagcaggatctggaacggaacatccagagaacacctgggcgaagtgattacaatgctgagaggggtaaatctgtaccagcagaaagtggttcagtggatgttgagcaggcaaaaaggactggctccacaagcagtgcccctgttccaagagatgttcccagaaaataccatggcccattattcgatttcccatccttcactaggagacacgattccatgggatctgcaaattacaacagcaatctgtcactaggttatgatgtgaaagatttattagctcaggaggggatgatagttcttggtaggaaacgtgaggataacttaaaaaagataagtggtttgcttgcaatcaatctagagaggaaaagaatccgacctgatcttgtcttgaggctacagatcgaagaaaagaagctcaaactcctagagcatcaggctcgtctaagggatgaagttgagcatgaacaacaagaaatcatggcaatgccagataggatatacagaaagtttgtcagacaatgtgaacgccaacgtgttgagcttgtaaggcaagttcagcagatgcagagagcttcaagagagaaacagctgaaatccattttccagtggcgcaagaagcttttggaggcacattgggccattcgtgatgctcgaataactcgtaatcgtggggtggccaagtaccatgaaaggatgttgagagaattctcaaagaagaaagatgatgaccggaacaaaagaatggaggcattgaaaaacaacgatcagactagtgttcctggtgatgcagctcaaagatacaatgttctatcttctttcttgacccagactgaagagtatctttataaactaggaggaaaaataactgctaccaagagtcagcaacaagtagaagaggcagcaaatgctgctgcagcagctgcacgggcacagggcctgtctgaggaagaagtgaaggctgctgcacaatgtgctggtcaggaggttatgataaggaacacattctctgagatgaatgcaccaagggataatacatctgttaacaagtactatactttagcccatgctgtgagtgagagagttactaagcagccatcactgttgcgagcaggaactttaagggactaccaattgtcatggcctgtcataggagatcttacaattcattttgttggttatgcaggtgggcctaacagtggatgcttttctttgtacaataataagttgaatggcattttggctgatgagatgggtcttggcaagactgtacaggtcatggcattggttgcgtacctgatggaatttaaagggaattatggccctcatctcataatagtgccaaatgctgtcttagtcaattggaagagcgaactgttaaattggttaccatctgcatcttgtatcttttatgttggtgcaaaggaccaaaggcagaagttgttctctcaagaggttatggccatgaaatttaatgttcttgtaacaacatatgaatttgttatgtttgatcgttccaagctttcaagggttgattggaagtacattataattgatgaggcacagaggatgaaggacagagactccgtcttggcgcgtgatcttgatcgctatcgctgccagcggcgcctccttctcaccggtactcctctacagaatgatctcaaggagctttggtccctcttgaatttgttgcttccagaagtatttgacagtagcaaggcattttcagattggttctctaagccttttcagagggatggtcctacacataatgaagaagaagacgattggcttgagacagagaagaaagtaataataattcacaggctgcatcagattttggaacctttcatgctacgtaggcgtgtggaagatgttgaaggatcacttccacggaag

SEQ ID NO: 26869 - DNA, 225 bp, Zea mays
  Peptide Sequence Number=SeqID_70244
atgcggcgcaccagagtggaaggcttgctgctgttcatggtgatgcatcattccctgcagcagaaggaattgagacagtaccaaggtcagacaatcctaattgaaaagcggggcaagacggaatcccgggcaccacacacaacaaacgtgcaacaacaaattaaagaaatccgaccaggcgaagaacagcaggagagcaaagacaaggacaaccgaaggaactga

SEQ ID NO: 26870 - DNA, 177 bp, Zea mays
  Peptide Sequence Number=SeqID_70245
atgaagagtgagatgtcagaatacaagaacgtcgttggggggaggctaaagctgaagggtaaggcactggacgtgaaggaaggtggagtcaagaagaaaaagaagaagcttcaactcgaagagtcgtctcagattgagcacgacctttcttctaaggttgtttctcgtcatcattaa

SEQ ID NO: 26871 - DNA, 190 bp, Zea mays
  Peptide Sequence Number=SeqID_70246
ctcggagacaactgatcaagccaaggacggaggcaagaagagcttcgaggtaccaagtgcacgggagaaggtcaaggaggctgaggaacccaaagccaagggtgaagaagaagccaagaggctggttcggtctggggcaccggactgtccggtggtgcaccggacagtgtccgggatcccgcagtaccag

SEQ ID NO: 26872 - DNA, 273 bp, Zea mays
  Peptide Sequence Number=SeqID_70247
atgggggctgtgcaggcgctgagctgcattccaccaagtgaccgtctgaccgaggggaggccgggagcatgtgagggcgtgcgctgccctgctgcgtcctgtgtcctgtgggcgagccgcgccctgcctgcccctgctgccacctgccaatgccatggggtgggcaacattgctacaagcgctacccgtctcgaaaatctgaatgcatctccatacaattcaacactgtcacctatcagtaaacaaagattggtgacccgcaacatctcctaa

SEQ ID NO: 26873 - DNA, 381 bp, Zea mays
  Peptide Sequence Number=SeqID_70248
atgaccgttggtggggctgtctgttcgatggcgcaccgaacagtccggtgcacaccggacatgtccggtgccccagccacgtcatcagtgccgttggaatttgaccgttggagttctgacttctggccccgcctcgatgtccggtggcgcaccggacatgaactgttcactgtccggtgcgccggtatgggcacgcctgccttctgcgcgcgctgcgcgcgcattaaatgcacagcagcgtgtcggctccaggaaaatcccgaggctgaggagttcagcgcgaggccccctggtgcaccggacactgtccggtgcgccaccggacagtccggtgcgccagaccagggaggcttccgggacgcctttagctctcaattttga

SEQ ID NO: 26874 - DNA, 429 bp, Zea mays
  Peptide Sequence Number=SeqID_70249
atggccatgatgggttcaacatcagaaaagatgtacctctgccaggtaagaaagaagataccaaacttgtcaagtggttcaggggcacctacacggttgtctgaggaatggtctatgggtcgcggatcagccattcgctacttgcaagaccaactcgcgaaacgagatctagcgctcgattgggcggttaactctcgtccattcgcctgggctaaggaatccaaagctcaagtccgcgtggaggagcttagcttagccatggataacttgcaggtttattataatactctacatgaagttcatgtattgtattcacaactgcacccgaacgtctctgcggatcctgtcgggatggaagtcggaccttctagagtagcgggagaagcacttggtggtgaactgaaccttttcaggcccctccctctatga

SEQ ID NO: 26875 - DNA, 429 bp, Zea mays
  Peptide Sequence Number=SeqID_70250
atggaattactcagcaagtcttacccgactaaagaaaagactctcaagggtatgctggttaagggagtcaagggcagtgaccaagtcttcataaccgcgaagggtttcaaggaaggtaatcaagttcaaggaagaaacgtccctgtagttctaattctttacaccttgaagccctcgacggcggacggtgatgcgcagggctccaacgagcacgtgaaccggctatttcgctcagtgaccggtgtcctactttggccgaagccaaattcaagttctaaggaccatttccccccaatcaattttataattggtgatctgcctagctctgcccgcgaggacagtgaacggcgtagacatgtgctcgtgttcctagcgattggcgggctcctagttcaattcggtggtttggcaagcatcacagggttatga

SEQ ID NO: 26876 - DNA, 252 bp, Zea mays
  Peptide Sequence Number=SeqID_70251
atggatgatgtttgtgaagaatgccaccgcctgctcggacctgatgctggtgaggggtcggacctcgatccacttggagaatttgtcgatggcgaccagcaggtgcgagaagcccccaggtgccttttacaagggaccgatgaggtccagaccccacacagcaaacgaccaggtgatgggtattgtctgcagggcctgagcgggcaggagcgtacaatcctagtggcgtcggccaccgtggtcggccagtag

SEQ ID NO: 26877 - DNA, 1170 bp, Zea mays
  Peptide Sequence Number=SeqID_70252
atgcatcgcgtccttccaccttccgagcccccggacggggagcgcccgcgttgccttcgtcttgttgttggaggagcgcgacctcacagaggttggcacccttcagccatcgctcggcttcaaggattttcatctggcagcccggctgcattccctcaccaatggtcacccaggatggtgaccaccagttcgatggtggggagaagcaagccgggttgcggcctctgccccgccctcagcttcaaggatcttcatcatccttgttggggaggagggcggagcaagtcggggcctgcctccgcgtgggccggcgacccgcctcttcctccggcatccgggggaggaaaccatcctccagctctgcggaggaggcgtcctccagccatgcgggggaaggcgaactgctgctgcctggccagggtgcagcattccgttctccgcccgggcgactgtggccggctgcaccagagggtcgcacaacacgtcgtacgccgcgagggcggtactcgtgttctaggacggtcccgttctcgttcttgcggcgagaacgagagtgaggacctgccggtgcgctttggggcagccgtcgctcgttggtgcggtgttggtgggcaggtggccgctgtcatcggtgctgaggtggtggtcgccagaggaggtttctccgccgacgacaccgtcaatgccacctgcgctccgggcctccggctctttggctttaatggctggttctcatcccccatgaggggacgtgaacgagggccttccagcggtagtgttcgccctggggccatcgctgctgctgtcttgccgtccgaggcggaggtcgttgtcgctgctacagtggtcggcggcgagccacctggagtggagatccttccggccgtgtcgccgtccgaggccgggccagattccgccgaaggcggaaacgacaccgagggtgctgctgctccctctgttgatgacttgttcgtcggtagcagaatcgtttatctgagcgagagttacttttcacgggaggtgatgagtgaggatcccgctatcgaagcagtcgaaaagcgcgaaagacgttctggcataaagacttttactgaggaaaatcttgacgcaccccttctagcccccgagggagggtcgggctttgccgaggcaaggctgacccttccttga

SEQ ID NO: 26878 - DNA, 465 bp, Zea mays
  Peptide Sequence Number=SeqID_70253
atgaaaggcattaagacctcagaggagtcaaaccactcctccgaggcctcgggggctacacccggcggtcggcaaggtcgaagtgaccgcagtcacttcgccctttcactgaccgacctgacaggaaaacagcgccgctcgccccgctccgactgctgtgccacccaccagggtgagactgacgacaaccaagttcggcctcgggcgcaacaggaagctccgcctcgcccgaccttaggcctcggcctcggaaggaggtcttcgcctgagggctcggcctcaacctcggcctcggaaggaggtctccgcctcgcccgaccccagggctcggcctcaacctcggcctcgggaggaatcgtgtcctcgcccgaccccggcctcggcctcaggagaaacctccgcctcgcccaaccttgggctcagaccaaccgcgccacgggggatacatcattaccctacccctag

SEQ ID NO: 26879 - DNA, 104 bp, Zea mays
  Peptide Sequence Number=SeqID_70254
atggcctgcagcaatgtactcggcttcggcggtagaaagagctacagaattttgtttcttagaagcccaagacaccagatgttgggggccttcgtcctccgaag

SEQ ID NO: 26880 - DNA, 552 bp, Zea mays
  Peptide Sequence Number=SeqID_70255
atgcccacgctgccccaccagccctcgaacaaggccctccggcgacaccgacagcggcacgaccaagcaccacgccgcccctcagtagcatatcaccggatacccgatacccgatgggtaccccgtgggcgcgggtgcataaaggttcaacacaaaccaataaaagatcaaagtcagggttcaaaagctaaggagcaagaaatccaagtgtgccctgggtctggcgcaccagactgtctggtgtgccaccggacagtgtctggtgcaccaggaccgtacaactccaaactggccaccttcgggtttctgcagcgccgctccgctataattcaccggactgtccggtgcaccagcggagcaatgactctttcgcgcaacggtcgactgcgaaagttgaagaaacagagctacagtgcaaaaacagtgcgcggcagagcagagcagtcgtcaaagacgcaccggacagtgaaaagtacctgtctggtgcggaccagactgtccggtgccactagaagacaaagcctccaacggtcgtctgcgcccgaatcctaa

SEQ ID NO: 26881 - DNA, 783 bp, Zea mays
  Peptide Sequence Number=SeqID_70256
atggacaccggacccgacacagccgtgcctcgcatcaaggtggccacgcccctccccctatgcatccgccacggcggcaccttcaagatcttggcggtggtgcgggcgagcttggcggtggtccagttgctggccaccgttgccgcgagggaccttgaccatggcgtcaccgtgggggcgatcgatccaagagacgatgctggagaccgtggcgcttaccaccaccagcagcaggccaggcagaagctgctcaagagcctcaccttcgttttctcactctgcgggcttgacaacgatgaaccctactgggaggagaaggaggacaccgtcgagctcgtccagctcgacgccaaccgtgccaagaacgtcctcatcctcatgagcgacaccagcgacagacatcgtgcctccaccgaggccatcaaggatcgattgccgccaccacaccgccaccggagcagcagcctcaaggagggcagatcaagcactagatcctgcctgaggaacactgggccttcacctactccatgctccagaaggtcttccgcagcttcgccctcgtcattcagcaactcgggcccaaactccgcaatgccaccagtacgaactcgcttcgcctcctcccatttttcctctgtccaacacgaattcgctggcgtcgtcaattgtgccactgcaagtattgttctgttcctcgacaagggccctattgattccagtgagcttttaccatcagtgcgaatgctttctctgaaatatgaattggaagttgaactaatctga

SEQ ID NO: 26882 - DNA, 411 bp, Zea mays
  Peptide Sequence Number=SeqID_70257
atggatggcgacctggaaggtgtgtgggtcctccagctcaaagtcgtcctcgaagaagtgcctggagtgaggctgacagcagctaagtccagcctcgggcgccataggaagctccgcctcgcccgaccccagggctcggcccccgtctcggcctcggaagatgggctttgcctcgcccgaccccagggctcggacttaaccacgactcagccttggctccggaagacgacggactccgcctcgcccgaccccagggctcggactcagcctcggctccggaagacgacgaactccgtctcgcccgaccccagggctcggactcaacctcgacctcggaggagcctccgcctcgcccgaccgagggctcggaccgaccacgtcacagggggggcatcattaccctacccctag

SEQ ID NO: 26883 - DNA, 477 bp, Zea mays
  Peptide Sequence Number=SeqID_70258
atgtcagtatgtcactttgcttggttctggcaacacccaggtcccacctggcagccaccttatgcatattctaggttcgggtacaaacgaagacttcgactcagtgtccagtgggttggtggtctgtctacaccacttccttttattctaggagtgcggcaatcgtcatctgatcatcgtccaaccaaccaggcacgggcatgtgtggatcacctgtttttaaatgttggtggaactacagagaagcatgccatcaccaagaagctgattcttgttggtgaagtcttccgttttgatttggaagcattgacctggtcagtcattgggcgcatgcctttccgaatcaagacatccttatctagcgagatcatgggcctgacaatccagctccaaagaaagttgttgggagtctgggactatgtggagaacgaggctgcacttgtgatggcagaagttgtgacagtttgtttcccctga

SEQ ID NO: 26884 - DNA, 262 bp, Zea mays
  Peptide Sequence Number=SeqID_70259
atggcgacgccacggaagccgatcaagctcacgctgccgtcccacgagaccaccatcggcaagttcctgacgcacagcgggacgttcacggacggggatctgcgcgtcaacaaggacgccctgcgcaaactacggagcaacggctacttcgcgccaatggtcgtctgcaaaggaatagtgaaagtgaacagtgcgcgcctgcgcgcgcagaagtcagagcaggtgccagaaggcgcaccagacagtgaacaggacctgtccg

SEQ ID NO: 26885 - DNA, 405 bp, Zea mays
  Peptide Sequence Number=SeqID_70260
atgagcctgcggaaatggcgcgctgaagctccagctccgcctacggaaggactctgtggcctcgatggacgccagccctatggctcccgcagcgtcgtagttgctgttcccgcctgcttcggggcaggagccgcaagaaaagggactgaaatggaaggtgggaaaattgacttggcgttgtcgtcgctgggtgtggtgctccgcgtccttgaggatctcgttgaagtagccgtccatggagcaggtgctgggcgggtcggtgccgagcgccaggcaacgacaacaacgcaacctctaaagaagtgtcccttggggaaccacaccataattaggaagtatcagcagaaggcccacattttgtccctgaaggaggatgtggtacatctcaggacgctcaaccagtag

SEQ ID NO: 26886 - DNA, 444 bp, Zea mays
  Peptide Sequence Number=SeqID_70261
atggggaggtgcatgccagggccggtggtggcagtggtggtgtccatggcggccagcatggccgcagtggtggcggcggtggacgcgtccatcggggcgacggctggagggcgccgcagcagggggctctgctggtcggggtggggcacggctctgcacggcgcggtggggcgcgtgggtggcgcgggcacaggggcgcggccgaggggcgtccgcccggtgcgtggggcggcgcacggggcggggcggccctggtggctggaggcggccgacggcggagccagcggctgggagggagggagtgccggcggccggctgctgggagggagaaggcgcgaggcggtacctagtaggatccaaaccttcgagcagaaagcagcacaggcactggcaccaaagaggaaccgtagccgccaggcaacatcagtcatcaggaccggttaa

SEQ ID NO: 26887 - DNA, 459 bp, Zea mays
  Peptide Sequence Number=SeqID_70262
atgaccgcagtcacttcgccccctttactgatcgttctgacaggaaaacaacactattcaccctgttccgactactgtgccaaccaccaggataaaactagcgacagtaagtcacgacctccctcgagttcagcctcgggcacaacagggagctccgcctcgcccgacaccaggccacggcctcagcctcggcctcgggagaaggtctccgcctcgcccgaccccaggcctcggcctcagcctcagtctcgggagaaggtctccgcctcgcccgaccccagacctcgacctcagcctcgggaggagtcacaacctcgcccgacctcagcctcggcctcaggagaagtctccgcctcgcccgacctcagcctcggcctcaggagaagtctccgcctcgcccgacctcgcctcggaccgactgcgccacaggggatacatcattaccctacccctagctag

SEQ ID NO: 26888 - DNA, 537 bp, Zea mays
  Peptide Sequence Number=SeqID_70263
atgcagaagtggccgcgcaggagaggggatctactgggccgaaatgaggtagtgtggcccaggggtgtcggcgtcgtcgactcgctctggtccgacagtcgacgaggtgccacctcttgcctggccatggttgctccgtctcctcctcctccggcgaggagggtggcggggaaaacccgggtgttcctcttccgccacagggagatgtcgtcatcgagttcgccttcgctgggcgagccgatgaccgtcgttgttgtcgtgctgcggggggaggagtaccatgtcgtagctgccgtcgagggacatgaactcgagactcccaaagcggagcaccgtcccgggccgaagaggttgctgaagattatccatctagaactcaacgggaaagtattgccaacacgcagcgccaccctacctggcgcgccaactgtcggcgttttggacccgcgaggaccctcaaccgaccaggagttgagaacaatcgacgtcatggacgcatgcagggaaccatcattacctgttgccggagtaatctag

SEQ ID NO: 26889 - DNA, 573 bp, Zea mays
  Peptide Sequence Number=SeqID_70264
atggccccatcgggcagccccactctcacgcctcacactgaatcgggggggcccgctgctcggctccatctctccacccgcgcgtcaaccggctgcgcaaatgtcgctgcgccgggcggatctcaagcctgcgcggacttctcggacgtgcaacaaccacgaccgtgcccaggatataaagacgtgggcgcgatcctcctcctcctatccccagaccctcagctcaccgcctgcgcccgcgaaatccagccacctgggcgcagtggaatctgcctcgccggtcaactccaccttgccacctcgggtcgaaggaccgcgtggaacatcgaccgactgccaccaaaccctgtgcgtggctctcccaagctcggtgtggcgcgttactgcaaggattgctcaacggtgtttgagctgcgtcgccgaccgcctggtgtcgtggccgggaggaaccactccaagaattccgggcggttggatcttgatttgatgtccctgattagatcttggggaaatcgtcgtgagccgtcggatcgggatcaggtggtcctgggtgcgtaccgattcattaagtga

SEQ ID NO: 26890 - DNA, 462 bp, Zea mays
  Peptide Sequence Number=SeqID_70265
atggcccctcagaagggttcaacggtcgcctcaggccactcgggcttcgcgcccattactaatcaggggttcgtaggctggcctccgaagggttctacagccgcctcagatgcagagcgagggatgaccctggggctcggactcggcctcggccccaggagacgacgaactccgcctcgcccgaccccagggctcggactcggcctcggccccggaagacgacgaactccgcctcgcctgaccccagggctcggactcgaccttgccctcagacgatggtctccacctcgcccgaccccagggctcggactcgacctcgacctcgacctcggaggagcctccgcctcgctcgacccagggctcggaccgaccacttcacagggggggccatcattaccctacccccagctagctcaggctacgtggaacaagaccggcgtcccatctggctcgccccggtaa

SEQ ID NO: 26891 - DNA, 948 bp, Zea mays
  Peptide Sequence Number=SeqID_70266
atgaacaagacaccggcattcaaggtgccattacaaacggaactccggttccgtctccgcaggtacgaacaaccccccacgttggagggcctgcggagcaacagaaaaccccaggcggctcaccgacgcccgaagagcagcagcgacaatgacctctgctctgagcggccgaacagcagcaacgatgacctcagggcggatgctgctgccataagaccctcgcccacgtccccactcgaggggcgaggacaagcaggaggccgtagagttggaggtcagtccgcgggtggcgccggctatctcgtcggcagcgaaacctcttccggctgcctcggtgggaggcggccccggaagcggcgccgaagccgcttgggccggagagccagacacacggcagctgccagcgccacgaacggcgaacgcccttccccccgatcactgagggaaggagcgggtcgctgcctgcgcgaagacaggccccaactcggcgcactcccctccccagcactgatgatgaacatccttgaagctgagggagggccgggctgcctgatgaaaatccttgaagccgaacgatggctgaaaggtaccaacttccgcgaagctgtgctcctccaacaacgacaaggcggaagaaccacaggcgcccccatccgggggctcagaaggtggaaagacgcgatgcatgagggggagcgcgaagacatggttgcctttcaagggggtcaccctccttttaaaggcaactctccccacttgcgtcctcagccgtcacatgctgagtcttctccaacacgctccaaggtcctccccctacgacacgggggctgggtcccacgcgtcatgcaagctggcccagggcagaagaagtcaaaccgccgcgcgcggtgcgcgcaactacccagcggttacgggcattcctccactttcgcccagaccagcgggtga

SEQ ID NO: 26892 - DNA, 885 bp, Zea mays
  Peptide Sequence Number=SeqID_70267
atggagcacgaaggggggcaagaagggaggacgggcgtaaaggggaaacccgcggccttcgtgttgtcctgcgtccaggtcgggcgtaaggagagggcccaggcgaggcggagttcatcgtcttccggggccgaggccgagtctgagccctggggtcgggcgaggcggagttcgtcgtcttccggggccgaggctgagtccgagccctggggtcgggcgaggcggagaccatcatctgaggccaaggtcgagtccgagccctggggtcgggcgaggcggagttcgtcgtcttccggggccgaggccgagtccgagccctggggtcgggcgaggcggagcttcctatggcgcccgaggccggacttagctactatcagcctcactctatcgagtggcacaacagtcggagcggcgcaggcggcgctgtcttcttgtcaggctggggatcctcaggcgagacgtgaatcctccggggtcggctgcctttgcccgaggctgggctcgggcgaggcgagatcgtgtcccttgagtggatcgagccttgacttaatcgcacccatcaggcctttgcagctttgtgctgatgggggttaccagctgagattaggagtcttgagggccatccttgcattaaatgctcctgtgatacggtcggtcggtgtggcgatccggccaaggttgcttctcggcgaagactgggcctcgggcgagccgaagctttgtgctgatgggggttaccagctggcggactcgccaaaaagggcggacggtccgcggcctggcacgagactagggttcctgcctgacggccggatggccgacctagactcctctaatcgacgtagagtcgaagagaggcggagaatttggggattggaaggctaa

SEQ ID NO: 26893 - DNA, 503 bp, Zea mays
  Peptide Sequence Number=SeqID_70268
tgcgtccgcgcttccctccttcgctgctccacgagacccgcgcgccagcttcaccagttgactacgtcgcgtccctccgcgtcgctgactatggcccccacgtgtcagatccatccccaacggcttcgccgcgcatggtgggcacgccacactggcgtgattctcgcgcgcccgacccaacggaccacggcttcggcaccatttgggtgttctgcacgtcgtgtgatttggcggaatcacgggcgattctggtccgaattgctcgtcagaactgccacgccgcctcggatccgcgcttcaccgtgaacaaggcatccacgccaccgccgctgatggtcaataccagcaagggtggtggaattgatctaccccccaatcgacacaatcggaggatacttagacaacaacaacagcaagccaagatgaatcctccgaatcctccaaatcctccaccagccggagctgatccagcagttgcagcccagatgcggataatgcaatag

SEQ ID NO: 26894 - DNA, 264 bp, Zea mays
  Peptide Sequence Number=SeqID_70269
atgggcgccccgagaacccagccaccaccaacgggaaccgtagacggaaaggggcagggggatcgccgccatggaatcctgtctgcaaagctatccaggccaaaggaactggccatggaggttcgcgggttcccttggaatctggtcagggcctcaccaagtggattggatgcctgtggtattcggaattgctcaacggaaagtatggccaccaccatgctgcgggtcctcgtggtcttgatcctcggatgctccaatccttag

SEQ ID NO: 26895 - DNA, 210 bp, Zea mays
  Peptide Sequence Number=SeqID_70270
atggctaggaaggagaaggtgccaaagggattcataccgattctgatagggcagggggaggagagggagaggatcctcgtgcacatggagcagttcaagcagtcctacttcctcgagctgcttgatctggcggcgcaggagttcggcttattagtcacagtttcgcacaaccacacaaggaacaaggttgtgcttgtgcagaaggtgtag

SEQ ID NO: 26896 - DNA, 1089 bp, Zea mays
  Peptide Sequence Number=SeqID_70271
atggcgttcaagaaagcggccatcggactctcttcccttctcctcatcctcgtcctcctcctcgtcgcgcccagcgctaccgcggcgagaccgacgcgtcagctgacttccgacgacgacgacgacggcactggtgctgcggcgcccgctgccgcaccggccatagcgcaccctgctgctgacgcaccggtcactgccgatgccagtccacctgtggtaggaggcgccggtgtggtggcggcgcccggaggcgccgtggcagcagacgcaccggtcgctgccaatgccatccccgctgctgctgcggcagctccggtcgcagccagcaccatccctgtgggggccggggccggggccgcgggagcgggtgcagcgagcggcgctgacggccacgggatggtcttcttcatgcacgacatcctcgggggcacgaacccgtcggcgcgcatcgtggccggcatcgtggacaacgccgcggtcaccgggcagctgcccttcgcgcggcccaacggcgccgtgctgccgctcaacagcggcgtgaacgtcaactccggcgcggcgggcgccatcgacaacaacaacattcccttcctcacgggcctgggcggcgccaccaacgccgccaagtccgtcggcagcaacggcaacgggaacgggaacgggaacggcgtgccggtcttcgccggaggcagcctcccgcagggcaccacgctgcagaagctcctcttcgggaccatgaccgtggtggacgacgagctgacggaggcaccggagctggggtccgccgcggtgggccgcgcgcagggcttctacatcgccagctcggaggagggcgtcagccagaccgtggctgtgaccgccatgttcaaggaaggcgggttcgacgacaccatcagcttcttcggcgtgcaccgcaccgcggactcggagtcgcacctcgccgtcgtcggcggcacggggaagtacgtcggtgcgaagggcttcgccaaggtggccgtggtgaggcccggaggggtggcggcgtccggcgcgctgctcgagaccgacggcgtcgagtccgtactccagttcaccgtgttcctcgtgtaa

SEQ ID NO: 26897 - DNA, 1686 bp, Zea mays
  Peptide Sequence Number=SeqID_70272
atgtcctcgtggctgcggagcgcggtgagcaaggccgtcgaggccggcggccgcagcggcgtggcccgcacggtcctgggctacgccgacgccgtcgcacaccacgccggccaggccgtcgccgagggcgccaagattatcaacgagcgcgtgagcactcagaacttcaaaagtgtgaagcaaacagtgaagcgattggaagaggttgcggtttcatcacgcagggatgagagagttcaagtgctaaggcgctggctcggagccctacaggaggttgaggctgaagttggaggttcgggtgggtctcagaggcagaatgtctcttcaagcgagccaaactcttcgaaaccatcattggccaaagttttgttttatgatgctgatattggagggcctcctatgaacttccgagatatattcctttatagccacgcacttgagggtattacgttgtccatgattcttgaagctcctaaagaagaagaggtttcccttcttctagaaattttcggaatatgtcttacagggggcaaagaagttaataatgctatagtgagcagtatacaggacctggcaaagtcattctcaaattaccatgatgaggtcctggtgaaacgtgaagagttacttcagttcacacaaagtgccatttcaggtctaaagaggaatgctgacattgtgaggatagattctgaagctctagatttgtggaagaaactacatgagaaggaggcatcacgagctcaatcaattggcgatcctgataaagttacagaaaagacttcaactattgagaaccctttagggtccgttgctggagctagccttaatcctaactacccgcctacagggactcctagtgtaggccgagcagtgagcttggttcctggtttggagagcctcgagagaaatagggctctagaggctggaaggccctgggcctcagagggccttagggacacatggttgggccgagccctgattgagcttttctctgttgatgtgatctttgataggcatattgtcagtatccgaggacgccagaaagaagaggctcttaactttcgtgctaaaaaggagaacgaagtgattgctgttgaaaaggatttgactgctgagatttctgaattggagaagcaaaaggatgaacttgaggctcagttaaagaagacaagtccacaaaagtcccttgaggaggaatatttggaaactgaaaagaagatcgtgattgccttcagcattgtagatcgcatgaagaagatgttttattctgagcaagcggctaattctaggcaagatgatgcagaggtcaggaccttattttctgagattgagaaactgaaggaagtgtttgagtcggtagaaaggccgacactagacattgaagtccgcaaggcaaaggatccaatgaaggacaagtctggatcgaatcgttcagccaaagacaaatctgaatcgagccattcacctgttcaggtgccctcttcacctaaagatgtgcccgtggagtctccgaaatctccagtgaaacctgagcagacgatggacccagattcagagtttgcaaagttagagctagaattcggaaaagttaacagagaccatgaggagataggcggttgggatttcgacgagcttgaagaggagctgcgagctgacctatctaaatcaaccaatccaaaataa

SEQ ID NO: 26898 - DNA, 963 bp, Zea mays
  Peptide Sequence Number=SeqID_70273
atgtcctctaaatatagaggactgtcagacactctaaatgtggagggctccgggagtgcgctatccacgctcttcgtccaccagccgccgccaggaaacttccccgcattcctaccccacgctagcgactgcatcttccggggccgagccctcgatccggcgcgcttcgccgccggcatcgaggcaggagggcgagaagcggccgtgcggaggtgggtctgtcggcgtagagctcgcaccccttggaaccgaggccgtgcgaccccccgcaaccgaagatccaagccagcttccccctgttcgtcgccggagagccgccatcggcaaaaggcttcgtcgtccgccgacttcgtcgaaggcagccggcaaaaggaagagaacctcctcgccgccgtcgtcttcgtcttcgattcggtccaccgaggcagatccgcgaacagcgaggttcacatagatgcaacagccatggattcggagaacgaaaagctccgtaaagcactggctactctgctcagagttgttcaaaagcgtagttgtgacatcgttgatgtcgtgaaatcagccttccagcctttcaactcacctttgctcgacgaattgaaccgagcactagttgagattgacgacctcgccaaggatcttgaagacgtagcagtgcaaactcagtgggaggtagaaaatatggctaagagtgaagtgaaagaacatccacaacaagaggaagcagtagaggagcttctcatacaagatggttcagaagacgagctactgatagacgaagagtcaccaattaagtatgaagaccttgtgggctacgctaatcccacacattctaacactgtcgatgtggatgcagaagaatctgtaccatcaagcttcacatccaagaggccccttggtcgagattcttcgaaggaaaaggcaaagaggactaaatctgtggacacatctgagagcacctag

SEQ ID NO: 26899 - DNA, 483 bp, Zea mays
  Peptide Sequence Number=SeqID_70274
atggtcagacagagctttgctcatggtcgctcattctgtccggtgcgatgccgacggggcaaaaggaagcggaacatgcgatgggcgatcccccacggtcggtgtcgtgccgactctttgacggaggaaggtgatcgagccaaagacgaacaggggaggcgggtgaccgaatgcccggactcactcagacggcggctcatttcgcacgcacggctctatgcctcggcagatgcgagagttgggagcaggtcaaagctccgtccactcaagggacacgatctcgcctcacccgagcctagcctcgggcaggaacagtggaccaaggtggattcacgcctcgccccgagggcctactcaagcaacgggcgcaccttcgactcacccgaggcccagctcgggcaggcttcgcggagaagcaaccttggccagatcgccacgccaaccgtccgtatcgcaggagcattcaatgcaaggatcacctga

SEQ ID NO: 26900 - DNA, 531 bp, Zea mays
  Peptide Sequence Number=SeqID_70275
atgggcaagagtaacaaacgcaagcgcgagccgactcctccgtctgaggacttcggcgactcggaatactcggaggaggagttctcctccgagtccgaggggtctccggctcccgtctctcccccggcgtcgtctgatgattcagacgactcccaggggattgccgcggaagtctggacgtacatccgggccgtcgagcgctctgggctcgagggctcggatgagtcggagtactcctcggatgaggaggactcggacggcggcgaggatgaggatgacgacgacgacgacgacggcgacgacgacggtggcgacggcgacggtgacggcagcggcagcggtgggggcagctgtgacggaacctcccaaggcagtgaccaagtcttcataaccgcgaagatcaaggtccacgacgaggatcagccctcgctgcaccccgacgagccaattccgaccggccgccgccatggctggagcttccgggcgacaggaacaccattgaacctccaccgaacacttcccctaagttaa

SEQ ID NO: 26901 - DNA, 150 bp, Zea mays
  Peptide Sequence Number=SeqID_70276
atgtcgactgagaaacgccacctagatcagatcatactcctcgccttgtggcgcctcatgaaccacctgttcttctcctgtgggggggtgcgagacaagagtcctgagccgctcaagatccggcactacaccgaggtagcatttgcatag

SEQ ID NO: 26902 - DNA, 441 bp, Zea mays
  Peptide Sequence Number=SeqID_70277
atgatggtcctcgcctcagttgctaccacctcgttcgccattctacttcttttctctctcccctcatgtctccaccctccgcgccaccccattctcgacagaaggtcagaggatgtaggagcagacgcctcctcctcgtattcgtccgacagcagcctcgacaccgactcgtgtagtggctattgcacgtccacgaggacgtttcacgtcatgcgcgcaccatcgttttcgccgtcgtcggacgtcccattcgtcttccctgacttcgccctgttcttccacccccaacctgctgcccccgtccacggtcgtagccgcgagccgaccgatgctcgtcgacgtgggtacgggggttcttgcctgaccgccatcgcagcaaaatcaacccaaggacctccctacactgaccactcccctactgcccttgcccctttcgggtaa

SEQ ID NO: 26903 - DNA, 618 bp, Zea mays
  Peptide Sequence Number=SeqID_70278
atggctaccacccagggggtcgcccccttttttaaaggcgactctcctcactcgcgtcctcaggcatcacggactaagtcttcaccaacgcgctccaaggtccccccctacgacaccggggctgggtcccacacgacatgcaagctggcctgggacagaagcagccagaccgccgcgcgcggagcggcatgcaaccgcaccacgaggatgcaccccttcgacttcgacgcgtccagcatggagtcccagggccacacgtcatgtaactggcgcgccggttactacgtgcgaaaaactgcaccgccccttgcatcagtaccgcgccttctcgactacggagccgatgccgcgactcgaggcaaccctgcgcatggcccaactgtgccaaaccgagctcatcggtcatgggtcagtcagccgcgggagaaggggcgacagacgatatggccaaaagagagccctctcccacttcgtgaagacgacgtgcccgtgttccgttcctcgaacggctcacgcaacagctgccccgcgaaccacacgtcccgtcgcattaactccgcgacagggcaggcgacacctttggcaggcgaagcgggcgatgcttcacctccgccataa

SEQ ID NO: 26904 - DNA, 486 bp, Zea mays
  Peptide Sequence Number=SeqID_70279
atggggagcgcccgcgttgtcttcgtctcgttgtgggaggagcgcaacctcgtggagcttctgggggtggaaaccatcctccagctctacggaggaggcgccctccagccgtgccggggaaggcgaactgttgctgctcagccagggtgcaacattccgtcctttgtccgggcgacggtggccagccgcaccgggggggtctcacaacacgtcgtacgccgcgagggcggtactcgtgttccgggatggtcccattctcgttttcgtggcgaggacgggagtgaggacttgccggtgcgctttggggcgcccggcgcccgctggtgcggtgttggtgggcaggtggacgctgccaccggtgccgaggtggtggcagctggagaaagctttctccgccgtcgagaccgtcagcgccacccgcgggccgacctccgactctttggctttaatgtctggttctcgtccctcgagtggggacacgaatga

SEQ ID NO: 26905 - DNA, 387 bp, Zea mays
  Peptide Sequence Number=SeqID_70280
atgtccaagatagtgctcgacacaggcacttcgccaaacacaaaagaggcgagcagggtgctgatggagaggaaggaacagggcagccttgaggactcgacggcgatgaatggaggagcagagaaggagttcgactccatgatgctggccgtgagcaggttaggggaaggagcagagaagggagggaggacaccgacatttgggaggaggggtgcagtggagcaaagagctcttaggggccggcggccatggaagtcgcagggggcaccatgggaagctccgagtaggggggagaaaggagaggggcggctggagccaagggaggagacgcagggaatcctggacgccatgactgctggccggagctggagctcagtcgctgtttga

SEQ ID NO: 26906 - DNA, 312 bp, Zea mays
  Peptide Sequence Number=SeqID_70281
atggggaagcctgacccatcactcctcatgctcttcccctacagaggtagggtcccactcgactgtccaacccggtggcaagatggacggccaagtcactccagcaaccatatcctccaggaacctgtaaaaaattatgccacaagcaaggctgagtatactaatactcagctagacttacccgtgaccgcacttgtacccacaataaccggaatgggagaccacgtctcaggtcgtgtgaggagtaaagtctgcgggcaggttcactcaggtatccgcacgttaatccttattccaatttctgtctcgtaa

SEQ ID NO: 26907 - DNA, 372 bp, Zea mays
  Peptide Sequence Number=SeqID_70282
atgcccagttatgacttcgtcgagggcctcaacttctttttcaatatgttcacgggctccgggaatatcttcggaagaagggacgactcccaggggatcgccgcggaggtatggacttacattcgggccgttgagcacgccgggctcgagggctcggatgagtcggagtactccttggacgaggagaactcctcgggctcgtccgaggagggcggcggcggcgatggcggtgacagcgacgacgacggaggcgatggtgatggcgggggaggcgacagcaagagcggtgacgacgacggcaaaggtggtagtggcgacggcggtagcggcagcaagggcagcagcaggggcagcaacaaggccagtggctag

SEQ ID NO: 26908 - DNA, 219 bp, Zea mays
  Peptide Sequence Number=SeqID_70283
atggtgcgcgatcgtctccgagacaaccgccaaccccaagaggaggcagtcgaggccctcttccacaaagacaagggtgatgggaagaggaaggagggcgcccccgaggcgtccacccaatgcaacccaaataaggggaagaagaagaagacgcagcagggtccacccgagcccctcaccgtcgagctcgtcaccgcaatcgagaagcacaacccctga

SEQ ID NO: 26909 - DNA, 201 bp, Zea mays
  Peptide Sequence Number=SeqID_70284
atggcgaggtgcctgcaccgtcccgtggtgggcctccgcaccacagtccgcattccatcgcgaccagggagctcttgctacgaattctggatccttgatccatcattggacgatcgtgatcgactcggggttgctttagatctaggccgtaggtttgtgattgggcagtcttgcgctgtccacggattcataatgcactag

SEQ ID NO: 26910 - DNA, 315 bp, Zea mays
  Peptide Sequence Number=SeqID_70285
gttcatgcttcggaggtcagcattttgcactgttggacttcgaacttcattgggtgcatcgaaggcattttcacatttcttgctgctgcttgctatttcatctcctcttcttccttccactccaccatgggcaagagcaagaaaggtggtggctcttcgcatcactctggcgacaaacgcaagcgcgagccgactcctccctcggaggacttcggcgactcggagtactcggaggaggagttctcctccgagtccgagggctctccggctcctgcctctccctcgccgtcgtctgatgattcagacgactcctag

SEQ ID NO: 26911 - DNA, 132 bp, Zea mays
  Peptide Sequence Number=SeqID_70286
atgacgaagacagaaacaatattgaattacaaaaggtaccttcagcttgatggaaagcgaaactacaagcgtgacgcaaaaatgaatatcagtccgcgtgaacagtacggggtactgttcatctatttatag

SEQ ID NO: 26912 - DNA, 243 bp, Zea mays
  Peptide Sequence Number=SeqID_70287
atgtcgcagtctgaattcattatcttaaacaaattaatacagcgaggggctactgttggggggccttcgtcctccgaaggtcctcaaaaacgtaatttaacaatgtcttccaagtatggcttatggacaggtaccttcggattacatgatgagaagggcgcgatcgtgacaaaggttgctgatactttgaagctatgcgcaaaggagcttcggcacaatcacgggaaaaaggaaccgacttaa

SEQ ID NO: 26913 - DNA, 318 bp, Zea mays
  Peptide Sequence Number=SeqID_70288
atggttggtggtttccactctagaatatccttgaccttgctgggatcaaccgcaatcctatttgcagacaatacatgtcccaaaaattggatttcctctaaccaaaacgcgcatttgctgaatttagcatgttgggggccttcgtcctccgaaggtcctcaaaaacgtaatttaacaatgtcttccaagtatggcttatggactggtaccttcggattacacaatgagaagggcgtgatcgtgacgaaggttgctgatacttcgaagctatgcgcaaaggagcttcggctcaatcacgggaaaaaggaaccgacttaa

SEQ ID NO: 26914 - DNA, 246 bp, Zea mays
  Peptide Sequence Number=SeqID_70289
atgaggatggtatgggacgcccttggccaagtaattagggaagtcttatgttgggtgttggttttggtcaatgaggacggaggcatctgttatgctcttatattctcgctcagggatttaggtacgggtatcgttcccacagcttttcctgagggcggagggtatatgcttgggttgcctttggtgcaacctatgctcaggtggcataggatgtcgagggggctcaagtcctatggtcagcactga

SEQ ID NO: 26915 - DNA, 189 bp, Zea mays
  Peptide Sequence Number=SeqID_70290
atggagggaagtacgccaatgtctattggtcccaccgtcgcattcatggacgtttcggccacccacccctccacacaaactggcatcttcttgctccctgaaataataatttattacaagtgtaccttcggcttgaagggagataaggagtacaagcgtgacgcaaaagcaaatgccaagtcagcgtga

SEQ ID NO: 26916 - DNA, 150 bp, Zea mays
  Peptide Sequence Number=SeqID_70291
atggcgaagagatggggtcgtgggattggggacggttgtgccgcgcatgaagatgagggttgggtgaaggcaggccgcacgaacatggagaaccacccgagacaacagtacaataacaaggactatatggctctggtcttagccaattag

SEQ ID NO: 26917 - DNA, 753 bp, Zea mays
  Peptide Sequence Number=SeqID_70292
atgggtccaggcgtagggcacacatgcacaaagcggtatctggtgatctggaccgcgcgattgagatcggacagtcgaaatcaagcaccggaggggttaacggatgcgggtggtgccgctcttgctcacggcggtgcggtcaccggagctggggcaggtgtgggctacaacggttcagaggtcgccggggttggccaggatcaacgaggagaacccggtgaacacgctggtgggggagatgggagaacgatagagggagagctccgggcgggacgggggaaaaatcaagcacgggaatggatgtctctcctcgggacggagctcggggtggcttggcacgacgcggagaggctccggttggctggacatcgaaggatcacggtggcggcgaactctgacctgcgcagggaagaggttgagcgcgggccgggaagaggaattaaggaaaggggaaaccaccatgggttcctggtgcaccaagctcaggcaaagctcactgtgggcaaagcgctggcagaagtccagcggcgacggcggaatggcgaaggaacagtgaggggaagcgatgtcgtggctggtgcaagggcgacgtgggcgaggcgtgtagacgtgggtgcgagtctggcgggcagggcgcacaccatgggtgcgacggttgcggaggaagagggcgggtctgacgggcagggcccacgagccagcgagagcgggtacgagcaagcgcgcaacagtgctgacggggcagtccactag

SEQ ID NO: 26918 - DNA, 660 bp, Zea mays
  Peptide Sequence Number=SeqID_70293
atggtgacctccagcttgatggtgggggaaagcgagccgggctgcggcctctacccctccctcaacctcaaggattttcatcaccagggctggggaggggactgcaccgtgcctggctctcggacgcgagtggcttcggagccgctcgcggcgccggtgtctaccacggcagctggaagaggttcttccgccggcgagatagccaaggccggccacggaccgacctccaactctgcggccttctgcccgtccttgcctcacaagtttgggcatgggcggaggcctcctggcagcagcatccgccctgaggtcagtgctgccgctgttcggccccccggagcagaagtcgtcgtcgtcgccgctgctggagcgggtgacggcgcgccgttcgtcggtcttctattcctccgcaggctcacccctatcgagtggggttgttcgtacctgcggagggggaaccagagttccgtttgtaatggcactttgaatgccaactcgcctgttgattatctgaaccgctttaccaagcatgagtcgccccatgtcaaggtgacgagtgagagtggggatccctggaccgcgtcgccgtccgaggctaggtcggacctcgctgaaggtgtcgtcgatgccgagggtgccactgcccccttccagcgttaa

SEQ ID NO: 26919 - DNA, 342 bp, Zea mays
  Peptide Sequence Number=SeqID_70294
atggcgacttcctcaggaccaaaggaggcgccagcgaataaccctgggctccagaccgaggtcgaccccgccaccaaaggctacttcttgcaacaaacgatgttacgtgtgaaggacccaaaagtgagccttgacttctactcacgtgtgatgggcatgtcaaatcagcaagctgcgcttccgaaggcacatattgaagatcaatggtcttctgatgacaatgagaccaagtggatgatacatcaacaccaatgtgttctgtggtttagaagagtaagaaggcatggaagtggaaggaggtgcgatgggaatggggacatcgggcgtggctacacgggttga

SEQ ID NO: 26920 - DNA, 291 bp, Zea mays
  Peptide Sequence Number=SeqID_70295
atggggttctgggacacactggtgtttagcgggctcgtgccgaagcagatcaacgggtggttggcgatggtgggcttcgtgtccacgctcgccatcaaggctacccacgccgatggcatcccatcgcaagtcggcagggttcatgaccgcgcgacgccaagctctggaacgacctcctcgacatgctcgggctcgtcggtcacccacgcatcgcatgcatctaggcggaaaatcagatggatacgtggagagtggctagtggccctccgttgcgcagggactacctgctag

SEQ ID NO: 26921 - DNA, 174 bp, Zea mays
  Peptide Sequence Number=SeqID_70296
atggcttcaaaccgcaccgtggacctacctcgccgtccctcgatcaccgattgtttacatgtttgttgtgatgttaatttcccctttatattgtacttgtttgtattatggcgagtagaagagcctgtgaccgaggatcctggcgaccaccagatagaagtagctgagcagtag

SEQ ID NO: 26922 - DNA, 345 bp, Zea mays
  Peptide Sequence Number=SeqID_70297
atggaggaactcgatgaaaatcctttcctaaatgcatgtaggagaaaatatgagaacaacgaataccaagttaagtttcactttcatggtactattgttctatctcatgccagtccaacaaacacggcaaccccaatctctccgaggaatagctctgtgctttggcgtcaactttgcaaggctctgatactcccatatgtgtgctatctctccatcaagaagggtgcaatacctttatgggagatcatcctatgcgtaatcatcataatgattggcgtcgtatgcgcatacatctggtcatacacctcaaacagtcggatgtttttcacagatagtgcacgctag

SEQ ID NO: 26923 - DNA, 291 bp, Zea mays
  Peptide Sequence Number=SeqID_70298
atggaagatttgggatcgagcgaagctaagcttttcatcgagatggcgcttcctccagtagttgttgaggatgatgaagcttatgagatactcttctgcgtgtatggatgcccatcaccaaatatagaagctttcttaccactttgtaggcgtctaacctcagttcttctgttactgctttcagtaatgtctgtctctgccaaaaagggttgtttatgtctctcatcgcaatatttactagcaggagcttttgaagagcttaaagatgagtccctagagactgatgaatga

SEQ ID NO: 26924 - DNA, 204 bp, Zea mays
  Peptide Sequence Number=SeqID_70299
atggaagggggctgcggtgagcggggtgaggatggcggggacagacgcggaggttcccaggaatggcaccttccatcgatggaagggggcggatggggcgtgacgccggaggtggccgccgaggatccctggaatggcgtgacggagagcggacgtgggggtgagaatggagggggcaggggaacagtgagcgggcgcgggtga

SEQ ID NO: 26925 - DNA, 342 bp, Zea mays
  Peptide Sequence Number=SeqID_70300
atggcggtcctgcaagggattcctgcattggagcttcctataaactgtagcgggaaaggaaagattatcacgcaacagcaaacagaaatgaatcctccaaatcctccacctgttgaaatcgatcaagtggttgctgcccaaagactggtaatacaacaattaacagacctggtgaccgaaatgcaaaatcagataagacaagaacgcgaggaaatacgtcaggtccgccaagaaataaggcaagcgcggttggagagacaacaacaacaacaatctccaccaccaccaccaccagctccaccaagctacataaacatatatataaattactactatttgtaa

SEQ ID NO: 26926 - DNA, 444 bp, Zea mays
  Peptide Sequence Number=SeqID_70301
atggcgccgccggagtaccagcagtacctcgtgcaggtgaccaagtaccaggccgcacagaactgcaaggctaggggattgaagaagcacttgaagaggctcaatgcgcccaagcattggatgctcgacaagcttggcggagcttttttcatgctctgcaaggtgaggtctgttcagtttggccagaaaggtatcccctacctgaacacctacgatgatcgcaccatccgctaccccgacccgctcatcaaggccaacgacaccatcaagatcgatctagagaccaacaagatcatggacttcatcaagtttgacgtcggcaacgtggtcatggtgaccggcgggaggaacaccgggcgtgtaggagtgatcaagaacagggagaagcacaagggcagcttcgagaccatccacgtgctgcttggagctttttgctatgtctag

SEQ ID NO: 26927 - DNA, 432 bp, Zea mays
  Peptide Sequence Number=SeqID_70302
atgaacacgggtgttcccgacgatctaacgcggtttagcttaattgaatgggtcgaggagcatcaggagaatctaaggacactgaaacgggaaagcatagagcatgaacggacctggaacgagctagccacggcgatcaccggagagaagggggtgcactggcacaagcgattggtggcatttaccgtggcaagctcaccggcgatcaccggatgggctaagatgactcacggcggcatggttaaagccctgaggcacatggcgcaaggttgtgaggtggataactctggcgagcctatccaaagcggctgtgacttaggcggaactacagagctccaaagtcagccatgttcactaattctcagacttagccacatgaggggtgtagagtggctttttgcaaataagcccaaatctcatggtttgatttga

SEQ ID NO: 26928 - DNA, 279 bp, Zea mays
  Peptide Sequence Number=SeqID_70303
atggcggcgcaagggcaggcggcggctggatccgcgtccgagtctggcggctcaccggctgcctcagctgctgcagcggcggcggctgcgttcccggcgacttctctctacgtgggtgacctgcacgagagcgttcaggacgcacagctcttcgacgtcttcagccaggtcggcggcgtcgtctccgtgcgcgtctgcagagacatcaactcccgcaagtcgctcggctacgcctacgtcaactacaacaacactagcgacgtggcagttaggctttag

SEQ ID NO: 26929 - DNA, 276 bp, Zea mays
  Peptide Sequence Number=SeqID_70304
atggagcagatcgacggtttcagcggtttggacgagatgggcgcagggactaatcttcctggcgatgatgacggtgttcggcgtgacgagctaggcatagaggctctgtcgacgtcgaggcagtatcttcggaatcaggaatcaggttgcgggtatacagaagcatggtcaagacgaagcttgactaggatggtgatcacgacgaaggataagatgatcacgaagctatatgcagaagagcttcggcatcacaacgggaaggggaaaccgacttaa

SEQ ID NO: 26930 - DNA, 186 bp, Zea mays
  Peptide Sequence Number=SeqID_70305
atggcgggcggaaatacgctcgccggagctaaggaacggtggctggccgatgagggtgagtgcggggcgaagagagatgttgcagatgaagatatgatgctgaactccatggatgctagtctagtgataccctcggtcatcttcctatggatggatgtccttgtttcgctgtactttgatgaataa

SEQ ID NO: 26931 - DNA, 306 bp, Zea mays
  Peptide Sequence Number=SeqID_70306
atgcacctgacatgtccgatgggccaagcagccaacgtctcttcgccagcgtcaatgatcgacaccgtgatcaacatagcacgacggaaaggaaaaactggctggccaagggggctcaccggtggcgagggaagcataggagcgcaggccatggcatcccaggcgtccgccatgcccgagggcggcctcggcctagccggaagtgacccgaccaggcctggccacgaccaccggcggcgctgctcggtcgatgacggcgactgggcccatccggctacggtcttgcccggaaaactagtgccctaa

SEQ ID NO: 26932 - DNA, 327 bp, Zea mays
  Peptide Sequence Number=SeqID_70307
atgggtagggtacttgccaacgatgggcgcgacggtgaggttgactacggcaattggcggcttcccctcagcggtagttttgcggcacgaagcttggcggccagtggtcgcggcccacacatggtgaggctgagagatcactacaaggctccgaaccaagccccctgggcgcggcaccaagaacgaggaggtgatggacgtgaggtgctgctacgacggcaatccagcgaagaccactacggcgtgcgcacagactgtaggaaggaacagggaggctgtggccatggatttatacccagatttccaatcaacatgatcctaatgtga

SEQ ID NO: 26933 - DNA, 267 bp, Zea mays
  Peptide Sequence Number=SeqID_70308
atggcgcccgaggccggacttggccgctgtcagcctcactctgtcgagtggcacaacagtcggagcggcgcaggcggcgctgtcctcttgtcaggccggttacgcccgaagcgggtggtagtgggtctgatcccacagcaggaaaggttaattcccgtcggttttgtaactcccatcggccatatctgcccgacaggaataattcgaataattcccatgggccagatatggccgacgggagttatagaaccgacaagaattaactga

SEQ ID NO: 26934 - DNA, 1098 bp, Zea mays
  Peptide Sequence Number=SeqID_70309
atgcaggcggcatgcaaccgcaccaagtgggcgcaccctttcgactccaacgcgtccagcatgggggcccaggcccacacgtcatgcaaccggcgcgccggttgctacgtgcaagaaactgcaccgccactcgcgccactaccgtgcctcctcgactgtggaaccagtaccgcgactcgaggcaaccctgcgtatgacccaacagtgccaaccaggcacgtcggtcacgggacaggcggcgcctttggcaggcgaagcaggcgacgcttcacctccgccataatgaccgcgtccaaaaagggaccgggaaagggggataccccgaaagggatccttctcagcgaaggaaacgggccccgagcccccctactgatcagaggttcgaaggctggcccctcggaggggttcaacagtcgcctcagagcgctcgggctccgcgcccactactggtcagaggttcgaaggccgacccctcggaagggttcaacggccgcctcaggccactcgggctccgcgcccactactgatcaggggttcgtaggttggccctcgaagggttcgacagccgcctcagacgcagagcgagggatgaccctggcgaccaagtccggcctcgggcgccataggaagctccgcctcgcccgaccccagggctcgaaatcgggctcagccccgaaagacgacgaactccgcctcgcccgatcccagggctcatactcgggctcggccctggaagacgacgaactccgcctcgcccgaccccaggccttggactcgggctcggccccggaagacgacgaactctgcctcgcccgaccccagggctcggactcagccctggcctcagccgacggtctccacctcgcccgacccaggggctcaaactcgacctcggactcggaagacagactcgacctcgacctcggaggagcctccgcctcgcccaacccagggctcggaccgaccacgtcacaggaggcgccatcattaccctaccccaagctaactcaggctacggggaacaagaccggcgtcccatctggctcgccccggctccagcgctcctccgacggccacgacaccacacgaacagggtga

SEQ ID NO: 26935 - DNA, 771 bp, Zea mays
  Peptide Sequence Number=SeqID_70310
atgtcttcgcgctcccttatgcatcacctctttccaccttccaagcccccggatgggggacactcgcagttcttccgccttgtcgttggtggaacgcaacttcgcggaagttggcacctttcagccatcgttcggcttcaaggattttcatcaggcagcctagccgcatcccctcgccggtggtcccccaagacggtgaccaccagttcgatggtggggagaagcgagccggactgcgatcttggtcccacccttagcttcaaggatcttcatcatccttgctggggcggaggccgggctgagccggagctctacctcccgtgcgggttcatgggtcaccttctccctcagcattcaagggagagggcgctcaccggcctagcgggagggtcggacatcgacaacgtggggctggtcggaggcgagcgtcgtcagcttcagcgcattgggctcgctggctcagctggctctggctcggctctcggtgccccctcccgccgcaagagcggtagtcgcgccgcgcgcaccggaggaccgcccaagacgtcacgcgctgctagggcggcgttcgtgttctggggctgtcctgcctttgccccagtacgacgtctctgcgcggaggtcgatgctccgctcgtccgagaggatccgagtggggatctgccggtgggcagacagacggcttccgtcgtcggtgctgaggtggtggcggctgaagaagtcctcgtcgccgacgggatcactgccaccatccgcgctccgggcctctga

SEQ ID NO: 26936 - DNA, 195 bp, Zea mays
  Peptide Sequence Number=SeqID_70311
atgggcgtgacggcggggttgactacggtggcggccatcgagcgagccggagtgagccgcgagatccgtggtggtttggtgaaacacccgctcgcgaatgagcgtgacctgtggaggctgctgcggagtttagttagggaggatagggatgaacctgactacgagggcccaccagcagatttccaatcaacatga

SEQ ID NO: 26937 - DNA, 744 bp, Zea mays
  Peptide Sequence Number=SeqID_70312
atggcggcggaagcgccaccgtcggcttcggcgtcttcttcctcggccccgcggccgcctgccgcggcggcctctgcctccggcggcggggcggccgggtccgcggagtcgtacatcgggagcctcattagcctgacttcgaagagcgagatcaggtacgagggcgtcctttacaaaatcaacaccgaggagtccagcatcggcctgcgcaatggtaactgctttctcttctctagcgcactcgctccgcatccgctgctgtcattttcctcagatgcgaatgttccagacctagatttgctggtccctgtgcggtcctttgggaccgaaggtcggaagaaagatggaatgcagattcctgctagcgacaaagtatacgagtatatcctctttcggggaactgatatcaaggatttgcaagttaagtcatcaccaccgccgccgccacctcaagcagcttccctgcacaatgaccctgccataatccagtcacattattctcaaccagcatcaacatcgtcaaatttgccttccgctgggggtgcagttttaccagacctcagctcccaggcagttcaatatgggcttcagaggccaacttttcagagtaaccttcctctataccaaccagggaatgctccacggggctcttcagcggcacctccagcaggaaatgctccgtggggctcttcagcagacctccagcaggaacgacactttcggttccctcatgtactggcatga

SEQ ID NO: 26938 - DNA, 837 bp, Zea mays
  Peptide Sequence Number=SeqID_70313
atggcggcagcggggcggactccgaatttctgcggcggccaagtcgaagacacaggcggcgcccggagaggcgctagcggaggcagccgggtcccgcggctagctgcgcgagtacgtggatcgcctcgcgtcctcggcctcctccctctccgagcggtggagcgcgcggtggagccagagacaccacagccgcaaccagagcaacctcgcgagattggggccagaacaatagctctatttgctatggaactacctgtaagtcccggatccaagatgcacccctacctcaggaaccttatggtgctcgggctcagctttcggcaggatcataatatcatcaccaatcaagcgctgaagcggcatagtgtcgatcctgaatggtggatgtgccctgccatacctgtgaaagacattaccccggcaccaccgccttcagtggcaatggcgaaggtgacagacaagaagaagactaagaagaagtcactggggacaatatacgaggaggggagtcctgagcctgccaatggcgacgacgatggagctttggcactgccagagacaggattggggcttagcttgaatactgacggggtgctcaaggcgtggtgtggcagaggctctgcgtttgctgatggcaatgggcctgacttgccattgtcccctgctcatgtgataggtcttagattattcaacattgatatgattagggagcaccccctccttgtcaagcaactcacaccattacaagatctacacgacatgacatctgcatcgccaaggcctcgctcaactcagcgcgcaaaattaggtgttgactgtcgatacctggagatgtga

SEQ ID NO: 26939 - DNA, 732 bp, Zea mays
  Peptide Sequence Number=SeqID_70314
atgcctttaaatatagatattgcactattcaagctagacattgatgagctaatagctgattatgccaagctgaagatcatacttgctgtggagcctttgaccccttcagagggaccaaggattggagagaacattttcggttacacgatagtggacatcttcagtagcagctgccgtggccaccataagaatcctccttcagagccatatgtccttgaggttaacagggacgtatcattttataatttcagaacaaagcaggttcatgaatttaccgcaaggttgctagatattcatgataagatgatgttgataaataataaagagacattagatttttcgtttcaggtggttggcaatgcagtgatgctcggtgaaatcataaactacgtgcagtccctacaacgacaagttgagtttatgtccatgaaactggccaccgtgaatccccaggtggacttaaatagcctgcctaacgtcctccctaaagattcttgtggtccgccacatttctcgctggagacctcaggcgcttcgttgtcgtacctcagccagcctcaccatggaagccctcttggctgcatggacaaccagagttgtatgcatccacttgacacgacgttttgcctggcgataaatctgcagtatcatttcctcaacggtgttagcgatgcatcgtctcagacctccatggaatccaaggaagaacattacccaagcatgaccaactaa

SEQ ID NO: 26940 - DNA, 237 bp, Zea mays
  Peptide Sequence Number=SeqID_70315
atggtgatcaaggtaaagttagaaaggaatcttcatatgctggtggatttttttgagcctaaaatgggtctatatgacaattcgggaacattcctcggtgctaatgaagactcaactagaacccttgcagaaatcgagaagaagattgcaagggctaccgtgttacccagaaatcatggggagccattccaaactcctccacctggtcccttggtctccatcaggaagccaccatag

SEQ ID NO: 26941 - DNA, 225 bp, Zea mays
  Peptide Sequence Number=SeqID_70316
atggctgttgggtgtttgctaggcttggagcttcgtttggatcacgacgcaccagcttggggacctcggcgggtggagattggatcagctgggtggtggattgctcgccgggtaggatccccgggtggtcacgatgagcgcatcgccggcatggctccaccaaggcctgcggcagcgctgcctcagatcccgaccgttgatctgactgctggcgccccagattaa

SEQ ID NO: 26942 - DNA, 405 bp, Zea mays
  Peptide Sequence Number=SeqID_70317
atggcggtggaactcccccgcttgatgctgagctcccaccgacgtcgagttctcgtcaatggggaagaggaaggggaagacccgcaacgtttttatagggccaagtcgaatccgcgtcgaggggaagatgcgaatctcagaagcggatttgcggagctaaccacggagatggcgaaatgttggttggggaagaagaagatcctaccggagcgggaccaccagtcagtcgccacgaaggaaacaggtttggttgtgcggtttgaccggtgggtcccacgtgacacacggacgagcggcgcgggcgtcaagctcccaggaatcgcgtggcgtggggaaagagatgaagatgatgtaaatgtggacattactcgacaacccatcacactcaatcaaagatccaaataa

SEQ ID NO: 26943 - DNA, 333 bp, Zea mays
  Peptide Sequence Number=SeqID_70318
atggccaagggcatcttaccggcaatgacgtcgcagaggagtcgggctacagcgcgagcaggttctacgacggggcagcaagtgcggcgaggaattccccccagtccggatgcaatcctcgccagaaagagccccggaccgatgcgaggtgacctagcaacacacctcgactgcttggtgagtcccgaagtggtggcgcaggcgagttccacggtggcggcacattgcagggcggtgcgagcgcggaagataggaaacaggggagaggtagctgcgagagggttaaatacttccgggatggcgcggccccggcgtgatattcgcggaaaatag

SEQ ID NO: 26944 - DNA, 717 bp, Zea mays
  Peptide Sequence Number=SeqID_70319
atgccgcgccttctcgactgcggaaccagtgccgcgactcgaggcaaccctgcgcgtggcccaacagtgccagttgagcgcatcgatcacggggaccgggaaaggggatactccgaaagggatcattctccgcgaaggaagcgggccccgagccctcctactgatcaggggtttgaaggttggcccctcggaagggttcgacagccgccccagagcactcgggcttcaggctcattactgatcagaggttcgaaggctggcccctggatgggttcgacagccgcctcagagcactcgggctccgcgcccactactgatcaggggttcgaaggttggcccctcgaagggttcgacagccgccctagagcatgtatagcaagggatgactctgggagcattcgatgcaaggatcgcctgacaccttatcctgatgcacgttcctcagtcggcagggccgaagtgaccgcagtcacttcgccctttccactgaccgacctgacaggaaaacagcgccgcctgccccgctccgactgctgtgccacccgccagggtgaggctgacaacagggaactaagtgcttttggatttgtcaaattttgctaccttgaggatgctacagttgccaagcgcgagatgaatcatcaagtcattggtggtcgagaaatttcaatagtttatgcgaggagaatcgaaaaacgccacaagaaatgtgcatga

SEQ ID NO: 26945 - DNA, 768 bp, Zea mays
  Peptide Sequence Number=SeqID_70320
atgggtgcattaattgttggtgccaaatatcgtggagagtttgaggatagacccaaggttgttctcaaagaagttacagattctgatgggcagaccattcttttcattgatgagattcacaaagttgttggagcagtgcatataagagatgggctccgagagttgagtgtttggagagtttgtgagggctgtggaatgtcgaaggtgaagaacaataatggttatcatggagtcactgagccaatctcgctgagtgggccgactgagaagtaccttatgcagacagttgaggttgaaaagtacctttcagatgcacgactctatgagaggcaagatgaggctatcttgcgagaagaggttttaggcaagctggaccagactgtgaaagcttggattaagaaggctactaggatcagcgggtatggggagcaatttgttcatgaagcaaatgcaaagatctttacatttggttcataccgtcttgggtggcttaaaggaactgctctgaatatggtgtgtaatctattgcacaggtacatggccctggtgccgacattgacaccctatgtgttggtccaagaccatgcaactcaaaacctgagatgccagaagtttctgagttacatccagtaccagatgctcatgtgcctgttctgggattcaaaaattaatggggtctcaattgaccttgtgtatgctaatcttgctcatgcagcgattcctgagaaggcatgtgcttatgaacataaggagtatttagcaatgtga

SEQ ID NO: 26946 - DNA, 81 bp, Zea mays
  Peptide Sequence Number=SeqID_70321
atggcgaagctccctggaaggtaccttcggcatgtaccttcacgctatgtttgcttctatgctgatcttccgaaggtttaa

SEQ ID NO: 26947 - DNA, 399 bp, Zea mays
  Peptide Sequence Number=SeqID_70322
atgcagaacatgacgaagatacaaaaagttgttcctaagggatcacatcgcttcgatgagtataaaagaagcaaagttatgcttcgttgtgtacgaaaagaagggaaggtgtttttcgtcttcggctcaaaaaatacaagtttcgtccacatcaaagcagttcatacatggatggaaagagcttttttgcagcatcttcatcagtatccgtcaagcttcggatcatcgatctttggcttcgtcatcctgtacataacaaagcggtataaggtaaatagaaatctcaggagaaggctggggatgtcagttaaatccgctggtgataggctgaagtttggtctgtttacggtcttcccatgcgtgcaaccagtcttcatgaaagcaatagctgtgtcgtga

SEQ ID NO: 26948 - DNA, 780 bp, Zea mays
  Peptide Sequence Number=SeqID_70323
atggccaagaaggttaagtgttgtactttcttttcctatatgagttttttccttgaaggtcaaggctccgtctactcaaggaacgcgatctcgcctcgcccgagcccagcctcgggcaggaacaatagtcccaggcgaattcacgcctcgcccgagggcctcctcaagcaacgggcgcaccctcgactcgcccgaggcccagctcgggtaggcttagcagtgaagcaaccttggccagatcgcctcgccaaccgaccgtatcgcaggagcattcaatggaaggatcgcctgacaccttatcctgacgcacgttcctcagtcggcagggccgaagtgaccgcagtcacttcgccctttccactgaccgacctgacagaaaacattgccgcctgccccgctccgactgctgtgccacccgccagggtgaggctgacaacagctaagtccagcctcaggcgcaacaggaagctctgcctcacccgaccttgggcctcggcctcagaaggaggtctctgcctcgcccgacctcagggctcggcccccgcctcggcctcagaaggtggtctccgcctcgcccgaccccagggctcggcctcaacctcggcctcggaggatggtctccgcctcgcccgaccccagggctcggcctcaacctcaacctcagaaggaatcgcgtcctcaccccaccctggcctcggcctcaggaggagtctccgcctcgcccgaccttgggctcggaccgaccacgccacagggggtacatcattaccctacccctag

SEQ ID NO: 26949 - DNA, 786 bp, Zea mays
  Peptide Sequence Number=SeqID_70324
atgctggatgtgtcgaagtcgaaggggtgcgtccccgcggtgcggttgcacgccacctacatggcggtccgccctatcaaccgctggatggtgaccaccggttcaatggtggggagaagcaagccgggctgcggcttctgccccgccctcagcttcaaggatcttcatcatccttgctgcggcggggggcgagctgagccagagctctacctcccgcacgggctggtgggccacctcttccttcagcattcaggggagagggcgctcattggcctagcggaggggcggactttgacaacgcggggctggtcggccgcaagcgtcgtcagctccagcatgcctggctcgctagctcagttggctctggcgctgcttccggtgccacctcccaccgctggggtggggcgcggctgcccgcccaccgtacgggcggctgttgcgccgctggggggccactcgtggatagacctctggctctttggctttgacggcttgtcctcgcccctcgtgttgggacgtgggcgagggccttcccacagcagcatttgccctgagttacggaaccctcggctgctctgcgatgggctggagccggaggcagcggtgtcagtatggacagaggcggagtcgactcaaaaaggggcttcgtcagcccaggagcaggtggcttcccaggccgaggaggtggagatccttccgcccgtgtcaccatccgaggccgggccagatcccgccgaaggtggaaacaacgccgagggtgctggtgttccctctgtcgatgtctga

SEQ ID NO: 26950 - DNA, 798 bp, Zea mays
  Peptide Sequence Number=SeqID_70325
atggcggtaccgcaagcacgaggaatggaatatactttcccaaaattccgcaagcttcccacgcggcgcggccaccccacgttcccacccatcccccctccgaaaagcacaacgccacaacccgctcactcgcaaagtcgcaacgcgccccacgaggccacgacgcacgagcgcgcgctccgggcgttcgggaactcgaacgcgccggtgggagaggagaaccgcaccgcggcgcagacatgggcgagtactgcccctccccgcagggggactccgcgctggcggcgccgccccttgacgctcccctcctcgtccccagcgacggcggttaggccaagctacgggagctgcgaccgcagctacgtgaagcaggtcttcgacaacctccacggcagcatctccgtagacccgggagtagagcttggaattgatcctgtcgacatgcagactgtaaaacttgcaggttggtctacaaatccagggtcccatgaaaagatgtcagtgctccttttggacagtattgttgacaaacatgcaatagatattgaaaatgattacctcaaaatggtcaagagtgcaaaggagaaacattttctttatgacattgtcgctaatggtcgcaatggtatagatgttgacaagtttgactacattggccgtgactgcagagcatgtggtcttggatccgacacacagagtcgagagggcgggaggtacgctgcttctgcggtcgttcctcctgattgcgactcgggttgtggggttctaggtgtgtcagatggcttgacctggaactag

SEQ ID NO: 26951 - DNA, 129 bp, Zea mays
  Peptide Sequence Number=SeqID_70326
atgtcgtgcgcgttcgacgactactatatcaaggactatggcgtcatcttggcaccagagctatttctcgagaggacgacagagaatggtgatccacaatcgcttacaaatgcaccacataaagactag

SEQ ID NO: 26952 - DNA, 753 bp, Zea mays
  Peptide Sequence Number=SeqID_70327
atggccggcaaacgggcagcaaacaatgcggctacgggtgctggcggcggcgacttgagcatccataaattgttttcaacacgtgctgatctgcaccgaacagtctacacccatgccaaagtgaaggctgttgaactcatgctcgtggatgcccttgttgaggctaatgattacttggggatatcattgcatgcacatgatccagaagatttttggaagagtatcttacattccctgaaattacagttggatgacacaatcattaaaacaattgagactgctcctaacaatgaactgaagaaagcaaaagaaatcattcaacgtattcgccgaagagaactctacaagttttgcaaccagtattctgttccaaaggacaagctggagcatttcaaaaatattactgcacaggacatagtttgttcacagaaatcttctgaggtgctgctgaaggaagaggatgttgcagtatgcaatgttaagatagatcttactcgtggaaaatataaccccctcgaaagtttttcacagaatgtagattttggttgcgatgagaagttcccgatcatagatgatagagtcagccacttgctacctgcgtacaatgaggatagaattgtgagggtctatgccaagaaccctgagttggttgatgtggtgtcagaagccttcgagaatctccaaatgagaatgtatggtgagaagactcaagtgcacgagacgcccaagaaaaagaagattaggtccaactag

SEQ ID NO: 26953 - DNA, 540 bp, Zea mays
  Peptide Sequence Number=SeqID_70328
atgcacatgaaagtctttggcaaagctattgtgaaattgctgttttcacagtcagtaacaacattcactgaagaatttgatttcacggccatgaatgagaagtttaacaaagatgaagtctggggtcatcttggaaagaaatcgcagtcaagggacaaggatggtgaggtgggagatgatgtgtttgatgaagacctggaggttgaggaaactgataacccagagctatctgttaagcctgtttatgtcaaggatgatttttttgattccctctctagtggaacatttggacgtggaggaccaaatggaaggggtagaccttctgaacggcgcagagtagatacagagacttttggcgaatttccacggcacaggcaaccctaccgtggtggcgcccgaggttaccgtggcggtggacgttcccgaggttcatattatggtggcagaggctatggaaacacagggaccggaggctatggaaacacagggacaggtggccctggaaattcttattctcaccggggctatgggagagattga

SEQ ID NO: 26954 - DNA, 993 bp, Zea mays
  Peptide Sequence Number=SeqID_70329
atgaccgcgtcaaaaaagggaccggaaaagggggataccccgaaaaggatccttccccgtgaaggaaccaggctccgagcctccctactgatcagaggttcgaaggctggcccctcggaagggttcaacagccgcctcagagcacgtgggctccacacccactactggtcagaggttcgaaggccggcccctcggaagggttcaacggccgcctcaggctactcgggctccgcgcccactactgatcaggggttcgaaggctggcccccgaaggctcaccggagacaccatgttcggcgcccaccgagggcaacatggtgctttccccccctcctccttgcggaaaggcgacgcaggggcatatgtaaaaaagtcgagtctgtccttgatcgccctctcgccctgtgcagaggctcgggggctgctctcgcaaacccggctccggccaaaccattgacagcgtcaacataccagcccgagaaacttgggacccgaccgtacacccgggctacggccagctcgcatgaggggacgaccagaccagccgaagcattacgcgaggcattaagacctcggaggagtcaaaccactcctccgaggcctcgggggctacacccggcgggtgcgctcgcgcgcacccaccggaacaaaacgcaaccaagaaaggctggtccccttgcaaaaaagtgcgacgaaagcctccaagcgagtgctaacacacccttcgaggctcgggggctactgtcggggaccataattaggggtaccctcaaggctcctaattctcagctggtaacccccatcagcataaagctgcaaaggcctgatgggcaccataggaagctccgctccgcccgacctagggctcggactcgggctaagccccggaagacggcgaactccgctccgcccgacccagggctcggactcgggctaagccccggaagacggcgaactccgctccgcccgacccagggctcggacttgggctaa

SEQ ID NO: 26955 - DNA, 471 bp, Zea mays
  Peptide Sequence Number=SeqID_70330
atggggctcggtgtatgcggctcgctctgccaagtttgggttcgccccttggggaggagtgcggtgcatttaggaaacctaacaggtattgttagggggtttgatcccgctgaaggagggaagcataacgttgacgttagtgcacaacctacctctgccaatagttttgactctaatatatcagccgtgctcgcggttatgagcggccaagggacctccggaaatgattggtacttgatcagagacattgtggtacaggtggttatgagattgatggttttggttatgactatggtgctggttgtcagcattgcaaccactgctcaggcgaagatgaagctgtggaaggagacttccaggagttccaagattacgacgagttctaggtgtgggttagcggcaacccccagtcggctgcctgtgaaggccgcggttatctacgtttcttttccgcactttgatttattgtaa

SEQ ID NO: 26956 - DNA, 921 bp, Zea mays
  Peptide Sequence Number=SeqID_70331
atgacgtctgctgctgctgccgcggcgccatgggttagcgtctgcagcttcttgctctgcttggcggccttccagggagctgaaggcgcgattggcgtgaactacggcatggtcgccaacaacctgccggcgccggagcaggtcgtctccatgtacaaggccaagaacatcagctacgtgcggctcttccacccggacacggacgcgttgaacgcgctccgcggctccggcgtcggcgtcgtcctgggcacgctgaacgaggacctcccgcgcctggcgtccgacccgtccttcgccgcgtcgtgggtggccacgaacgtgcagcccttcgccggcgccgtccagttccggtacatcaacgccggcaacgaggtcatcccgggggacgccgcggcgcgggtgctcccggccatgcagaacctggagtcggcgctccggtccgcgggggtcacgggcgtccccgtcaccacggccgtggccaccagcgtgctcggcgcctcgtacccgccgtcccagggcgcattctccgaggcggccgcgtcggtgatggcgcccatcgtctcgtacctgtcgtcgaagggcgcgccgctgctggtcaacgtatacccgtacttcgcctactcgagcagcggcgggcagaaagccggggtccaggggctggagctggtggtgtcggagaccggctggccgtcggccggcggcgagggcgccaccgtggagaatgccgcggcgtacaacaacaacgtggtgcggcacgtcggcggcggtaccccgcgccggccagggaaggccgtggagacgtaccttttcgccatgttcaacgagaacggcaaggccgagggcgtggagcagcacttcggcctcttccagccggacatgagcgaggtctaccacgtcgacttcacggcgggatccccctag

SEQ ID NO: 26957 - DNA, 1161 bp, Zea mays
  Peptide Sequence Number=SeqID_70332
atggcgtccgcggccgcccctccaacctccctctccctcgcggcccgcgcggccaccagggcagccgccgccgccgccgccccgctgcgcaggggaggcctcgccacggcgtgccagccggcacggtctctggctttcgcggcgggcgacgcgcggctcgcggtccacgtcgcgtcgcgatgccggcaggcgttctccgggcgtggcacgcgggccatggccaccatggcgaagaagagcgtaggggaactcacggaggccgacctcgaggggaagcgcgtcttcgtgcgcgccgacctcaacgtgccgctcgacgagaaccagaacatcaccgacgacacccgcatccgggccgccatccccaccatccagtacatcctcagcaagggcgccaaggtcatcctctcaagccacttgggtcgccctaagggttttacacccaagtttagcttagctccccttgtaggacggttgtctgagcttcttggcattcaggtgcaaaaagccgacgatgttattggccctgaagttgagaagctggtggcggccttgcccaacggtggggttctgctgcttgagaacgaactcgactaccttgtcggagctgtttcaagccctaaacgcccttttgctgccatcgtgggtggttcaaaggtgtcatccaagatcggggttattgagtccctgttggagaagtgtgatatccttctcttgggtggtggtatgatcttcacgttttacaaggcacaaggtctccctgttggtgcttcattggtcgaggaagacaaactcgagcttgcaacgtctctacttgcaaaggctaaggaaaagggtgtctcccttatgctgccaaccgatgttgtcattgctgacaagtttgcccctgatgctaacagccagattgttccagcatctgcaattcctgatggttggatgggcctggatattggcccagattctgtcgcttcattcaacgcagccctggatacaaccaagacggtcatctggaacgggcccatgggtgtcttcgaatttgacaagttcgctgtaggaaccgaggctgtggcaaagaagctggcagaactcagcggcaagggcgtcacaactatcatcggaggcggagactccgtcgccgccgtcgagaagagaagcaaactctag

SEQ ID NO: 26958 - DNA, 246 bp, Zea mays
  Peptide Sequence Number=SeqID_70333
atggatggcgacgtgtgggggctcggtggcttcgttttcccctgtcctctgtgtgatctgggatcgccgtcccttctcagtcccacatttccgaaactcgccgcactggaagaagaagctgcggctgtcgtttttttcaatcccacccaattcaagatcaaaacgaacaagccagcgctgggttctattctgcttagtgctggtcaagccgctgctgtggcagagtccgagatcagaccattgtga

SEQ ID NO: 26959 - DNA, 294 bp, Zea mays
  Peptide Sequence Number=SeqID_70334
atggaggaagtcggaattcgatcgccgccggggcctccaagctttgctggggtgtccgccatgccctgggcgcatatgggatttggttgggagctctgggttgccgggacgtcgaggtccggtggcacggccatggcgccgctgcagctgaggcaaggcgccgccctgctcggacggtggcggtttatcaccgttgatctggccatcggcggcccagatttgatcaagtggacaccggtttggaggattgaatctggccgttggtgctgggatcgatggtccggatcggagtag

SEQ ID NO: 26960 - DNA, 2403 bp, Zea mays
  Peptide Sequence Number=SeqID_70335
atggactcgggcagcaagagctggagcatcgatagctacctcaacgagcacttcgacatccccgccaagaacccgcccagcgaggcccgcctccgctggcgccgcgccgtcggcctcgtcgtccgcaaccgccgccgccgcttccgcatgttctcaggcctccacgccctcgacgacgcccagcgccgcaacatcctgatgtcctctgcagtgcagaggatccgagtctacgccgaagatggagcaggaggaggggaatttggtgtaggcgcggtggtagtggatgagatgactgggaggttgggagctttgatgattacgacatacatgaacgtgctactagtgcagagtatagggcatcagcgacagactgttgggcttgacataagggagggagggagtgacggtctagcgggtggcgcgaacgcatggtgctggcggacgaatgtgcataagggaggtataagacgataccacctatctcctgagcttatcgaagaaggattttgtatcagtccagatgaactggcagcaattactggaatccgtgaagactctacgatcctcaagtcacatggtggaatcagtggaatatctaggaaaatcaaggcatcattggatgatggcatcaaggaaactgaaatagcaaccagacagaagctgtatggcagcaacaagcacaccgagaaacctcctagaagcttctggacgtttgtctgggatgcgttgcatgacctgacgttgattattctaatcgtttgtgccgttgtttctctaatggttggccttgccactgagggatggccgaagggcatctatgacggccttggcataataaccagcattttgttggtggtgctggtcacagcatccagtgattacaaacagtcacggaagttcatggagctggactacgagaaaaagaagatatacgcccttgtcactagagataggaaaaccaaaagggtactgattcatgatctggttgtgggtgacatcttgcatctttcagtaggcgatgtggttcctgcagatggcctgttcatctctggctactgcctagtcatagatgaatctagcttatcaggcgagagcgaaccagttgatgtttctgaagaaaagcctttcgttcatgctggaagtaaggtggtagatgggactgccaagatgcttgtgactgctgttggtatgcgtactgaatggggcaaagtcatggatactctgagtgctgatggagtggatgaaacccctttacaagttaagctcaatggtgtggccacgatcattggacagatcgggctggcgtttgctatcctcacatttctagtgctcctagtgaggttcctggtggacaaaggaatgcatgttgggttgtcaaattggtcagcaaatgatgcgctgacaatagtgaactactttgctattgcagtgacaatcatcgttgtcgcagtgcccgagggtctaccactggctgtgactcttagcctcgcgtttgccatgcagaagttgatgaatgacaaagcgctagtgagacatctcgctgcgtgtgagaccatgggttcagcaagttgtatttgcactgataagactggaactttgacgactaaccacatgatcgttgacaaggtttggatgggcgatgtatccaagtctgtcaacagtgatacaaatatgaacgagctgaaggatgctactgcagaaagtgctgtggacttacttgttcagggaatatttgtgaacactgctgctgagatcgtgaagggagatgatggcagaagatctatcttaggcacaccaactgaagcagcgttgttggagtttggcttgggcttgcaaggagatctatacggtgagtacaataagatggcaagagtcaaaatagagcccttcaactcagttaagaaaaagatgtctgtggtaatacagttacctaatggaggcctccggtccttctgcaaaggtgcatcagaacttattctagggcagtgtgacagcttcctcaacagtgaaggaaatttagcaccactgtcagaaatgcaaaagcagaatgtcttagatataataaactcgtttggatctgaggcgttaagaacgctctgtatcgcgtttaaggatctgggtgaaattcctgacgaccaaacaataccagaggatggttacacactaatagcgctttttggcataaaggatccagtccgtcccggtgtgagggatgcagtgatgacctgcatggctgctggaattaaagttacaatggtgactggagacaacatcaatactgctaaagccattgccaaggaatgtgggatattaaccgaggatggaatcgcaatagaaggaagagagcttcacgataagagcatggatgaactgaaggagatcctgcctaaaattcaggtttag

SEQ ID NO: 26961 - DNA, 543 bp, Zea mays
  Peptide Sequence Number=SeqID_70336
atggttagggtactcactatcttcaaagtcgggaggttgctcaacatagacctcttccttgattggtccattgaggaaggcacttttcacgtccatttgataaagcttgaagccatgcgcgagggcgagcgcgaaggggggaaaagcgaggcggccggagaccggcgtgagagaggtgggaatcccgcggccttcgtgttcgtcccgcgcctaggtcggagagccgccgtcgtcacagagtatgcggggcgccatcattgcctgtctagcggagcaagccagatgggacaccagtcttgttccctgcggcccgagtcagctcggggtagggtgatgatggcgcctcctgttgacgtggccggtctgcgtcctaggttgggcgatgtggaagctcctccgaagccgaggtcgagtctgtcttccgtggctgaggtcgagtccgagcccctgggtcgggcgaggcggaggccgcccgctgaggccagggcggagtccgagccctggggtcgggcggagcggagttcgccgtcttctggggcttag

SEQ ID NO: 26962 - DNA, 213 bp, Zea mays
  Peptide Sequence Number=SeqID_70337
atggaggtttctcaccggggaagaagaccctcgctggagccgaagcaaaatccgtcgattgccggagattcggggatccaatcgacgaaccgaacgcgctgcgatgaaaccctcgacgagacgaacgcaacggagttcgccgtcttccgggacttagcccgagtccgagccctgggtcgggcggagcggagttcgccgtcttctggggcttag

SEQ ID NO: 26963 - DNA, 438 bp, Zea mays
  Peptide Sequence Number=SeqID_70338
atggcgtcttgtggcgaggaggtgcaggcaggtttgggtacgatccggtattgggaattcgtcgtggcgtcgggtggcgaggagttgggaggcaggattgggtccgatcagtggagaattcatcatgatgacatgttgcgaggagatggaggcaggctcaaatgtctccgggtgtggtaccaccagaaccttcgatccattcttactttaacggcagagaagaaagggtccttgctggttacagggagaggagactcggagttcgtcctagatgcaaaagtacctggctggttatggagaggtcagctgaaggctggaggtactaacttattcttgtatatgaaccatgatacttgtgagactgcttcgaacctgttacatggtgacttgagagctattgtaccagccctgcttcaaactcgtgacatgaccatttag

SEQ ID NO: 26964 - DNA, 960 bp, Zea mays
  Peptide Sequence Number=SeqID_70339
atggatgtttctcacatttattgcagtggtctgggtggtcttcgaaataagcttgtcggtcgcttcaagtcaaagcgtcctcgtgcagatgatgctgactacgctacaaccactgactcagaggcccaatcttcagctgggggcagtgtatctatggacataaaagacattccgcatactcatcctgactatccaattgacatcacaggatggacatttccaaagaggaggttctctatggcagaatactgctccaggagaactgtcaatcaatatactctgccatcagacacaaatgttcaattctttcacactcaactccaatttgatgttttttggggcacattgatggataccaactttcacaaacaccaggtgattgattggactttcatgctgggacaatcagttatggaggacctgatttcaaagtttgagacatgtggtctgtaccattatatgggtcagaggactgatttcagtgacctggccacaactgagattgatatagatgaggaatccatcacttggatgattggtttcaaaagatattctacaatgtttgctgaatttgcagctgccaacagtctgaattatggcaccatttcagctgggattgatctctacactgaagataactttgaagactttgtgcaattttatgagccagcaaggctgggcatacctaggagacagttaaatgatctaaaaatggacaaaaaccagaatttagtctatgctccttacattatggctctcatcaaagcaaagacaagatttgaggggccttgtgagatcgttcatacaccctttagacccttcaagaatgaaattgggttcctcaccagaccactcactcccttcccaaatgatgaggaagatcctggttatgatgcaggagaagctcttgaagttgagacagagcagatgcctcctcctccacctcctcctcagccttag

SEQ ID NO: 26965 - DNA, 369 bp, Zea mays
  Peptide Sequence Number=SeqID_70340
atgagcatagtaaaggatggagctaaagcaaggattgtaatcgacaagggagaaaatgcaaccaagggcagggtaggtaaaacaccattctcaaatcgagatggaaaatatgatatttcaaaaggggtgtatttcagacaaaacttgcaaggcgtcaaagaagggggagcaatcaatggtgaagtgggtgaggcattaccctcgaatagggacagaaaagagaaggctttaaaaggtaggttcaaagtaggcatatggcaagggcataggtatcacgagggtttaaaggtgataactgacaaggatgtaggagaggaggtaaatgttcataagaaccaagaatataaataccacaaaggatggagttaa

SEQ ID NO: 26966 - DNA, 93 bp, Zea mays
  Peptide Sequence Number=SeqID_70341
atggcgcttttggtgagtggatctggagcgttggctcgtggacagacggataggattagagatcagcccattcaagttgcgttggctttataa

SEQ ID NO: 26967 - DNA, 486 bp, Zea mays
  Peptide Sequence Number=SeqID_70342
atgccgatcgctatcggcggctattcactcaagcagccaatcatcttctacccctcgctcacccaccgaaagatctacgacacgccatcaacagtcggcgagacgcacggagctccatcaacacttcgcgctaacagcgacatgagaacgagatacgtcgccgggaagagtacgaccgggatcacgacatcccagcatggagtcaggctaccaggaccgaatcggccacggcttcaactggtggcaccacctggggacggtcgaggcaccatgacgaccactcccctccccgggacagacaacatcatcgacgacaggaggacacgtgtggagtataggcacttactccgcgcctcaaagccattcaatggccccctaacttcaaggtatccaacgtcaacaaatatgaacctaagcaggatccgggaggctggctggccgtctacaccaccgctgcctgagctgctggggcaaccgaggacgtaa

SEQ ID NO: 26968 - DNA, 1110 bp, Zea mays
  Peptide Sequence Number=SeqID_70343
atggctcactggagttactccggcccgcccgagaccttctcaccgttgttctcccttctctgctcgtggattcatggcctcttcatcgccattgagttcgctgtggtgccctctccctctctgcccaatcccgacaacgagcagtccgaggttcctgagtgtgttgttggagacctgcctgagcagcaacctggtgaaggaggtgatgctggcaacatggatgacttcgaggagttccagaaatatgatgagttctggttctttcttagtggcaaacccccagtcagtccagtcacctggagagactgcatcgtcgcctgcacgaggagcaggagcaccaacgctaggagcaggagcagcaggactcttccccctcgcctcagtagcaggtggagtctgagaggccgccttcccctgcacctcagccagagatgccccgtgcaccacctcagggcatcccggctgctggaggagaccctgacggagacagagacgacgacaacgccggtggcagttcgagccacggcacggagctctcggaggagccggagccgtaggtatggattgctagacccatcactcgtaacgccgctcgcgggtgtcacttccatgacgctctcgataccctgctgcgtcgggccttcgaccaacacacttggtccatcgaaggccttctcagagcactattctattactgagagggatactaccgaggcagccatgcaagatgtagcacgacgggcactttctcagtattgctcgttgttcaacggagtagctgatggcctcgacctgaagtactaccctcgccattcgaccagcagtgctggaggtgtgattgccttggcagttggtgagggcaatcctaggctgaacaacatggtcaacttggctgtcgtgctcaacaaagagttggaccacgccctcgacgagttgggcaaggttcaggttgaggttgcagaattgcgttctgagtgtgcagcacgccactatctggatggtggttctcccgcccctgttgggattcagcacccttaccgttcgccgccccatggtcgcttcgactatggtaccccagactgcaggacccggatagatttggatccctag

SEQ ID NO: 26969 - DNA, 465 bp, Zea mays
  Peptide Sequence Number=SeqID_70344
atgggcaagagcaagaaaggtggtggttcttcgcatcattctggcgacaagcgcaagcacgagccgactcctccctcggaggacttcggcgactcggagtactcggaggaggagttctcctccgagtccgagggctctccggctcctgtctctcccccgacgtcgtctgatgattcagacgactcccaggggatcgccacggaggtatggacttacatctgggccgtcgagtgcgccgggctcgagggcttggatgagtcggagtactcctcggacgaggagaattcctccgacccgtccgaggagggcagcggctgtgacggcgacggcgacggcgacggaggcgacggtgacggtggcggcgatagcggcaagggcggtgacggcagcggcaagggtggtagcggcgacggcggcgacgacagcaagggcagcagcaagggtagcaacaaggccagtggctag

SEQ ID NO: 26970 - DNA, 177 bp, Zea mays
  Peptide Sequence Number=SeqID_70345
atggcgtcaaactcccctaccaggtccggcgcaggcccctgcccagctggacccgccctgctgcgcgcctcctttcttcgccgccttcgttggttctgtcgctgccgtggccttcccggcttcagctgcgagtttcctgaatgcgaccacctcgacttcgactacctcggcatctag

SEQ ID NO: 26971 - DNA, 633 bp, Zea mays
  Peptide Sequence Number=SeqID_70346
atgcacgcaccctcgcgaggcatcagctgccatccagcacacccgagaggtagcagcggcgcagcagccgacatcgtggaggaggggggcgcaccatgctgccattgccgcgccgggggccgggctcgtggccccgctaatgggggaggaaggcggagacgtccaaggccgtggccacgcgatggagacgtaaacgttttggccggtgcctacgtggccctagaggaggagagatgggcggctcaaggccggagaggggggacgacgtcggtgtgcagaggagatggggccgccacggggaggggcacctggggcagcggcacgccgttgagcctgagtgccggtggggcggtccgtgcggacctggaaggaggggaggtgtccggcggcggtgttgaccagaggggccatggtggcgcggtgaagtgtcgtggccgccgccgccacaagctgcagtgtgtgtgggcgcagggcactgccgcagccacgacaaattcgatcgggaaggcacgctatgggccgaatcgaactagcggtgacacgcaagggagaagggccggattggccggaggtgtaggggaagggggggcgaccgggcacgggctcgcccactacagcgtcggcggctgctga

SEQ ID NO: 26972 - DNA, 1050 bp, Zea mays
  Peptide Sequence Number=SeqID_70347
atgtcctcctccttcgactccatcacggccgtcgtaggagatgacgacgagctaccgccagccccgttcgacactgccgtcgacgggaccgcagcggagtacggcggcgagcagcagggcttcggcatgcgccgcggtcaccgttttgccgcgtcctactcgtccttcggcaccgccgtctcggaggacgatctgggcggcgccggcggagaaggcggcggtgggtacggaggcttcggcatcccgccgtactccaacggcggccccgcgtacgggtacgccgacaacgacgcgaacggcgtggagcatgtcatgggcgcccaggacgtgatggatggcgcggcgcacgcggcaggggacatcagcggtggccgactcgatgaggacctgttcagtggtgcggccgacgacgacgacggggccgtcctgccgccgccggaggccatgcgggaggagggcattctccgccgagagtggcgccgccagaatgcactgatgctggaggagaaggaacggaaggagagggagcgtcgcaacgagattatcgcagaagcggaggagttcaagaggtccttccttgacaagcgcaggctcaactgcgagacgaaccgaacgcagaacagagacagggagaagctgtccctggcgaaccaagagaggttccacaaggaggcagaccagcagtactactggaaggcgatcgcggagctggtgccgcgcgagatcccggggctggagaagaggggcaagaggaaggagcaggagcgaaagccgggcatcgtggtggtgcagggtcccaagcccggcaaggccaccgacctctcccgcatgcgccaggtgctcctgaaactcaaggacaaaccaccatcgcacatggtgccgcctccaccgcaggccaaggaggagaaggagaaggatggagataaggacgccaagaaagatggcaacaagcaggaagaaaagaaggatggtaagcagcaggcagctggaccggccgagaagaagactgatggccctgagatggccagtgctgctggatctccgccgtag

SEQ ID NO: 26973 - DNA, 660 bp, Zea mays
  Peptide Sequence Number=SeqID_70348
atgaagaggagcatagaaaagtaccagttcttggaatccaacgcctggacggacggccgctggacgattggaccagttcgcttggacggacgcctggacggacggccgctcgcctgcgcctggacggacggccgctcgcctgcttctgctgcccgcgcgactggacggctggacggacggacggcctgctgcccgcgcgactggacgcctggacggacggacggcctgctgcccgcgcgtggacgcctggacggacggacggacggacggcctgctccgctcgcctgcgtctgcgccgcacttttctccgccgccaagataagaatgagaggggatagggacggcgaagtcctatgcatctcagtcaaggaccagctcaagctgcatgcactccacattaaaaacaatcacctacagaagcaaaaggaaatactcgcagccaagcgccagcgcatcactatgcaggccaaggttaggcaggtgatcctagatgaggagcggaaagcgagagagctggaacaacatattgtagaaatgcaaggcgaagacttccttcaccagcggcaggaccctgagcaccgcctccgcatgctagtcccggccctagctacttttcatagactaaattaccttgatgaacgaagccccctcactccatag

SEQ ID NO: 26974 - DNA, 411 bp, Zea mays
  Peptide Sequence Number=SeqID_70349
atggccggttccaaagatcacaccgacgtctccaccaccaacatcatcaagcggaccatggaggcactcccggctaatgaccagcatcccttcaatgacatcataaggcgcgaggaggaggaggtgctgcgacaactcgtcgaacggcgcgacaaagaggaggaggaggtgcataagtcaaaccatctcaactctaagccgactgtccggaataccgtagattattccggacaggaacagctctttagaaaattcacctgtgcgcggaccgtctgggtccttccggcaggccgtccgcgacacctcggagagaagaacaccgttggagaccaagctcagactgtccagcctcaggcgcagaccgtccgcccgttggaaataagagaaacccgaaggtgccaagttcggtaa

SEQ ID NO: 26975 - DNA, 189 bp, Zea mays
  Peptide Sequence Number=SeqID_70350
atggtcaagcgtcccatacctcctctctcctacagccacttgattccctacttcaccgccgctgcgcatcctgctcccttcctagcccctgtcgccatggcaatatcctggatcgacgttgcagaagactttgtggactctggccccacccacgctgccagcgacgacaccccgttcgaggagcactag

SEQ ID NO: 26976 - DNA, 195 bp, Zea mays
  Peptide Sequence Number=SeqID_70351
atgatcctgccacaacatttgcacatcaagagagtcacatttggagtcaactggtcaaaccaaggatggaagcaagaaaaacttcgaggtaccgagtgcacaggagaaggtcaaggagaccaagagacttcatcagcaggcttggccaacctggtgctctgtagcgggtccgagtgcaccagatcgccagtatag

SEQ ID NO: 26977 - DNA, 243 bp, Zea mays
  Peptide Sequence Number=SeqID_70352
atggcgatctcatgggccaacgtcgcaaaaggacatggggatcaacttcgatgcgtatggggacatcctcgtgagacgcccaaccatttgccgttttcgatgtacccgtacgtggggccaccgttggagtacgacggcatgccgaagcctccgtacctgtcgctgccttctccgccggtgccgcacagatcgtcctccgagacggcggtgccaaaggacgagttggacacgacaaagcagtga

SEQ ID NO: 26978 - DNA, 378 bp, Zea mays
  Peptide Sequence Number=SeqID_70353
atggagggaggggaaggtgacaccgttgtccgactcaccagtcaccagggctcagaggcggtggaggcggtagagggactcaagaaggccgcaggcaccgcagctacttggggcgtcggtgggtcgggacgggagactgaggaagagaggagccgagtaggagttagggctatggttgtgcctgggctaacccgatgggtcgattcattaacccaatcattgcccgatgatcgagtcgggctaggcacggcccacgtgtcaccatgccgagccgggccagtgacgggccaaaacagtgccgggccgcgggccgcttggtgggcccagcctgtttggacaactaaatgcaacatggatgatgggacacgcgactgctaa

SEQ ID NO: 26979 - DNA, 186 bp, Zea mays
  Peptide Sequence Number=SeqID_70354
atgcacaacaagaaggagcctgggaaccagctcccgaactcatcgtggaagaaccttccgcggcacccgcatttgaaggcaagccctggttcactgcaagacatggttgatggtgtgacttggccatccaccctgccaccgggttggacggtcaagtgggatgccgcctcggcaggagaggactag

SEQ ID NO: 26980 - DNA, 222 bp, Zea mays
  Peptide Sequence Number=SeqID_70355
atggctaccgccgcgccggtactgtatgctaccggggccgagcaccaggtgagtggggaagatgcacgtgggccgttggttttagcaccagcggatgggattagatctggggggagatcggtcggtggggatatcacaataccccttcgactcgcccgtattgcaaaagagcccctggaaaatttagtaatcaacccacggtccatcgcgggggagttatga

SEQ ID NO: 26981 - DNA, 222 bp, Zea mays
  Peptide Sequence Number=SeqID_70356
atgaaggagaagatcaagaagttgaggcacctcaagaggagagcaatgatcaagggagcgatgcccatgatcaagacaaggaagatgaacaagttccaagactgccacacccaagagtccaccaagcaatccaacgagatcaccccggtagaggaagcacttcaagattcggattgggtggtggcgatgcaagaggagctcaacaacttcactaggaaatga

SEQ ID NO: 26982 - DNA, 354 bp, Zea mays
  Peptide Sequence Number=SeqID_70357
atggctctcgaggccactgacattgaagctatgagtcttcgtgctcgtttgttgaagtcggatcgccgcatgggtggtgagtcatgtctctttgttcgaccaattttcgactttactaacccctctccattttgttggaactggagtcagaggttcaaggcctctactagggcacgggtcaagtctcggggcttgtccaagcccgcggtgtcaatcgggaggagcgtctcttcaatgtacctaatggggttcactacgtcgttcatcgcggcgctcagcgcagcatcaacaccgccttggccatcgcccaatttagatcgagctatgagctatgcaatatcgttggtctcctag

SEQ ID NO: 26983 - DNA, 264 bp, Zea mays
  Peptide Sequence Number=SeqID_70358
atgtgtcagagaggatacagggaggaacctgccaaggtaaatccgcccccagatgaccctcgcaccaaggtctggcgaggcgcaaccttggccaagggtcagatgaggtgtcagagagccactcgagtggattctgcatctggccgaaggactgctcttgtcattaatactgtgcacgtcacattaactacacttggtgctgagtcgtggtgtggtagcgagctagtgtgcctcccactcatggcctacgttttctatgtctga

SEQ ID NO: 26984 - DNA, 585 bp, Zea mays
  Peptide Sequence Number=SeqID_70359
atgagttactatactaagtgcatggttcactcttgtagggtgggtatttttgattctacgattgattccagagagctgagacgccgtggacaacaatccacatcgtcgtcttcacagtcgtcccgttcacgatcagcagcccatgagatagagcttgcagtgttgcgtcaacaggcagagtaccatcaatcagtcttgagggatcaattggagtaccagaggcaacaatctgaataccagagacaacaagccgagtaccagaagaagagggacgagtattatgcaagcctccaggcccaaaatcaagctcttctctcgttaattgaacaactagcccaacaagtgggcgtcccgatgccgacatatgggatgccgcctccggactttgcactaccaatgccaatgttggcgcctccaccaccgcctccgcctccgtcacaattccctatgggatttcagacaccacccgcttcagttgccgcacctggagatgggtctggtcaggacgacacaacacattcgtgggtgaacaatcttttcagcacgcatagtccagccggaggaggtggcgatggatatgagtga

SEQ ID NO: 26985 - DNA, 180 bp, Zea mays
  Peptide Sequence Number=SeqID_70360
atggatcccactctaaccaaaaaagtgtgcccaattcatggtacagttcctctatttataggcacgggatacaacttccgcagaattacaatcgtgcctcagacctatacatttaagctatcaggattaggaagcaacaggagcacctacatagctataccgtcgggtggaaattgttga

SEQ ID NO: 26986 - DNA, 609 bp, Zea mays
  Peptide Sequence Number=SeqID_70361
atggggttagggagtctggacgccttcggggatggagctcacttcgattcaccagtggtcgatctttttgcgccctttgtggaagaagcaactaacacatcttcccttggtgccacgaaggcgtccgtccacactgagggcatattagggcgaggtggcaatgaggaagcaaagcacttcccaccttcctgcccttacgtagggcgcgaggaaagttatttccatgaaaaacaggataacaccgccctacaccgaaggcagcaggcctttcatggctttggtcattgtgccatgatcgtcacagatagagggaccacagccacccgtgacagagtctccacccgggaatcagtagcccctcctggctccgaggccgcgttgaggcagtcatcagattatagtctcgctctttctatcgagggagacgaggtgctcatttccgcggttattaggtcgtctcaacttcacctagggataggagggcctcaagtcgagttgtcgtgtctcgagggcgcgctcggtagtcagtttttgctggaagactcctcagagaggatagacctccaagctcttaatggggagttattcgagatgggggccatatcctaa

SEQ ID NO: 26987 - DNA, 195 bp, Zea mays
  Peptide Sequence Number=SeqID_70362
atggggattagctctccccgggcagaaagggaatcacagcttgtgggtaaagtgtgcgacctctgcagagggttagaaattgatatatcagtcgtgctcatggttacgagcggccttgggatcctctttggtaaagaagaaggcgtcgaggcagatcttcaggagttccaggacttcgatgagttcgtggtttag

SEQ ID NO: 26988 - DNA, 273 bp, Zea mays
  Peptide Sequence Number=SeqID_70363
atggagagtacgtgctcatccccgagcaaggaactgtccaagaggaggaccaggagcaagctcccgaggctgctatcgaggatctccctgcagccccagctattgaaggcaagccccggttctctggaggaaatggttgctggagtgacttggccgtccatcttgccaccgggtttgtcggggaccataattaggggtaccctcaagacgcctaattctcagctggtaacccccatcagcataaagctgcaaaggcctgatgggtccgattaa

SEQ ID NO: 26989 - DNA, 853 bp, Zea mays
  Peptide Sequence Number=SeqID_70364
atgatggtagactacacaatgatactcaatggaccaagtgtgtcggttgaaggcccgacgcaacaaggtgtcgagagcgtcatggaagtgacacccgcgagcggcgtcacgagtgatgggtctagcgatccacccctccggctcctccgagcgctccgtgccatggctcgaactgccaccggtgtcgtcgtcgtctccatctccgtcagggggaaggtgacctctcagactccacctcccgctgaggcgaggggaagagtcctgctgctcctgctccgagcgtcggtgctcctactccttgtgcaggcgacgatgcagtctctccaggttagcggtcctacagtcagcaaggctttgataccacttatgtcacacccggttttggaaggtgtaaaaggttcacactcagccaataaaaagaccaagtttttggattcaacaaaggagcaaaatggcaaccgaaggcacccctggtctggcgcaccgggactgtccggtgtgccaccggacatgtccggtgcaccagggggactcagactcaaactcgccaccttcgggaatttccagaggcactcgcgctataattcaccggattgtccggtgtacaccggacagtgtccggtgcgccatggagaagcggcctcaggaactcgccagcttcgggaaattccaacggctagtccgctaaaattcaccggactgtccggtgtgcaccggactgtccggtgcgactccagtgcaacggctatctctgcgccaacggctctctgccgcgcatttaatgcgcgctctgcgcgcgtagaagtcaggcgcgcccatactggcacaccggacagcaaacagtacctgtccg

SEQ ID NO: 26990 - DNA, 150 bp, Zea mays
  Peptide Sequence Number=SeqID_70365
atgagcctcggtggtatcgtcattcgccttagcatctatgcccgtgactgtcacacccggttttggaagggggctcttaagcaaaactcgcacgcgaaggggtacggggtaatctcggccatcagatcagagatcagcggcccagattag

SEQ ID NO: 26991 - DNA, 240 bp, Zea mays
  Peptide Sequence Number=SeqID_70366
atggaggaggctcaaactggacttgtcgtgagcctattcgatgtttataggagagggcatagagcgaaaaacagtgaaatctccgatgagctatgtagtcaagcagtcgttgagcgtatggcgggttgtggtagcagccgtagttggcgctctgtatctagcatggaggacgctatgagggagcagcaagaaaggtttcgtgaagagctgcagcaacaacaaatgacattcctccaatag

SEQ ID NO: 26992 - DNA, 333 bp, Zea mays
  Peptide Sequence Number=SeqID_70367
atgcacctgaccagtagggtccaacaggaagcttttgcactcaacgatcagttcaatgactacctgacatggcaggacacgtggctgggtccactggtgcaccagactggtccggtgagtttatggatgacagggtcagaggaaatctcgttgattgaggttaccattgaagaatcatatggcaacattgtagatggtataatgctctacagtatgaggatcagaacgccagctcagacgctcgtcgccggcgataagaacgccaccgtcgttcgggatgggtcgtcggcggccacagtaaaggaatcctgcgatgtggcgttaaagcagtga

SEQ ID NO: 26993 - DNA, 240 bp, Zea mays
  Peptide Sequence Number=SeqID_70368
atgccctacttcctcgttgaggcgcccacaaagagccgggtctctttcaaccctaatcctccctttgccgaccacaaagatttgaaatgggagaggcaagagatgtgtgagagggagtgggaggtgtttctcaggttagaaatggagttcaagtcgtgctcttctgtgggggagagagacaaaaactggttgagtgtccagttgagtgtccggctgaaccagtattttccaaaaaggtga

SEQ ID NO: 26994 - DNA, 330 bp, Zea mays
  Peptide Sequence Number=SeqID_70369
atggaggagcatggtcggccatatgatggccacccgaccacctcgatggccgaccgacaaagatacagtgtactaaacatatggagatctattgataatttgatatcttttaattatctccaattcctcctcagctttcctaatggtcgaagcaacatcaagagtgggcatctaaaaaatgcagtcgttcctgtggttccaaagtgcccagaaccccaggatgataaaggaattgagcccttccgcagcaatgccctgcaactgatcagaggccttcttccaccaatccatggtgctcctatcgcctggctgaggagtgaggccctgtag

SEQ ID NO: 26995 - DNA, 105 bp, Zea mays
  Peptide Sequence Number=SeqID_70370
atgggggctagggcgtggtgctcgctctgccaaggggggtgtagaggaggtgatgctggcaacatggaggactttgaggagttccaggactacgacgagttctag

SEQ ID NO: 26996 - DNA, 84 bp, Zea mays
  Peptide Sequence Number=SeqID_70371
atggagaagtgcaaaccaatcaagacacccatgcctactaatggacatctcgacctagatgagggagggagtacttttgggtaa

SEQ ID NO: 26997 - DNA, 255 bp, Zea mays
  Peptide Sequence Number=SeqID_70372
atgaaggccaagtcacaccatcaaccaaatcaaggaggtacctgcaaaaattatgccacaagcaaggctgagtatactaatactcagctagacttacccggcctcaccgccttggcatacaatgctccactgaccccgaccgccgccgtgcagtggccgcacttgtacccaccatatctagaatgggagacccagtctcaggtcgtgttagggataaagtccgcgcccggcttcactcaggtatccgcacattaa

SEQ ID NO: 26998 - DNA, 270 bp, Zea mays
  Peptide Sequence Number=SeqID_70373
atgtcaaccgtccccatcgattccccgttcgcgtccaggcctcaccgccttggcatacaatgctccactgaccccgaccgccgccgtgcagtggccgcacttgtacccaccatatctagaatgggagacccagtctcaggtcgtgtgagggataaagtccgcgcccggcttcactcaggtatccgcacgttaatccttattccaattttgtctcatagaccacgcatccccatggatccgtgtccacagaccatcatcattttgatataa

SEQ ID NO: 26999 - DNA, 1200 bp, Zea mays
  Peptide Sequence Number=SeqID_70374
atgaagcaccagccgccgcgccgctggggcgtcgtggcggcggtcgtcgcactcgtcctcctcgcctgcctccagatccagtaccaccacctcaaggtcgccctcttcccctccctccctcctccgtccacgcccgtctttccatttttagctctctctctcgcttatttcttcaccctcgcccgctgctctcaacccggggataatacacatgctgctgtatcttatcttcaggtggatctcggcaaggccggctttgcctctgccacgcaagagaataacgcgatccgcagccgcaatcgcattcgctggggccccgacaggaacggcgcccactccttgccgcgcgggattgtccaccgccactccgacatgtccctccgcccgctctgggaggacgacactgcttccacccacaagaataaaaacagtgactacagtgctctcctcgccatggcagtcggcatctcccaaataaaaaacattgacactatggcccgtaagtttctgaaggaaaactatgcagtcatgctcttccattatgatggaaatgtagatggatggcgtcatcttgagtggagtgataaggccatacacatccttgctcacaaccaaacaaaatggtggtttgctaagcgttttctgcatcctgatgtcatggctatctatgatttcatttttctatgggatgaagaccttggagtggagaacttcaaccctagaagatatcttgatataatggtgtccgaaggcttggaaataacacaacctgctctggaccctgatctatcaactgatatccaccatcgaatcacaatccgtaataagatggcaaaagttcacaggagaatatacgacaatcggcctagtatgaattgttctgacgagagcaaaggacctccatgtacagggtgggtagagggcatggcaccagttttttctcgcactgcttggaaatgtgtatggcatctaattcagaatgatcttattcatggatggggtcttgacatgaagcttggatattgcgctcagggtgatcgaacagagaaagttggtgttattgacagtgagtatgtagttcatcaagggataccatcattaggagggccatcacttagcagcaaggtgcttgacatctcagcaacaaactatttttttagaaacttggagtccggtaggaccaaggatgaagtgtactga

SEQ ID NO: 27000 - DNA, 537 bp, Zea mays
  Peptide Sequence Number=SeqID_70375
gaaaaagagaagaaggagaaggagctgaggagccaaatcatcgttgatgctgaagagtttaagaaagcttttgttgagaagagaaagctcaatgctgagacaagcaagggccaaaaccgtgacagggagaaggaaaagttccatgctggtgcagataagcaatactggaaggcgatatctgaacttatcccacatgagattgctaacatcgagaagagaggggcaaggaaagacaaggagaagaagcctgggatcgtggtgatccagggaccgaagcctgggaagccaacggacatggcacggatgcggcagatattgctgaagctgaagcacactcccccaccacacatgaagccacctccgccacctgccgcagctaccggaaaggatggagcaccagctgccgccgggaaggatggagctaagccagcaaccgttgccaacggcagtgtccctgagatggaaaaggctgctgcggaggcatcagtgccagcggcagcaccaccagcagcaactgagccgatcgcagctgcttaa

SEQ ID NO: 27001 - DNA, 1323 bp, Zea mays
  Peptide Sequence Number=SeqID_70376
atgtcagacgcgctcggaccgctcggggaggtcgccgactatctcggtgcctgggctcgccacgccgtgcgggacctcagcctcagcccgccaaggaagaagcctgcaaaaggcaacaacagttcagatgttcaagccgcggccaatcccaacaaccgggctgctcaacagcaacaggaaattgggagcaataagcccgtggactctactctgcaacagcagccttttgcatttgatccatctgcagtcgatgatgcaaatggaaggccgcttggcatgttgcagtttgacgaggatgacaatggatccaaggatgcagggaccggtgctcaggccacgctggagagactggtgtccaagcacaggcatcggcgtgaccctgatggccccccgtttgaaggcaggttttccgacgagtcatcatctttgctggagaggacgcttgaaatccgggacaggtcctacaggctcaagatcggtgtgatgagcgaagcgcatcctcctgtatatggtgacgatgaaagcgccgccagtgctgctgattcagatggcgaggagtttagccgaaacgtcaaggaagctgcggagatcctgaggaaggccagggcatccatggctgacgaagagaccgcagacgcactgctgtacaaatcagctaggctcctttccacagctgtggctttgaggccaacaagcctggtagcagtgggtcagctagggaacacgtacctcctccacggagagctcaagctcaaggttagtcgcgagctgaggacactcttggccagcagcggcgcctttctgaacggaagagagcgtgctccacggtccaggaaggtagacaggaggatggtaagcagagagagcatctcatccgctcttgtggatgtatgcgaggaatgcgagagcctccttgtcgaggccggcagaagctacaggatggccctctccatcgattcaggtgacgccaaggcattgtacaactgggggctggcacttattttccgggcacaattgctcgctgacatcggaccggaagcagcagccgacgctgaccgggtgtatctagctgcaatcgacaagttcgacgccatgttgtcgaggagcaacacttatgctccagaagctctctacagatggggcactgcgttgcagcagcgctcccatctgcggcctcggagcaacggtgagaagataaggcttctggagcaggcgaagagcttgttcgaagatgtgctgtatgtggaagcagacaacaagatggtgagggaggcgctgtcatcgtgcatatcagagctcaactaccatggccgctggttataa

SEQ ID NO: 27002 - DNA, 276 bp, Zea mays
  Peptide Sequence Number=SeqID_70377
atgcaccttgtgcgcgctacgcacctgccacccgacctgtggggccgtaggtcagccccacaccattttgaccatgcacgctcggactctctgccgcgggggcccgctgaccaggcgcaacagctctgcgcgcccgccttggctcgcctggggtcgctgccggtgggtccgccagggcatagggcgccgacgttgagagctccgatgcttgccgtgaaggatagtgaagccgccgtggccgcgtgcggaaggtggaagatggccactagccgttga

SEQ ID NO: 27003 - DNA, 156 bp, Zea mays
  Peptide Sequence Number=SeqID_70378
atggagattgtgttcgaggggttgaagagcctagaggatgtcgaggagatggaccccgagtggctgcatgatcccccacaagctacgcgcatgcgtggagaaggacatctcctcgtaggactcgtgcagcgtcggcccgttcggagcaaatggtaa

SEQ ID NO: 27004 - DNA, 603 bp, Zea mays
  Peptide Sequence Number=SeqID_70379
atgactctgggtacgtccgttacatggccgaggctcgggctacgctcccgaggtaccctaggacatttccgagaccagcaggagcgattttgtaacggaatcccaccagagggaggcatcgagccctcggaccctatcgaacgggtccgggtccagcaaatcacctgcagtcggcaaggtcgaagtgatcgcagtcactttgccctttcactgaccgacctgacaggaaaacagccccgctcgccccgctctgactgttgtgccacccaccagggtgaggctgacaacagccaagttcagcctcgggcgcaacaggaagctccgcctcacccgaccccagggctcggcctcaacctcggcctcggaaggaggtctccgcctcgcctgaccccagggctcggccacaacctcggcctcggaaggaggtctccgcctcgcccgaccctagggctctgcctcaacctcggcctcgggaggaatcatgtcctcgcccgaccccggcctcggcctcaggagaagtctccgcctcgcccgacctcgggctcagaccgaccacgccacgggggatacatcattatcctacccctagctagctcaggctaa

SEQ ID NO: 27005 - DNA, 384 bp, Zea mays
  Peptide Sequence Number=SeqID_70380
atggcgaggttgtgcctgattgtggcggagcacggtcggggacgatggccgagctctaccggcggtggattcgggcgcaggaggcatggcgacggggaagctccagcgagcttgaagaactggtgcgcgcagctcggggggagatgggggtatgcggggacttggagagggggtcagggtgccggtttggcgctgggtggcgacgtgggcgcggcgatctcggcgtccgtgcgcgtggtccacgcacgagagcggttgaaggaggaaagagggactggaaagcggggcccaccgaacagcggcacagacacgcgagcacatgacgggccagggcgccgacaaggcgaccccgctgagcagagagggagaaggccagtgagctag

SEQ ID NO: 27006 - DNA, 564 bp, Zea mays
  Peptide Sequence Number=SeqID_70381
atgacgtctccgcgcggaggtcggtgccggcccgtctgggaggacttgagtggggatctgctggtgcaggctggggcggccgccattcgtcgccgtggcgctggcgcgcaggtggccgctgtcgtcggtgctgaggtggtggtagccagaggaggtttctccgccgacaagaccgtcggcgccacccatggtcggacctccggctctttggcttcgatggcttgtcctcgcccctcgtgtggggacgtgggcgagggccttttcacagcagcgcttgccctgaggtcatcgctgctgctgtttagccgcccgacacggaggtcgttgtcgctgctgaaccttcggccgctctgcgatgagctggagccggaggcagcggtgttggcgtggacagaggcagagtcagctcgaaaagaggctttgtcggcccaggagcaggtggcttcccaggccgaggaggtgcagcagcggcggctggagcttggccaggtcatccgcgagcgggaccaacctcggagtcacgctgccgaggccgtgagccgggctgaggtcctcgggggatag

SEQ ID NO: 27007 - DNA, 639 bp, Zea mays
  Peptide Sequence Number=SeqID_70382
atggcctctattggctccaccgcgcgattgattagtcctacctcctcagaggcgcaacaagacaccttgcatgtctttgaggcaacgagggcatcatcaccgagagttgctgcagaattgctgaaggacaggccttcaaagccaagttacattgagattgggcgatctattctgaaggaaaaggttctgcagactatgaggagacttgggtacttcagcagcggagtaaatgtgcgtcttcccagggaagagacaacgtcgaagccagggcctacccccgcagtcgaggaggaagcgtcggcggtggagagggccgccaacccactccaggtgccgaccttgggggcaaagggcccatggagccaggggctaaggatgctaggcatgccccagtctagagagtacgtcctcgtgccggagcaaggagctgctcaggaggtagccccggacccagcaccagaccctgcaccagaggacctgccttccactgctttggaaggcaagccccggaatccttttgagatgaatactagttctctggaggacatggttgctggagtgacttggccgtccatcttgccatcgggttggactgtcgagtgggacccctcctcggctgaggaggagcatgaggagtga

SEQ ID NO: 27008 - DNA, 633 bp, Zea mays
  Peptide Sequence Number=SeqID_70383
atggtcccaggacggacgcggccaccggaaggctctcgttcgcgttcccgctcaagggacgcgaaccagccatcaaagccaaagagcgggccgctccaaagcgcacccaccgagtgcgggcgaaattggagggacgcttgtaggcggcatgcaaccgcgccaagtgggcgcacctctccgacttccaacgagcctagcatggaagcccaggcccacgcgccatgcaaccggggcgccggacgctgcgcgcgagcaactgcaccgccgcccgcgccactgtcacgcctcctcgactgtgggaccagtaccgcgactcgaggcaaccctacgtgcgacccagcagcgccagcctggcgcgacggtcaatgcggccaaaatgggccgacagtaatggcggtggcaggcgggcaggagcagcggtcacgtcgtcagccaagcttacgtcccatccgggggcagcgagagaaccctctctcacggcgtgaagacgacgcgcccgtgttccgttcctcgaacggctcgtgcacgcgcaacggctgccccgcgaaccgctcgccccgtcgcattaactccgcggcgggacaggcggcgcctctggtaggagaagcaagcgacgcttcccctttgccataa

SEQ ID NO: 27009 - DNA, 1650 bp, Zea mays
  Peptide Sequence Number=SeqID_70384
atggccgccgccgccgaggtagaccccagccccaacccgccgccaactacagcctccggcctctccaagaccaagacgcgggaggccgaccgccgccgacgccgccgcagcaaggccaagaagaacaagtccgtcactgaggctgatgcccaggacgctgacgggggagcttccagctccgacgccaaggagaacgccgatcccaaccccgagccacaggttgaggtggagatagagtacgtgccggagaaggccgagcttgacgaccctctcctggatgatttcaaggccatcttcgagaagttcaccttcaaggacgctgctgcagcggcggccgaggatgataagaaagacgagggtgccgctgatgccacaaagaaggggtcactggatgatgatgacgacgacgaagatgatgagcaggaggcaaacaagaagaaggacggaggcctatccaataagaagaagaagctggaacgcaggatgaagattgcagacctcaaacagatatgcaacagacctgacgtcgtggaggtctgggatgcaactgctgcagatccaaaattgcttgtatatctcaaggcgtaccgaaatacagtacctgtccctaggcactggtctcagaagcgcaagttcttgcaggggaagagaggtattgagaaacagcctttccagcttcctgacttcattgctgcaactggaatagaaaagataagacaggcttatattgagaaagaggatagcaagaagttgaaacagaaacagcgtgagcgtatgcagcccaagatgggcaaaatggatatagattatcaggttttgcatgacgcgttcttcaaatatcagacaaaacccaagctgtctagtcatggtgatctgtattatgaaggcaaagaatttgaggttaaactgagggaaatgaagccaggcatgctgtctcgtgagcttaaagatgctcttggtatgcctgatggcgcccctcccccatggcttataaacatgcagcgctatggtccacctccatcttatccccaactgaagatcccaggtctaaatgccccaatcccccctggtgccagttttggttatagaccaggggagtggggaaagccaccagttgatgagcatggacgtccactctatggagacgtttttggtgttctgcagcaggacgaacctaactacgatgatgaacctgttgatcgcagcaaacactggggagatttggaggaagaggaggaggaagaagaggaagaggaggaagaggaagaaccaatggaagacgaggaaatggaagacggaattcagtctgtcgataccatctcaagtactccaactggtgttgaaacacctgatgttatcgaccttcggaagctgcagaggaaggagactgacaagcaggcagaacggccgctgtaccaggtggatctgcttaagaatcaaaagtcagacaaggtggacgtcaccatccaacccgaggaactggaagccatggatgatgttctggcagccaagtatgaagaagctcgagaggaagagaagcttcggaaccaaaaggaggacttcagtgacatggtggcagagaatgctcacaagaggaagaggaagcaagagaaggaaggcaagtcgaagaagaaggaattcaagttttaa

SEQ ID NO: 27010 - DNA, 468 bp, Zea mays
  Peptide Sequence Number=SeqID_70385
atgacccgcgcccgcgcctataaaaccctcccagacttcgattgtacccttccgcgcaccctcacacctcaccggagtctagctcgccgccgtttgcccgtgcgcagcgtgtccgcgaccgcccaatccctctgccaccgtagaccggccagtggagccattcccaactccgtccagctctcggagaagactgtgcacacctccgtgaagctccccgagcaaggaatcggagtttgcttcgccggagaggccagtccacgctcgccggagctctcaaccccgccggattcgtcgtggtttggccggtatactcgccgccgacgaggacacccgcctgcacgcgtggaccgggcgattctggccatccccgacgtcaagccgtacctcgacgtgaccgccagagtctccccgagccaaccccacccttcgccggacctccctcgccgccgaaactttgaaaattcataa

SEQ ID NO: 27011 - DNA, 54 bp, Zea mays
  Peptide Sequence Number=SeqID_70386
atggcctcgactagcgtcggaggtactgggggtggattcgagaaacaaccttag

SEQ ID NO: 27012 - DNA, 370 bp, Zea mays
  Peptide Sequence Number=SeqID_70387
atgtccggtgcaccggctgggcgcgcagatctgttcctgtgctgccctatccggcggttcaccggacagctactgtgcgctgtctgctcctggcgatttccacctcctctccatcaacggcggtggtcgccagcggtcggcttcggggagctcctcaagccagagtccgtgttccatctctctcctgtagtgaagctctgtgatcttgcttgttcgcttgctcgtctcctgctctgcctggatcttttgtctcttgagaagatggtgcaggcgaagaatgtcacaccgttagggggaggagacgacgaggaccctccttgccccttcaggcaggtcaaggggaagaccgtctatcttgagcagcaagaag

SEQ ID NO: 27013 - DNA, 369 bp, Zea mays
  Peptide Sequence Number=SeqID_70388
atggacggccaagtcactccagcaaccatgtcctccagagaacctgtaaaattatgccacaagcaaggcgaatacaatggatcaagcagtctcattagctgcgagaagcagacgattcgaatcgagttttcatccttgcaagtgaccgcacttgtacccaccataaccggaatgggagaccacgtctcaggtcgcgtgaggggatatgtccactgccagatcctctggggcaggctctggtgctggatccggggctacctcctgagcaactccttgctccggcacgaggacttcgcggagaggtcgccggagctatgggcgagctccggggagttcggcgttggacagaggatgcaacggggaagctag

SEQ ID NO: 27014 - DNA, 477 bp, Zea mays
  Peptide Sequence Number=SeqID_70389
atggggaggttcggcgaagggtggggttggctttgggaggttcttgcggtcacaacgaggtacggctcgacgatggtcaatccaagggcacggggagcttcacgaggtgctaaagagtcgacccgtgcaaggaatcgaagaataactcatcgtggagctcggtctacgttcgccggcgggcgggtgaagtccggcaaccttgatccagcgtctccggtgaggcaaggcttgattcctcgctctgggagcttcaccgaggcatgtagagtctatttcgagggttggatagggctgggaatggctctgctggccggtctacggtggcgggggatcgggcggccgctggcacgccgtgtgcagggcaaactccggcgatctcgtgctccggttataaagttacttacactttggttaagggttaactcatggtttgcacatttgtttaacctttcccttaaccagggttctgggagttaa

SEQ ID NO: 27015 - DNA, 543 bp, Zea mays
  Peptide Sequence Number=SeqID_70390
atgacttctcacgggtcctcggaaggagggaacgcacattcccacacggacagacttgcacgagagggttttccccgtatcttgtgggaggtacttcagggagcaggttacacgacgcctccccagtacacggtgcagctgttcgagaagcaccgggtgccccgctgtagggtgaggatgaccctggagcctcatcccttacagtcaggctggcgttcgttggactccgagtctttcggataccgggctgaggatactattgaggcgattgctctccacgggctaaccaccttctgtggttttcaccccttggagctgtctactcgtcccattgacttgttccccgctgaaaaggaggacgacccaatgtggaaagaccgagtggagcatgctaagtgttggggacttgttctcaaatgctatgaatcaagaacaaggcaacataaaattttaaatatcgaaggcccttcgtcctccaagtcattatttcccttcggacataatgaatctaggacgaaggttatgaaggatgtaccttcatga

SEQ ID NO: 27016 - DNA, 111 bp, Zea mays
  Peptide Sequence Number=SeqID_70391
atggagagtcatgatctccgggcagaatgggaatcacgacttgtgggtaaagaagaaggcgccgaggcggatctccaggagttccaggacttcggtgagttcgaggattag

SEQ ID NO: 27017 - DNA, 168 bp, Zea mays
  Peptide Sequence Number=SeqID_70392
atgcccgtcggtggtttgctgtttttgcgcagccccgccgtcgtcgtcgttcaccccggagagaaaccccgtgttttgcgtggagaagaaggcaagttgttcaacgctcgtcaatgtgcggagctatgcacaaatcgaatcgccaacgttcttacaaacaccgattga

SEQ ID NO: 27018 - DNA, 378 bp, Zea mays
  Peptide Sequence Number=SeqID_70393
atgtcgtcgagtccgccgccgctgggcgggctgacggccgccgttgttgctgtcgtgctgcggaggaaggagtaccatgttgtagctgccgtcgagggacatgaactcgagactcccgaaacgaagcagcgtcccgggctggagaggttgctggagactacccatctagagcttgacgggaagttgttcgtcaacacacagcagacccctacctggcgcgccaactgtcggcgtttcgaccccggggggtccctggaccgacgagtaaaattgtcgctgcgtgtcccagcccagatgggtcggcgcgagatggaatacaagggggagagaaccgcggctcgtgttatcctgcgcctagggcggatgcgcttgcagtag

SEQ ID NO: 27019 - DNA, 246 bp, Zea mays
  Peptide Sequence Number=SeqID_70394
atgtcgccgtccgaggccgggccagatcccgccgaaggtggaaacaacgccgagggtgctgttgttccctctgttgatgacttgttcgtcggtagcagaatcacttatccaagcgagagttacttatcgcggaaggtgatgagtgaggaccccgctatcgaagcaatcaaaaagcgcgaaagatgttctggcagaaagactttttctgaggaaaattttgatgcagagggggttccccccttctag

SEQ ID NO: 27020 - DNA, 306 bp, Zea mays
  Peptide Sequence Number=SeqID_70395
atgcaggtggcatgcaactgcaccacggggatgcacccctccggcttcgacgcgtccaacatggaggcccaggcccacacgtcatgtaaccggcgcatcggttactacgtgcgaaaaactgcactgccacttgcgccaatgccgcgccttctcgactgcggaaccggtgccgcgactcgaggcaaccctgcgcatgccccaacagtgccaaccgagcacatcggtcacgggtcgggaccaggaaaggggatactccgaaagggatccttctccacgaaggaagcgggccccgagccctcctactga

SEQ ID NO: 27021 - DNA, 528 bp, Zea mays
  Peptide Sequence Number=SeqID_70396
atgaattttgcggaggacgcgcggcggccggagaggaggaagaagcactggcttcgcgggtacgtggccaacgacgtggcagtaactccggtgaaccacggagggttcagagaaggtcatggcgacgctgtaaaacggctaggccacgcggcgcacggtcgggaagcggcggtcgacggcgagcctatcgggtttccaccgcggcaactctgtgcggtggtcgggtttacttttccggccggacttatccacggcaacgcgcaccaggtgttatccacttaccccaagctcaagttggaccggcggcggcacgaatcgcggcggaaatcggtcgccggcggtaagagcagtcgcactggcgtcctgatccattccagtctactgttccatggcaagccttatgcagagcacctgaccgagcgagttgagagccatttttctcttcatttttccatagtgacacaggttaagctctgcagcaaacttgtagagatggtacccactacaaacttgctatggcaatcatag

SEQ ID NO: 27022 - DNA, 423 bp, Zea mays
  Peptide Sequence Number=SeqID_70397
atgggctcgacggacgacggcgagacgcagacacacgacaaaggtgttgcgcaggctcacgacatcgcttggtatggcgagggcgctgtgcacggctcggtggacaagccacgcggatggggcactgggcgacgacacggatgggttgtgcgacgccgacgaacggcggtccctggcgcagggcggatgctggcacgacgatctaacccccttaacagggatctcgcccccgagattcaagaagaagttggcaataagataagacgctcaagaccaagcggtacacttcctgaggatcccttggaccggagcattgatacacacttgatgaggatgcagccgactccgatcttgactgatttggaggagttggaggttgccaactggacaagggcaagaggaaagaatagcgagaaaatctaa

SEQ ID NO: 27023 - DNA, 840 bp, Zea mays
  Peptide Sequence Number=SeqID_70398
attaaaggactgcaaagacaaattgatatgatatctcaacgtaaggagttaaaagaccacaggtggccagacctccaagttgcttttttgccgctcagagaaatagacatgggatatacaaagcagacagatagctcttcatgtggcctctttcttttgaactatatcgaatactggacaggggatgaattgtctgacagttttatccaggatgacatgtcacactttaggaaaaaaatggctgctatattactatcttcagacctgaataagagaagagggtgtctgttatacaaaaatgaaaaagaagttgactctggaagcccatcagatgttgagatattagaaaacccaacagattctaagaagaggaaactactccatgtgcttgatgatagtgaagtagtgtatgaagatgaggaaggccctattactcaagcagacttgcaaaggtggtttgttgatgattgggataaaagagctcatattttcgtcatgctacattacaggatgacatgggtgcgaagtttcaatccttttaagatagaaatatctgtcaaagacctgcaaaacatattaacgataaatcaagatatgattctaagatgttttgacatggctgttcggctgcttgccaataaagagtcacgtaggccgaaaggagaaatcataaataatagaaagcattatatggacatgcgtttctggagaatggttggttttggtaaacttccaaagcaccatcaggatcctacaacagaagagttagccaaaacactcgattgttggccatcaatgaattattatatcacgggttgtagatatgttcttatgccatga

SEQ ID NO: 27024 - DNA, 549 bp, Zea mays
  Peptide Sequence Number=SeqID_70399
atgcctgcggggattattcatacccgcccgcgactatactgtagacaaaacactaacactgaaattcgcagaacgaataaggaggaagccaagaaggcaaccatagcacgtgatgatcgcttcccatacaacatgcaatctttgctaattgcagagcaggaacctggtgagcacgagcaccttgcagacgacggtgaagagcgcgaagatggacagatcccaagaccgctgcctcctgggcctatctacgcccttggcctcggcgtggaggttcttggccctacgcaacgtgtccacctccttgagcaggtcaaagtggaggcccttgtgcttgagcttggagacacacctggccaagagcagcgcatcctcgcgctaccatgcaaggaggcgttccaggttgacctccatgtcggacttgtaccgctgagcccagagcatggagagcgaggagagcagcaagatgagatgggggatccacgatcgctacacggtgctaccgaggcagtgaaggaggaaaggaagaggagtaggacggaggtggcgtga

SEQ ID NO: 27025 - DNA, 915 bp, Zea mays
  Peptide Sequence Number=SeqID_70400
atggcgcctcctgttgacgtggtcggtccgtgccctaggttgggcgaggtggaggctcctccgaggtcgagtctgtcttccaaggtcgaggtcgagtccgagcccccgggtcggacaaggcggagactggctgagcccgagtctgagccctggggtcgggcgaagcggagttcgtcatcttccggggctgagcccgagtccgagccctggggtccggcggagcggagttcgtcgtcttccggggctgagcccgagtccgagccctggggtcgggcggagcggagttcgtcgtcttccaggactgagcccaagtccgagccctggggtcgggcgaagcggagttcgtcgtcttccgaggctgagcccgagtccgagccctggggtcgggcgaagcggagttcgtcgtcttccggggctgagcccgagtccgagccctggggtcgggcggagcggagttcatcgtcttccggggctgagctcgagtccgatccctggggtcgggtgaagcggagtttcccatggcgcctagggccagacttggctgctgtcagcctcactctatcgagtggctcagcagtcggagcggcgcaggcggcgctgtcctcttgtcagaccggaaaaaggtgtcaggccacctttgcattaaatgcccctgcgatttggtcggttggcgtggcgatttggccaaggttgcttcttggtgaagactgggcctcgggcgagccgaagctttgtgctgatgggggttaccagctgagatttaggagtcttgaaggtacccctaattatggtccccgacacgtggtgactggcgagtcccgcggcatgcacgcctgtgatttggccgagcgcgtgttgggtcgcgacattcccggccacgaaatccgccctggttctgctttctgttgggatccg

SEQ ID NO: 27026 - DNA, 1149 bp, Zea mays
  Peptide Sequence Number=SeqID_70401
atggccgcctttcaaggaggtcaccctccttttaaaggcgactctccctacttgcgtccccagccgtcgcgggctgagtcttctccaacacgctccaaggtcctccccctacgacacgggggctgggcccacgcgtcatgcaagctggtccagggcagaaggagccaaaccgccacgcgcagggcatgcaactgcccagcggttacaagcattcctccactttcgtccagaccagcgggcgggcaggagcagcggtcacgtcgtcagccaagcttacgtcccatccaggggcagcgagagaaccctctctcacggcgtgaagacggcggcgcctcaggcaggagaagcaagcgacgcttcgccttcaccataatgaccgcgtcgaaaaagggaccgggaaagggggataccccgaaaaggacccttctccatgaaggaaacaggccccgagcctccctactgatcagaggttcaaaggctggcccctcggaggggttcaacggccgcctcagagcgcttgggttctgcgcccactactggtcagaggttcgatggccggcccctcagaagggttcgatggccgcctcaggccactcgggctccgcgcccactactgatcaggggttcgtaggctggccctcgaagggttcacagtcgcctcagacacagagtgaggaattaccctgggtacgttcgatacataaccaaggctcgggctacgctcccgagctcaccggagacaccatgttcggcgccctccgagggcaacatggcgctttccccccctcctccttgcggaaaggcgacgcaggggccgtcgcctgcgctgctccgactgctgagccactcgacagagtgaggctgacagcagccaagtccggccctaggcgccatgggaaactccgcttcgcccgaccccagggctcggactcgggctcaaccccggaagacgacgaactccgctccgcccgaccccagggctcggactcggcctcagccccggaagacgatgaactccgcttcgcccgaccccagggctcggactcgggctcagccccggaagacgacgaactccacttcgcccgaccccagggctcggactcgggctcagccccgaaagacgacgaactccgcttcgcccgaccctag

SEQ ID NO: 27027 - DNA, 648 bp, Zea mays
  Peptide Sequence Number=SeqID_70402
atggagtgtggaagatttagaatgctcaaagtatacttgggtgactcctccatgcgcctaggggtcccttttatagccccaaggcaactaggagccgctggaggcatttctggaaggcaattcttgtcttctgtcgggtggcgcaccggacagtctggtgcaccaccggacatccactgttcattgtccggtgcggatcgccttccatttctggcgcagccgaccgttggatcttcgggctggttggcgcaccagacactgtccggtgcacaccggacagtccggtgcccccagccgaccgttggcgtgggccacgcgtcgcgcgcgaattgcgcggccgaccgttgccctggtggccgttggctcatcggacagtccagtgcaccactggacagtccgtacagccactcgagactgtatggacaatcactcaatctgaactcgtacggtccaaaccctagggttatgatggctggggagcaccgggaggatgaggagggggaatgttttgtccggtttggacatggcggtggcctgactccttctggtataaccgttaagcagctgaagacttcttttctgctatgctcgactagaagggggttgtgtgattgtgtctgcacccagtctgcctatggcttgggctag

SEQ ID NO: 27028 - DNA, 189 bp, Zea mays
  Peptide Sequence Number=SeqID_70403
atggaagagttctatggtggcgacgcggcgttctgggattttggctacggtagagttcaattggctggcacagtaagtaacccgaggctaaaggaagtggcgccggcggccaggtacgaccacaagggccagcagtcgcgtggtgaccggggcattcgcgcgccacggcggcgatcttaccccatctga

SEQ ID NO: 27029 - DNA, 792 bp, Zea mays
  Peptide Sequence Number=SeqID_70404
atgacggtggcaggcgggcgggagcagcggtcgcgtcgtcggccagactcacgtcccgtccgggggcagcaagagaaccccctctcacggcgtgaagacagggcgcccgtgatccgttcctcgaacggctcgcgcatgcgcaacggccgccctgccaacaactcaccccgtcgcattaactccgcggcgggacaggcggcgttactggcaggagaagcgggcgacgcttcgccttcgccggaccgggaaagggggataccccgaaaaggatccttccccgtgaaggaaccgggcttcgagccccccctactgatcagaggttcgaaggctggccctccgaggggttcaacagtcgcctcagatcgcgtgggccctacacccactactggtcagagggctcggactcgggctaagccccggaagacggcgaactccgctccgcccaacccagggctcggactcgggctaagccccggaagacggcgaactccgctccgtccgacccagggctcgaactcgggctcagccccagaagacgacgaactccgcttcgcccgaccccagggctcggactccgccctggcctctgccgaacgacctccgcctcgcccgacccaggagctcgggctcggcctcggccatggaagacagactcgacctcggcttcggaggagcctccacgtcgcccgacctagggcacaggcccgccacgtcaacaggaagcgccatcatcaccctgccccgagccgactcgggccgcagagaacaaaaacagatgtcccatctggatag

SEQ ID NO: 27030 - DNA, 252 bp, Zea mays
  Peptide Sequence Number=SeqID_70405
atggcggaggttctaataagtaaccttatgattggaaattgcagtgatcggttgtgtgctggcagtgctcatgctcaaatataccctccactcactgacgttttcaaacctctgataaaggagggcaatgtctacaatgtctcctacattcagatcaagaaagctaataggatgtacaagcatgttgacaacgatatcatgatcggtttcacaaaatggatcctatgctgcctcaacaaacccgcggtttga

SEQ ID NO: 27031 - DNA, 528 bp, Zea mays
  Peptide Sequence Number=SeqID_70406
atgtattctaccagctattgcacccacctgcatcccaaaccccccaccagagaacttgaatttgggatttcccccaaaccggttgaagaacaccgtgaacccaagctcaccgtggaaagctctcctcaggagcccgccaatcgattggaacacgaacacctgtccgcgccgttcactgtcctcgcgggcagagcttggcagatcaccaacgaacgtgaagaagaaatagaagtcaccgaagacaggacaccaccaccttcggaatctcaggccggagattgtttctactttgatatctgcggatccgagcctgattcacctgtaaacgaaggcaagccccggcgtgctgaccgaggaccctttaactggtcacatgcctcgtcatggcatacccttgagagtcttttccttagtcgggtgaggaagcgacaaatttttgttgcttttgctccaaggtggtaccaaatgaagaaaaacaagactgaagtgcgggaggacttggtcctccacataggatcttttgcttaa

SEQ ID NO: 27032 - DNA, 356 bp, Zea mays
  Peptide Sequence Number=SeqID_70407
cgcccttatctcctacgcgcgtgctcatcgatccatttcagctgccgcgcgtccctgcggtcttccagctccagcgtcggctgctcctccctggccacccgcgccccttgcttctcccttctcacgctccccgtcgagctccctggtcgccgcgcagtcgagctccctcagctcgctcctcctgtgccgcgcgccagcccctggttcggctctactcctccctgcttgccgttcctatccccctgccatggagtccgtcgtcagtccgagctcgcccatcctctgctcggtttcaacttggtcgtgcctgcagcttctcccatagtgagctccctccactgccctaggttcccatg

SEQ ID NO: 27033 - DNA, 210 bp, Zea mays
  Peptide Sequence Number=SeqID_70408
atggcagaagcaagcttccacgtgttcgacgcgagctggcatccgggggcgcgctcagagcacgcccactgtaatcttgctgacggagagtacatcctcgtgccggagcaaggagctgctcaggaggtagccccagatccagcacccgagcctgcaccagaggacctgcctgccactgctttggaaggcaagccccggttttatgcataa

SEQ ID NO: 27034 - DNA, 714 bp, Zea mays
  Peptide Sequence Number=SeqID_70409
atggttgccttccaagggggtcaccctccttttaaaggcaactctccccacttgtgtcctcagccgtcgcggactgagtcttctccaacacgctccaaggtcttccccctacgacacgggggctgggtcccacgcgtcatgcaaactggcccaggacagaaggagccaaaaccgccgcgcgcggtgcgcgcaactgcccagcggttacgagcattcctccactttcggccaggccagcgggtgaaagggcggaccaccatgcaggcggcatgcaaccgcaccaagggggcgcacccttttgacttcgacgcgttcagcatgagggcccaggcccacacgtcatgtaaccggcgcaccggttactacgtgcgagaaactgcaccgccactcgcgccactaccgcgcctcctcgactgtggaaccagtgccgcgactcgaggcgaccctacgcacagcccaacagtgccaaccgagcacatcggtcatggggatcgggaaaggggatactccgaaagggatccttctccgcgaaggaagcgggccccgagcccccctactgatcagaggttcgaaggctggcccctcggaagggttcaacagccgcctcagagcgctcgggctccgcgcccactactggtcaggggttcgaaggccggcccctccgaagggttcaacggccgcctcaggccactcgggctccgcgcccgctactga

SEQ ID NO: 27035 - DNA, 393 bp, Zea mays
  Peptide Sequence Number=SeqID_70410
atgggcaagagtaacaaacgcaagcgcgagccgactcctccatcggaggacttcggcgactcggaatactcggaggaggagttcttctccgagtccgaggggtctccggctcccgtctctcccccggcgtcgtctgacaattcagacgactccctggggattgccgcggaggtctggacttatatccgggccgtcgagcgctccgggctcgagggctcggatgagtcggagtactcctcgggcgaggaggactcttcggactcgtccgaggagggcggtggcggcgatggcggagatgacgacgacgacgacgacgacggaggcgacgacgacgatggcggtgacggcggcaacggcggcagcagcaggggcggcaacagggccagtggctag

SEQ ID NO: 27036 - DNA, 246 bp, Zea mays
  Peptide Sequence Number=SeqID_70411
atggcccagaccgaagctgccttctccatagatgatacgaaggatccttcagatgaagcaaccttgatgggcagaaaattctataatgatatctgggttgctgtggtggaggtggtgggggctgaggccacgaagcctgtgaatgacttgctgaagcaacagaagctacaggatgattgcccacatattcaaaatagtgatttggcacattcttgtagtatggtccttgttctcaccatagaataa

SEQ ID NO: 27037 - DNA, 732 bp, Zea mays
  Peptide Sequence Number=SeqID_70412
atgatgaccgcgtcaaaaaagcgggccacgagccctcctactgatcagagggttcgaaggctggcccctcggaagggttcgacagccaccccagagcactcgggctccgcgcccactactgatcagaggctggcccccgaagggttcgacagctgcctcagaacacacagagcgagggatgactctgggtacgtccgatacatggccaaggctcgggctacgctcccgagaggctcgggggctgctattgcaaacccggctctggccaaaccgttgacagcgtcaacataccagcccgagaacttagaacctgactatgcacccgggctacgaccagtcaaggctccgtccactcaagggacacgatctcgcctcacccgagcccagcctcggacaggaacagtagacccaggtggattcacgcctcgcccgagggcctcctcaagcaacgggcgcaccttcgactcgcccgaggcccagctcgggcaggcttcgcagagaagcaaccttggccagatcgcctcgccaaccgaccgtatcgcaggagcattcaatgcaaggatcgcctggcaccttatcctgacgcgcgttcctcagtcgacagggccgaaggctcggactcagcctcgacctcggaagacggtctccgcctcgcccgaccccagggctcggactcaacctcgaccccggaagacggtctccgccttgcccgaccccagggctcggacttag

SEQ ID NO: 27038 - DNA, 252 bp, Zea mays
  Peptide Sequence Number=SeqID_70413
atggggaacgcagaaaaaaaagagaaggccgagagtgagtgtcgtgggatcgccgccgtgggtggaggagagcagtcgggcggagtcaggggggtggtccttggtgaatcgccgctctgcccggggggggattcatccggtgcttcgcaagaacggcgggccggcgcaccgtcgtcaccactgaaccacaaggcttccgtcgctccacccagggataacctgttcgaacctgggcgccggaccgtagattag

SEQ ID NO: 27039 - DNA, 126 bp, Zea mays
  Peptide Sequence Number=SeqID_70414
atggaagatgaattcagagaactgaaagcagaattcccaaaagaagaagattatgaaattcaagaagtggtttctgaagaggagtctgcttcagtgcctgctcgtccagtgatgggagccatctaa

SEQ ID NO: 27040 - DNA, 339 bp, Zea mays
  Peptide Sequence Number=SeqID_70415
atggcgcctgaggccggacttggctgctgtcagcctcactctgtcgagtggcacagcagtcgtagcgacgcaggcggtgctatcttcttgtcaggccgccggtctggttgttccctcatgcgaactggccgtagcccgggtgcacagtcgagtcccaagttctcgggctggtatgttgacgctgtcaactgttggggaccttcggcatccgaaggtcctcaaaaacaggatttaacagtgtttctggagtataatgtgcgaacaggtatcttcggactcaagtcaggcatcacagtagaccagaataatacgaaggttggtgaagcgccgaaggtgtaa

SEQ ID NO: 27041 - DNA, 210 bp, Zea mays
  Peptide Sequence Number=SeqID_70416
atggacatcaaagatataaagacctttaatggaggtgatgaatactacaaagcgttttttgcagagatctgggataaaggtggccgacaattatctacttccaaagttgaagcttatacccagaagaggaaatatgcgaagaggaaggtgattatacttgagctctacattcccttaggaacaacttcgaagctttttcacctttactag

SEQ ID NO: 27042 - DNA, 462 bp, Zea mays
  Peptide Sequence Number=SeqID_70417
atggatcaactcttggtgaaaggacaagacataaaaaagtggcagaggatccaagaatcagaggtcaaagaagctttcaataggatgaaagaaggcaaggcgatgggctcggatggtatcccaacagagatctacgtcgcgtggtgcaaatcttcgattgttttcggtggagggaagaagggaggaagtaaagggggagaacccaaggtggtggacttctggaccgtacttagggatttgcccaaacttccgtttcgtcgcgatcttatggtccgaccgtaccggtacattgagcatcatatgttgcccgagaaggggcacctaatttctcctttgggaaaagagggatgtagcagcacgaccactacacctttaataaaggaaccactacttaataatgttgttaatcagggagggtcatgtctagagaatttctatgttctagcttctcttggtggttga

SEQ ID NO: 27043 - DNA, 282 bp, Zea mays
  Peptide Sequence Number=SeqID_70418
atggtctcctggtttgggtccagtggctgcagagcggcagcccctgtcgctgaagctttcttcggtggcatgacaaagcttcggcgctgcgtcaaccttcgtattctttgtgcttctcacattgtggttcgttttttagccttcggaaggtacctgttcatgtattatactccagaagcattgttaaatcatgtttttgaggaccttcggaagacgaaggcccccaacagatatagtggacaccctaagtcgagtaagagtgagcatgttgcaccgtcctaa

SEQ ID NO: 27044 - DNA, 504 bp, Zea mays
  Peptide Sequence Number=SeqID_70419
atgggcaagagcaagaagggcggaagttcgtcgcaccactccggcgacaagcggaagcacgagccgagtcccccctcggaggacttcggtgactccgagtactcggaggaggagttttcctccgagttcgaggggtcaccggtctatgcttctcccccggtttcgtccgatgactcggacaattctcaggggatcgccaccgaggtgtggacgtacatccgggccgttgagcgctccgggctcgagggctcggatgagtcggagatctcctcggacgaggagaactcctccgactcgtccgaagaggggagcggtggtgacggcgacgacgaaggcgacggcggcgatggaggcgacggcggcgatggaggcgacaacggtgatggaggcgacgacggtgatggcgacggcacgggcgaaggcgacggtggcaagggtgacggcggcagcgacaagggcgacggcggcagcagcgaggccagtggcaaagcgccactggcttaa

SEQ ID NO: 27045 - DNA, 171 bp, Zea mays
  Peptide Sequence Number=SeqID_70420
atggttaaaaattttggcaggaaaacagtgcaaatagcaatgaatgctgtggtaacttcacacctactcgtctgtttatatagtgctgcagcacttgagaacaagttcccaacaactggtatatcagctgagctcatggttaagagcggccttgggatcctctttgattag

SEQ ID NO: 27046 - DNA, 399 bp, Zea mays
  Peptide Sequence Number=SeqID_70421
atgccccctacaccaccacaaggcatcccggctactagaggataccctgatggagacaacgacgacaccggtggcagttcgagccacagcatggagctctcggaggagcaggagccgaagggatggatcgctagatccatcactcgcgacgtcgctcgtggatgtcacttccacgacgctctcgacaccttgatgcgttgggccttcgaccgatacacttggtctattgagtaccgttgtgtagtctaccagcatcgtcgcgagttatacccggaccagtgggaggatacttgcttggtgcgtcgtccgatcgatgatctctggggtgcagaggccttctcagagcattattctatcactaagatggatactgccgggtacgggataatccaactataa

SEQ ID NO: 27047 - DNA, 156 bp, Zea mays
  Peptide Sequence Number=SeqID_70422
atgcccctcataaaagtttacaacattgactcagacccttatggactaaaagatgtaattgtggacattaatccacaattcatcacactcaatcaaagatccaaatcagacaaatatcataagaacaaacattcaagttcacagatacttatataa

SEQ ID NO: 27048 - DNA, 480 bp, Zea mays
  Peptide Sequence Number=SeqID_70423
atggggatgcactcaggaccgtataaggggatgtacagtcgtgttgatagagacctcccagcgcgcccttggtccgtcgcatgtatgttcggtcgtggcctagtggtgacgtgtcttgtccttgctgacgcgggtcgggtgtacttgactgggacttccgcctcgccgagttacttggtgggaacttggtcgttcggtccgcctcgcagagtcgctcggtcactccgtctcgtagagtggctcaacgagacttggtcggtcgctctggctcatagagttgcttggcaaggccctagtcgacgggtgttgtggtggaggcaggaagcggtggtggcggcggccggagaggaggaggcggcggcgttcgaagagaaggcgggagttcaatcagatctagctgcatcgtctttcttcggaggtagcgacgctgctggatccttcgatgtgccacccaccggcatcagagtttttgttgagtga

SEQ ID NO: 27049 - DNA, 1059 bp, Zea mays
  Peptide Sequence Number=SeqID_70424
atgtcgttccctctacctgcagcagtagcaacgtgcgacctgccctccgtgccggtcgtcctcaccagatgcgcgaccctgctcggcttccctctttgcatgcgcgcagagcatcaccagccgccgtgctgcttgccgatccatggtcgtcgctcgccagacctcgccccatggttgtcgtgcgcgtgccgccgggtggtcatccgcctcgtctatgtccacggggttcactcgcacggagctctgcggcctcgccttctctgtcctcgtcgcagcagagcagtcatctcgccgatcatccccagcgcatcctggaccctctccgctccttgctgcttggtcccagctcgtgcccaaactccctctgcccgtctccggctccctgcgcgcgcgcctgcttcctacgccgcgcgccgcgagcaagctcccaggtgctcggctagctcgccctctccagcgcctgtctcccctgctgtgagcccagtgcctagccccaactccccgccgagttccctgcgcgctcagccggagctctgctcccctgctcctctgcgttgcgctccttgtgcttgcgcagctgaacgtcgtgccgggtactgcgcagtgttttgtccgatgtcgagcttagctcggtttttgtttctctgcagcatcgtacaccgcatgtcgtcgctgctccccatcgtgccgtcgatcccgcttgagcccttcgcgttcatcgaagctccctggctcgactctgcccagttcgcgtcctgctcatctttgcgtcgcgcgcgtagcgttccattgttcctgcgcgtgctgctgcgaagctccctgttcagtctcttctgtcgcgttgttatgcgtgcaaagttttctgctcacgactgtggtcgtgttcatcgaattcgcaacgctttgttgctgattcgactgtcgtcgttccgcgcgccagcaagaaatcccaaaaatcgggtgaagacgaagcttgtagcgcgatattccccaagcgctcgacaaattgcctggatcggaaaatcgctaccgatctcgtggattcgagtcagccgttga

SEQ ID NO: 27050 - DNA, 279 bp, Zea mays
  Peptide Sequence Number=SeqID_70425
atgtcggccgagccaaacgccggcgagaccaaggtgacaaggtcccgccttgccggagaccttcgacaaggatcgcgggacatagagataaggagactggcgggcaccggttccggtgaggctagacacagaaggaataaggtggtgcgctgtcagcagtggcttgagcatggtcacgcggcgtccatgcataggtaccacgcaagttcatatccacaattgaacaatggcacagacgacagcaaagaaataggcagagaggtcaccgatagtggataa

SEQ ID NO: 27051 - DNA, 150 bp, Zea mays
  Peptide Sequence Number=SeqID_70426
atggcgcatgaggccggtcttggcggctgtcaacctcaccctgacaggtggcacatcagtcggagcagggcaggcgacgctattttcctgtcaggagaagaacaggtggttcaagaggagccacacatcgaggagttcgatttgatctag

SEQ ID NO: 27052 - DNA, 744 bp, Zea mays
  Peptide Sequence Number=SeqID_70427
atgggcgggtccggaaccgccacatggccagaaaagatgatatactccaaggtatcaacagtcggtccggacccccatgggaaagtgtcggacccctatatatacagaccggaccttcgagtaaggcggagccccgatgctgccacgtggcatggtgcacgtgacgtaagccaacgggcggggcctgacgtaaggcctctgggctacgcggcctctgcatttattgcggataaggcacgctgcctgtccattccactggcaggcgatgtgccgcctctgcatttattgagccctgcccattccattggcaggcgatgtgccgcctccgcatttaatgtgacctgtccattccgctggcaggcggcgacctgtccattccgcaggcggcatgtctgtgcattccattggcaggcagtacgcccatactgccgcgtgcactacgctcatcattactcgcacgtcaccaaggaagcagccgccgcatatcaatactgcatgagctgcggacatcagcacgcctggagattgctcaggcgttacttagttactcctacgatgtatttcttccattttgttcctgggcccacatgtcggggctcagcatccttgtatgtgccccccttgagctataaaagggagggcacacaacgttacagggcagacccaactcagactctgagactcacaagtccatacaagctctcaagctcacagattcaatacaacacacagacagtggagtag

SEQ ID NO: 27053 - DNA, 354 bp, Zea mays
  Peptide Sequence Number=SeqID_70428
atgctccgcctagagatcttcaagtgctttcttcgttgcctccaccgcctgggggcctggtgctgcctgcgccgcctagaactagcggacccgctcttccagctttttctccttctcctccgcctcgagctcatgctcggccagcaaattatcccgcctttcaaacatttcctccctaaaggcgaggtccttctcccgccaggcgagatccgtcgcccgcttatccaaggacgcatccttctccttgaggttctcctcgaccagggcaatgttgctggccttgtcctccagctcccgctcccatttgaggatcctctccacagtcgcggtctactggatccgctgctcttctag

SEQ ID NO: 27054 - DNA, 882 bp, Zea mays
  Peptide Sequence Number=SeqID_70429
atgcggcacctttggcaggcaaagcaggcgacgcttcacctccgccatgatgaccacgtcaaaaaagggaccgggaaaggggatactccgaaagggatccttctccgcgatggaaacgggccccgagccctcctactgatcagaggttcgaaggctggcgcctcggaagggttcgacagccgcctcagagcactcgggctccgcgcccaccactggtcagaggttcgaaggctggcccctcggaggggttcgacagccgcctcagaccactcgggctccgcgcccactactgatcaggggttcgtaggctggcccccgaagggttcgacagccgcctcagaacacgcagagcgagggatgactctgggtacgaccgatacatggccgaggctcgggctacgctcccgaggtaccctaggaatttctgagacccgcaggagcgattctgtaacaaaatcccatcagagggaggcatcgagccctcggaccctatcaaacgggtccgggtccggcaaatcacctgcaggctcgggggctgctctcgcaaacccagctctggccaaaccgttgacagcgtcaacataccagcccgagaacttggaacctgactatgcacccaggctacggccagaaaacagcgtcgcttgccctgctccgactgctgtgccacccgtcagggtgaggctgacagccaccaagaccggcctcaggcgccataggaagctccgcctcgcccgaccccagggctcggactcaacctcgacctcgaacgacggacttcgcttcgcccgacccctgggctcggactcagcctcgacccctgaatacggactctgcctcgcccgacccccggggcagggactcaggctcgacctcggatga

SEQ ID NO: 27055 - DNA, 1041 bp, Zea mays
  Peptide Sequence Number=SeqID_70430
atgtcccggccccggataccgacggcgccagcccactcggggctggctcgacgacccctagcccagcctcagatccgggctgaggccaagacgggcagccatgtcatcgtcttcatcatcgtcgtcatcgtcatcgtcgtcatcatcaggcgtctccggcgatggctcccttgggagcccgtccctctcctgccgccgatgatgcctttccaaggcatcccgagcccgcgtccgctcgcaggcccgagctttttacgcgtccttcttctccttcttctccgcagtgaccctccgcgcggctcggtccaccacgtcctctgggaccggtggcagaaaaggcttgtgaaaccccaccttcttgagacagacgaaaatctcagctgtgagaacccaagggcaatcttacacaagaaggaagaaggagcggacactcaccagggatatgcacccgcgctcagggcgcatcgagggctgggtaagagcaccggcgtccagctttcctaccgtggcggctacccgcctatggaggtcatcggcggggagggggaccgaggacatctacgaaccctccaggtcgacccccagcatcatctccgaaagcggcagtcgccgctccatcaaggggagcaccctccggggatggatggcggcaaccacccccgtggcggtgagccctccatctcgcagctcctgcaaagcctccagaaggggctggagattcttctgtctctcgcgcggggccccatagcaccagttggtgccggcggtggtcaccactcgttgagaaaacgatgggagcctcccctcgtcgttccgaaggtaaaaccaccggcgctgccaccccttgttcgaagaggcaaggatggcggggatgtactgctgcgcacgcgcctacctcaactgaaggatgcagccaccggcccgcaccgccatgcgaactctcctctcccccgtcgccaaggcaaaaggctccgcggagaagagatgggtccacagatcccagtgggggtcaatccccaaaccctttgcaaaccaccgtga

SEQ ID NO: 27056 - DNA, 438 bp, Zea mays
  Peptide Sequence Number=SeqID_70431
atggcgagctcgtcagtaggtaggactaggacagcaagcaagctcttgtatactgctagctgctacccagcagaagatggaatgggtggccacgacgagcgccatcagataagattatcttatcccgtcaatagatttggcgactcccctggggaacgatttgcatcgttttacaatgacaaaatgctagtgattggcatcctcatcgccaatcatagtcaggtcatggaggaccaaacaacaaagaaaatggcacaggacaagtcccacatccaccccttgaacgtgatcaaggtcacgatggaagaccttacagaggcagacatgaaagagcttgaggaagaggtcgcacaagagatggaggagagtcagaaggagaagttagcttgtttccgaaagaccaagaatggtgctgaaagtcgcctagagtgggggtga

SEQ ID NO: 27057 - DNA, 624 bp, Zea mays
  Peptide Sequence Number=SeqID_70432
atggcgcccacaattcaatggtggcgccatggtcgagttgcggccacccggcgattctggccccgaatcgaacagacgaggtttgctacacatctaatggaggattgcgaagcacggggaagcatccataccgtggttttgggcgtcggtggtacaatccgcggcgagcagtggatcggcgacaccgtccttgcacatggccacagcgcagcatacgcaaccagcactggtgagcgcgctctggtctgcgacctagccgaacgatggcacctaggtccgcccaacgttctggcgatgatttccccgcccgccagcgcacaggtacagggcggcggcgcacacgacgacctttcgatgtgcgcggaggatgagggcgctggtcttccttccgcccagcagaccgaggaggagcgcgcgaccgtggtgatactgggccaggagctagtggcccaggcgcaggtcgtcgtctgccagcggaatggacatgtctcattaaatgcgaaggcgacacatcgcctgccagtggaatgggcagggctcaataaatgcagaggcggcacattgcctgccagtggaatggacaggcggcacgccttatccacaataaatgctgaggccgcgtag

SEQ ID NO: 27058 - DNA, 267 bp, Zea mays
  Peptide Sequence Number=SeqID_70433
atggaccggccaactccgaccatccccgacggcaactcgcacatcgctgtgatccccgagacctcccctacgtcctcgaccacctcaccggagcaatctcgccgccgagagtacgtgctcatccccgagcaaggatctgtccaagaggaggatcaggagcaagcttccgaggctgctgttgaggatctccccgtagccccagcaattgaaggcaagccccggaaggatgccttgtccatgagacgggaaaacggaaataaggattaa

SEQ ID NO: 27059 - DNA, 618 bp, Zea mays
  Peptide Sequence Number=SeqID_70434
atggatgagggttgcactcaacccctttcaagtgatccgatgatcaacttgaataccatggtcttttcttttagagtatatttatcgtttgcgagggaatatccacaatttggagtctctcgcccttacaatttaagatcacaaaagaaatcacagagtaaaggggtatcttttatagccctaaggcagctaggagccgttggaggccaacttggaaggccaaacttgccttctatcgggtggtgcaccggacagtccggtccaccaccggacagtcactgtagctgtctggaaaacaacactattcaccccgttccgaccactgtgccaaccaccagggtaaaaccaacgacagtaagtcacgacctcccccgagttcagcctcggaagcaacagggagctccgccttgcccgacctcaggcctcagcctcagcctcggccgcaggagaaggtctccgcctcgcctgaccccaggcctcggcctcagcctcagcctcgggagaaggtctccgcctcacccgacctcgggcctcggcctcagtaggagtcacatcctcgcccgacctcagcctcggaccgactatgctacaagagatacatcattaccctaccgctag

SEQ ID NO: 27060 - DNA, 417 bp, Zea mays
  Peptide Sequence Number=SeqID_70435
atgtcccgtgggggagttcgtcgtgacacgttggagcaaaccacaacaacgcggtgggcggtggcacagggcgaggcacaactgagattggtgctcccctcatgggggttccctccttgtcaaatccttccctacagagtgacgaagtcgcactcccctctttctatgcaggtgaggaagggggcccaagtgtcggccatccggtggcggtccatcttctcgggaagacaaagaactgtcgccgtggcacatgaaggcccaatctggttctaccaaggcatcattaccggaaaagagtgtcaaggcacttcatcgaggcctcctgtggaagatgagctagaggaactttcgcgtgtggaggactgtctgtgggctcttgacgccgagcataccactttgtgtgtgtccatcaacatg

SEQ ID NO: 27061 - DNA, 831 bp, Zea mays
  Peptide Sequence Number=SeqID_70436
atgacctcagggcagacgctgctgcgacaaggccctcgcccacgtccccactcgaggggcgaggacaagctatcaaagccaaagagccggagcaccaacgacggcagccacctgcccaccaacaccgcaccagcgagcaccgaccgccccaaagcgcaccggcagggtcctccccctacgacatgggggctgggtcccacacgtcatgcaagctggcccggaacagaagaagccaaaccaccgcacgcggagcgtgtaaccgccccgcggttacaagcacacctccaccctcgccgaaaccaacggttgaaagggcggaccgccacacaggtggtgtgcaactgcaccacggagacgcaccccttcgacttcgacgcatccagcatggaggcccaggcccacacgtcatgtaaccggcgcgccggttactacgtgcgagaaactgcaccgccacttgcgccaatgccgcgccttctcgactgcagaaccggtgccacgactcgaggcaaccctgcgcatggcccaacagtgccaacggagcacatcggtcacgggtcagtcagccgcgggaggaggcacgacggtcgatgtggccaaaagtgggccggcagtaatggcggcagcaggcgagcggaagccgcagtcaaatcgtctgcaggctcacgtcccctcctggagcagcaggggagccctctcccatggcgtgaagacgacgcgcccgtgttccgtccctcgaacggctcgcacaacgaccgccccggaccgggaaagggggtatttcgaaagggatccttctccgtgaaggaagcgggccccaggccctcctactga

SEQ ID NO: 27062 - DNA, 132 bp, Zea mays
  Peptide Sequence Number=SeqID_70437
atggagaaggacacgctggagtgcgacatctgctgcctacccttccagtccgaagttttcatgtgcaagaacgggcattctggatgtgcaaagtgctgcatccgcatggacgttagactactttatctctaa

SEQ ID NO: 27063 - DNA, 324 bp, Zea mays
  Peptide Sequence Number=SeqID_70438
atgtacctgagcatgtctgggctagcactttcagagttgagctatttcttccgtcagctttgtgcaaaagagttatctcgaatagtggttgcagacttggaaagattggcacccatgtttagtttgtcaaacggccaaagagatccgtctatgagtgccgagttgagacaagtagccaacgactttgcttatagggtcaagaaatattctgggtttttggacaaatatggtgggcggttggctgaggaggaggagggggaggaggagcaggacggcggacgaggcagaacaggacgaggcacatcaggcggcgcagcaggatga

SEQ ID NO: 27064 - DNA, 366 bp, Zea mays
  Peptide Sequence Number=SeqID_70439
atggctccacggccagccgccaaccaccaggccacggccaagcagggcgccaagcacctaggccggccgagcggtgcgccgagcgcccgagcacccaggccaccgcccgccgcaccagagcggccaacggggcgccaagccgagcagagtttcaacagtgttcctgaccgtgtgttcttgatccaggtggctgccagcaagacgaagatctacatggtgcttgagctcgtcaacggcggcgagctgctggacaggattgcagccaaggcaaatgaaagtccatatgcaagcattacgcagaggtatgaagtctggtccaaccacgtggaaaaaatacctctgatccttacagatttcactgactag

SEQ ID NO: 27065 - DNA, 429 bp, Zea mays
  Peptide Sequence Number=SeqID_70440
atgccacccgccagggtgaggctgacagcagctgagtccagcctcaggcgccacaagaagctccgcctcgcccaaccttgggcctcggcctcaggagaagtctccgcctcgcccgaccccagggctcggcccccgcctcggcctcagaaggtggtctccgcctcgcccgaccccaaggctcggcctcaacctcgacctcggaaggtggtctccgcctcgcccgaccccaaggctcggcctcaacctcgacctcggagggtggtctccgcctcgcccgaccccagggcccagcctcaacctcgacctcggaaggaatcgcgtccacgcccgaccccgacctcggcctcgggaggggtctccgcctcgcccgaccttgggctcggaccgaccatgccacagggggtacatcattaccctacccctagctag

SEQ ID NO: 27066 - DNA, 480 bp, Zea mays
  Peptide Sequence Number=SeqID_70441
atggcgaacgacgatcgcgtggaggatgtggtcacacagacgcgcactcatgtggaggctcctattagttttgggccctggccaaatccggccctgagcatagctgggataatctacatacggcaatctcaacaaggctggatacaccacgaatattgccactggtaccacccactcgtctatttccccgcaactgccaagggcagctcgctccctggacttcgtcaatatccatttctgtgcatgatgtcgatcctgtcacgcccgatgcatcatcatatattttggcgccgatctaggcaccgccaatcactagatggtgtaccgcctggcggtgccctctgcggtggcgcagacggtccgcgacctgggcgcaggagcagtgtcttccctgcgtcacatcggacgatccacagctctaggtcggacggtccgcaacttggcgacaggatcgtcttcctcctccttgctagaatctag

SEQ ID NO: 27067 - DNA, 231 bp, Zea mays
  Peptide Sequence Number=SeqID_70442
atggaaggaaagccatcacgagaaaggaagtcggaactgaaacgagtgtctcctccactggcgggggtgggtgaattcatctgcggaagggaatcaaagtacaaggggtcaagcagtctcattagctgcgagaagcagacgattcgaattgagttttatccttgcaagtggggttctagtggttacaagtccactggatttttattatccattttgggtctagttttgtaa

SEQ ID NO: 27068 - DNA, 474 bp, Zea mays
  Peptide Sequence Number=SeqID_70443
atgggcaagaacaacaaacgcaagcgcgagccgactcctccatcagaggactttggtgactcggaatactcagaggaggagttctcctctgagtccgaggggtctccagctcccgtctctcccccagcgtcgtccgatgactcggacgactctcaggggattgccgcggaggtctggacttacatccgggccgtcgagcgctctgggctcgagggatcggatgagtcggagtactcctcggacgaggaggactcgcccgaggaggacggcgaaggtgacgacgacgacgacgacggaggcgacgacagcgacgacggtgacggcggcagcaggggcggcaacggcggcagcaggagcggcaacggaggcagcaggggcggcgacggcggcagcagtaggtgcagcaacggcggcagcagcaagtgcagcggcggcggcggcagcagcaagggcagcaacaaggccagtggctaa

SEQ ID NO: 27069 - DNA, 273 bp, Zea mays
  Peptide Sequence Number=SeqID_70444
atggacgccacggtgaactcggctagtgaaacatctcatcgcgccgtgggcatacttgtcacggaacctcccaaggtattagacccacctacagatgtccttgtcttaaggacctcagacagtcatgcagaaatagcagaactcagccgtttcatcacctacaacaacatgggtttgaaaaccctgagtacggagtgtactttcgcaagtcatacccgtcaaaggaaaagactctcaaggatatgttggtcgttgggaatcaaggttaagtag

SEQ ID NO: 27070 - DNA, 360 bp, Zea mays
  Peptide Sequence Number=SeqID_70445
atgaagcagtggccggacgacgtcgaccgacttctcggcatggcgcattctacctcgaccaggtccaggcctcggtcatcccaccgccaacatgaggcgacggcgtttgtgcgctcaccctctgtgaggggcgcacagaccgacgacctacgggcagagctcaaccgcaggcatgcaggagaggatgcccaggtcttcctagagagggagcgggagcgccgacaaaacttcgagggtcgcgaagacgctcgagtctctctagagagggcgcgtgagcgccggcaaaacatcgagggtcacaacctcgatcaagactttgctgcggtagcaccgcaaaccccagtgggcgcccagttctag

SEQ ID NO: 27071 - DNA, 369 bp, Zea mays
  Peptide Sequence Number=SeqID_70446
atgtctgacctaaccaccccgagaaaaccttacgccgcctgtgcccggtgccaaaggttcatctacaactatactaaatctactgtctggaataccgtagattattccggacaggagaagctttttggaaaaacaggccaagcgcggaccgtccgggcccttgcggcggaccgtccgcaacaccaggataacactcggacagaaccaatgcaaaaatccaagtctgcactacggaccgtccggaggaaaagcaaggaccgtctgagacctcacgcggaccgtccggcctcaggcgcggaccgtccggcgcggaccgtccggactaggcgggcagaccgtccgcggtcggcagaatggagcaacggctag

SEQ ID NO: 27072 - DNA, 492 bp, Zea mays
  Peptide Sequence Number=SeqID_70447
atgggtagaggcaagggatggcctcgccgcgctgacgggaagcgcaagcatcctccgagtccaccctcggaggacttcgaggactcagagtactcagaggaggtttcctccgagtatgatccgtcgcctgctctagcgtcccccatggcgtcgttcgaggactcggacgactccatggggttgtctattgcggcgcgggcgtactggcgattcattgagtgtgccgggctcggtgggtcggacgactcggaggagaccttctcggaggaggtggaagatttcactgacttcgaggagtggagcgacggtgagggcgacaacggtgagggcaacggcagcagcgacgacgacgacagcgagggcagtggtgacggcgacggcgaaggcggtgatggcgatgatgaggacaacgacccagaaaaggcgacgacaatggcaagggcgacgacgacggcaagggcgacgatgacaacggcaaggccgacgtcataa

SEQ ID NO: 27073 - DNA, 657 bp, Zea mays
  Peptide Sequence Number=SeqID_70448
atgcacaaaccagacccctgggacgggtccgagctactcatagtagggtcccgggattccaagacaaagaatacccaggccttaatcaaggccaggcgggggtccggtgctgacacgcagtacgcccgtgctgcggcatacactatgctcatcatcactcgtacgttgccagtgaagcttccgctgcacgccgatactacacaggctgtggatatcagggcggcgggtgcattccgccaccccgccggagatttcctctctgacactatcgagttcattgctctccacgggctgacaaccttttgtggctttcaccccttggagttatccactcatcccattggcttgttccccgctgaaaaggaggacgacccaatgtggaaggaccgagtggagcatgccaaggatctgatgggattggtggagtctaccaagatcaccctggataacagggaggaccttgtggtagacctgtccaccgaattggtggaaaatgacctccaggtggagcagatggccacccagatccaagagcttgaggagcaagtaggggccagggagaacaccatcgaggttctcgaggatcagctcctgaccatgcagcaacaacttgaggaagccaaccagcacttggatatgcaccaccaggaaatttag

SEQ ID NO: 27074 - DNA, 882 bp, Zea mays
  Peptide Sequence Number=SeqID_70449
atggccttgctagaccctcccgagcgtctccagcccgaggtggcactcaacttggtgcgcaacctgctcggatggggtgcgccagcgttcgtcgaaaggatctgtgtcggcgcctctactcacaacgacctcaccaccggggggttcatgctctttgtctccaaccacccagtggttgtccgcggaggcgacgctccttcccgcttcttcctccagcattcggggggaaggatgttccccagcctcgtgaaggtggacagtgggctgagccacggctccatccctcatgcccccaacccttgggggaaggcgggggcgagggcctcttcgcttatggcgcacgcgttgagacgaccaccgccgctggcttggccgctgaagacgtcgtacaagacgtcgtacgctgaggagatggcggcctcgcgcttccagcgcgaccctactgatgtcgagcttatggtacgagaccaggctaagcggctacacggctccggaccaccccaggagacaagccaacaggccgggcttacgagggcggacctcactgggccggcatacaccgaggtggtcacccacgggtcagcatatttccatcgccttgaagggtccttcccagctgggggagaccgtttctgtatggacccatcagaagactggacccttggggagtccagaagggtttccgggggaaggcaagctttggccccgtggaccggggagtacggggtccccccggtggcccgtctagctgtcaccaccggagtaggagtctctggtgatgacatccttcaggaccccctcgggtgggcctccacgctgtgctgttggcaagcgctggcgaagttcgctgtgaaccgcgcgcagagatcttcccaggaatag

SEQ ID NO: 27075 - DNA, 246 bp, Zea mays
  Peptide Sequence Number=SeqID_70450
atgaggtcgtggagcttggagggtgacgcagcaactccctggccgcagaagatgcccccggagccgctcttgacggagtctgggatgtctacgtggttgtatgctgctgtgcagcatgcacagcagcggtgctcgtcactgggcagttgggaacctgtggggtccggcactttcccatgggggtccagacccactgtcgccaccttggagtatactatctttcctggccacgtggaggccctgtag

SEQ ID NO: 27076 - DNA, 1347 bp, Zea mays
  Peptide Sequence Number=SeqID_70451
atgcaggtgatcgggaaggagctgtttgggcttctccgagagacgcacggcaagaggttccactccttcatcgaggagaaggtggtcccgttggccggcgacatcatccacgagaacctgggcgtggaggggccccagctgaggcggatgactcgggagctcaacgtcatcgtcaatggagctgccacaacaaacttctacgagaggtacgacgtggccctggacgtgaacgtgatgggagtgaagcatatctgccagttggccaagcagtgccccaatctggaggtcgtcctccatgtgtccacggcctatgtggtgggggagaagcaggggatgatcctggagcgggcgttcaagcagggcgagaccctgcggatggagacggagctggacatggacgccgagctgcgggtggccagggactaccagcagcaggtcgccggggacgacgccgagcagaagaacgagaggaaggccatgaaggagctgggcctcgccagggcccgggagttgggctggcccaacacgtacgtcttcaccaaggcgctaggggagatgatgctggcgcgggagctgggcggcgtcgtccccgccgtgatcgtgcggcccagcatcatcacaagcatccataaggagccgctgccggggtggatggaagggaccaggaccatcgacgccatcctcattggctacgccaagcagagcctctcctgcttcctagccgacctccagctcaccatggacgtggtgtgtattcgctgtgctcacccatgcatgggagcgatccccggggacatggtggtgaacgcgatgatggccgcgacggtggcgcacgcgtccgcccccggcggccacaaggaggagtcgccgacggtgtaccacgcgacgtcttccctccgcaaccctgcgccgtacgcggtgctgtaccggacgggaatccgctacttctgcgaccacccgcgcgtgggcaaggacggccgccccgtgcgtacccgcaaggtgcacttcttcggcaccgtcgcagccttcaccgcctacatgctgctccgctacaggctgccgctggagcttctgcgcctgctcagcctcctctccggcggcctcctcttctcgcgcctctacgccgacctggaccgcaagtacaggttcgtcatgcatctcgtcgacctctacgggcccttcgcgctcttcaagggcatcttcgacgacgccaacatggagagactcaggatggccatgcctgtcgccgaccggctggagttcaacttcgacccaaacaccatcgactgggacgactacttctacaagatccacattccaggggtcatgaagtacgtcctcaagtag

SEQ ID NO: 27077 - DNA, 528 bp, Zea mays
  Peptide Sequence Number=SeqID_70452
acccggacaacttcttccttgctccggggcaaccacgagtgcgcctccatcaaccgcatctacggcttctacgacgagtgcaagcgccgcttcagcgtccgcctctggaagatcttcaccgactgcttcaactgcctgcccgtcgccgccgtcatcgatgacaagatactatgcatgcacggcgggctctccccggacctggacaacctcaaccggatcagggagatccagcgccccgtcgacgtccccgaccagggcctcctctgcgacctcctgtggtccgacccggaccgcgacagctccggatggggcgacaacgaccgcggcgtctccttcaccttcggcgccgacaaggtcgtggaggacggctacgagttcttcgccgaccggcagctggtgaccatattctcggcgcccaactactgcggcgagttcaacaacgccggcgcgctgatgaacgtcgacgccagcctgctctgctcgttccagatcctcaagccgtacaggggcaaagcacaaacggagtga

SEQ ID NO: 27078 - DNA, 657 bp, Zea mays
  Peptide Sequence Number=SeqID_70453
atgtcttgcagacatgttcttggtattgatattgacccacagtcacttgaacttgctcaagaaaatgctgctgatctggagaataatctatacacatgcatggaagaacatgtaacacacggacctgggttcccagcaagaagcagcacgtggagggacgactctttggactttatctcgagcagttccgtcgcaaagccgcagggaatcgcagcgagcagccagcagccaaattggaagaggatgggtggggatgaaaccattgatataggagaggggcagatccggtggcggttgggttggggtgaccagcggcatgcacggaggttgttgggagtccggcggcacaagggttgcatctcacacccggatggctgggttcggggatggttccggggacggcaggagcggtttcgcgatggtttccgggaacagcgcgcggagtcggcggggatggcggctgcggctgcggggtcagcggagatcggcagatttgacggatgttacgggaatagcgcgcggagtcggtggggatggcggctgcgcgcggagtcggcggatgttgcgaggtcgatggctgcgagaacggggatggcggccgcggggtcagcggaatcggtggatcggcggatgctgcgggatcggtgggtcttgtga

SEQ ID NO: 27079 - DNA, 273 bp, Zea mays
  Peptide Sequence Number=SeqID_70454
atgggtcggcgcgagacggagcgcgaaggggggagggagccggagggagacgggcgtgagaggtggaatcccgtggccttcgtgtttgtcccgcgcccaggtcaggttgggcgaggtggaggctcctccgaggtcgaggtcgagtctgtcttccaaggtcgaggtcgagtccgagcccccgggtcggacgaggcggagaccgtcggtggatgccagggccaagtccgagccctggggtcgggcggagcggagttcgtcgtcttctggggctga

SEQ ID NO: 27080 - DNA, 762 bp, Zea mays
  Peptide Sequence Number=SeqID_70455
atgatcaaaggtatcctcggacaagtcggcattgctgtagaccgaaataatacgaaggttgatacagagccgaaggtgaacagtatccccgtactgttcacgctgacttggcattcgctttttgcgtcacgcttgtattgtcatctccttccgattgaagtcgaaactctagccacgataaatgttgagactggaccgaaactcctcaaacaccatcgtagggaggccctaggtgaagacatcggcgaactaagaagtagtcgggacatgaagaactcgcacaaccccaatggtgacacgctcgtggacaaagtggaggtcgagcttgacatgcttcgtgcactggtgctggacgagattggtagagaggtacacgacgttgatgctgtcgcagtagaaaagagtgctctgtatcaatggactatggagctcctgaagcagctgacgaagccacgtgaaacgtggtattcggtcctgatgctggagcaaggaacgactggctgctgcttcgaggaccacgagacaaggaaagttggcccagttggcgtaggtgtagacgacaaggtcgatggtcgtagatcatcgaaggaagctaaaatcgaccaccggggagccaacgtcaaaggatgccttgccctgagtatccaccagagtcgtacatggcttatagtcgaccatgctagtgtgcttgaggatgttgacgatgtactagttgaaagggaaatatgcccttgggccatttctagttgttttgatgattaa

SEQ ID NO: 27081 - DNA, 546 bp, Zea mays
  Peptide Sequence Number=SeqID_70456
atggacaattatagcaaggtagtggaagatgcttgtctagatatgctaaaggttggacaacgccaaatgaggtatagactaaaacaaaagtatttcaatgggatacctgctaatcatgtgaggactacatcgcctatttcaagcatgtctgatgaggactggagaaagttggtggagaagtggtctaccccaaaacacaaggatatttgtatgaagaataaacgtaatcgtgaaaaaaaacaagagaaatataaggatgttgaaccgagtgcaatagatcttttcaaggacatgcattgcagcaagaagaaaggtttttctgaaaatgtaaagaaagcaattgttgacatggaagcaatggtgacaacaccagttgaggatggacaacaacagaagtctcctatggaagttgtttctgaagtgctaggggctccagtttatttctacagaatgttggtctacaagataactccaagaaaagctccacaacaactgtttctgcaaaggttcaagaacttcagaatcaattggagtttgagaggctag

SEQ ID NO: 27082 - DNA, 144 bp, Zea mays
  Peptide Sequence Number=SeqID_70457
atgacgctgttgcggctgctgaccgccgcgggaaaaaaccagtggtcgtggctgaggaaggcccttcgcgggaggctgccccagccactaagaagagaaaataggcgaccgacttcgccggccctgtcacgtcgggtgctctga

SEQ ID NO: 27083 - DNA, 1650 bp, Zea mays
  Peptide Sequence Number=SeqID_70458
atgaacaaaagaccggcattcaagatgccattacaaacggaactccggttccgtccccgcagttatgaacaacctccacaccagggagcctgcggggggacaagttccgggcgactcgccagcgacctctgcagcagcagctatggtcccaggacggacgtggccaccggaaggctctcgttcgcgtccccgctcaagggacgcgaaccagacatcaaagccaaagagcgggccgctccaaagcgcaccggcagcaacagttcgccttccccggcatggctggaggacgcctcctccgcagagctgggggatggtttccaccaccagaagctggaagaggaggtggccagccgacccgtgcgggaggtagagccccagctcgcctcgctctccgccccagcaaggatggggctggtggtcaccgtcttaggtgaccaccggcgaggggtgcagccgggccgcttgatgaaaatccttgaagccaaacgatggctaaaaggggctgggtcccacgcgtcatacaagctggcccagggcagaagaagccaaaccgccacgcgcggtgcatgctaccgcccagtggttacaagcgtccccccactttcgcccagaccagcgggtgaaagggcgggcagccatgcaggcggcatgcaaccgcgccaagtgggcgcgcccctccgacttccaacgcacccagcatggaggcccgggcccacgcgtcatgcgaccggcgcgccggttgctacgtgcgagcaactgcaccgccactcgtgccactaccacgcctcctcgactgcggaaccagtaccgcgactcgaggcaaccctgcgtacgacccggcagtgccagcaaggcgcgatggtcaatacggccaaaaatgggccggcagtaatggcggtggcaggcgggcaggagcagtggtcacatcgtcagccaagcttacgtcctatccaggggcagcgagagaaccctctctcacggcgtgaagacggcgcgcccgtgttccgttcctcgaacggctcgcgcacgcacaacagccgcctcgcgaaccactcgccccgtcgcattaactccgcggcgggacaggcggtgcctctggaagggggagcaagcgacgctcgccttcgccataatgtccgcgtcaaaaaaggaaacaggctccgagcctccctactgatcaaaggttcaaaggctggcccctcggaggggttcaacagccgcctcagagcgcttgggttctgcgcccactactggtcagaggctggccctcgaagggttcacagccgcctcagacatagagcgagggatgaccctgggtacgttcgatacataaccaaggctcgggctacgctcccgaggggaccgggtccggtagatcacccgcaggtacttttgagcgcgcctccggacctcaagcgacccctaacaaatggggcacgggcgtccactcggattacccgccagcagctcaccggagacaccatgttcggcgccctccgagggcaacatggcgctttccccccctcctccttgaggaaaggcgacgcaggggcgtatgtaaaaaagtcgagtctgtccctgaccgtcctctcgccctgtgcagaggctcgggggctgctctcgcaaacccagctccggccggaccgttga

SEQ ID NO: 27084 - DNA, 150 bp, Zea mays
  Peptide Sequence Number=SeqID_70459
atggggagcgcccgcgttgcttttgtcttgctgctgttggaggagcgcaacttcgcggagcaattaggggagagggcgctcaccggcctagcggagggggcggacttcgacaacgcggggtcgatcggccgcaagcgtcgtcatctctag

SEQ ID NO: 27085 - DNA, 156 bp, Zea mays
  Peptide Sequence Number=SeqID_70460
atggcgatgttggtcaccagcgaggcggttcgggtgctcgactgcatcacccaccgattaacaccctgtgggcggttaccagcacaaggaagatggaagcccgacaccctgggcccgcgggtcagtgggacgatgcgcccttggagccatgactga

SEQ ID NO: 27086 - DNA, 1350 bp, Zea mays
  Peptide Sequence Number=SeqID_70461
atggttcgagatactatggttctatttatggatttggttacatatgatgatgatgatgctattaatgatgattctggatatggatcttggtatttcctctatgaggaggaaccatgtaaggttccgactaatcctcggtggtacccctacgcaaaggcctcctcccggatgctccctgccgtcttcactatcgagcttctggccgaaacactgagggcctcgttccctccggtggctctggcatcgatggtggcagttctggtactcggcctcgcctgtgcagaggcggagccacagtgcacgcggcgccgcccgcccgcgccgccgcggccgcacagcgtgacgatcaccgagttcggggccgttggtgacggcgtcaccctcaacaccgtgtccttccagaacgccgtcttctacctgcgctccttcgccgacaagggcggcgcgcagctgtacattcccaggggccggtggctcaccggcagtttcaatctcaccagccaccttaccctcttcctggagagtggcgctgtcatcgttggcacgcaggacgtttcacagtggcctgttgtcgaacctttgccatcatatggacgaggaatggaccttccaggttcgaggcatcgaagcttaataaacgggcagaatctagttgatgttgtaattacggattcatgctcaaatatgtgcatcgaggacagcagtatcagtgttagccacgacgccatatcactaaaaagcgggtgggacaagcaaggcattgctttcgggaggccaacctcagacatccacataagcagactggatctgcagtcctcactgggcgccgctctcgcgttcgggagcgagatgtcgggcgggatctcggacatccatgcggaccgcctcctcatccactcttcgtccagaggcgtcttcttcaagaccgcgccgggacgcggaggctatatcagagacaccgtgatctcagacgtccagatggaagacgtcgacgtcgccatcgcattcaccggtgactggccaagccacccagatgaccagttcgacccggccgcgctcccggtggtcagccacatcaccctgaagaacatgactggaacaagaatctcggtcgctggcgttttgtcaggaatcgccggcgacccgttcaccgacatctgcctctccaacatcaacttctcactggccgattcggccagtcccacctcccactggtcttgctccaacgtctccggatactccgagctggtcttccccgagccttgcctggatctgcagacccaatcctcagacgcttccgtctgctccaccctccctagcttccacgccgccgccattgcagcagcgtaa

SEQ ID NO: 27087 - DNA, 816 bp, Zea mays
  Peptide Sequence Number=SeqID_70462
atgacgcctcctattgaagtggtcggtccgtgccctaggttgggcgatgtggaggctcctccgaggtcgaggtcgagtctgtcttccgaggccgaggtcgagtccgagcccctgggtcgagtgaggcggagaccgtcggctgtggctgagcccgagtccgagccctggggtcgggcggagcggagttcgtcgtcttccggggctgagcccgagtccgagccctggggtcgggcggagcggagttcgtcgtcttccggggctgagcccgagtccgagccctggtgtcaggcggagcggagttcgtcgtcttccggggctgagcccgagtccgagccctggggtcgggcggagcggagtttcctatggcgcctgaggccgggcctggctgcttgtcagcctcactctgtggagtggcacaatagtcggagcggcacaggcggcactgccctcttgtcagaccggtcagtggagcggcgaagtgactgcggtcacttcggctctgtcgaccggagggcgcgcgtcaggataaagctttgtgctgatgggggttaccagctgagaattaggagtcttgaggaggctgagcatctgctgctcggtatgacggtatccaatggtgttcagttttcgcgtaacattctgcttcctgctcaccaacagcagcttcggtaccagcagcccgtgttccaagacaagcctggagcttgcgcaaatggcgaccgcccaagacggcgccagctcagcggcccgcccgccgcactgcatggcgacaaagcgaagccaatgaaaccgcccccacccccaggcccccagtag

SEQ ID NO: 27088 - DNA, 591 bp, Zea mays
  Peptide Sequence Number=SeqID_70463
atggaggacctgaaaaaggtgcatcaggggcttgatgatagggccagcagccttgccctggccgaagagaacctcaaggagaaggatgcctccctggataagcgggcggcggatctcgcctggcgggagaaggacctcgcctttagggaggaaatgcttgagaggcgggataagctgctggcagattatgagctcgaggcagaggagaaggagcgggcgctggaggagaaggagcagacgctaggggagcgggtccgccagttcgaggcggcgcaggcagcgcaggcagcccaggcggcgcagccggcgtccatctccgacgcgctcccagtgctggattctgccgctgatcgcctccgacgcctgggccagatccttggcacccgcttggaggccgagggcagcagactctgccggtcggtaatagagtacatcctgacgtgcttccggagccatgacctagccatctccatggagccggtgatcgcaggtccggtggccgatatggaagacgccgcccgagtgggcatacaggatgctgtggatgcagtggccaagcgcttccagcgggatcccactgacgatgagtag

SEQ ID NO: 27089 - DNA, 498 bp, Zea mays
  Peptide Sequence Number=SeqID_70464
atggcctcagggcaaacgctactgcgaaaaggccctcgctcacgtcccctcacaagggacgagaaccagccattaaagccaaagagccagagaggaagcctcacctatggcgaccaccacatcagctccgacgacagcgaccacctgcccaccaacaccgcaccggcgaacggcggccgccccaatgcgcaccggcaggtcctcactcccgtcctcgccacaggaacgaggacgggaccgtcccagaacacgagtgtcgccttcgcactgtacgacgtgttgtgcgaccccccggtgcagccggaggcgcagggaggacctggacgtggtcggcccgtgcacggcgcgaccgacacccgtacggcggatgggcagccacgctccgccctagtgcgcgtcggttactacgtgcaagggaaccgcaccgccacttgcgccaacgccgcgtcttctcgactgcagagccagtgccgcgactcgaggcatccctgcgcgtga

SEQ ID NO: 27090 - DNA, 1782 bp, Zea mays
  Peptide Sequence Number=SeqID_70465
atgccttcccggggcgggcagcgggtgcgaagtcccgccttcgcattggatttgcatggtcgggatctcgccgcattcgtgcgcgaagcggaagacggtgcagcgaggatcgtggggcgctatgtgccgaagacagagggtctgcagagctgggatatccgtggggccaacgatagattgaatcgggtcttcgaattgaactgcttgccatacgatggttatcccggggaagacgccgccgaccgccgtgggaaaaaaccgatgggagtgaccgaggaagagccttcgcaggtggctgccccggccactaagaagagaaaattaggtactacagtgaggggactgggggtctccgatagtttttctatggagttgatggggacgtgcgcagccctcgggggaaagatgtctttgcccgagctccgggagtcttcggcgcagatgctggaggttaccgggggtcgatggcccaagaatgttccgatcccccacgcggctggcgaagacttctttacgtctcgcatggctcgtgacttagaagtgtttccttacggacataatattgctgctgttgtgtcggcagtgatgaacaaggaccgtcaagacgctgcgcagaagcgccgggcggtcgtcaggctcgcagatcctatgtgtgagacgaagagggcgcaggggagcgcgaagactgctgctgcctccggcagtagcaagccggtgccggctgcgaaaccggttgtccccggacccagcaaggcgtcggcgagcgcgaagactgccgcctctggcggaaccaagcctcccccgggcgaacccgtgaaaggacgggagttgccttcgccggggaggcgtgttgccgacttcgacacgaacatcagtgtcgaggattattttgttgggtcgggtgaggggcaattggttgttgtcccgccttcggcggcaaccacgttgccaacagcggtggttggggcgaagggtgccgcgcaagacccgtgggccgccttctgcgtgagcgacgagattctgtcagctgccgccgccaaggacgtggcgggctccatgtcccatcggctgagggaggcgtcgcagcagctgtcgcagcagctgacgcagcaactgaagcaagcggccgacttcgccgaccgcgtggcgtcgggtgtcctgactgcggacgtggctgccaaagtcgagagtcttcgggcgcagcatgcggatgctgtccgggagaagtcggctgcggaaagcaaaaaccacaggctagcggagaaagtggccgccatggaggccgagaaggcggacctccggcgccagctggcggaggagaggagggaggcgaaccaggccatcgctaaagcgcaggctgcacgagcggaggccaaagtggcgcgggcggagagcagtctcgccagccaacgcaccgaggaggtggaggcaaggttcaacgcattgcgcagctgcgtggacaaggccgaggcctcgacgcgctcggaagtcgagcgaacgcatgcacagttagtggacgcgtaccgcgagctgggtgtgcggactgctgacttcgcagtacccgaccgggaagcaagccttcgcttcctcgaatggttgcaggaggagctgctggtgctcccgaccattgtggagggtttcatgtccttcgcctccctcgtcacctgcgaggggaccatgaatgcattgtcccgcgaggggtgcagggcactacgaggtcttcgacccaatcagacgagaactttgaacgtgaaatcttcaaggccgaagaccctgtggtga

SEQ ID NO: 27091 - DNA, 219 bp, Zea mays
  Peptide Sequence Number=SeqID_70466
atgttggttatgggtgatcagggcttcaacagcattgacttcacgactttccaaggcagctacatgggcttgagctgtggtgagatccacatggagcttacggttgcgcttctctgcatcttctgctcgggcaatcatctaacggtggtgccgagccaagaaatcatactgtgcatccagggtgagcaggctaagggttacgtcctgcggccaacctaa

SEQ ID NO: 27092 - DNA, 519 bp, Zea mays
  Peptide Sequence Number=SeqID_70467
atgaagttggagcttaaggatggtaatatgacacgtggcagcacactgttgagcaccaaattgagtggccggacggtccgcgccggtggtccagacggtccgccgtctgcgccagtggtccggacggcaggaaaccctagccctgccccaggtcacagaccatccggtccctggtcgtggaccgtccgcgcctgtgcagagagcactgccgctggttctcacgcagtgattggcgcccaaaaaggcaccaacacacttttggcgactccgctagggaaaacacatataaacccatcagatcggtcctcaatggccggttcaagggatagttctgacgtctcccccagcaatatcatagagccgacttgggagaccttgccggctgacgaacaactccagttcgaggagcacaaggagcagctgatccaagaagcaaaggcgaagttcctggccaacttcaaggtggacaggaacaacaaggtcgttcggcaatggacgactgatctggcttcgctctga

SEQ ID NO: 27093 - DNA, 2109 bp, Zea mays
  Peptide Sequence Number=SeqID_70468
gtgttcatacctataaacattcgtgaacttcactggtatcttgttgtgcttaacgccaaaagacgagagatacaaatactcgattcactgggttcttcattgggtcataaagatctcgattgtgttctaaagggtttgcaaaagcaaatagatggtgtgtcgcaatacatgaaacttaaagaccataattggccagaccttcaagttgcctattggccttggaaacttatagagtttaaagatgccaagcagacagatagttcttcatgtggacttttcctacttaattatatggagtactggacaggagtcgaactatcagacaattttacacaggccgatataaaacactttaggccaaaattggctgctattttattgtcttcggatttgaacaagagaaaaggatgtccgttatataaaaataagacaaataaaagtacagaagacaatgagactgactccagtggtgttgagattttagaaccctccccaaatcctaacaagaggaaacgaagccctccgattagccccgaagatgatcctatatcattatattttgaagaaatatgtgccaaagaaaagaatgatgtcatccctactccaacctctgttaatgagtgtggcaaggactctttaattagtggtctttccacgaaggatatgccagtaaaaaaagaagatatgatagagtttctatgcgattatatcatgacaattcaagatgccacaattttagaggctaaatgggtccgaagcttcaaaccataccggatagatttgactgtcaagacactacaagaattgttaaatgtgaataaagatatgcctatagattgttttaacatggctgttcggattcttgcccataatgaaccaaataggttgtctctcgcaaaacgaaggattacaaaacactatatggacctgtgtttctgtgaaatgtgtggttttgacgaagaatcgaagtcatataaggatcctagcgcgatagagttggcagaaacattaacaaattggcctcaaatgaattattatatcacactttgcaaatttgttcttatgccatggagatactctacaggctatgtacttttcatcattaatcatgcaaacaaatctgtgtctgtgtttaatttcacacctattccagaatggtgcaaagatataccactaaattttttttgggaagttatgcttcttatttcgaagaaatataaggctgcatacggtgtcaaacgtattggatggtcacatgacatttatatgtggcgacattcaattcgacctgatgctccaatcgacttaaaaggtgttaatactggtcattttgctctgcacattatggagtggtgggaaagtgggttaaaagcgcaatttagtatggatggtgcgactctgcgtagaaatttacttattgatctgttgacatacgaggggaacacatatcgatttaacattcctgtagatatacgagagtaccttgatcatattatgtttgttgctgataaagttgcatatgcactcactcaaggtctcaaggtaattgcttgcattggtgagacccttgagcagagagaggcaggaacaacaatggatgttgttgctgcacaaacaaaggctattgctgaaatgaaggacttcactcaaagtgtcagttggacaaggtttttagcctatgacaaaggatggagagtgagaacagattttaagcaatatcaagtgttgaaacagaacccattctggtggacacatcagcagcatgatgggaagctttggaatctaaataactacagaacagatgtcatccaagcacttggtggtgtacaaggcatcttggagcatactttatttaaagggacttacttccccacttgggagggtctgttttgggagaaggcatcaggtttcgaagagtcaatgaaatacaagaaactgataaatgcacagcggtctggtctcaatcaaatccccaatcgaagatttaccctgtggtggtcaccaaccatcaatcgtgcaaatgtctatgttggtttccaggtccagctagatcttacgggcatattcatgcatggtaaaatcccgacattgaagatttctctgatctag

SEQ ID NO: 27094 - DNA, 438 bp, Zea mays
  Peptide Sequence Number=SeqID_70469
atggatcgtggaatggagagtgatggggacaatgaaattgatcacctgactacttttgagatcaacaacaatgtccctgccacaaatagtgacaaaatgactgaaggagtagacgttgggaagcaacaccagacaaactcgactattaccaccaatggggatgatgatgagactgtactttttaaagatgatgatgaagaagaagaatacctattcgctgggcaagatggtgaatttggtgaggatattgagattgatgaaacccaagatgcctttactgtcaaccctgacgtacctgacttgtacgacaagacaactgatcaagccaaggacggaggcaagagaagcttcgaggtaccaagtgcacgggagaaggtcaaggaggctgaggaacccaaagccaagggtgaagaagaaggcttgcaaagtcaagggtga

SEQ ID NO: 27095 - DNA, 912 bp, Zea mays
  Peptide Sequence Number=SeqID_70470
atgtactctgattttgctgtaggaagttctattaaccccagcgagagaacatatccagaggagatgatccaaactggcatatccaccattgatgtcatgaattccattgctcgtggacaaaagattccactgttttctgctgctgggctccctcacaatgaaattgctgctcagatttgtcgtcaggctagccttgtgaagacattggagaaagaaaagcatgctgagctaggggttgatgcttccatcaaattatttgagcaattcaaatcttatgagggtctttactttttcttgggatcctatctgagctccagcgaggacccagatatccatttcaagtacatagaagcagcagcaaaaattggacaaatcaaagaagttgaacatgtaaccagagagtcaaacttatatgatgctgagaagacaaagattgacaggctcagtgatattgaggaattctcaaatttagtgaagtaccttctgatggtaaggcaaaaggcacgggtcaccaaagtcgatggagaactcatttttgcatatgctaagattgacaggctcagtgatattgaggaattcattcttatgccaaatgttgccaaccttcaaaatgttggtgaccgtctgtatgacgaagaactatatgaagctgcaaagatcatctatgctttcatctcaaactgggctaaactggttgttaccctggttaagctgaagcagtttcaaggtgatgtggatgctgctcgcaaggctaacagtgccaaaacatggaaggagttctgctttgcttgtgttgacgccgaggagttccgttttgcacaaatttgtggtctcaatattattattcagcctctctatacggccttccaccgatatgctttaatggctctaaatgaagaactatgccaataa

SEQ ID NO: 27096 - DNA, 618 bp, Zea mays
  Peptide Sequence Number=SeqID_70471
atggaggttcgttgccaaaccagcttttgccagaatgaagatggttttcctaagttgctgagagcatgcacagtccgcctcagaatcaggaaccagccagagtatgatggtcatgaattcgtcgagcatggcacagagaagtgtgtcgtgactgtatacattggatccagtctgcaccatgtggaatggagtgtcactgcaactgggcacagattcaaagacacatgtcaagtcgtcgccctcgtgtacctcactgcatacctgctcaccctggatgcacagtatgatttcttggctcggcaccaccgtcagatgattgcccgagcagaagatgcagagaagctcaaccgtaagctccatgtggatctcaccacagctcaagcccatgcaactgcattggaaagtcgtgaagtcattgcggttgaagccctgaagcaagccaaggatgagcatgtccagaagttgatggaggcctacttggtcacccataaccaacgtagagccctgcggatccaagagcccgcttcatccaacccagttcaacccaggagagctgaagatccccaaattcttgaaggtcacccagtctctatcagaggagagaagaagtcttggtaa

SEQ ID NO: 27097 - DNA, 810 bp, Zea mays
  Peptide Sequence Number=SeqID_70472
atggcagaagcaataatccttgctctgagaaagattggtagcgctttagcagatgaaactgccaagaaaatgctggccaaattgtctgaaaaggttaacaatctgagggatctgaatgataagatcgagtcaataagaatgcaactgacagccatgaacaatgttatatgtaagattggcacaatatacctcactgatgaagtcgtcaggggatggattggggaagtgcgcaaggtggcctaccatgttgaggatgtaatggacatgtactcctatcacacacttcaaatggaggaagaatggttcctgaagaagtacttcattaaagcgtcacattatgtcttggtttttagtcaaatagcagaagaagttatcaaggttgagaaggagatcaagaaagttgtagaactcaaaaatctgtggagaaggctcaccgaatggctatattctgatgagcttgacagcacagtgataacagtatcaggcatgggtggacttggaaaaactacccttgtaacaaatgtttacgagcgtgaaaaaaccaatttttctgctacaacatggatggtcgtgtcccagacctacactatagaagccctgcttaggaagttactcatgaaggttggtcgtgaagagcaggtgtcacctaacattgacaaattggatgtccatgatttgaaagaaaacataaagcaaaagctcgataatcgcaaatgtttgattgtattggacgatgtatgggaccaggaagtgtaccttcaaatgtctgatgcattccaaaatcttgcaatgacaagctgctggagatag

SEQ ID NO: 27098 - DNA, 246 bp, Zea mays
  Peptide Sequence Number=SeqID_70473
atgcgctcgaaaactgtatcgtttctcgacaacgagctcagggaagcatttgagaacaagtccccaacagtaatagtagaggctttcttcaatgcacctgatgccgatgagccattagctttggatatgagtagcatgggtaaaggtcaaatctggataaatggacaaggtattggaagaaatatccacggaaagctcacatttgaaagcctttatattcatgccatgctcgctcagaagcgctga

SEQ ID NO: 27099 - DNA, 2076 bp, Zea mays
  Peptide Sequence Number=SeqID_70474
atgccgtcagcactacgaaggttgtttgcaacaatactggtatactgcgagccgaatgatgtggcagaattatggcagagacaccttgactcaatgtcagaggactatcaccatagtactcaaagcaaaacccatgtgcaacagatggtattgattgacattagaaacattttgcagtcaatgggtaaagacataaagacattccctctccctgctatcattgacatatatgacgattcacatggtactgatagagagatttacgaggaggaaagtatcgagccgacggcagaagacgttgctatgaaagaaaccctaaatgaggagcagaggtctgcctatgataagatcctatctgtcgttgacaccaataacgatggagtgttctttgtggatgggcctggtgggactagaaagacctatctgtataaggcactgcttgcggcactacacagtcaggacaagattgcagttgcaacagctacatctggtgttgtggcttccatattgcctggggggaggactgcccattcacgcttcaagataccacttactattgatgatggtgctgtatgtagtttcatgaaacaaagcgggacaacgaagtttctacaaaaagcatcgctcattatctgggacgaggcgtcaatgactaagagacaagcaattgaggcgctagacagtagcttgcgtgatataatgggacaacctgggctgccctttggtgggaagactgttatgttcgggggtgatttcagacaagttctccctgttgtgtgcaaggggtcaagggctcagatagttgctgcctctctacggagttcttacctctgggaatccatgtgcctcctaaagcttgttcaaaacatgagggcatatagtgacccatggtttgcagaatatttgttgcgcatcggtggtggaactgaggaagcgaaccacgatggtgatgttcgtcttccagatgaggtatgtgtgccatatactggtagtgaccgcgaccttgatagactgatagatgacatttaccccaatctaaatgaaaatatgtctaacacaagctacatcacatcaagagcaatattgtctacacggaatgactgggtggatatgataaatatgaggatgatcgatcgtttccaaggggagcagatgatgtaccatagttttgacaccgcgatggatgatcctaataactattacccgtcagagtttctaaacacgttgactcctaatggactacccccgcacgttctgaagctcaaagttggatgcccaatcatgttgcttaggaatatagaccctgctaatggacttcgcaatggcacgaggttggtggttcgtggtttccaaaaaaaaacagtattgatgcagtttaaaaggaagcagtttccgataagactaagttttgccatgacggttaacaaggcccagggccaaacaatttctaatgttggtgtgtacttgccggaaccagtgttctctcatggccagctttatgttgctctatcaagggccaccgctcgatcgaaagtgaagatacttgccattccagtcactgatgagaagaagaagaagaagaagaagaagggggttgaaaggaactcagcgataaatggcgcaacatacacaaagaatattgtttataaggagaagaacaatgttcagtatgcaaatctcgtttataaggaggtccttaaccctgcacgttctgaggtgtggacggacatcacgactccagcaacctcgtggccactggtgggatatgtggttgtcccaattgcagacaattttgttgaacctgtaatatcaatgaggttgaagatatcagaagcaaaggcaatttttaatcaggctgaagataaaatgcgtctgctgcttgcaaagaatgcaaagcggctgaagtacttggatctgaaaggtgcagaagctcagaagatagacccgatccggaatatggtcaggaagctgtcaacaaaattaagaatatatgtaagagtaattaccaaggtctccaaaaagataaacagagaaagggacgaagaattgtggccacaaattaatgccttaatctaa

SEQ ID NO: 27100 - DNA, 255 bp, Zea mays
  Peptide Sequence Number=SeqID_70475
atgcagcccaacttctccaaaccatcacacccgaggccccatggcgtccaccgtaggctcaagggtagctaccgcgacttgttggtcatcttccatgatattgctgctatcttctccttcgtggcgcgagctccgtgcaagcaagctcgtttgaaggttgttgtgatgcaccgccactgtcatacctggttttggaagcttcatctcctgatcactgagtacaatggggacaacctggtgtggggtggtttgtaa

SEQ ID NO: 27101 - DNA, 426 bp, Zea mays
  Peptide Sequence Number=SeqID_70476
atgtggttgagattgcacgagttgcgcgcgttctgttaccgggcgtggaggaacaacgaaggggataagcctgacaaggtgtgggcgctggggccacccggaagggatcgggaatgggtcgagaagggggtttcggcccatgacacagatgcaattgtggacattactccacaactcatcacactcaatcaaagaaccaaatcaggcagattaggtctcctattcctaaagatcactttaggtgcaggatttcaaagtgtgaaatccacttttgtctttagaagagaaaagttgtggggaataatgtgcatgagctcacggtggggctcatgtgaaaggcaaggattagccttcgtggcgaggtcaatcgcgcagcacacggttgataaccagaggagaagtggtgctgcgattgcggggttctag

SEQ ID NO: 27102 - DNA, 441 bp, Zea mays
  Peptide Sequence Number=SeqID_70477
atgggcaaaagtaagaaaggtagcggttcttctcctcgctctggtgacaagcgcaaacgtgagccgactccttcttcggaggacttcggcgactcggagtactcggaggaggagttctcctccgagtccgagggatccccggcgttgtctgatgattcagacgactctcaggggattgttgcggaggtctggacctacatccgggccgtcgagcgctccaggctcgagggctcggatgagtcggagtactcctcggatgaggaggactcctcggactcgtccgaggaggacagcggcggcgatggcggtgatggcggcgatgacggaggcgacggtgatggcagcggcgacagcggcaggggcggtgacggcggtagcaagggcgaccatggcagcggcagcaagggcagcagcaagggcagcaacaagaccagtggctag

SEQ ID NO: 27103 - DNA, 893 bp, Zea mays
  Peptide Sequence Number=SeqID_70478
gcccaagcggccagcccaatcactttggcctgtggcctccaagccgagcgcggtgtcgctgctaccctggggcctgggtcctggccacctgcgttggcttccatcgtccagccgccagacgccgtcaccgcggctgcgcgacacagcctcacgcccagatcgagcgggcgagcccgagctgccatccggcgatccccgactccccgtcgtccgtccgcccgaggcccgagctcgtcgcgccgctggacgaaccacggacgggcgagctcggtcagctccctgctcaccgcgccgccgctggacggaccacggacgggcgccgctcggtcacctcgctccctgctcatcgcgccgcgtccgcccgagctctcaccggccaccgcgctccctgctcccaggtgccagccaccgagccgggcagccgaccgcaccgcgccgccgccagaccgagcgccgtccgagcgccgtcaaccccagctccagtccactgctctaggcgccgtcaaccctgcgtccaagaatgcagcagcctcacgccggcgcatcaggtcccaacagcgggcactcctcggcggccaccatcgtcggctcgtcggcgggggctcgtcagcagcagcaagaggcaactcacgcccgaaccctcgatccgtggccccgtcgtgcagctcggtaatgttgttgctttaccaacgatgacagtccacttagtatggtttacaactattagtaactttgctcatattattgtgatggataatgacagcgccatggatgtcgatgatatttgtgacaacaatgtgtcccatgaagatgaaatacatggtagtagggaggatgttaatggtaacaacagtgaacacatggtggaggaccatgttcctgcacctagtgag

SEQ ID NO: 27104 - DNA, 444 bp, Zea mays
  Peptide Sequence Number=SeqID_70479
atgaaagttcaggcgctaatatctggatcttcacaagcctctggtcatcgtattaacttggatactcatgttctgaacacccgaaatgaaaagatagtgcgggttccatctgagaaacagcttgctcaaagtcatcgtgtaacaaatgttgcaggtcctgtttccaattcaaaacagttagcccatataggaccctctgctggtcttttggatccaaatggaccttcaaaaaagaggaaaaagccaaaagcatggtctaaagaggaagatgcagacctggcagctggtgtgcagaagtatggtgaaggaaattgggaggatattttgcataaatgtaacttcgataatacaagaacgcctgatcagttatctcagcatgcactatcctgccatattgcattcttatttatgggtctgtttggttcgctgtctaacttgccatag

SEQ ID NO: 27105 - DNA, 813 bp, Zea mays
  Peptide Sequence Number=SeqID_70480
atgcgcctaggggtcccttttatagccccaaggcagctaggagccgttgagagcattctaggaaggcaattcttgccttctgtcgcctggcgcaccggacagtccggtgtggatttctttcctgttttggcgcagccgaccgttgaagatccagagccgttggcacaccggacactgtccgatgcacaccggacagtccggtgcccccttctgaccgttggctctgccacgcgtcacgcgcggattacgcggccgaccgttggtccggccgactgttggctcaccggacagtccggtgcaccaccggacagtccggtgatttatagtcgtacaccgccgacgaaacccgagagcagccagttcgccagagccagcctggcgcaccggacactgtccggggaatgctggaggcacggggcagcggcggaggcacagggacacgacggggcgacggtggcggagctccagctgcgcaagaaccactccggtgagcacgggccggctgaaccagggagggaaggggcacaccaaagggtgtcccgagaagctgacggcaaggtgaagctcaccatagcactggacggggtgtgggcgcaacggcggccacggaacaggcagtggacatcggcgggcggtggcaggggttctcggttcgcgtgggcagagcgagagagctgggcagagggcgcaaatggaagaggggaggtgggcgagcagggcgcggggttcaaaaggggcgcgggggctcggtcgtggccgaagaacgcggtcatgagcgcgtccacggtggggagttcgtgggcgagaggttag

SEQ ID NO: 27106 - DNA, 480 bp, Zea mays
  Peptide Sequence Number=SeqID_70481
atggcagctgcggctccggcggcgtgcaaggggaaacgaaagcggcacctctccgaggacgacgtctggctcctcctccacaggtaccatccagggacgatcctgacggcgctgcaggaggtggcgcagcacgcggatggccggcgcatagactggagggcggtggtggcgaagtcggccacggggatcacctccgcccgcgagtaccagatgctctggcgccacttcgcctatcatcacgacgtagacgagagcgtcgacgccgatgaccagcctctggacgatgacagtgacctagaactggagcttgaacccgatcccaacctgaccaaggaagctttatgtgaggcctctgcattagccaaggaaagagaggcacctgcttgtgtagcatttgctctgccatttttcaacaccttattttaccatgatcaagtatccagaagggttttggctgcatacacttgttcggtactgtag

SEQ ID NO: 27107 - DNA, 66 bp, Zea mays
  Peptide Sequence Number=SeqID_70482
atggccgccgctgtggtctgtgggcagaatgtcgccgctacctggggttggctggccatgtgctaa

SEQ ID NO: 27108 - DNA, 177 bp, Zea mays
  Peptide Sequence Number=SeqID_70483
atgggcgcggcgcggcgtgtagggaaggtttgggccgcgcggggagagcccagtgaagtgggccgagtgggaggaattaagcccaagcgcagggctttacacgacctcggcctcggattaactacgctactgggatccatcattaccctacccctagctagctgcctcaggctatga

SEQ ID NO: 27109 - DNA, 1416 bp, Zea mays
  Peptide Sequence Number=SeqID_70484
atgccccgccacctcttcgacgccacgccccaccccaacgtcttcctctactccgctattctctctgcatatgcctccgccgcagccgctgcctcaccttcatcctacgcccacgcccgcgacgcgctcgcgctcttccttcgcatgcttcgtcacggtcgcccatcgcccaaccagttcgtgtacccgctcgtgctccgcgctgcctgcgccgtcgacgtccgcattgtcaggtcgatccactcccacgcctgcaagagtggtttctgtggatatgaatacgatgtcataaggacctcactcctcgattgttattcgaggcacgctatgatggccgacgcgcgcaagctgtttgacggtttgacagagaggagcgtggtctcctggactgcgctggtgtccgggtatgcaagggcaggaaagattggggatgcgatcatgctcttcgagcgtatgaccgaaagggacgtggctgcatggaatgcaatcatcactggctgctctcagaacaggctgtttgcagaggcggttgggatttttgggaggatggtgggcacagggttgaggccaaatgcaaccaccatttcttgtgtactatctgcttgtgggcatcttggaatgctgaagatcgggaagttgatccactgctgcgcgtggaggacctgtgttggttttggctcatccgttctgaatgggttgattgatatgtacggtaaatgtgggaatctggagggggcaacgtggatattttatgaggtttcagatagaagcctaacagcttggaattctctgatcaattgtctggcactgcatgggcacagcaagtgtgcaatatcagtgtttaatgagatgaggggtgaaggggttgaacctgatgtgattactttcgttggactgcttaatgcatgcacccatggagggtttgttgatgaaggcattaagtactttgaattgatgcagcatgagcacggaattgaaccagagattgaacattatgggtgtatcattaaccttcttggtcgggcaggccggtttcaggatgcattgaatgttatcagcaatatgagaattgaatcagatgaagtcatatgggggtcattgctcaatgcatgtagagtacacagaaatgtagaacttgctgagttagcaattcgaaagttactagaattggatccaaataatgcaaactatgtggtgatgctagcaaatgtgtacagtgaaggtggcttgtgggaagaggtgaggaaagcaagaaagttcatggaggaggagaatataggcaagaagctgcctggttgtagctggatcgaggtggaccgcaagatacaccggttttactctggtgatgatgctcattctgagtcagagaatatatatgacactcttgaggatttagctgcctcaatggaattatga

SEQ ID NO: 27110 - DNA, 1509 bp, Zea mays
  Peptide Sequence Number=SeqID_70485
atggcgacgtgcgctacgaccctcgcacctcttctgggcccggcggcaaacgcgacggagtacctttgcaaccaattcgcggacaccacgtcggcggtggactcgacgtacctgctcttctcggcctacctcgtcttcgccatgcagctcgggttcgccatgctctgcgcgggctccgtccgcgccaagaacaccatgaacatcatgctcaccaacgtgctcgacgccgccgccggcgcgctcttctactacctattcggcttcgccttcgcgtacgggaccccgtccaacggcttcatcggcaagcacttcttcggcctcaagcggcttccccaggtcgggttcgactacgacttcttcctcttccagtgggctttcgccatcgccgccgccgggatcacgtccggctccatcgccgagcgcacgcagttcgtggcgtacctcatctactccgccttcctcaccggcttcgtgtacccggtggtgtcccactgggtctggtccgccgacggctgggcctcgccgtcacggacgtcggggaagctcctcttcggctccggcatcatcgacttcgccgggtccagcgttgtccacatggtgggcggaatcgccggcctctggggcgccctcatcgagggcccccgcattggccggttcgaccacgccggccgctcggtggcgctgcgcggccacagcgcgtcgctcgtcgtgctcggcactttcctgctgtggttcggctggttcgggttcaaccccgggtcgttcctcaccatcctcaagagctacggcccggccggcagcatccacgggcagtggtcggccgtgggccgcacggccgtgaccaccaccctcgccggcagcacggcggcgctcacgacgctcttcgggaagaggctccagacggggcactggaacgtggtcgacgtctgcaacggcctcctcggcggcttcgcggcgatcaccgcgggctgctccgtggtcgacccctgggcggccatcatatgcgggttcgtgtcggcgtgggtgctcatcgggctcaacgcgctggccgcgaggctccggttcgacgacccgctggaggccgcgcagttgcacggtgggtgcggcgcgtggggggtcctcttcacgggcctgttcgcgcgcagggagtacgtggagcagatctacggcacgccggggcggccgtacggcctgttcatgggcggcggcgggaggctgctggccgcgaacgtggtgatgatcctggtgatcgccgcgtgggttagcgtcaccatggctccgctgttcctggcgctcaacaagatggggctgctccgagtctcggccgaggacgagatggccggcatggaccagacgcggcacggcgggttcgcgtacgcgtaccacgacgacgacttgagcttgagcagcaggcccaaggggatgcagagcacgcagatcgcggacgcggccagcggcgagttctacttcaaacaaaaaaaaaggatattgagagttgagacaatataa

SEQ ID NO: 27111 - DNA, 582 bp, Zea mays
  Peptide Sequence Number=SeqID_70486
atgaacgtatgtgagctcactcttgctgtctcacacctccccataggtcaagaacaggtcgggcgaggcggcgactcctccgaggccgaggctgaggtcgggcgaggtggcgactcctccgaggccgaggctgaggtcgggcgaggcggagtccttctcccaaggccgaggctgaggccaagttgccggagcggggtgaacagtgctgctatcttgtcagaacggtcagtaaaggggcgaagtgactgcggtcacttcgaccttgccgacagaggcacgcgtgtcaggacaaggtgtcaggcgatccccgcattaaatgcacatgcgatacggtcggttggtaaggcgattcggtcgaggtcgctgcgcgacaaagttcgcccgagcttagccttgggtgagacgggggtgcgcctgttgacagaggggaccctcgggcgaggcgtgaatttgcccgggactattgtctgcgcccgaggctgggctcggacgaggcgaggtcgtgtcctacgaggccctgacttgaaccgtgcttatcagttgttgatggtttgttccgaagatgtttttcggccaggttaa

SEQ ID NO: 27112 - DNA, 264 bp, Zea mays
  Peptide Sequence Number=SeqID_70487
atggcctggccgcgtcccggcgtccgtgtggcgtggtcttctcgagagctgaccggctgtacatctacgcaacgccgggcgcccgggccgtccactagtggccacagccgcgaccgccccagctgggtcggtgaactgtatgctcgcagccaacttccattggaggcgattttggaggtccagaattcacaaaatacatggggagaggttttgatcttcattttttggaagaagattgctaagaaagccacattttggatctag

SEQ ID NO: 27113 - DNA, 219 bp, Zea mays
  Peptide Sequence Number=SeqID_70488
atgcggctggtgaaggacgagaaagcagtatggtatcctctgccaaaggacactttgtctgcgtcagacactcgaaccagagaatatggcccttgtctgccaaatggaatcagggcagggcagcccccgacgggcactcccgcccagggaatctggcaaattccaacattgacaaagccacacctcttctgctttgaattcactatatataccttgtaa

SEQ ID NO: 27114 - DNA, 567 bp, Zea mays
  Peptide Sequence Number=SeqID_70489
atgtcgctcgcctttctccagctgccggcttgcaggatcctcgggcccaggctccagcgaagaggagggagatctgttgccttgcgcgaagaagaggagggagatccggtgattgcgcgacgaagaagaggctgccatgcgcgagaaagctctagtgttttaccgagcgcgcggtgccaggaagcaggaagtgctcgtgttcagcaaaatcaccggacgacgacagatccagtccaagagagtgcgaggcagtgggcggcgacggcttcgagagggagacgaggaggcggtggctttgcgagggagacggggaggaggaggcttcgtgagagcggacagggaagctcttcccgacctgctgaggtggggagcgaaatcaccgagctcccccgcggtgagggccgggaagcgtgctcaccaaatagcgaaaaaaagttcgcgggggcgatttggcccggggttttcgtggccagggattggatcgggatcctgccgggatcctgtgctgccaaaggagccctaaggccttgttcggttacatgggataaaatcccaccatggatttaa

SEQ ID NO: 27115 - DNA, 585 bp, Zea mays
  Peptide Sequence Number=SeqID_70490
atgcgggctgacgctgctcgtcggcacgggaaaggcaagggcgagcaggcgatgatggatggatggagatcagaaagaggccagaggcccaaccctatatccagtatctcgtgtgtttcctctgtcgtgcttatgggaagggagacgggtcttctacagcttctcgcgcctctactgctgacgggagggaagggagcagatctggtgatccgtggtaacgtagttctcaacacgttatcagcacgctctacctcgacgttgctgcgtggatcagatctgcatcaactcttcgttaagccggcaggtccctggcctagccgaactgtcctacacgacaggcttcaattcctctactcaaccgagcacggctgctgcagcagagaccgggtggtgattggtgtggtgagcgatcaaaggaccgggctggaagatccggttgctcggcggcgttgctcggcgcatccggtcgctgggtccaccggctccacgcgcattctttcgatctacgagacatgcacgcaaccgcaaccactggactttctccttgccgttgctgaccagcgcacctcacgcacgtatgcatga

SEQ ID NO: 27116 - DNA, 72 bp, Zea mays
  Peptide Sequence Number=SeqID_70491
atggccaccaggccgggccctttgactgaatggccatggcaaaggcttggaaacttcaagagtaaattttga

SEQ ID NO: 27117 - DNA, 948 bp, Zea mays
  Peptide Sequence Number=SeqID_70492
atggaggcggacccccgacttggctcgccctccactccagcgaggatgatgaacatccttgaagctgaagctggggggaagccgcagcctggcttgcttctccccaccgcgaggctagtgaagacacaggggcaccccatctgggggcccagaaggcggaagggcgcgaaggatgcaaaagggccaaggcatgactactacccgaggggtcagcccctttttaaaggggagcggtcaggaaggcgaaccgccgcgcaggaggcatacaaccaccccatggttatgcacccccctcattttcactgcaactggcggtccaacgtgggggcccagacccacatgtcatacagctggcgcgccggttaccggagccagtgcaacgactcgaggaatcctgcatggctcagcagtggcattaagtgcgaagactctggccccgcctataggttcacatcctcccctgaggcgggcccgggggccactgtcgcgttgggactggacctccacagaagaacgccggacccctatgcgtacaactccggagcccccaagaaggcacgtcgggccccttgggaggatcccagtccccctctgagtgaggtccgagccttggcaaggtcccgggacaagaaggaccctggcatgagtaagggtccggtgctggcacgtgtccagaccttccctgcgctccccactactaccgcacggcttgtggcctacgaagctaacgggccgagcctgaccatttatgcgttcctgtccaatctgctggcagacgatgtcaaggtcacccaacaggcggcgcatcagaccagttctgttggcaaacaggcaccagaggaccgcctcagtggcagacattggaggttccaagagctacctttgttgtgtccctgggcccacatgtcggggctcagtacctttgtgcatgccccccttcagctataa

SEQ ID NO: 27118 - DNA, 666 bp, Zea mays
  Peptide Sequence Number=SeqID_70493
atgtgcgcatcaccgcatgcaacctttcgacgacagagccgatccaggacgccctccgaccctggcacgcgctcccgcaccaacaccgatggacctgcaacagtccacaccgccgcacccaagccggactacacaccgcggcgattgcctccctgctcagagatttcacagcaaccgcgagcgctgcctatcccttccaccttggcgtcgctgccctcctcatcctcgtccttgtcctcctcgggctcgacacaagcagggagcgagggcggcacgaaggtggattggagccgcgaaggccatcgtcacgcgggcctcgtcgacgtcctcgactcctcgtcatcggacttagcgcgggtgggaagcgggggcggcgcggaggcggatcggagccgcggagggttggagacttgtgagggagaaagaggaggcgtcggcgtgctagcggttgggagcattgcgagaatttggcaatcgcttatctttgactcaataccttatgacctcggaaagcccgaccaatgtgcctctaagcatattcccaacaggttgaagaagggtcacgagcaaagagggcatttactatcctttgcgatcttcaccgttggaagggctgatgagctatcccctgatgagcttgaccgcctcatgaccatggttggttga

SEQ ID NO: 27119 - DNA, 546 bp, Zea mays
  Peptide Sequence Number=SeqID_70494
atgccgccctcgctccctgcttgtgtcgaacccgaggaggacaaggacgaggatgaggagggcagcgacgctaaggtggaagggataggcagcgctcgcggtccatcggtgttggtgcgggagcgcgtaccagggtcggagggcgtcctggatcggctctttcgtcgaaaggttgcaggcggtgatgcgcacattcatggagcgggtctgcgtcgagaaccgaaggccttcgccgaggagggtgtggtcgccggtagctacaagagttgtaatgactgttgtacacagaagtttggcagtcacacaaggtctcagctgttcactaagatggaatgcttttcagatttggatgttaatgttcacttagttgaagtctatgctggactcctgagacccgagctcatatatgtcaacattttcaaattgaggaatggtggatgtgattattttggcaagggtgttcttaaggttgtgaacaatgtaaataatattattggaccagcaattgttggaaagatttgtatctcaattataaagttacattga

SEQ ID NO: 27120 - DNA, 840 bp, Zea mays
  Peptide Sequence Number=SeqID_70495
atggcggtgccctctgcagaggcgcggacggtccgcggccaggggctggacagtcagcgacctggcgtgcacaggacctttgttctgcctccccgcgcatcggctgctgccgcgcgtaaatccgtcgtgcccccggtcccgcatatccgccgcgccagctccgcccgctcgattcccctcccagcgcccgcattccccgtcaccgtcctcgtggatggaaggttgcgcacacggatggaaggttgcgcacaaggaggacgcagacgagcacaactggaaggttgcgccaaatcgtgcatccgccgcaacgcccgcggatggaaggtcccagatctcttctcgccattaccgcgccccgtcaattcccatatcccttctcgccattctctcggagcatccactgccattcatggacggcagacgattccatcctctcggttcatgaaggtgctcttcctacgcctcggcttctctggtgtcgcggatttgaagatccgccgctccgagtggggcggggccctggtcgcgccgcggaggtccgggtcgctgtcggcacgcatcagcgccgcgctgtccggtggcctggtgttggcgccgccggcggtggaggagaaggtggaggtcaactccgccatattccccaagggcccgccggtgccactcccggttcagaagatggccacgcacatcgacaccaccgaggtgagcaggggccccgacgacctgccgggctactgggttgtcaccggcgccaagctctgcatggaaggcggcaaggtcgccctcaaggtcaagtactcgttgctcatcgcagtgcaagaggaccctgaaggacactga

SEQ ID NO: 27121 - DNA, 927 bp, Zea mays
  Peptide Sequence Number=SeqID_70496
atggaggcgctcccagctgatgaccaaagaccctttgaagacctcgtaatgcgcgatgagaaggaggtgatgcggcaatggaacgaacaacgcggcaaggaagaggcggaactgctgcacaaactctccgaacaacgcaaggaggcggcagaaaagtacttgtcacacttcacgatggatcgccaccagaagatcatccgtcaaggggagatcgatatggaatctctcctacctccacttcagggtcccgctcaagagtctaatacagagccacccgcgtcaaacacatcggctataaatgggtcacccttgaccaagccatcatatggtatgccgacgcacgctttcgtgccaccatcacagccacaaccactaggcacgcggcaagtactggacgcggccggaccgtccgagcatcatctcagacagtccggttataccacggactgtccgacgtatttcgccggaccgtccgaccagatgcaggcccgcacacaaaccgcccaggtcgcaacatacatggccggaccatcagggtacaaccccgaacaattcggccccatcacggaccgtccggtgcatcacgccggacagtccggatatgttacggaccgtccgccatcttacgtcggaccgtccggatatgtcatgaaccggccaacgtattacgccggacaatctgactctacacgagtccacgcgcagactgcccaagtcgtgccatatatgaccgatccatccgggtacaaccctagaccattcggcccgatcacggaccgtccagttctttacgatagacggtctgggtacgagactgcccacgtagcaccatatacggctggacaatccggatataccttcggaccgtttggcccggtgaaagggaaatgtgcccttgggccatttctaagtattttggtgatttag

SEQ ID NO: 27122 - DNA, 147 bp, Zea mays
  Peptide Sequence Number=SeqID_70497
atggcggtcggacgggggattcttgcaagtgcttgttggggcgaaggcaaagacgccacccttcgctcgaggccttcgctgcagccgctggacgctgggcactcagatacctataaatacccccgcacagtgcccgtgagaggctag

SEQ ID NO: 27123 - DNA, 228 bp, Zea mays
  Peptide Sequence Number=SeqID_70498
atggatccatggggatgcgtggtctacgagatgaaattggaatatggattaacgtgcggatacctgtgtcaagcgtttgaacatactaagcacatgccgagaaatatggtaaatcgtagactttgcccctcacgcgacctgagacgtggtctcccattccggttatggtgggtacaagtgcggtcactgcacgacggcactcggggtacccttaggatgattggttga

SEQ ID NO: 27124 - DNA, 1653 bp, Zea mays
  Peptide Sequence Number=SeqID_70499
atgacgcttgcgagcacggacaaggtggtgctgggatgcgtcgcgttcagcatcttctgggtgctggccgtgttcccgtcggtgccgtttatgccggtggggcgcaccgcggggtccctcctgggcgccatgctcatggtgctgttccgcgtgatgacccccgacgaggcgtacaaggcgatcgacctcccgatcctgggcctcctcttcggcaccatggtggtgagcatcttcctggagcgcgccgacatgttcgagtacctcggcggcgcgctggcgtggcggagccggggcagcaaggacctgctcctccgcgtctgcctcgtgtccgccgtggccagcgcgctcttcaccaacgacacctgctgcgtggtgctcaccgagttcatcctcaagctggcgcgccagaacggcctgcccccgcagcccttcctgctggcgctcgcctccagctccaacatcggctccgccgccacgcccatcggcaacccgcagaacctggtcatcgccgtgcagagcggcatcaccttcggccagttcctcgtcggcgtcttcccggccatggccgtcggcgtcgccgccaacacctgcgtcctgctctgctacttctggaggtacctcgcggcgccggagaaggaccaggaggcggggcccgacgcggtcgtggccgacgaggaggtcacctcgcacaggttcacaccggcgcggatgtcgcacgcctcgtccatgaacggcggcttcgacggcgactgcgtcagcgagcccatgcgccggagcgagagcctgggcagggccgacgcgctgaggagccgcagctacaactcggagggcgacatccaggtctccatccggtccatgcgcgcctccagcctgtcgcaggagatggtggatgtgtccaccgtcggcgacgggcccaggaagatcaccaggagcaccagccagcagcgcagcgtcatcatcgaggacgcgccgcccgaggccgacgacgacgcccacaagggcaaggacggcgacgacgacgacgtcaaggtgaagaggtggaaggtggtcgtgtggaagagcgccgtgtacctcaccacgctgggcatgctcgtcgcgcttctcatgggcctcaacatgtcctggtccgccatcaccgctgctcttgtcctcctcgcgctcgacttcactgacgcgcaggcttgcctggagaaggtgtcctactctttgctcatcttcttctgtgggatgttcataacggtcgacggcttcaacaagaccggcatacccaacgcgctctgggagctggtcgagccgtattcgagaatcgacagcgccagaggcacggcgctcctcgcgcttgtcattctcgtcctttcgaacgtggcctccaatgtcccaactgtcctcctgctgggctccagagtggcagcgtcagcggctgccatctccccggagtcgcagaagaaagcctggctcatactagcgtgggtcagcacggtgtccggcaatctcaccctcctgggctccgccgccaacctgatcgtgtgcgagcaggcgcggcgggcgcagttcttcgggtacaacctcaccttctggagccacctccgcttcggcctgccgtcaaccatcatcgtcaccgccatcggcctgctcatcgtcgtcagctactga

SEQ ID NO: 27125 - DNA, 906 bp, Zea mays
  Peptide Sequence Number=SeqID_70500
atggctaagggtcatgacaactggtatcgaagcctccaattctttgcggcgatgctgcacttcattggtgatgagaggcgtgtggcggcggtagacaacgatgctattggtggtgatctgcacttggtggcgagtggtggtggtagaagttgtggcaagatgttggagtgggacgacgagcggagcgtggcaaacacatgggatcaaacctgtggtgaagatggggatgatgagcgactacaaggtggagatggtgaaacgacgggatgcaggaattcttcgtcgaattcaagggcccggccgaaagtaataaccctcgcgccgaatcccagcctcccccctctcgcgccgaatcccggtttctcccctccctctgcctcccggcgggctgatgatccacgtgggctggggggagatgggtttccggagaactgccaatctaccctgtcgatcgtgttcagatattcttgtatctaccaaggtggtgtctggaaggttcgggtagaactgcctgatgcatacccttacaaatccccgtccatcggcttcatcaacaagatttatcacccgaatgtcgatgagatgtctggctctgtctgtttggatgtcataaaccagacatggagcccaatgtttgatctagtaaatgtttttgaagtattccttccacagctgttgctgtacccaaatccttctgatccattaaatggggaggctgcagcactgatgatgcgtgatcggcctgtttatgaacagaaagtgaaagaatattgtgaaaagtatgctaaaccagaggacgctggcatcaccccggaagacaagtccagtgacgaagagcttagcgatgacgacgacgacgacaacgactccggggacgaagctatacttggcaatcctgatccttag

SEQ ID NO: 27126 - DNA, 891 bp, Zea mays
  Peptide Sequence Number=SeqID_70501
atgtacaggaatgtcaagtccctccaaggtttatccatatcagattttgcaaacacacaaccaccttatttgcagtgcccagctcatgtattgaagattaagcacccccaggacaccaaggtatctcccggggtatggtacattgggtactttcatggccttggccctgctcgcacgcaatcaaagatgattagccgaggaaaagcacacttggtgagcactcgcattactgtaagaggatgtgccacttcagcattttggggaccctactgcaaccagacagttgacatgattggttgttctcaaccttcaatagataataactcaaggaatcttctagatctgaaagctgagaggaggaacagtttgtatactagagagcacaataggcgtattaatatcttatcacggccgaacggtttagtagaacaagaagttgcatctaacgccacgaccttggtgagaatggaaaactcgatcagttgttccatttccaatgactcaatatgcatcagacaaggcgacatgaagttctacttcttggatgtagtcaacctagcattgcagtttaaaattacagctacaaattttggagctctagggccatccttgatttgctacctgcggcataatgcctttcctcaaagagatctgcatgactattcaggtgatatcagccatgatcctttggttgtcaagttgccgaatattgggcgttggtatattgcaattgaaactgtcaacaaaacacagacgaatgttacagcatcaacacctgttctagacacaacatgtttctcattgaagtggcaattaactggatgcttgaatggaaaaactggaaccaattgctcttgggaggcatatgggctccatgaatgcattgtatag

SEQ ID NO: 27127 - DNA, 675 bp, Zea mays
  Peptide Sequence Number=SeqID_70502
atggggagccgaaggtgggggaggaatcggatcggactcgaggagggagtcaagatcggtgggtggggtggagccagcaaggggaaacacatcttcgtcaaagatgacatgacgagagatgatgatgcggtgggaggtgaggtccagacaccgggcgaagtgaggggtagggtggcgtaccgccttcgagggaagacggttcaggaggtgggtggcagtgtgcagggcctctgcccagtagctggcagggagagacgcctggaagaggaggcagcggagcatattagtggtggtgcggatcatgcgttcggctcggccgttctgtgcagaggtgtaggggcacgagagacgcaactggacgccatgagtgaggaagaaagagcgagaggcgttattatcgaactcgcggccattgtcacactgcagagcacggaccgggcgacgaaactgagtggatacccaggtgaagaagtgtgtgagggtggtgaatgtgtccgacttcaacagaagcgggaaggtccagagaaaatgggaaaaatcatccaaaatcaccaaataatatttatagccagaaagactgagtacaggggaggtccaaagatcacagtgaaccaggtcaaaagcctgctcagcccgagaagaagtagtaaatgggagacgagtatgtcggtctaa

SEQ ID NO: 27128 - DNA, 2055 bp, Zea mays
  Peptide Sequence Number=SeqID_70503
atgccgcgcatgaagaatgtgtcggcgccagggggaggcgatgatgaggatcctcgtcgccccttcaggcaggtcaagggcaagactgtttacttggagcagcaggaaggccgcaagaagcggcgtacggacagagctgcccgtgcagcggcagcagctgcagcagccgctgcgcaggccgtgcttggagatcagccgcagactccatccgatcagatcgcctaccgtgttcgtcgtctcacctcccagcctcgctcctccactcacaccttcgcttccactccgccacccactctgcctgctcccgtcactcctattgctccatccacctccacagccatacccgctacctccactacgccagcttccactgctcctcctcctcccgctcccgcttcagctcctcctgtccctccacctcgattccgggagcgcgatgagactgaggttcgtcctctggtttcggatcctcgactgtttgaccttcagcgtgctacagcggcacgggtacgtaggttcagatacgtacccgtggagtcttggctaccagctcagagagaccctgcagcaggtgatcttttcagcacacgtattcaggagtcatttttcagagctcagatgtctgctcagatagctctgcgagtgcaccggcttttggatcttccagcctttctgcttgtagccggtgctgactctgaggcgcacctcacctatctgcctggccttcagacccttctgactatcagcggcaggtatgttgaggagtgggtacgagtcttctacgcctctgtttggattgacccggatcatcactggatgaggttccgctttgagcgagaggatgtcacaattactgccagtcagatccaccagctatttggattccccgagtcgaccactcgccttcacagtctctgctacgacacttctgaccctcctcgtcgccctcacggcggtgtggctccgggtacagctcacgtcgcggctctgttccgcccgcccttcaccgatgggtcgcgacgttctccggcagattttactacaacagcaaagtacttatatgagctcatcagacggactcttctgccgaggatgggatacagggaggctaccactcatattcagctttggctccttggtgccctggtctcccagtctgagtttgacgttgtggacttcctgatttgtgagatcgaggacaccgttctggatgggattcgtgctcgtcggcagttgccttatgctcactacttgtgccacatctttgcgcagctgattcaaccccctcgatttcagagcacccttgaggcctcacgcctcgccgaggatgcagctcttcgacagtttgacactcagggtacagcagctgatgatgatgatgatgatgactttggggttcctcctccgcctccgcctccgcctcctatgcctccacgctcacatgatcatgaggctgggagttctagtgctgtccctcctcctcctcaggctatggaccctgctcttgcttcgattctggcccacctggcggccgagcaagcccggttatccgagaggatgctctcgatgtttcagaacatgcaggacaggcaggatgcacttcagcagcagcttcttcaggatcgggctgagagtagggcattcatggctcttatgcttcagcactctggtatctcagtacctccggttcagtctgctccacctcctccgcttcacgctccagtggtgccatcgattctgtcaggaccccctgttggtgcctctccgctccggccggtcactttggcgttcacctctccggttctcagctctgtctgcccgcagccgccagtgccaccagcatctgctgttaccactaccgctgtggcagtatctgtgaccgcttctgttccggtagctcctgcagtgcggcctctgtccgagtcagtaccagctccagcttctaccacagatcctggatccgagactgactctgaccctccgccggcgttcgctctgctgcctcgaccgcgaccggatgcgcccccgccgcctcctcctgcttcagatgtttag

SEQ ID NO: 27129 - DNA, 387 bp, Zea mays
  Peptide Sequence Number=SeqID_70504
atgaacgccttccggttcctcggggacatgacccacctcttctcggtcctcgtgctcctcctcaagatctacgccaccaagtcctgctcaggggtgtcgaggaagacgcaggagctgtacatgttggtgttcgtggcgaggtacctcgacctcttcacggactacgtctcgctctacaactcagtgatgaagatggtgttcatcaccagctcggcggcgattgtgtggtgcatgcgccgccacccgcaggtacggaggacttacgacaaggagcaggacaccttccgccacgcggtgctcgtcgccgccgcgttcctgctcgcgctgatgttccacgaccggttcaccttccgagagttgatgacccatcaaataggtccatactga

SEQ ID NO: 27130 - DNA, 1164 bp, Zea mays
  Peptide Sequence Number=SeqID_70505
atggcgcctcctgtcgacgtggtcggtccgcgccctaggttgggcgatgtggaggctcctccgaggtcgaggttgagtctgtcttccatggccgaggtcgagtccgagcccctgggttgggcgaggcgtataccgtcagctaaggccagggctgagtccgagccctgggtcgggcggagcggtgttcgtcgtcttccggggctaagcccaagtccgagccctgggtcgggcagagcggagttcgccgtcttccggggcttagccccaagtccgagccctggatcgggcggagcggagtttgccgtcttccggggcttagcccgagtccgagccctgggtcgggcggagcggagcggagttcgtcgtcttccggggctgagcccgagtccgagccctgggtcgggcgaagcggagcttcctatggtgcatgtggccaggcctgactgcctgtcagcctcgctctgtcaagtggcactgcagtcggagcggcgcaggcggcgttgtctttctgtcaggccgctttatgctgatgggggttaccagctgagaattaggagacttgaggaagtggccgacacactgctcagattctttccgccctttcagagagaccgtcccgtttggatggccaggatgcgtgcattggaagggaagcagctgcttgaggatgaccccacagtcgtgtacctcactgcatacctgctcacccttgatgcacagtatgatttcttggctcggcaccaccatcagatgattgctcgagcagaagatgcagagaagctcaaccgtaagctccatgtggatctcaccacagctcaagcccgtgtagctgccttggaaagtcgtgaagtcattgctgttgaagccctgaagcaagccaaggatgagcatgtccagaagttgatggaggcctacttggtcacccataaccaacgtagagccctgcggatccaagagcccgcttcatccaacccagttcaacccaggagagctgaagatccccagattcttgaaggtcaccctatctctatcagaggagagaagaaggcttgggaactcccggaaggagccatagtcttggaaggaattccagtcttccctcaggctatgaataagaaagagcaccccgagtcctcccaagatcccctgccagagtttgtttga

SEQ ID NO: 27131 - DNA, 246 bp, Zea mays
  Peptide Sequence Number=SeqID_70506
atggggtgcacctatgctgccatcttcttgctgctgttggaggagcacgacctcgtgggggttggcgctcttcagtcatcgctcggctgcccggctgcagtcccccgccggcggtcacccaggatgatgaccgtaggcctcgtggtggggaagagcgagccgggccgtggcctcccccctgccctcagcttcaaggatgttcatcatccgtgttggggaggagggcgcgccgagccgccgagttag

SEQ ID NO: 27132 - DNA, 1515 bp, Zea mays
  Peptide Sequence Number=SeqID_70507
atgccggagcaaggagctgctcaggaggtagccccggatccagcaccagagcctgcaccagaggatctgcctgccccagctttggaagctagtgcttttggcaaccaaaccccacagccaaacagctgcatgtttagaggtagaggagtagactcctcacaccgggtggcactgacagtctcgtcggcggaggcaaccgcttctgtagggggaagcctcacctatggcgaccaccacctcagcaccgacgacagcggccacctgcccaccaacaccgcaccggcgaacggcggccgccccagcgtgcaccggcaggtcctcactaccgtcctcgccacaggagcgaggacaagactgtcccagaacacgaacaccgccctcgcggcgtacgacgtgttgtgcgaccccccggtgcagccggcagcgcaggaaggacctggacccacgctctgccccagcgttaggaggcggcaccggaagcagcaccagagccgctcaggccggggagccagacacgcggcagctgacagcgccacggacggcaaacgcccttctcccctgaacgctgagggaaggagcgggccgctgcccacgcggaggtgggacctaactcggcggctcggcgcgccctcctccccaacacggatgatgaacatccttgaagctgagggcaggggggaggccacggcccggctcgctcttccccaccacgaggcctacgggaccgggaaaggggatatttcgaaaaggatccttctcagcgaaggaaactggccccgagccctcctactgatcaggggtttgaaggttgcgccatgcggggttcggcaaccgccccagagcactcgggctccgagccctttactgatcaggggttcgaaggctggcccctcggaagggtttgacagccgccccagagcatgcagagtcagggatgaccctgggtacgtctgttacatggccgaggctcgggctacgctcccgaggtaccctaggacatttccgagaccagcaggaacaatttgtaatggaatcccaccggagggaggcaccgagcccttggagcctatcaaatgggtccgggtccagcaaatcacctgcatggatcgcctgacaccttatcctgacacgcgcgcctcagtcggcaaggtcgaagtgaccgcagtcacttcgcccctttttgactgttctgacaggaaaacggcgctattcaccccgtttcgactactgtgccaaccaccaggccttgggcgcaatagggagctccgcctcgcccgacctcaggcctcggcctcagcctcggcctcgggagaaggtctccgcttcgcccgatctcaggcctcggcctcagcctcggcctcgggagaagggctcaagcacttctccgacagccacattagcacatatacagggctcaggcacttctccgatggccacggccttccaaagggcggtagaagagaaaaggcaaggaagaagggcgaacagaggcagacggagtgggagagacgctaa

SEQ ID NO: 27133 - DNA, 309 bp, Zea mays
  Peptide Sequence Number=SeqID_70508
atggcgcgacggcggcccgggtcgatggtggcggacctccgcggctgcacggaggacggcggcgcgggggaggtgagagaggggcctgctggtgcgcaaatgagggagggggagagggcgagtggggttctgggctcaagtggccggggcgggacggttgcgagctccacgcgcgacgtgggcgcggagtccgcggcagcgcgcagctcgggcggcggttacgcggggatgacggggctgacagccgggacccacgggcagagaaggagaggaaagcgggcgcgggtgcggagaaggcggccgcgctga

SEQ ID NO: 27134 - DNA, 468 bp, Zea mays
  Peptide Sequence Number=SeqID_70509
atgacgacggcggctctcagcccccttacggaagcaaggagacgtcagcaaggactcgacagccccgacagctgtccttccgcaagggtccagcgctcctccgacggccacgacatcacacgaacagggagccaaaacctcttcggctgccacgacggcatgtgtcaaaggttcatctacaactatactaaatcgactgtccggaataccgtagattattccggacagaagaagctttttggaaaaacaggccaagcacggaccgtccgggcccttgcagcggaccgtccgcggcacaaggatgaccctcggacagaaccaatgcaaaaatctgagtctgcactatggaccgtccggaggataagcgcggaccgtctgagacctcgctcggaccgtccggcctcaggcgcagaccgtccggtaggcaaggatccgaaaaacccgaaggtgacgggttcggaagaatga

SEQ ID NO: 27135 - DNA, 876 bp, Zea mays
  Peptide Sequence Number=SeqID_70510
atgggcgggcgcgaccgggaccgggagctcctcatcccggtctccggcggcggctcggcgcccggcgtcgatgacgaggacgctgacagggcctcctccgcctccgcggcgctctcctcctccggccgcgaggctttccataaggtcgtccgcagttgggcttcaaagaagttcatgactggatgccttggcgagtggattattaagcgcatgccccttgttcgtcatatctacaatgcatcgaagcaaattagtgctgcaatatcaccagatcagaacaaacaggcattcaaggaagcggtcatcataaggcatcctcgtgttggagaatatgcgtttggtttcatcacatcgtcagtatctctccagagttattccggtcaagaagatctttactgtgtctatgtcccaacgaaccatctttacattggcgatatcttcatggtgaattcaaaggatgtcataaggccaaacctttccgtgcgtgaaggcatcgaaatcgttgtgtctggtggtatgtcaatgccccagattctgtcaaccctcgacccggagatgatccttggctaccaagagtacggcgaactgaacttggagcacaagcgccataggaagctccgcctcgcccgattccagggcatggactcggcctcggccccggaagacgacgaacaccgcctcgctcgaccccagggctcggactcggtctcggccccagaagacgacgaactccgcctcgcccgaccccagggctcggactcggcctcggccccggaagacggactcgacctcgacctcggaggagcctccgcctcgccctacccagggctcggaccgaccacgtcacaggaggggccatcattaccctacccctag

SEQ ID NO: 27136 - DNA, 165 bp, Zea mays
  Peptide Sequence Number=SeqID_70511
atgggcgggggcctcctggcagcagcatccgccctgaggtcagtgctgccgctgttcggccccccggagcagaagtcgtcgtcgtcgctgctgctggagcgggccctcccctatcgagtggggttgttcgtacctacggagggggaaccggagttccgtttgtaa

SEQ ID NO: 27137 - DNA, 741 bp, Zea mays
  Peptide Sequence Number=SeqID_70512
atgacgcgtcaaaaaaggtgtgccacgtcatttcgatttcgtatccttttcctcttcctctttctctctcttacaacagggaccgggaaaggcgataccccgaaagggatccttctccgcgaaggaaacgggccccgagcccccctactaatcagaggttcgaaggctggcccctcggaggggttcaacagccgcctcagagagctcgggctccgcgcccactactggtcagaggttcgaaggccggcccctcggaagggttcaacggccacctcaggccactcgggctccgtgcccactactgatcaggggttcgtaggctggccctcgaaagggttcgacagtcgccttagacgcagagcgagggatgaccctggagtgaggctgacagcagccaagtccggcctcgggcgccataggaagctccgcctcgcccgatctcagggctcggactcggcctcggccccggaagacgacgaactccgcctcgcccgaccccagggctcggactcggcctcggccccggaagacgacgaactccgcctcacccgaccccagggctcggactcggcctcggtcctagaagacgacgaactccgcctcgcccgaccccagggctcggactcggcctcggccccggaagacggactcgacctcgacctcggaggagcctccgcctcgccctacccagggctcggaccgaccacgtcacaggaggggccatcattaccctacccctag

SEQ ID NO: 27138 - DNA, 441 bp, Zea mays
  Peptide Sequence Number=SeqID_70513
atgggcaagaacaacaagcacaagcgtgagccgactcctccatcagaggacttcggtgactcggagtactcagaggaggagttctcctctgagtccgaggggtctccggctcccatccctctgcgtgagtcgtctgacgattcagacgactcccaggggcttgcggcggaggtctggacttacatccgggccgtcgagcgctccgggctcgagggctcggatgagtcggagtactcctcggacgaggaggactcgtccgaggaggacggtggcggcgatggcgaggacgacgacgacgacgacgacgaaggcggtggcggcggtgacggtgacggcgacggcaggggcggcagcagcggcagcagcggcagcaaggatggcgacggcggcagcagcaggggcggcggcagcagcaagggcagcaacaaggccagtggctaa

SEQ ID NO: 27139 - DNA, 384 bp, Zea mays
  Peptide Sequence Number=SeqID_70514
atgaagagggagatcagcgaggcccacgacaccattcgcttcggcatcaacgccggcgtcaaagccgacctcgccccgccgcacccgctccagtctaccatccaatcggtaaggatccgtcgctctcctccgttcccctttgtccgtgcccacgaaaccctaacgatgagcatgggacttatgtggggtggggggcgcctcgcacaggagaccaagttctgggcggacaagaagaagttcgggacagatgccatatatggatccgccctcaacatccgcaaggatctcgatgcccaaatcctctccaggttcttcactatcccctttgcggttgttcttaccggagaaatagagtttccttccatcaatagttcaatacgttag

SEQ ID NO: 27140 - DNA, 609 bp, Zea mays
  Peptide Sequence Number=SeqID_70515
atgagttgcccaccgccgccggctgccgtggactgggcgtcgctgcttctaccgcccagcacgtcgggcgcgagcgaggtcggctgcggtgtcagcgctgtgacgacggtggctgccggaagcaaagctggtgcgacggcgggagagggagataatagtaagaccgtaaaagctgggaagcagggcggcgggagagggaagaacaaggtgagccggccacggttcgcgttccagacgcggagcgagaacgacatcctcgacgacggctaccggtggaggaagtacgggcagaaggccgtcaagaacaccgcatttccaaggttgatcgtctctttgttgatgctcatgaagtcatgtcttatgctagcttcaatctgctgtggaaatgacgcactgtgggcatgcaggagctactaccggtgcacgcaccatacgtgcgacgtgaagaagcaggtgcagcggctggccaaggacacgagcatagtggtgaccacgtacgagggcgtgcacaaccacccgtgcgagaagctcatggaggcgctcagccccatcctcaaacagctccagctcctctctcagctccagtcttgcactaatcaactcctctga

SEQ ID NO: 27141 - DNA, 273 bp, Zea mays
  Peptide Sequence Number=SeqID_70516
atgacgagggattacaggaaaggattttggagggcttggagcaggcctggtacaccacacatgggagatggccgctcgggtatgctggatgagcagggaggcatgctcgcccaaccgtctgcgggtaggaccgtgggatggttgagaccaattgatgaaattcttgaggatctcatggacatgtgggttaggacccacacacgctttcgctgtgccactctaatcttgttggttgatgttgattgcattgccttcattggggttagcggctaa

SEQ ID NO: 27142 - DNA, 402 bp, Zea mays
  Peptide Sequence Number=SeqID_70517
atggtcggtccgagcccaaggtcgggcgaggcggtgactcctctgaggtcgaggctgagtccgagccctggggtcgggcgaggcggagaccgtcttccgaggtcgaggttgagtccgagccctggggtcgggcgaggtggagaccttcttccggggtcgaggttgagtctgagccctggggtcggcgaggcggagaccgtcttaggaggtcgaggcgggggccgagccccggggtcgggcgaggcggagcttcctatggtgcctgaggctggactcggctgctgtcagcctcaccctggcgggtggcacagcagtcggagcagggcaggcgacgctgttttcctatcaggtcagtcagtggaggggcgaagtgactgcggtcacttcggccctgtcaactga

SEQ ID NO: 27143 - DNA, 741 bp, Zea mays
  Peptide Sequence Number=SeqID_70518
atggatggcagcgaccacccccgcggcggtaagccctccgtctcgcagctcctacaaggcctccagaaggggctggagattcttctgtttctcgtgcgcagccccatagtgccagttgctgccggcggcagtcaccactcgttgagaaaacgacgggagcctcccatcgtcatttcggaggagcgcccgcatgaaacggcttgttggcactccgaacccccgctcatggaaggagacgaaactcggcacataccccgccggcggggtcggggcggccccgctcggagggaccatccactccaactgcgggtcaccagagaggggacggagcaagccatcggcgacaagggcctccagatcatccaccgtgacggtggagaaaggccatgggtcacgcggcggaacgacggttacccggtctgccatcgccaagcgaagggggtggcggcggagcggacaagggcaggcgacacctttggcaggcgaagcgggcgacgcttcacctccgccatgatgaccgcgtcaaaaaaggtgtgccacattgttcaatttcgtatccttttcctcttcccctttctctctcttgctacagggaccgggaaaggggatactccgaaagggatccttctctgcgaagaaagcgggtcccgagccctcctactgatcaggggttcgaaggctggcccctcggaagggttcgacagccaccccagagcactcgggctccgcgcccactactaa

SEQ ID NO: 27144 - DNA, 432 bp, Zea mays
  Peptide Sequence Number=SeqID_70519
atggcgttgagaaggctggcgagccgcgcgccgggggaggccggcctgcggcagccgccgctggcgggggcggcggacggcttccgcgccctcttcgccgtgcctggcggggccggcttctgcttctccacgggagccaccgaggccggcccaacgccgccagctgaggttcggatggggcggaggcggcggagggagtactcgacctcggacgacgagaaggccgcctggtgttgctccttggcgctccgaggcgtcggtgccgtggcacgctccgccgttgctccgtggccgccggcctgctcgtccaaggaatcgcagatggcgtccagcagcgtggacgagaaggatggttggccaggtcgccgcctcggcctctcccgcgccgccgacggtggcgctggcgcccacctctccattgttgacgtgtag

SEQ ID NO: 27145 - DNA, 255 bp, Zea mays
  Peptide Sequence Number=SeqID_70520
atgcgccgccaggtccgggctacttgtgcgcatcacccattgctgttgaaatccatcccaccccaatgtttccaagtagagttacagatatccgatctcggaatgaggatagtgactgggccatgggaatttgatcgagaaagaaagggaaaggatttcggctctcatcaagtgactcctgcccctcacgctgactttgcggacagatgtctcaattctagtggtggagctacgaacaacaattcgatgtcctga

SEQ ID NO: 27146 - DNA, 333 bp, Zea mays
  Peptide Sequence Number=SeqID_70521
atggacgatcatcacttcaggcaaaatgcacaactattaggaaggaatattcggaccaagggccaagacacaaagatcgaggatgcctttgctctgatggctcaaggagttactcctctggaaccgctctcagatagcgaagaagaagacgaggaatgtatagatctggtaatgagctcattctttgatgtcgatgaagacgactctagggacaatgatactgctagcacaaccttggcgacgaaggattttatgatgcctactgcagatgtggcaataccaaggagcccaaaaattcaaccaatgcctgcagtagtttatgcctcttcatag

SEQ ID NO: 27147 - DNA, 513 bp, Zea mays
  Peptide Sequence Number=SeqID_70522
atggctccgagcgcgacatcgagggcgggcgagatcaaagatgaaggcgcagcgtctgacggcctgtacgacgaggtagagatcgatggaggagctcgacaaccaaacaagcaggaggggacgctggcgcggggacagcaaggacgtgccaacgcgatgagcttggacgacggcgctcgctgcagtctagcgaagaggactccggcaccaggaaaccaacaatttgggcgaccacgagggtgttacagatctaacccccttaacaggaatctcgcactcgagattcaagaagaggctggcaagacaacaagatgttcgagaccaactgatgcaattcttgaggatctcctggacatgtgggttaggacccgcacacgcttccgctgcatcacttcaatttattggttgatgttgatcgcattgtcttcagtggggttagcagctaacccccttaacaggagcattgatatgcgcttggtgaagatgctgacgactctgatcttgactgattaa

SEQ ID NO: 27148 - DNA, 291 bp, Zea mays
  Peptide Sequence Number=SeqID_70523
atgcccccacctccgcgaactccgcctgtgcagttgagggccctaatcggccgcaccgtggggtaccgtgagggttatcgccgtggtgaggtcgccatttcttccattgacgccatggctcgcggttttgcggctgcgggtcctcgtctgggtgcggcaagggtctccttggagctattgggggaaaagtgcttgcggttcgcggcgaattcctcgccgtacctcgccgccgccacaactccgcggcccactgtgaacagcccgtgcgcgactcgattttcgatcctatga

SEQ ID NO: 27149 - DNA, 135 bp, Zea mays
  Peptide Sequence Number=SeqID_70524
atgagggtggtgatgagaatgatggttttttattatgattatggtaatggttgtccacattgcaaccactgctcaggagaagacgaagtcgtggaaggagacatccaggagttccaagactacgacgagttctag

SEQ ID NO: 27150 - DNA, 528 bp, Zea mays
  Peptide Sequence Number=SeqID_70525
atggactccattccacacctcacgctcacgtcgttcatgtgctcgctcctcaaggaagagagccacttccacgatgacctcctcccaccacatctagaattatggattgatgaagggactaacaaattaataattagtgcaaaagaagtgtgggcggtgacattccttagagaagggactctcttgcaagacccaatacgcaagttgtttccatatggtgcacaaattaggattggcgagactaacagaggattctgttggagaacgcctagaaaagggtccatacctccacttatatatgaaaggggggaaaggcgtttggatccattaaatcagcccctaatggccggttccaaggaccactccgatgtttcccccaacaatatcatcgtgccaactatggagactctgtcggccgaagaacaacaggaatttgaggagtacatggagcagttgatcaaggaggccaagccgaagtacctgaccaatttcaaggcggacaagaatcaaaaagtcgtccgtatatga

SEQ ID NO: 27151 - DNA, 408 bp, Zea mays
  Peptide Sequence Number=SeqID_70526
atggctccgagcgcgacatcgagggcgggcgagatcagagatgaaggtgcagcgtctgacggcctgtacgatgaggtagagatcgatggaggagctcgacaaccgaacaagcaggaggggacgctggcgcggggacagcacggacgtgccaacgcgatgagcttggacgacggcgctcgctgcagtctagcgaagaggactccggcaccaggaaaccaacaatttgggcgaccacgagctcagactcggggtgacgagcagagatcgtgtcgaggcggacgactgcgagcgcgcaagcacgcggcgcggcggcagttgcgtggctgtggcctgagcggacacgagcgtaacaagagggacagggtgggggctatttgggcgcatgagagagaggaatggggcaagtga

SEQ ID NO: 27152 - DNA, 609 bp, Zea mays
  Peptide Sequence Number=SeqID_70527
atgcacagtcccacacgaacggacttgcacgagagggtttcccttcgtatcttgtgggaggtacttcagggagctggttacacgacgcctccccagtacgtggtgcagctgtttgagaagcaccgagtgccttgctgtagggtgaggatgaccctggagcctcatcccctacagccaggctggcgatcgttggattccgagtcttttggatacagggctgaggatactatcgaggcgattgctcttcacggactgaccaccttctgtggtttccaccccttggagctatccactcaccccattggtttgttccccgcggagaaggaggacgacccaatgtggaaggacagagtggagcatgccaaggatatatgggctatctacccaggtcagactgctcacttgacggctaccaagatcaccttggataacagggaggaacttgtggtagacttgtccactgagatggtggaaaaagacttacaagtggaacaattgtcaaatgagatccaagagcttgaggagctagtgggaaccagggagaacaccatcgaggttctcgaggatcagctaatcaacactcagcagcaactcgcggaggctaactag

SEQ ID NO: 27153 - DNA, 759 bp, Zea mays
  Peptide Sequence Number=SeqID_70528
atgacttctcacggatcctcggaccaagggaatgcacagtcccacacggacgggcttgcacgagagggtttcccccgtatcttatgggaggtacttcagggagctagttacacgacgcctccccagtacgcggagcagctgtttgagaagcaccgagtaccccgctgtagggtgaggatgaccctagagcctcatcctctgcagccaggctggcgttcgctggactctaagtcttttggatactgggctgaggatactatggaggcaattgctcttcatggactgaccaccttctgcggattccaccccttggagctgtccactcacccaattggtttgttccccgtggagaaggaggacaacccgatgtggaaggaccgagtggagcatgccaaggatatctgggctatctacccaggggaggaacttgtggtagacttgtccactgatatggtggaaaaagacttacaagtggaacaattgtcaaatgagatccaagagcttgaggagctagtgggcaccagggagaacaccatcgaggttctcgaggatcagctaatcaacactcagcagcagctcgtggaggctaaccagcatctggatatgcaccacctggagatccaggacatggaggccaacgaggatgtcgacattgagggaggagaggagctgcctccagcttggacactgctggctctaggagaccaccttcccccgagtcgagtgttgcctcatttgctcactaggtcgcagggatag

SEQ ID NO: 27154 - DNA, 318 bp, Zea mays
  Peptide Sequence Number=SeqID_70529
atgtacgacaagctccggcgcagccgccgcttggacgcggtgcagagcggctgctccgcgctgtccatcgtcaagcagggggacctcatgttcgtcgccaacgtcggcgactctcgggttgttctgggcaccgcattcgacgacgacctcagccaagagtcaccagtactcggtatgtcgcgcgcgttcgacgactactatatcgaggactgtggcgtcatcttggcgctagaggtgacgcagaggaggaccgacaacaatgaccagttcgtcatcctcgccaccgttggggtagcttttgtgctggcttgcctttaa

SEQ ID NO: 27155 - DNA, 690 bp, Zea mays
  Peptide Sequence Number=SeqID_70530
atggtagtagaggaaatccctgtcgatctccctcacattcgtgtggagaacagggtcattctggaggatagcatggaggagtttctacctacgcccaccccgttggtagaattactagccttcgcagctggatcacgcgacgacccggatgactctggtgacaatgatgaagatgacgaagaggaagaagaagaagatgaggaaaacatcaacgaggaagccaacgaagaacagcaggaccactacgtggggttatggcctgtcactaaacattatacatcaatgttcgagacagggcacttccctaacctgctgcaggatgttctgcatgcgttgggaacctacgtccgacccctgtctgagacaaggcaagtgtacgagcctcctcgggctttctactacatcactcgcattcatgtcagggtgatggatgcaggtggagctgcagaagatcgcctcaacaccctagctggtgtggtggctggtcttaacattgacctcgatagtgctaccctggacctctctagggtacatttggagctggaggatgcacatgcaaggatcacagccctggaagctcagcttgatggaaggaatccccctgaagttcaagtccctgctatggcgttatcccctccccgcaagaggatccgctatggggaaccaggatccatcaccaagatgctttag

SEQ ID NO: 27156 - DNA, 336 bp, Zea mays
  Peptide Sequence Number=SeqID_70531
atgggaaagagaggagagctgggcacgagtggccaaggagaagaagagctccatgagctgagggaggaagatgcgcaggggagagagacagagctctcaggcgcggctggaagaagaagagtagagcagagcgcgcaggcatctgggcgcaggagattaacaccacggcgggattcggattcttatccaaggatggccgagcggatgaaggcaagaacagcggcggccggagaggataagcgctggaggtggacgacgcgcgtcccaggagctggcgtggggagcttggccgccggcaaggattgtaatgtgcacttaagtgtaggagttgcttga

SEQ ID NO: 27157 - DNA, 594 bp, Zea mays
  Peptide Sequence Number=SeqID_70532
atggagagtacgtgctcatccccgagcaaggaactgtcccaagaggaggaccaggagcaagcttccgaggctgctatcgaggatctcctgcagccccagctgtggcagaacctcccaagttattgggcccacatgcacctgtccttgtctcaaagacctcagacagctatgcatgcgcgcagcaaagagccagggccgggaggagcaaggggcgtggcaccaaggaggtcagctgccggcagtggaaaccgccatggagagcacagggaagccgcggcgggggaagttcatctgggcgtgctggaagaagagcgtgcgctgcccgaggacgcttgttccgagcaggagaaatgggcgcgtagaggagggagaggaaggagagagccgccatgggaaagagaggagagctgggcacgagtggccaaggagaagaagagctccgagattaacaccatggcgggattcggattcttatccaaggacggccgagcggatgaaggcaagaacagcggcggcccggagaggataagcgctggaggtggacgacgcgcgtcccaggagctggcgtggggagcttggccgccggcaaggtaa

SEQ ID NO: 27158 - DNA, 564 bp, Zea mays
  Peptide Sequence Number=SeqID_70533
atggcggctctctccttcctctccctcctctacgcgcccatttctcctgctcggaacaagcgtcctcgggcagcgcacgctcttcttccagcacgcccagatgaacttcccccgccgcggcttccctgtgctctccatggcggtttccactgccggcagctgacctccttggtgccacgccccttgctcctcccggccctggctctttgctgcgcgcctgctccaaccccctcagccgagcagcgcatcttgctccctatgcggagctcaagctcagagctctctctcgtggcgccaggaatttcccctgctcggattcagctctgtgctgcgaggcgcattaaggtgctcggtaatttgcgtgagtcacggaactctcgtgacttcgcggtctttgcaattatcaagccaggcccttgctcaggggttatcctgaggaaagatgacttctacctgcaagaatatattttcattgggagcatggtgggatcttactgcaaagttccctatgatgctcttttcatcctaaggaacacaaacaatcctaagggtggaaatacttaa

SEQ ID NO: 27159 - DNA, 432 bp, Zea mays
  Peptide Sequence Number=SeqID_70534
atggccgtgattgggcaaagatggcgggcggcggtgctcgcttttcacggcgagctccggagatctctggctcaggcgaggctcggggtgtgtaagtgccaacggctaaggcctctggaggcatttataggcgagggcacaacacaggcgcgcagggcgaagcaaccacgcgtggggcgcgcgctgccgcggccagtccgtgctcggccggtcaggcaagcgatcgaacacgtggctttttgcttctgcccgagttcaagcgctcataggttgaagatcttcacgtcacttagaccccgcaaggaccaccacacaattagtgtctcttgctttgcttacaaggctttgagagtaagaatgagagaaagaagaaagccaaccaagcaacaagaacaacaaaagaacacaagccgatcttctcataagtcctaa

SEQ ID NO: 27160 - DNA, 483 bp, Zea mays
  Peptide Sequence Number=SeqID_70535
gaaccgaagctcgcgcatcaggtactcctcgccgacctccccgaagcgccctggtcaagctccgcggtcaccaaccggaatcgcacgatgcagatggtccaaaatatctccctcacggtgacgagcacactgttagtggccggtaacgagaatcgtggcaatctccacggagctagtggcaacggttttgcgcatctgtgggaaggtgaagacgacaccagaggctgggacccacccaccagcgccatagcgaccgggagcgcgcgtctgcaggaccaggccaggaaacatccggagcccaaggatcccgattctctgttactcgagaaggcccacctgtcggcgcaaacagcagaagttgggtcacgcggggcaagctggtgggccgaaatggagcaccaaggcccagagatttggagcccggaaatccggtctgtctccctgctcaaacccgaggcaaatccagggttttgtcgtgtctag

SEQ ID NO: 27161 - DNA, 165 bp, Zea mays
  Peptide Sequence Number=SeqID_70536
atggggaggctagaaccccgcgcagaatgggaatcactgcttgtgggtaaagtgtgcaacctctgcacagtgttagaaactgttatatcagtcgagatcacgtgctcaggagatgttggcaacatgaaggactttgaggagttcgaggactacgatgagttctag

SEQ ID NO: 27162 - DNA, 114 bp, Zea mays
  Peptide Sequence Number=SeqID_70537
atggggaagcctgtcccatcactcctcatgctcctcctcagccgaggtttgaactacaacagtggtttaactttttccaaaaatgctgtaaaaatcacagtgggttgccattga

SEQ ID NO: 27163 - DNA, 117 bp, Zea mays
  Peptide Sequence Number=SeqID_70538
atggctggcggtgacctcgctagctgtcttgccctaccgcccctgcatatctgcagtgtccagcttctcattgatgctcaggagccgcatgaaagctcttgtcgcgtcagagactga

SEQ ID NO: 27164 - DNA, 408 bp, Zea mays
  Peptide Sequence Number=SeqID_70539
atggcgaacgacgagcaactgccgctgcagtgggcggaggtgcctccaaatcgacgtccatgggggccgatgcagatgatcccgcgtcaaacaccggcgctggtggcgacggggatgcagtggggagtccacactccaccaccggcagcggaaccaccgctgtccatccatggagaacgcagaagtgcacattttgcacttgcacacggcgttcagggatctcgtgcaccgatcgatcttgctgttcttgtgaagaacagcgtgttcttcctcttttccttctctgatttctcccttgagacagtgctgataacgatagagagagatcaccaggccggcgatggcactgcaccggccggggtaaacaaacagttcgtcgcatctgggcaggcaatgaatatggaatag

SEQ ID NO: 27165 - DNA, 621 bp, Zea mays
  Peptide Sequence Number=SeqID_70540
atggccctcgatccggccgtcgcgtcggccgtttggggggagggggtggagagcggcgcggcatgcctctgcgcgctcggcgcgggcctccccggcgtgggcactcggcgagggccccacatgggcgctcggcacggcctcctatggcgctcggcgcgggcccccacgagagggcgctcggcgcggccagccatggcccgctcggcgtggcctcccgctggcgctcggcgcggccagccaaggacgctcggcgcgagcccccacggggcgtgctcagcgcggcctcctgtgacgctcggcgcgagcccccacggggcgtgctcggcgcggcctcctgtggcgctcggcgcgggcccccacgaggcgcgcgactccggcgcgagcctcggcgcatggcgcggctgcctgctcctggcggcgctcgggcgagccccacaaggcgcgcgcgcggccccgcggttcggcgaggcacgccggccaggcggcctccggccctggcgacggctgggagcttggctcctggcggcggctgggactggccgctggtgcccaacggcggcttctaccgcgcgcacgccggacaaggcgcgctggagcgtctgctccaggacagaggcttaa

SEQ ID NO: 27166 - DNA, 681 bp, Zea mays
  Peptide Sequence Number=SeqID_70541
atgggcgcaattcaggtcaaggctccatccactcaagggacacaatctcgcctcgcccgagcccagcctcgggcgggaacaggccaaagtgaccgcagtcacttcgcccctccactgactgacctgataggaaaacagcgccgcctgccctgctccgactgctgtgccacccgccaggggctcggactctacctcgacctcggaagacgatctccgcctcgcccgaccctagggctcggtctcagcctcgacctcggaggagtctccgccctgcccgaccttgggctcggaccgaccacatcgcagggggggccctcgtacgagaaggtggccgcgcgggaggatgggctgacgaacaggctctctccctctctcgcgaacgcttggacccccggggtcgaaacgccgatagttggcgcgccaggtaggggcctgctgcgtgttgacgaacaacttcccgtcaagctccagatgggtagtctccatcaacctcttcagcccgggacgctgctccgtttcgggagtctcgagttcatgtccctcgacggcagctacgacatggtgctgcatctggagcacttggacgaaccgtgcgaggacgtgaaggacgccgatgactgctcagcactgctcgacgcgttcgtctacatcgagacgtcttccgctgctctgcgcgtctag

SEQ ID NO: 27167 - DNA, 1932 bp, Zea mays
  Peptide Sequence Number=SeqID_70542
atgcaagcggcatgcaaccgcaccacaaggatgcaccccttcgacttcgatgaatccagcatggagtcccaggcctacacgtcatgtaaccgacgcgccggttactacgtgcgaaaaactgcaccgccacttacgccaatgtcgtgccttctcgactccggaaccggtgtcgcaactcgaggcaaccccgcgcatggaccgacagtgccagccgagcacgtcggtcacgggtcagtcagccacgggagaaggcgcgacggtcgatatggccaaaagtgggccgacggtaatggcggcagcaggcgagcggaagcggcggtcaaatcgtctgcaggcttgcgtcccctcctggagcagcaggagagccctctcccacggtgtgaagacgaaacgctcgttcctcgaacgactcgcgcacgcacaacggctgccccgcgaaccacccgtcccgtcgcattaactccgcggcagggcaggcgacacctttgccaggcaaagcgggcgacgcttcacctccgccatgatgactgcgtcaaaaaagggaccgggaaaggggatactccaaaagggatccttctccgtgaaggaagcgggccccgagccctcctactgatcaggggttcgaaggctggcccctcggaagggttcgacagccgccccagagcactcgggctccgcgccccattactgatcagaggctggccccccgaagggttcgacagccgccccagaacacgcagagcgagggatgactctgggtacatccgatacatggccgaggctcggactacgctcccgagaggagtcaaaccactcctccgaggcctcgggggctacacccggcggaggcctgatgggcgcaattcaggtcaaggctccgtccactcaagggacacgatctcgcctcgcccgagcccagcctcgggcgggaacagtagacccaggcagattcacgccttgcccgagggcctcctcaagcaacaggcgcaccctcgactcgcccgaggcccagttcgggcaggcttcgcagtgaagcaaccttggccagatcgcctcgccaaccgaccgtatcgcaggagcattcaatgcaaggatcgtctgacaccttatcctgacgcgcgttcctcagtcggcagggacgaaccgccgagtccagcctcaggcgccataggaagctccgcctcgcccgaccctggggctcagcccccgcctcgacctcggaagacgatctccgcctcgcccgaccctagggctcggactctacctcgacctcggaagacggtctccgcctcgcccaaccccagggctcggactcagcctcgacctcgaaggagtctccgccccgcccgaccttgggctcggaccaaccacatcgcaggggggtacatcattaccctacccctagccagctcaggctatggggaacaagaccggcgtcccatctggctcgccccgggctcaagcgctcctccgatggccacgacgccacatgcacagggcactaacacctcttttacagccacgtcggcatggccctcgtacgagaaggtggccgcgcgggaggatgggctgacgaacatgctctctccctctctcgcgaacgcttggttcggtccatttcacggcctagaatgcgggtccaattcaagggaaggtccactgggctatggtgcccgccaactacagcacagttgcactcccatcagatctgtccttgttcgtgcctcgtgctggcttggtcgtcgctcatctctctccccttcaccctcggtgctcgggtatgcatcgggagcggcacagcgggtgctcgctgttcggcaagggcggcctccgggacagcgccagtggggccaaggtgcagcgcaggagcccaccatcggtcgactactcaagtcaagcgccatgcacggatctacagccgacgtcgagtga

SEQ ID NO: 27168 - DNA, 858 bp, Zea mays
  Peptide Sequence Number=SeqID_70543
atgccggggaaggcgaacttctgctgcccagccagggtgcagcattccgtcctctgtccgggcgacggtggccagccgcaccggggggtctcacaacacgtcgtacgccgcgagggcggtactcgtgttctgggacggtcccattctcgttttcgtggcgaggacgggagtgaggacctgccggtgcgctttagggcggccggcgcccgctggtgcggtgttggtgggcaggtggacgccgccgtcggtgctgaggtggtggcagccggagaaggtttctccaccgacaagatcgtcggcgtctcctgtgctccgagcctccggctctttggctttaatgtctggttgttgtcccccgtgacgagtgaggtatccgtatcccggaggcgtaggagtccctcggctcggtcggccttgccactcaaggtttctcttgctcagttaaggaacccttggctgctctgcgatgagtcggagccggaggcagcggtgtcagcatggacagaggcggagttggctcgaaaaggggcttcgtcggcccaggagcagtatcaggacttgtttgtcggtagcagaatcgctcatccgagcgagagttacttatcgcggaaggtgatgagtgaggattctgttatcgatatagtcgagaaggcacgaaaaatcattctggcaaaaaagttttcgagcgttaagacttgttcggtcagcagaatcgcttatccgagcgtgagttacttgtcgcagaaggtgatgagtgaggatcctgctatcgaagtagtcgaaaagcgcgaaagatgttctggcagaaagactttttccggagaaaattttgacgtagagggggttcctcccttctag

SEQ ID NO: 27169 - DNA, 2018 bp, Zea mays
  Peptide Sequence Number=SeqID_70544
atggagaagtgcaaaccaatcaagacccccatgcctacaaatggacatctcgacttagatgagggagcgcccgccgtcgatctcctctctccggcggcctccatctccggcgacctgcgcaccccttctgttcccctgcggatgccgcgcacgaagaatgcgtcaacatcagggggtggcgatgacgaggaccctcgtcgccccttcaggcaggtgaaggggaagactgtctttttggagcagcaggaaggccgcaagaagcggcgttcggacagagaggctcgtgcagcagcagcagctgccgcagccgctgcacaggcagcacttggagatcagccggatattccatcagatcagattgctttccgtgctcgtcgtctcgcctcccggtctcgctcctccactcacacctccgtttccactccgccacccactctgcctgctccagtcactcctattgctccatccacctcctccgccatacccactaccagcactacgccagcttccactgcttcccctgcccccgctcccgcttcagctcctcctgtccctccacctcgcttccgggagcgtgatgagactgaggtccgtcctctggcttcggatcctcgtctgtttgaccttcagcgtgctactgcagcccgggtacgtcgattccggtacgtacccgtggagtcttggctgccagctcagagagatccagcagcaggagtttttttcagcacacggattcaggagtcattcttcagggctcagatgtctgctcagattgcgctgcgagtgcaccgcctattggatcttccagcttttttgctagcagccggtgctgagtctgaggcgcatctcacctatttgccaggccttctgtcctttctgactatcagcggcagatatgttgaggagtgggtccgcgtcttctatgcctctgtttggattgacccggatcatcagtggatgaggtttcgctttgagcgcgaggatatcacgatcactgccagtcagattagacagctatttggattccctgagtcgacgactcgccttcacagtctctgctacggcacttcagatcctccacgtcgccctcacggcggtgtggctccagggacagctcacgtcgcggctctgttccgcccgcctttcacagatgggtcgcgacgttctccagcagacttcactactgcagcgaagtacttatatgagctcgtcagacggacactcctgcctaggatgggatacagggaggctaccactcatattcagctttggctccttggtgccctgggccgaggatgccagctctacgtcagttttgaacaactcagggtacagctgctgatgatgatgatgatgatgattttggggttcctctttccgcctccgcctcctatgcctccacgctcacatgatcatgaggctgggagttctagtgctgcccctcctcatcctcagactatggaccctgcccttgcttcgattcttcaggctctcacccagcagcagcagactctcacccagcagcagcagactctcacccagcagcaggctctcctggcagccgagcaggctcgtttatctgacaggatgctctcgatgtttcagagcatgcaggacaggcaggatgcacttcagcagcagcttattcaggatagggccgagaatagggcattcatggccctcatgcttcagcattctggtatctcagcacctccggttcagtctgctccgccttcttcgcttcacgctctagtggtgccttcgatcttgtctgcaccccctgctgttacctctccgctccagccggtcaccttggcgttcacttctccggttctcagctctgtctgcccgcagccgcccgtgccaccagcatctgctgttaccactaccgctgtggcagtatctgtgaccgcttctattccggtagctcctgcagcgctgcctgcgtccgagtcagtaccagctccagcttctaccgcagatcctggatccgagactgactctgaccctccatcggc

SEQ ID NO: 27170 - DNA, 423 bp, Zea mays
  Peptide Sequence Number=SeqID_70545
atggcgctttctgcctcttccttcttgcggaaaggcgacgaagaggcgtatcatcaaaagtcaaggcagtccctgattgccctctcgccctatgtagaggctcgagggttacccttgcaccaatgctgcggcaaaattgttggtagcaccaacaaaatcaacacagaggctcggggctgcctttgcacccaggctatggccagatgcagtgaacgtgccgccggtgagctccacgccgtgatcctcgctgacgtcgcgattcgtgcgctcggtgtgcagatattgctggtggtgaaaagatcttggcgctggataagcctaggcgcggtcatcgggctggccgccgtacccacttgcctcacggccggtccagatagcctcgccggagttggccgcctgccgcgtgatggccacatgccttga

SEQ ID NO: 27171 - DNA, 756 bp, Zea mays
  Peptide Sequence Number=SeqID_70546
atgcaagatgccgcacggcgtgcgctttcgcactactgctcagtactcggtggggtggccgatggtcttaacctgaggtattacccctgtcgtccatctggcagcataggaggcgtggttgtctcacctgttggtgaggacaatcctaggttgaacaacacagtcaacctagccgacatgctaaacgcggagctggaccatgctttagatgagctgagtagggctcgtgctaagatcgcccagttgcaggctgagcgcgcggagcgccgtcacctagaggatggctctcccgcccccgtcgggactaagcacccgtaccgctcacctcagcgtggacaccatgcctatggcacagaggaggaaggtgtgctcagcaggagcaggcagcaccgcaagataaggcacctggcagcagttgccaccaccgcccccgatgacaatagagcagatgttcttgatgcagactcaggcagtctaggctattggtctgatgatagtgaagaaagaggaattttttggcgctcaagcaagggcccatgtctagctcaagttgtgacttgtgtgcgtgtttgtgctcgtgctttgaggcttgtgtgtgttgctcttcccactcttacatctgtgcttctttgtgatcatctcattgtaagggcgagaggctccaagttgtggagattcctcgcaaacgggaaagagaaaagaaagaagaacaccgtggtattcaagttgatcattggatcacttgaaaggagttga

SEQ ID NO: 27172 - DNA, 1635 bp, Zea mays
  Peptide Sequence Number=SeqID_70547
atgtcatcctcttcttcttccgccgacgccacaccgccggccgccgcctcgtctgaggagacgttgagtaacgtgatggtggaggagttgcgcgccggcgactctgttgaatttggtgtgtcacggatgacgtcagcccgtattgaagatatgcagcggttgggctactttggcggcggagtcgctcgtgctccggggacggaggaagtccccgagccggagggcgagttggttgttttcgaggcgttcttcgtcgccggactccgcttgcctgcgcaccgggtcttcgaattaaatcaactgccgtacgacggctaccctggtcaagacgaagcggaccgccgtgggaagaaaccagcggtggagactggaggcgaccctgcgctggtggccgccgcctcctcgaaaaagagaaaattagtgatggacaaggatcaccaaggggcggcgcgaaaacgccaggcgactgtgagggttcacgaagctcggccgaaaaggcagcggggaacggcgaaggctgaggcctccggcggaggcaagccgccgctgccggcgaaggtgggcgcctctgcgcctggcaaggcgccggaggtgacggtgggcggcggaggccccaagctgacgaaggtggtgccgtctgtcagcggagtggcggaggctgcgaaggcggcccgaacgttaccgccgcccggcaaacgcgttgccgacttcggcaccgagattaatgtggaggattatcttggggggtcggacgagggcccgcttgctctagttgtgcctggcgcggcgatcgcgacggctgcgccagcgccgaaggcggggggagagacccttggcgccggaggcgaggtgtctgccctcgcgctggtcagggacgaggcgggcgtggcgacccgccggctgaagggagcgacggaggcgttgagtcgagcgacggaggcgctgagtcaggtggctgacttcaccagccgcaccgcgtcgggggcccttacggcagctttgtctgccgaggtcgagagacttcggacgcaacatgctgacgctgtccgtgagaagtcggcctccgacagcaagtgccgcaaactggcggagaaggtggccgccctggagaaggagaaggctgacctccggcgccagctggcgggggagaggagggaggccaacgaagccatcgccaaagagcaggctgctcaggcggaggccaggctggcgcgggcggaaggcaatatcgccaaggagctcgccggagagctgcagcggcggcttactgccctggagagccgcgcggagggggccgaggccgcgatgcgagcggaggccgaacggacgcgcacgcagctcatgactgcatatcgcgagctgggtgtgcggacaggtgacttcgaggtgccggagcgagaggccggacttcgctgtctggaatgggtgcaggaggaactgcaggagctccccactgtcttggcggggttgatgtcgttcagctccctggtcacctgcgaggcagcgatgaacgcgctctctcgcgaaggctgccggcactttgaggccctcgaccaggcagatgaggattttgggcgagatatctttgaggtcgaagaccccgtggtgaaggaatccgccgggggccctgtatga

SEQ ID NO: 27173 - DNA, 906 bp, Zea mays
  Peptide Sequence Number=SeqID_70548
atgaagccgaaagagtgcacaactgtggtgcgattgcacgccttctacatggcggtccgccctttcgcctgctggtttcagcgagaatgggggaacgcttataaccgcggggtggggagaagggcatactccagctctgcggaggaggcgtcctccagccatgcgggggaaggcgaactgttgcttcctggacagggtgcaattgttcgtcctccacccgggcgacggccgtgtcgcgcgcgggccggctacgtccaggtcctccctgcgccgtcggctgcacaacacgtcgtacgccgcgagggcggtacacgtgttctgggacggccccgttctcgttctcgtggcgagaacgggagtgaggacctgccggtgcgctttggggcggccaccgctcgctggtgcggcgttggtgggcaggtggctgctgtcgtcggtgctgaggtggtggcagccagagaaggtttctccgccgacgagaccgttggcgccacctacggtcggacctctggctcttcggctttgacggcttgtcctcgctcctcgtgtgggggcatggacgagggcctttccacagcagtgcttgccctgaggtcatcgttgctgctgtttagccgcctgaagcggaggtcgttgtcgctgctggtgcagtggtcgtcggcgagccacctggagtttgttgtcccgcaggccctctggtgtagaggttgttcatacccacgggagtggaaccggagtcccaaccttcggccgctctgcgatgagctgaagccgaaggcagcgatgtcggcgtggacagaggcggaatcggctcgaaaagaggcttcgtcggcccgggagcacgtggcttccctggccgaggaggtgcagcggcggcggctggagcttggccaggtcgtccgctag

SEQ ID NO: 27174 - DNA, 192 bp, Zea mays
  Peptide Sequence Number=SeqID_70549
atggtactgtgcgtgacgacgtgtgatagtggagacgtggcgcacaacaacgagcagggcggtaggctctctggacgagctccggcaagggaactcagccacaacgatgagcgcgaggggcgcgtcggggaggctgcaggggcgcctggcgtccagtggctcggcggcgtcgagcgcatgtcgaagaagtag

SEQ ID NO: 27175 - DNA, 360 bp, Zea mays
  Peptide Sequence Number=SeqID_70550
atgcatgggggggagtgcgaaggcatggctaccgcccgagggatcgatccctttttaaaggcggctctccccactcgcgtcctcaagcgtcacgggcaaagtcttcaccgacgtgctctagggtcctccccctacgacacgggggcagggtcccacacgtcatgcaagctgacccgaaacggaagaagccaaaccactgcacgcgaagcagggaccgggaaaggggatactttgaaagggatccttctctacgaaggaagcgggccccgagccctcctactgatcaggggttcgaaggctggcccctcggaagggttcgacaaccgccctagagcactcgggcttcaagctcattactga

SEQ ID NO: 27176 - DNA, 462 bp, Zea mays
  Peptide Sequence Number=SeqID_70551
atggagctgctgaccaaggcgcccgtggtggactgctccgggaagatgaagaagcagcgacaacgagggtccatgctgggcttcatcgtcgtgggcacaggtggatctcctacagtcctgtccccgatttcgcccgccgccaacgccgccccggcctcgatttcgctgccaccaaccgtccgacccagcgttgtgattgggcaaagtagggagtgctcacaccatttcttgtccattgacatcagcgctccacgcctgcacccccgaattcccaaatcctgcggcgcctccgccccaaccccgctcgttgactcctctcttccgaacacgccggaggaatccttctccgcgactcgtcttccacctctctgccgggctggcatggattggtctcttcttctgctgtgttatgggggtgttaccgtgttagatctgtttggttttcaagagcgaacagcttaa

SEQ ID NO: 27177 - DNA, 1374 bp, Zea mays
  Peptide Sequence Number=SeqID_70552
atggagaaggatcgccaagatgcgctacggaaacgtcaggcgtacgctaggttggcggacccaaggcacaaggcgaagatggaacggcctagcgcgaagcctaccgccaccggcgccagcatgcctccacccgctgtgcccacaattgagcgaaggcctccctcgccaccgcgcgctgctgaggcaacggtggcgggcgccgaagtctccatggagctttctgtggacgattactttgtgggcggggtcactatgttcgacgcccacacagggctggctcctactgccggcccggcggccgtgacagccgtggcgaggggtgacgtggggtcctcgcaggactcgtggtccaagttctgcgctggcggcgagattgcctcggccgctgctgcgaaggacgtggctgcctcagttgcgcagcaactgaaatatatggctgccttcgtcgagcgcattgctttgggggcgctgacctcggagttttctaccgagaggcaacgacttcaggggaggatcgagcgcctccggacgcaacatatggaggcagttagagataagtcggcggtggagaacaggagccgtaacctgcttgagaaactgatggcggtggaggcggagaaagaggacctcagtcgtcggcttgtggaggagagggagggcacggaaaaggcccgcgcagaggccccagcttcccgcgtagaggccagccttgccctcaagcgcgccaccgatgcggagtcggggctgaagagcttgcacggctatgctgagaagacggagacctccacccgcgctgaggaggagctggagtcgctcccgtccatcgcgaccggtctcatgtcctacgcctcgcttgttacctgcgagggggctgtgaatgccttatcccatgagggatgtaggcatttcgaagtctttgatcggatgctgaatgatgaagaagtcgaggactttggcggccttgaaagctcgatgacccggacagagggcgccgggacgggggctgaagagcaagcgccgcaagccggccctggcaaagaccctgcagcggcgactgctccggatggcgaagactctgcagcggcggctgctccttcgcaggttccgacgtacgggtctgcgcaagcaaccattgctgacattgatactaattttttggcggctgcgaatgcaatgcccattaatggaaatgcgtctggttctaaaactgagttgtggtcatcagagagggatgattttgggagcccgctttcgtggattgaggagtcttctgatgaagatttagactattttgctgcgttggatttggccgcagcagagtcctcgccacaacctgaagtgcgcgaagagtctactccccggttagggcgatag

SEQ ID NO: 27178 - DNA, 426 bp, Zea mays
  Peptide Sequence Number=SeqID_70553
atgcgcaccgacggtccggtggcgcacccgacagttccggtgcaaccaggggactacgcgatgaactcatcagccctcgggaatttttcagagccggcgcgctataattcaaccgaactgtcccggtgctccaagaggacacggctctggaacttggccgcctcgggaattcacaacggcggctccgctataattcaccggacatgtccggtgtacactggactgtccggtgtaactgcagggcaacgacatttcggcgccaacggctacctgcagcgcatttattgcgcgccaacgcgcgcagaagtcaggcgcgcccatactggtgcaccggacactctacagtacatgtccggtgcgccaccggacatcgaggcggacccagataacagtgctccaacggtcgaatcccaacggctttggtga

SEQ ID NO: 27179 - DNA, 1134 bp, Zea mays
  Peptide Sequence Number=SeqID_70554
atgaagatcaagacaacgagcctcctcaagaggaggacattgatcaagggggagatgaagatgatcaggataaggaagatgatcaagaaattagggatcaaagaccgccacacccaagagtccacaaagcaattcaaagatatcaccccatcaactcaatacttgccatacaagatagaggatgcactaagagatccggatttggtggtggcaatgcaagaggagctcaacaacttcacaaggaatgagaatggaaaacccatcaagacacccatgggaacaaatgggcatctcgacctcgacacgggaggtaaatccatagatcaaaagctctaccagaaccatggcctgctcgatgccagtcacctcctctcaggcctcccggtgctcttcgtccgccgtgtcaccaagttcggcgacacgacccacgctgaccggctcatcttctcattccaggagactgagcctgcgacgactggctccggtgcgggtcgtgctccacaacgccaagttccggggttgcgtctatcacatgccccacgagcgaacgtgtggacatgtcacgcaccagcatctcggccatcggatagaatggcaccaacgccttggccaacatgtgtcgcatccgcatgtgagaagactgacacctatggagcggagacaacgaggtgggggacggttggttgggccctaggcgacggggagttgcgcctcattccaaatccacgaaaatggagtagtagcacccaatacctgacgacgcgacaacggagcagctccagcgagaagatccgccggtgcaggatgatggctcgcctgcctccagatctcgtcaccgtgggcggtggcgagttctcttggaaggccccccactcggtggccgtcggggcgcatgggtggtttgggagggagagagagatagaggaaaacatgtggccgctcgtcaatgggatcgcggccgcggccgtctcagcggcggcaacactcaggcacgggggcgcgtttgggagggagagggagatagaggcgttgtctcatggcgtgcgcggtgggggcgggcaacgcgaggttggacgccgggcgcccgtgcgggggcatggcgcacctgtggacgccctccttacagccttatag

SEQ ID NO: 27180 - DNA, 297 bp, Zea mays
  Peptide Sequence Number=SeqID_70555
atggccttattcttggatgaagttatagttctgttgcagaaagatgaaggtgcaaccattgctaagatggtaacatacaacaggatactgatagttagagtggggactagggacatagtgaagtcccttttccaagatgattctcctacaacattactcgctcatgtgatgggcaccattggctccatagaacaagctatgcttgcacagggacgccacacctacaaatatttcataaaaaaccacatgttgtatgaaaaaaaatcaggaaaggatctaattgctcaacgtttatga

SEQ ID NO: 27181 - DNA, 1167 bp, Zea mays
  Peptide Sequence Number=SeqID_70556
atggattgtagtggaaggaggtctgagggtgaggaacgctggaacggggactcaagtgatgtcctgttgttgcctgcggctagggttgaatctgctattgcagcaaagattatgagcaatgtaaaaccatctgagaattccccaagtcttacatatactgtttcaatgctccagaaatttgcgagaaccttagcattgttaccttctgtccgagtgtccgaggacagttggtcactgatgattcggaggatactgattgtggtaaacaatcttttgaatgatgctttcattgggcttgaagaagaaaagaaaggccatgatattatgctgctgctagttccacctggaactgatcctctaccaacattgggagatgaagtaatgcctggaggcaatgtgcatatcatgaagaaatttcgtgtctttactgttcctaccatttcagctcttacgctttgctgcagcgtgatgctgactagttattatccagttcaggtcaatgttccaattcatgctttgatagctttgatgcgaagagtgctgttagttgatggatcattgcataacaagctgttcccttctacaacttcattgcatcaagagcttatttgttttgatcttccatcgttacattcaactttcttggatttgctgaatgcaactattaaaggcatgcgaagccaactcttacctcatggtgctagtatcatacggcttataacagagtacttcaaaatagcaaagctgcctactttgaggacaaaaacttatagcattttgcagctgttgctgacctccatgggtgttgggacgtctctgcacctgcttgaggcaacagtccgcaatgcagttgctgatctgaatgatgatggtgaaattaacatgactatgatcaacacaaattcatcgcaattgaccaatgaatcatcatcaaaagtttattcgaagaagaggaagcaagaaccacagatgcaaaactcaaccatctcaggttcagagaaagtagcaatcagcccaaggaaaagaaaaggttcttccataccaattacatcaaagggagtggcccctgaaagtacaggagatgttacactatcaactccacattctgtcaaaatagctgcgcttgaaacattggaagttcttctgaatgtgatattccttatttga

SEQ ID NO: 27182 - DNA, 75 bp, Zea mays
  Peptide Sequence Number=SeqID_70557
atggcagcgcaaaacaccttcttttgttttgttttgtttttgtttttttttcttcttcttcttctgcgatcttaa

SEQ ID NO: 27183 - DNA, 933 bp, Zea mays
  Peptide Sequence Number=SeqID_70558
atgcagtttgtgccccattgtgatcatgcagaagtgtcagattcacagtcaacaagttcacaactaaacctgatagagagatcaacagagcatctagcctcatgtgaaatcaacccagtgagcgttgatgatgacaacgacaatgaacatatcgatgccaatgaagaaactcaccttgttattcaggacgttcctcaatgccggatttgccttgatagtgaaggtgatgacttgattgcgccctgccgttgcaagggaacgcagaagtatgtccataggtcctgtcttgataactggagatcaacaaaggaaggttttgcattttcacattgcactgaatgtcgagctgcattctttcttcgtgcaaatgttcctccagatcgatggtggttaagattgaagtttcaacttctggttgttagggatcacacactaatcttctttattgtgcaactgcttggttttctactcgactggagagggaaagactgccctcccgatattgtattaagaagcgaccgaaacatggtctcgaccgagaaaattcctgaaccttggcccccatcactagtgggtcgtcaccgcccactcgcaacagcccatccagagggtggcgcgcaggacgtagttgctttcatgggtatggtgatttacagattttatggagatgaactgcgcgaaatgtttggttatgaagagcacccatatgctttctatgccatggcgatactggctattgttttggttggtttgctgtatgggttcttcattgctataatatgtggacagaggataactgaacggcattaccatgttcttgcaaagcaagagttaaccaaggagtatattgtagaagatcttgaaggagctgaccatgtgccagaccttgatcctagccatgttatagagttgaagatattaggactatattaa

SEQ ID NO: 27184 - DNA, 525 bp, Zea mays
  Peptide Sequence Number=SeqID_70559
atggggacgtggatggatggcgaagtaagggctaatagtaaggaaatgtttaggattattactgttgtcgttgatgattttcccaagagcattgtggacatgtacatctcttgcagaaaatatatgaagagttgtgtcgatacatctgaatcaacggttcgtgatgagataaacattgttgatgaatggggaacagcataccggaaacaaatctcagtaccttgggacctgggatgtgctgctgaaatcaggagcactcctgcctcgatgcttgcattattaatagagaacacggcaggcacctggaggtggtggccatcaacaacaatcccgtggaaccatgtcatcgcaaatgctatcgaggtcctagatttccaatgtttaattaatattttaaatgacgccatgacagtgaaagtgaagctgattcttgacggcttgttaagaagaatattccaggcagagctaacctccagtgcctgccaagcgtgtgaatcgccatcacgtggatctgcttccgcatga

SEQ ID NO: 27185 - DNA, 177 bp, Zea mays
  Peptide Sequence Number=SeqID_70560
atggcactgagggctgccactagtgctgcagccattagcttgcaggcagggatcattgtactggcggaaaatgaggccaagttattccattctctccgtaaaaagaccggctgttgtcactctgattattcccactaccttgaagaatatcaagctgagctttctgccggtgaatag

SEQ ID NO: 27186 - DNA, 342 bp, Zea mays
  Peptide Sequence Number=SeqID_70561
atgtcgcaatcccatctcgcgccaacggccgcgccgacttcgccggacgcactaatccccacccccgcctgggctgcagtggctgtggaggtgctccgggtggcctggttgtgtggagtgggttcgagggatttctgggacaatacttcgacccaagcgtggggaattgctcatcgaaacagtgttgccaccgtgagtccgccatctcgcgccggcatcctcaccacgctacgatctgagaagcgttgtgggccgttgatcctagatcaagcgggtcctattcgatctgggtgttttaaatcaacgtcatggatctctgatctaacgtccataggatactag

SEQ ID NO: 27187 - DNA, 339 bp, Zea mays
  Peptide Sequence Number=SeqID_70562
atgggcaggccaaagggtgccacgtggcaagggaagacaacacatcccaccctcacaatagagtatacttcagctacattttgttatgtggagtttaaaaagatccaaaatacagaaacacttgaaactcttaaagaacataagaggcaggaggatcaattttctattagcaagtgtctggctcaattgaaaggaatggatggattaacagtcatggacaaaacatatgctttggagcttttcgtatctgcgacaaacagagacattttcttaacagcaacagagcatgatgttagacaaatttggctcaagcgtaaaattaggtatgccataacttga

SEQ ID NO: 27188 - DNA, 1008 bp, Zea mays
  Peptide Sequence Number=SeqID_70563
atggcccccgggcccgcctcaggggaggatgcgagcctgcaggtgggaccagagtctgattggcagttggaccgctgctcctgcgcgcctgttgctgcaattactgccggtccgcctatggccatgccaactgactcccgtgacggcctcgagaagacgtggcattggcgcaagcggcggggtgcaaccccatgggagttggcatccttccaccatcattcggcttcaaggattttcatcacgcagcccggttgcaacctccggccgatggtcatccacaaggatgactaccagccttgtggtggagagaagcgagccgggctgcggcctccccctgccctcagcttcaaggatgttcatcatccgcgctggggaggagggcgagccgagtgggagcttcaccttccgtgtgggctggcggttcgcttcttcctccagcattcgggggagaagggcgtttgccagccttgcggaggaggcgaactccggaggtggtcactgccactggtggggctgacgtggtcgcctccgctggtgaggctgcccactgcagaggtggttgcctccgctggcaagaccgtcagtgccacctggcgtcggacctccgactctttggctttaatggcctcgctgtcgtcccccgtaggaggacggaggcgaggacctgttcgcagtagcgctcaccctgaggtgatcgctgctgctggcgagccgctcggagcggaggtcattgtcgctgctggtgcagaggtggttgccgttgtcggcattccatcgatgcagaggtggttgccaccgttggtggggctatccggagccagcttccggcatgactcttgctggtgcagcgtagttcattcctgcagaaatggagctagggtcccgcttgtaagggaatgtgatgacatttgcttgagagcagaatgtaataacatatgtacgcaggattttagccttggaagccaagttgtgtgttcggaccccctggatggtggcttcaagtactaa

SEQ ID NO: 27189 - DNA, 1872 bp, Zea mays
  Peptide Sequence Number=SeqID_70564
atgccatcctcttcttcttccgccaacgccacgccgccggccgccgcctcgtctgaggagacgttgagtaacgtgatggtggaggagttgcgcgccggcgactctgttgaatttggtgtgtcacggatgacgtcagcccgtattgaagatatgcagcggttgggctactttggcggcggagtcgctcgtgctccggggacggaggaagtccccgagccggagggcgagttggttgttttcgaggcgttcttcgtcgccggactccgcttgcctgcgcaccgtgatggacaaggatcgccaaggggcggcgcgaaaacgccaggtgactgtgagggttcacgaagctcggccgaagaggcagcgggggaacggcgaaggctgaggcctccggcggaggcaagccgccgctgccggcgaagggctggcgcctctgcgcctggcaaggcaccggaggtgacggtgggcgccggaggccccaagctgacgaaggtggtgccgtctgccagcggagcggcggaggctgcgaaggcggcccgaacgttgccgccgcctggcaaacgcgttgccgacttcggcaccgagattaatgtggaggattatcttggggggtcggacgagggcccgcttgctctagttgtgcctggcgcggcgatcgcgacggctgcgccagcgccgaaggcggggggagatttccttggcgccggaggcgaggtgtcggccctcgcgctggtcagggacgaggcgggcgtggcgacccgccggctgaagggagcgacggaggcgctgagtcgagcgacggaggcgctgagtcaggtggctgacttcaccagccgcactgcgtcgggggcccttacggcagcattgtctgccgaggtcgagagacttcggacgcaacatgttgacgttgtccgtgagaagtcggcctccgacagcaagtgccgcaaactggcggagaaggcggccgcccttgagaaggagaaggctgacctccggcgccagctggcggaggagaggagggaggccaacgaagccatcgccaaagagcaggctgcgcaggcggaggccaggctggcgcgggcggaaggtaatatcgctaaggagctcgccggagagctgcagcggcggcttgctgccctggagagccgcgcggagggggccgaggctgcgatgcgagcggaggccgaacggacgcgcacgcagctcatgacttcatatcgcgagctgggtgtgcggacgggtgacttcgaggtgccggagcgagaggccggacttcgctgtctggaatgggtgcaggaggaactgcaggagctccccactgtcttggcggggttgatgtcgttcacctccctggtcacctgcgaggcagcgatgaacgcgctctctcgcgaaggctgccgacactatgaggccctcgaccaggtggatgaggattttgggcgagatatctttgaggtcgaagaccccgtggtgaaggagtccgtcggggccctctatgaccggatgtggggttcatacggtcgtgaggtggtccgggcgcgggccgaggccgcgagggctcaggcggagcgcggcgagcgggtggacgacttcggggcgttgaacagcgcgctgcctgagccggagacgacccctgcggaggccgcgactggagtcgccccgggaccgaccccggagactgcggaagatgcaccaggcgcccctgcacctgctgcggccggcgaagaccttcccccaacggtggccgaaggcgcacctgatgcccccgcagctgctgtgcggagcgctgaagatccagcggaggtgggggcggaggcaacggcggaggcgtcggcggaggctgccgcggcggcagggccttcgcaggtggcatag

SEQ ID NO: 27190 - DNA, 441 bp, Zea mays
  Peptide Sequence Number=SeqID_70565
atggctaaaaatcaccggactgtcctgtcggtgtctagtgtccgaccgcacacccggggttaccctcgcggtgcttttgcggagcatgctttcaaccctctgagccgggccttgttctgtcatttggcctttcccttgggtgaagaagatgatgatattgatgttcatacaaggaagctagaagaggttctggaagtttatgagcaaaggctcagtgacaacgaattccttgttggaaacaagttcactcttgccgaccttgttcacctgccaaattcccactatatcaaagcatctaacaagtttctttacctttatgattcgaggaaaaatgtaaggaggtggtgggatgctatttctgatcggagttcttggaagaaagtgctgaggtatatgaagagcgtggaggagaagaataaacaagaagaactcaagaagtag

SEQ ID NO: 27191 - DNA, 465 bp, Zea mays
  Peptide Sequence Number=SeqID_70566
atggcgagcccgtcctcgtccccctcgcggaaggctctgagcaagatcgcctgcagccgcctgcagaaggagctcgcggagtggcaggtcaacccgcccgcgggcttcaagcacagggtcaccgacgacctccagaggtgcccctccgccatcgtcgcccttcctatcccctttcctcagcaggcaatccctgctgtgcggggtctcttagattcctttctccgtggctccgtgcttggctaccgttttcttgttcgcgagtctagcacgtccagcgccctggacgcgacgcgacgcgacgtgatacgtcgcgttatatttctgcatccagcaccgatgcatccacacatttacagcaatggacacatctgtttagattggtccactggctatgccaagaaattcctagaaatattactaactaaccatgattccatgagatggcaactatcactggccccttaa

SEQ ID NO: 27192 - DNA, 504 bp, Zea mays
  Peptide Sequence Number=SeqID_70567
atgggggacctcgacggggctccgtcgtcccgcttcggcgacccacgagccggcagatccgtgcgaagtgaccggtgtaattctagtttactatatccaaggagatactgcctgaggataggattcaagatgagcagccatgatgccaaagtgctgcaaaacttggtcctgactcttgcatccttagtggaaactagtgcattcaatattagaagctttctagaagaggctttcatgcatttgggtgacgagcattaccttctcaatgctctccttacaatccgaaaggaggtagacctcatggagcaggatgcactagagagcaaagcaaggtcagacccagagaaggagaggatggaggaagaaataaaagtattggagcaagtgaacccagtggcccaaaattctttcactcccccttcctcaccagaattgtatgaggccagtgacaatgactcgtacgactccgacaggtccactaggtatagcatttggaacctgtaa

SEQ ID NO: 27193 - DNA, 717 bp, Zea mays
  Peptide Sequence Number=SeqID_70568
atgggtccacaggtcccagtggggggcaatccccaaaaatcctttgcaacccgccgcgaagatggctgcttgcgcgatggagttgggactgagattgtgcagctccaccccgtagacgtgcagaatcgcccgcatgaaacgacttgccggcactccgaacctctactcgtgaaaagagacgaagctcagcacataccccggcggcggggacggggcggctccgctcggaggggccatccactccggttgcgagtcactggagagaggacgaagcaaaccatcagcaacaagggcctccagatcatccgccgcgacggtggagaaaggccacgggtcgcgcggcgaaacaacggtcacccggtcggccatcaccaagcagaagaggtggtggcagagaggacaagcagggcaggtgacacctttggcaggcgaagcaggcgacgcttcacctccgccatgatgaccgcgtcaaaaagggaccgggaaaggggatactttgaaagggatccttctccgcgaaggaagcgggccccgagccctcctactgatcagaggttcgaaggctcgggggctgctctcgcaaacccggctccggccaacccgttgacagcgtcaacataccagcccgagaacttggaacctgactatgcacccgggctacggccagttcgcatgagggaacaaccagaccggccaaagcatcacgaaacgcgctaa

SEQ ID NO: 27194 - DNA, 474 bp, Zea mays
  Peptide Sequence Number=SeqID_70569
atggatgcaaaggctggtggtatggtaaattgttgcggcagggaagagattgatggcaagttgcttgcgctcaccaaagaactggaggcggtcggcatgtggtacgtgttggagatgggcaatgtcgtaggggaaatcgctcatgttgctgaacgtgctttgttcttgtggaacaatgatcatattgtaagcttgatagcacaaaatcgtgttgttatatttccaattatatttgaagctcttgagaggaatatacagagccactggaatcaagcagttcatggtctcactgcaaatgtgcgcaagatgtttttggacatggacagtgaactatttgaagagtgccagcagcagtacatggagaaacaagcgaaagccaaagagatacaggaacaacgagaatcagcatggagacaattggaagctgttgttgctgccaaggctgctggagatgacatggttttggtcaactag

SEQ ID NO: 27195 - DNA, 207 bp, Zea mays
  Peptide Sequence Number=SeqID_70570
atgggcaagaacaagaagggtggaggttcgtcgcaccactccaacgataagcggaagtgcgagccaagtcccccctcggaggactttggtgactctgagtactcggaggaggagttttcctccgagtctgagggggctgaaagggaaatgtgcccttgggccatttctaagtgttttggtgatttagtgtccaacacaagtgcttaa

SEQ ID NO: 27196 - DNA, 447 bp, Zea mays
  Peptide Sequence Number=SeqID_70571
atggagaaccccgttgtccacctcatccatggaaatggacacggattacaaggaaaaaaaagaagcaaacgagataaaggcccgtcaagctgctcttctggcacctttgccctcaaaggagaacagagagaagtttgtcgtcatggcgaccccattctaccccgacgtcctctttatcggaggaagtggaatcgtctcccatctccgacgatgagccaaccgtgcctggggaagaacctccttagcgagaagctcgccgatggaggaaccaacgccggaatgttcagcgacatcatgaagctggagaacgagacccggcgcagcctgtatctcgagatgagatctcggaggtgggagaaactcttgatgaatgagtcttcagggaaaggaggaactcttgccgacgtgaccgacggcaagcttaggagcaagctgaacaggatgtga

SEQ ID NO: 27197 - DNA, 807 bp, Zea mays
  Peptide Sequence Number=SeqID_70572
atggcggcgccacccgtccccgtcctctgcagcgcttccccatgtcgcatcaccacccacctcgcccctcctgcctttcggaccgttgccgcggcgcggccgcaggccttgcccttcgtcttgtgcgtcgagcagcgcgtggggccctcggcgcgcgcgcgcgcgccgttcgcggccaagcgcggcggcggcggcgaggtatccgcggaagctccagacggcacgcgcgcgctgctccaggcggcgctctggggcgccgaggctgcctatatactctggctcttccttctgccttacgccccgggcgacccggtctgggcaatctcgcaggctaccatcagcgacctcatcggcctatcactcaacttcttcttcgtcctgccgctgctcaactcagctttcttgataccttacatggcgatccgactgaacggtccggaagcggaccggtctccgccacgaagatcacagctgggttcagtcatggtcaacggcgcgccggctgtgggcgcggtcggcggcctcgtctgcgttctctcgatcgtttgggcgttctctggccgcggagattctggtttcggaggcattgcggaacggtggcagtatctgcagagctacctgttctcggagcggcttgcttacgcgtttctctgggatatgtttctgtactccgtattccagccgtggctgatcggggacaatcttcggaacgtgaaggcggatgctgctgggcttgtgagtgtggtgcggttcgtccccgttgtgggtttagttgcctaccttctttgcttagaggaagaggattag

SEQ ID NO: 27198 - DNA, 1512 bp, Zea mays
  Peptide Sequence Number=SeqID_70573
atggtcggcgccggcgtgctcagcctgccgtacgccatggctcacctgggatggggccccgggatggtggcgctgctggcgtcgtgggggatcacgctgtacacgctgcgtctgctgatcgagctgcacgagtgcgtgcccggcgtgcggttcgaccggctccgcgacctcggcgcgcacgcgctgggcccgcgcctggggccctgggtggtggtgccgcagcagctcatcgtgcagctcggctgcgacatggtgtacatggtgacggggggcaagtgcctgcagaagttcgccgagtccgcgtgcccgcgctgcgcgccgctgcaccggtcctactggatctgcatcttcggctcctcccaattcctgctgtcgcagctgcccaacctcgacgccatcaccgccgtgtccttcgccgccgcggccatgtcgctctgctactcgaccatctcgtgggccgcgtgcgtggcgcgcggtccggtgcccggggtgagctacgacgcgtacaaggccggcaccggcaccggcacggcggcggactcggcgttccgggtgttcagcgcgctggggcaggtggcgttcgcgtacgcggggcacggcgtggtgctggaaatccaggccaccatcccgtccacgcccaccaagccgtcccgggcgcccatgtggaagggcaccgtcgccgcgtacctcgtcaccgccgcgtgctacttccccgtggcggtcgccgggtactgggccttcgggcgcgacgtcggcgacaacgtcctcgtggcgctgcaacgcccgccctggctcgtcgccgccgccaacatgatggtcgtcatccatgtcgtcggaagctatcaggtatatgcgatgccgatgttcgaaagcatcgagacgattatggccacaaggttcaggctgccgcgagggttgctcctccgtctagtggcccgatcggcctacgttgcattcacactgttcgtggcggtgaccttcccgttcttcggcgacctcctaggcttcttcggagggtttgggttcacgccgacctcctacttcctcccctgcgttctgtggctgaagatcaagaagccgccgaggttcagcgcgtcgtggtgtgccaactgggtaggcgacgaccgccacttcttcttcttcctcgcattctttggctttttcaaactgggagagagtccagagctgggactggcctctgcctgctcaccacttgcttgctccgtccgcgtctctttgtcagggctgcatcatcgtcggagtgctgctgatgcttgtgtccaccatcggcggcttacggagcatcgtccaagacgcatcgacgttccagttctactcctgaagccctcacacttgcatgtacctctacactcacatggttccagcaagtcgtcaccctcgctcgtccacgcagctctacctctacattttgttgcaagcttgagggtgtccgggtgtggctgcagcctgccgaaatgcagaggacgatgcagcaaactgtacactcgctaa

SEQ ID NO: 27199 - DNA, 726 bp, Zea mays
  Peptide Sequence Number=SeqID_70574
atggcgtcggctcctgcgttctacgtcgcgctgctgctgctgctggcttccgtcgctgccgtccatgcggtgccgccccaggccggcacgtcgtccacctgcagcactgacctcctccgcctcctcccctgcctgcccttcatcgagggcaccgccaccgtgccggcggacacctgctgcgccaaccttggcagcatggtgcacgacgagccgcagtgcctctgccaggctctcagcaaccccagcacggcccccgtcgccgtcaacatgacgcgcgtgatggccatgcctcggctctgccgcctcgacctcccgcccgccaccggcgcctgcgcaggtaatactcgtacgcacgcgatctccattacgtgcacggatatttcgcctccccttctcgtgccagggatttggcactcactgaagttgtgtttgatgatgagccctcttgcagttgccggtcttcttccccatggaccatcaccgccgctgccaccgccgccgccgccgcccgcggcggcggtcactccacacgcaagcgccaactccagtgctccagcgaccctcaccacgccagcgacgccaacgccgacgacaccacgtatgataccgtcaccgtcggtgagcagccagacgccgccgcgatacagccgggggtccaagatgatagctcacggcttctctgtcactcttggtttcgtggcattggtgtcagtcctagctttctga

SEQ ID NO: 27200 - DNA, 477 bp, Zea mays
  Peptide Sequence Number=SeqID_70575
atggcgtgcgaggatactgcagggcttggggccctttggcggcactcaatgccagccaaccacggccaggaggaccccaccccacacatgatgctagacgacgccaccaaggcacaccaacccaacaacacacgagggccaggggtatgccttggggtaaaaaacaagtctgcagatcgcacagcaaacatacaaagggacagcccctcgaaaatctctgctatggatctgaaaggcaagaaccctcagaactcccagtgggatcgttggggtccgatggagaagccgcagggtcctcattcttggaacaggacaagaaaccttagttggaagttgaagcctactctcggaaaatctgagcaacatgagggtctgttgtcccctcatcctggcgagggaactaaatcaggtaacccttctgtctcccctgtgcctctgaagaaagatgtagatcttgttcgccctgctttctgctag

SEQ ID NO: 27201 - DNA, 276 bp, Zea mays
  Peptide Sequence Number=SeqID_70576
atggccggggataagcaaaggcaaaagctcaagcaaaagccatcaagcaaaatctccaacacctacatcaaaaaggtagacaaaaagactgttataccatatttgatcaagaagaaaaagaatggaaaggtgatagcaatcaaggccaacaagcaagccaacaaaggaaagggggccaaacgcatctgggtgcaccaagaaggtttggatcccaaaagggaagttattgccaagtgggttagtaaattctttggacccaaatttccccacccatga

SEQ ID NO: 27202 - DNA, 887 bp, Zea mays
  Peptide Sequence Number=SeqID_70577
gtggtgatgagaatgatggttttgattatgattatggtaatggtgccaaaggttcacaacaaaccaataccaagtccaaaaaagggttcaaatataaaggagcaaaaccaaccaaaggctgccctagtctagcgcaccggagtgtccggtgcaccagggtggatcaactcgaactgctcagcttcggggatttggggaagctgctccgctataattcaccggactgtccggtgtgccagcggagcaacggctacttcgcgccaacggttgtctgcaaaggaacaatgaaagtgaacagtgcacgcctgcgcgcgcagaagtcagagcaggcgccagaaggcgcaccggacagtgaacaggacctgtctgataagcaggatacgccctgtccttcaaaggctagatattcttcaagacgaaatcgacaaccacagcctcagcagtcagacctctatcctttagcaagcaaatctcagcaagcaggactctggcctctgcaacctccgaaggagtcggagactcaacccagcatggagtacgaacatctggttgcctccccgaccgagggggagggactcgcagtggttttccacaataaaccactcgaggtgccaccctttgatgctgtccttgagggggatgtcgaggtactctatcttcctcccacgacgcatctccagactggcaccaccgatgagctggtgctgtcccccggccatcccgggctagcaatgatacaaatacttccaaaggccaaaatgggggagaatcttgagatcatagaaatcaaggaggccgcggaagaagggagaaacgggaagagcaaggccgcagataagaaaaggaacaaccccaacgtcaacaagatggaaaagatcggattttga

SEQ ID NO: 27203 - DNA, 321 bp, Zea mays
  Peptide Sequence Number=SeqID_70578
atgaccaacctgaactcgccccatcagctctctccaatacttaaggacactgtgatagggacgctgggcctgaaatatctctcttcgccccctcatgaccagcctgaggcgacgctggagaggtttgtttctggctcgccccataaaattacaacggacagtgaagcaccaccatgtgtctcctactcctccgtgacctttgggaagaagcagactgccactaccctgaaggtctacaccagaaaaatgccaagagaaagggggtaccaggatacagaggttgttcaggtgattgatgatggaagaggggatgctgagtag

SEQ ID NO: 27204 - DNA, 1779 bp, Zea mays
  Peptide Sequence Number=SeqID_70579
atgcacaccacgagacctctgtctacgaccaaccacctgccagccttcctcatccaccggaagggccgcaggagaggggctggcggcgcagtgacttgccgagggagaagggctggcggcgcaaaccgagctggtgggggctgcatctttaatggatcgtggagatggaagggaacctccagccgaagagtcgccgcaccatctctgggccttggaccgcccatcctgggagtgcagccgccgggacagactggaccctgtcgccgagggggtggaagacaaggaggtggtcaccagtaccagggtggtgaccggcgaggggctggtggagaggggagtggggaggggaagcgatcgggcgggtttgcacagaaagaggagtggcatattttgtgtgacacacttgcgtctaggcttctgaatgtcggtgatacactagctgcgaccctctgttatatttgtgctggaaatattgacaaagctgttgaaatatggtcccgcaccttgaaatctgaagatggtgggaagacttatgttgatcttctccagaagagatttagcgcgtcactgtctaagcttattgagaactacgctgaattgctggctagtcaaggtcttcttaaaactgcaatggagtatttaaaactgttgggatcagatgaacactcgcatgagctggcaattttgagagatcgaattgcatgttctacagaagagaatgataatgttagttctgtttctgaaagcacgggcactccttccccctatgtcacaaatcaaccttataccaccccagaccattctcagaatgtttaccaggtacctcaaccatacaatgtgccaagcaatacatattcagaagcttacccacaacaaggtacaggagcctatggatacaacaatgcatatcaacctcagcaaccagccaatatgtttgttccacctagcacacctcccaacactcagcaacagccaggcccttcacatgtaccagtgcctcagcaaacagtaaagacatttactcctgcgaacccagctggtctaaaaaacccgggacaatatcagcaacctaataccttaggttcccagctttacacgggcgctacgaatcaaccgtattcttctggaccatctgctccttatccaagcggacctccaacaacatttcatcagcctgtagcacctgttcaatatcagagtgctgctccaccagtatcttcttttggtccaaccacccctgtaccaggaacagtccctaaccagatgtttccccattctgctgctactaactcgacttccaggtttatgccatcgaacaatcaaagctttgctccaaggccaggtttaagtcctgtgcagccctcaagtccaacacaggtgcaggcacagccagctcctcctgcacctcccgcgactgtgcagacagctgatacgacaaaagtgtctgctgagctgagacctgttattggtacactaaccagactattcgacgagacgaccaaagccttgggaggatcacaagctactcaagcaaaaaaacgtgaaattgaggacaattcgaggaaaataggggcattattttcaaaactaaatagtggtgacatatctccaaacgtttcatcaaaactcattcagctgtgcagtgcgattgatgctagcgattttgtcaccgcgatgcacctccaggtactcttaacgacaagcgactgggacgagtgcaacttctggcttgcggcattgaagcggatgatcaagacaaggcagaatttcagaatgtaa

SEQ ID NO: 27205 - DNA, 1914 bp, Zea mays
  Peptide Sequence Number=SeqID_70580
atggcgtgcattaagagcgcgcatcgggcggcgctaacggcgctggcgccggacgcgccgtacctcgccgcgggcaccatgaccggcgccgtcgacttgagcttctccgcatccgccaacatcgagatcttccgcctcgacttccagtccgactccacggacttgccgatcctcgcctccgcgccctccccggaccgcttcaaccgcctctcctggtcgcgcccaggcgccgtcgagggcgactccttcgcgctcggactcctcgctgggggcctcagcgacggctccgttgccgtgtggaacccactgagcatgatcagctccgaggggaaagcggaggacgccatggtcgcgcgccttgagaagcacaccggaccggtgtgtggactggagttcagcgagctcacgccgaatcggctcgcttctggggctgagcagggggagctttgcatctgggatctcaagaatcccgttgagccaatcgtgtacccgccactcaagagtgttgggtcccatgcccaagctgaaatctcttgtttatcctggaatcccaagtttcaacatatagttgcctcaacttcgagtaatgggatgacagttgtttgggatttaaggaaccagaaaccactgactagtttttcagattcaaatagaaggaaatgctctgtgcttcaatggaatccagatatgtccacccagctgattgttgcatcagacgatgacaactctccctcactgagagtttgggatgtgaggaagaccatttcaccagtaagagaatttgttggccattcaaaaggtgtaatcgctatgtcgtggtgcccctatgatagttcattcttgcttacatgttcaaaagacaataggacaatttgttgggacactgttagtggagagattattagtgaactacccgcaagtgctaattggaactttgaccttcactggtaccggaaaataccaggtgtcattgcagcatcctcatttgatgggaaaattggcatatacaacctagagttctctggtctttatgcgactggtgatgctgttggtgccccagtgcgtccaagggctccagctccaaaatggttgaaatgccccaccggtgcatcttttggtttcggtggtaaacttgtttctttccatccggtggcacccacccaaggtgcacaaacatctacatctgaggtgcatgtgcacaatttggtgattgagcaaagtctggtgagccgatcaactgaatttgaagctgctattcagaatggtgacaaaagttcgctgcgtgctctatctgacgaggagagagaaacctggggcttcttaagggttatgtttgaggacggggattttgcaaggacaaaattgcttgctcatcttggcttcgaaccacctcaggcaccgcctgcaagttcaactgatgaattgagccaaacattggcagatacacttaatattgatcatgctgcagtaaccgataatgcggatgcccagtttcttattgataatggggatgattttttcaacaatcctcgaccttcagaggctagcttggctgaagaatcagtttctacaaatggtcaacagatagaacaggaagtttctggagattctgtgccatcagatccatcaattgacaaaagcattcaacatgcgttggtggttggagactacaaaggggcagttaaccagtgtcttgcttctaatcgtatggctgatgctttggttatagcccatgccggtggttctgctctctgggaaagcacaagaaaccattatctcaagaacagtatctcgccctacttaaaggttgtctctgctatggtgggcaatgatttaatgagttttgtgagtacctggccactaagttcatggaaggaaactcttgctctgctttgcacatgtcttctcatctag

SEQ ID NO: 27206 - DNA, 648 bp, Zea mays
  Peptide Sequence Number=SeqID_70581
atggcgggcggcgccttcaccgagaagggcaagcaatatccggggaagatgacggtgttcgtcttcctcacctgcctcgtcgcctcctccggcggcctcatcttcggatacgacattggcatctcaggcggcgtgacgtccatggacccgttcttgaagcgcttcttcccgtcggtgtacgccaaggagcaggaggtggtggagaccaaccagtactgcaagttcgacagcgtgctgctgacgctcttcacctcctcgctctacctcgcggcgctcgtcgcctccctcttcgccggctacatcaccaagaggtgcggccgcagggtgtccatgctcggcggcggcgccatcttcctcgtcggcgccgtcctcaacggcctcgcccagaacgtggccatgctcatcatcggcaggatctttctcggcattggcgtcggattcagcaatcaggaatcccttgcaggaccgccatcacagcaaaatcctcccgagggcctccccaggaatcccttgcaggaccgccatcacagcaaaatcctcccgagggccttcccaggaatcccttgcaggaccgccatcacagcaaaatcctcccgagggcctccctacactgaccactcccctactgcccttgcccctttcgggtaa

SEQ ID NO: 27207 - DNA, 765 bp, Zea mays
  Peptide Sequence Number=SeqID_70582
atggaggtcacctcctccccctcgccttccgcgccgccgccggcctcctcgaagccggcgctccagctcaaccccgcggccgtcctcctccgccgcctgccgaccccgaccccaacagcggcgacgcccgtcaccgcgacggcgccccccgcgcggcccgccaccgcgtccaacccgctcgcggccttgctcgtccccttctggcgcgggctgcggcgagcgccgaaacagccggtccaccccgcctccgccgccgcggcgcggagggcggcggagcagcaggaggcggaggcccgaggcggaggcgcggcagctggtgggctgccgtggcacggcggcgcgcgggcgtggctgtcgaagctgttcccgcgctacggccactactgcgggcccaactggtccagcggcaaggaggccggctccgtgctctgggaccgccgccccgtcgaccacctcgacttctgctgctactgccacgacatggcctacgacacccacgaccaggcccagctcctccgcgccgacctcgccttcctccgctgcctcgagggcagtcggcacacgcccgcgcgcgacggcatcgccgccgcagccatctaccgcgccatgtgcatcttcggactgaagacgatcctgatcccgtaccggacgaacctcgtgcggctgcagacggggcccaactacgcggatttcttcgccgatttcgtgaagagggtcgcgtcgtcgtcgggcaggccgaccggcggcgagaagcagaggctgtga

SEQ ID NO: 27208 - DNA, 960 bp, Zea mays
  Peptide Sequence Number=SeqID_70583
atgtcgctgtcgccggcggacagcgcggcgtactggctgcggtggcaggtcctcgtctgcggcgcgctcatcgcgctccccgcggcggccgcggcggcgctactgccgcggttgcggagggcggcgccgcctctgcgcgcggccgacctctgggtctcttgctgggcgcgcctccacccgggttggctcctcgcctaccgcgccttcgcgctcgcagcggccgtcgcgctcctggcgcgcctcctcgtcgggcacggcctcaccgtcttctacttctacacccagtacggtcactccatcctcctcctcaaggcgtcgtggacatttctattagtcaccatatattttgcgtttgccacagctatatcagcccatggctgctgggtttactcaaggaaaagtttgaggaaatccgatgaatcccatggatttcttaatgctgatgtcgaaaatcgtgatgtttccaattccatttctggagagaggaaaaaagatgagacaaaaatgatggtgagctattatgaacaaatagcgaatgagagaagagcagggttctggggccggtgcatgcaaatcatataccagactagcgcaggtgcaacaatgttgaccgatgtcacattttgggggcttcttgtgccatttttctaccgtgacaagtttgggttagcgttggtcactgatggcatgcactccctaaatgctgtttttctacttatagacacagttctcaacaatatgatttccgaatacgctgcaaattcgctgcaaattcactgtttggtgctggccatgcatgttggcacactcttattagcaaagtggccatacccgtttctggacctttcatcatctggagctcctatatggtactggcatctacctcctctcataccatcatttactatccgggaatgcctacagcaatctgaatttggtgcagctgttcgactgctgtaa

SEQ ID NO: 27209 - DNA, 2616 bp, Zea mays
  Peptide Sequence Number=SeqID_70584
atggtgcagcagcagcaacagcacagaatctacatcttgcagttcaggaagggcgggccggagcaggaggtgtcatgcaaggtgtcgcagcccaagggcggcggccggcggccggtcatgtactactaccaggaccacggcagcggcggcggcaagaacggcaagaaggtgcaacctagggcgctgggcctgcggcgtttcttgggcatgctcttcctctccttcctctgcgtggggacgctgttcgtggcgcccgtgtccttcctctccttcgtgcatagcgacgaaggcggctcggcggcagcggcagcggcagcggcggcgaccgccgccgtgcgtggcggggtgtccgagccgtgctcggccgtggggaacgacagcctctgctgcgaccgcacgtcggagcgcgcggacatctgcttcgcgaagggggacgtgcgcatgcactcggcgagcgcgtcgttccagctcgtgtccgccggcaacagctcggcggcggcggaggaggaggagcggatacgtccgtacacgcgcaagtgggaggcgaacgtgatggcgacgatcgacgaggtgcgcctgcgccgcgtgctccccggcgacgccgcgcggtgcgacgtgcggcacgacgcgccggccgtgctcttctccaccggcgggtacacgggcaacgtgtaccacgagttcaacgacgggatcctgccgctgttcgtgacggcgcaccacctccggcggcgcgtggtgctggtgatcctcgagtaccacgactggtggatgaccaagtacggcgacgtggtgtcgcagctgtcggcgttcccgccgatcgacttcgccgccgaccgccgcgtgcactgcttccccgagttgatcgccggcctgcgcatccacggcgagctgaccgtggacccggcgaggacgcccgaggggaagagcatcggcgacttccgcaggctcctggacgacgcgtaccgcggccgcatcggattcctggagcgcctggagcggcgcgcggctcgcaagcgcctgcgccagcgccgccaccgccgcggcggcggcggcggcgcgcctccagctccaggaggtcctcgcgaggaccgtcccaggctggtgatcgtgtcgcggacggggtcccgcgtgatcgagaacgaggcggacgtggcggcgctggccgcggacgtcgggttcgacgtgcgcgtgatccggcccgagcgcacgacggagctgtgcaagatataccgggagctgaacggcagcgacgccatggtcggcgtgcacggcgccgccatgacgcacttcctgttcatgcggccggggaaggtgttcatccaggtggtgcccctgggcacgcactgggcggccggcgcctactacggcgagcccgcggcgcggatggggctgcgctacgtcgggtacaggatcctccccgaggagagctcgctgtcccgcgagtaccccaccggcgaccccgtgctgacggaccccgccggcgtggcgcagcgcggctgggacgtgaccaagaaggtgtacctggaccggcagaacgtgcggctggacctggcgcgcttccgggaggagctcgtcagggcgcaccggaagctgcccgtcgacgtcgacgcctcgggccgtcgggcgcacgcgcacagcgacgtgtggtggcaagcgcggccgcgcccgcgcaggagcagaacatcggacgtcagggcagtggagccgaacgccggacaccgggagcctgcgggtggattggccttcctgctggcggcgggcagcggcgtggggccgtgggcgacgttcctgcaggcgtggctagcgtgggcggcggcgcttgcgagtagctctaggattggcaagtggctgcctcggcactttgcacgctacgctgagacatggaggaatcgccagacattgggctgctgggccgtggctggctatcgcctaacggcctgcgcggcctcgcgggacgtgggaaactttgggcagttgggctgctgctgtggatggacagaggaggatcggctgtatttcggggtaggcccgaacccgaagggtctcggctccaaaagcctattccgtttccgcctcctccagcctgtcctcctgcctcgtacgtcctctgcgcggtacccggggagtcctcttgtccgcaccatcgcctccgctccgattcgccgactcggcgcgggcgggcgagacgtggatctcgacggaggagactccgaccatcgctccatggaggccgcggactctgaatccgtcatctccaccttcacctgcccgcactgcatcgtatcaggtaggtactcgtatgattaccacgatgggcgggaggttccatcttcaaacattgcattgcacagcgcgcactgcgctcggaaccttcagaagtgcgaacattgcggagatatggttgccaggaagcttatggatgaacactacgatgaaaaccatgctccggcatacaatgcccacaaaggatgctcgcgtgccaatactgtcagtttgaactgcctgcagttgatctttttgaacatcaggaagtatatcagacttcgtgaatggattggacatgaactccagttccatacgattttgaatgctgcatcagaactttcaaggtaa

SEQ ID NO: 27210 - DNA, 315 bp, Zea mays
  Peptide Sequence Number=SeqID_70585
atggcctcgacggacttcatctgcgtgcacgacaggggatgcggcgctaagagctcgtcctctaccatggcgaaaatgagtggggaatggggcatgtcgtcaacgcattgggcctccagcgaggcagaggaacaggctggagcgcggaggagtaccataatatcgctcccgaggacgaaggcgaagccgacgatgaggaggaacgacccacgaggcacaacacggtggaaggcaatgacgactacatgggaggacgagctaatatcgtgccttcagaaaggggagagagacgatcctgctagcgtagtggcatga

SEQ ID NO: 27211 - DNA, 516 bp, Zea mays
  Peptide Sequence Number=SeqID_70586
atgaggggcgtacgatggattggtgatggtgatagtggcttggagataagcgtggtgaaggagaccagcgactggatggtggtggaaggagggcctgacatatccgataccagattgtatagatctagggttacaaagccttatctttatctaacctacctgaggggtgtggggccctcttgggccgtgacaatctgctttgtatttttaatcgagccggcagcagaaatccgtatcaacaatcttccatggcatcttgaaaggtcggagctgtcgatggaagaccagacattcacgacgacagacacagttcatggagatcctcgtggcgatggtgtcaagatgttggagatcctcgaggcgatggtgtcaagatgtctgaggtggtggagatggttttgtggtcatgggtggtggcatggtgcgaaagggttgctagagtatgtttttcacaatagacttagcactggcgtttattttggagttccatcaaggttggtaaatgtagggatgtaa

SEQ ID NO: 27212 - DNA, 75 bp, Zea mays
  Peptide Sequence Number=SeqID_70587
atggagctggagtcccgtttgttagggaatgtcgggaaagccgtcgagggcgctgccgacgtctatgtagcgtag

SEQ ID NO: 27213 - DNA, 600 bp, Zea mays
  Peptide Sequence Number=SeqID_70588
atgagggaccgggaaaggggatactctgaaagggatccttctccgcgaaggaagcgggcctcgagccccctactgatcagaggttcgaaggctggcccctcgaaaggtttcaacagccgcctcagagcactcgggctccgcgcccactactggtcagaggttcgaaggctggcccctcggaagggttcaacagccgcctcaggccactcgggctccgcgcccactactgatcaggggttcgtaggctggcccctgaagggttctgacagccgcctcagagcgcgcagagcgagggatgaccctgggtacgttcgatacataaccaaggctcgggctacgctcccaagaggctcgaggtctgctctcgcaaacccgactccggccaaaccattgacagcgtcaacataccagcccgagaatttgggactcgactatgcacccgggctacgaccagtttgcatgagggaacaaccagaccggtcgaagcatcacgaaaacgcgctaagacctcgaaggagtcaaaccactcctccgaagcctcgggggctacacccggcggaccttgagccaaagatcaaggatgttcaccttgatccttaa

SEQ ID NO: 27214 - DNA, 603 bp, Zea mays
  Peptide Sequence Number=SeqID_70589
atggccatcatgttgtcgtgcagtaggacgctagaaaaagcactgatgatgatgaccatggctctcgccaccatcgccggggcgtccatcatcaccacgaccaccaatctgacacaccagaacctaggctcgtacccggtgtggcctctcgtgacggccaacgcgggcgtccagcccatccccgccgacgacgaaccagcgttgcggttggagttggacagcaacggcgagggcctcgcgacgctggcgttcccgccgggcgcgtggtggcacggaccgggcaacacgccggcggtgacggtggcacacgtgagcgtgggcgagccgggccgggccgggccgcggcatacagccagcacaggctgccgccggagggcgggcggcggtgccccacgctgggatgcgccgtggacctcgctgccgactgccccgcgcgcgcccgagcgccatgaggaggatgcggcgctgttcaaggcccggtaccccgacacgaggaccaacgccacggacgtcgaggtgacgccgcatgaccacgtcaaccccagcgagatcaaggttgtcttgtgccccaagcccgccagcgtcgtcgcgggccacctctag

SEQ ID NO: 27215 - DNA, 567 bp, Zea mays
  Peptide Sequence Number=SeqID_70590
atgtcgtggtcgtcgctgacgagcggcgacacgtacaagtcgccagcgttcatcgcgctggtgagcgcgctgtgcgtggccgtgctgctgctgctgcaccactgcgtcctcgtcgcctgctgccacggcggcgacaggcgacgccggaggcagcagcaccaccaccggcgcgtcgtcggcgtggtcagcgccagcacggccgacacgcggcggcaacggcagccggaagaggaagaggaggcgagcgtcagcgtggaggtgagcgcgacgtcgcggacgcacctggtgggcgcagcggtggtgtgccggtaccgcaaggaggaggcctggaacgagtcgacgtgcccggtgtgcctggccgacttcgacgacggcgaggtcgtgcgggtgctccccgagtgcatgcactacttccacgccgactgcatcgacacgtggctgcgcgggagcaccagctgcccgatgtgccgcgccgagaccacgcccacgcccacgcctagcccggcctccgtgcgccaccacctcgagctctccgtctccctcgaggagatcctcgtcgcgacgtga

SEQ ID NO: 27216 - DNA, 219 bp, Zea mays
  Peptide Sequence Number=SeqID_70591
atggtggagaaaggccatgggtcgcgcggtggaacgatggtcaccttgtcggccatcaccgaacggagggaccggaaaaggggatattttgaaaaggatccttctcagcgaaggaaacgggccccgagccctcctactgatcaggggttcgaaggttgcgccctccggggttcggcaaccgccccagagcactcgggcttcgagccctttactgattag

SEQ ID NO: 27217 - DNA, 312 bp, Zea mays
  Peptide Sequence Number=SeqID_70592
atgtcccatctagattactccactaacagggtaaaactgacaacagtaagtcatgacttcccccgagttcagcctcgggcacaacagggggctctgcctcgcccgacctcaggcctcggcctcagcctcggcctcgggagaaggtctccgcctcgcccgaccccaggcctcggcctcagcctcgacctcggggggagtcatgtcctcgcccgaccccaggcctcggcctcaggagaagtctccgcctcacccgacctcggcctcggaccgactacgctacaggagatgcatcattaccctacccctagctag

SEQ ID NO: 27218 - DNA, 612 bp, Zea mays
  Peptide Sequence Number=SeqID_70593
atggcttctcacggatcatcggacgaagggaatgcacagtcccacactgacgggcttgcacgagagggttttccctgtattttgtgggaggtacttcagggagctggttacacgacgcctcctcagtacgcggtgcagcagttcgagaagcaccgagtgccccgctgtagggtgaggatgaccctggagcctcatcccctgcagccaggctggcgttcgctggattctgagtcctttggataccgggctgaggatacgatcgaggcgattgctcttcacggactgaccactttctgcggattccaccccttggagctgtccactcacgccattggcttgttccccgttgagaaggaggatgacccaatgtggaaggaccgagtggagcatgccaaggacatctgggctatctacccagacacggacgagaagaagagggacaggttcaggagggggctcagcactaagctccgtgaccgtctcaacacagtcagggccaacagctataatgagttagtcaacatggccatttctcaggaggactgtatcacaactcgtcaagcagagaagaaaaggaagacccctgtggcaggaccttcagctcagccatag

SEQ ID NO: 27219 - DNA, 59 bp, Zea mays
  Peptide Sequence Number=SeqID_70594
ggcatatttctaacagagagagggaaagcgggcgtgggcgagagcaacggcaccgacag

SEQ ID NO: 27220 - DNA, 667 bp, Zea mays
  Peptide Sequence Number=SeqID_70595
atgcgcgcggataaagttcgtgagattgccgcaaaactggggcgtcatgtggctattctgggtgacctccaggggcccaaaatccgtgtatccacctttaaagaaggcaaagttttcctcaatattggggataaattcctgctcgacgccaacctgggtaaaggtgaaggcgacaaagaaaaagtcggtatcgactacaaaggcctgcctgctgacgtcgtgcctggtgacatcctgctgctggacgatggtcgcgtccagttaaaagtactggaagttcagggcatgaaaagatgtgatgcgaaaattgttgccaaggttgaacgtgcggaagccgtttgcagccaggatgcaatggatgacatcatcctcgcctctgacgtggtaatggttgcacgtggcgacctcggtgtggaaattggcgacccggaactggtcggcattcagaaagcgttgatccgtcgtgcgcgtcagctaaaccgagcggtaatcacggcgacccagatgatggagtcaatgattactaacccgatgccgacgcgtgcagaagtcatggacgtagcaaacgccgttctggatggtactgacgctgtgatgctgtctgcagaaactgccgctgggcagtatccgtcagaaaccgttgcagccatggcgcgcgtttgcctgg

SEQ ID NO: 27221 - DNA, 790 bp, Zea mays
  Peptide Sequence Number=SeqID_70596
tgcggaaatcgtcattacccgtgagtctctttacatcatgaatatgctggaaaaaatccagtctcagctggaacatttgagcaaatcagagcgcaaagttgccgaggtcattctggcttcgcccgataacgcgatccattcgagtattgctgctatggcactggaagccaatgttagcgaaccgacggtgaatcgtttctgtcgcagcatggacacgcgcggttttcctgattttaaacttcatctggcacagagtctggcgaatggcactccctatgttaatcgcaatgtcaatgaagatgacagcgttgaatcatacacagggaaaatatttgagtccgcaatggcaacgcttgatcatgtccgtcattcactggataaatctgccatcaaccgcgccgtcgacttgctcactcaggcaaaaaaaatcgcctttttcggattaggctcttcagccgccgttgcccacgatgcgatgaataagttctttcgttttaatgttccggtgctggcacgcgaaaacgacgccatggtgattgccctcacctttgcgggtaccccgctcgcccgggaagcaacgctggcaattaccctcgacgtaccggaagatactgacatttatatgcccatggtttctcgacttgcacagctgaccgtgatagatgtgctggcgacaggatttactttgcgacgcggtgcaaaattcagagataacttgaagcgggtcaaagaagcgctgaaggaatcgcgttttgataagcagttacttaatttaagtgacgatcgctaa

SEQ ID NO: 27222 - DNA, 432 bp, Zea mays
  Peptide Sequence Number=SeqID_70597
atggccgaggatctcgcatcgagcgccggccacccgcgcgatgcggacgattctgttgaagaagggaagtccgaccgcatgggcccgcacgacagtgaaggtgggacgcgaggcgcggggggagaattagcgaacagggctgacagatgggcccgcgaacgcagtgaattgcagagcgcgagtgcgagcgagagaccgccatgtgggtcccacgcgacagtgcgcgcggcgcggggagcagaattgggctggccgcgcgaagggaaaggtaagtgggccaaattcacgaaccttcgaactcggaatgaagctgttcacaatatgaaaagcatggtcgagacgaaggtcgaaccagcttcgagggtacacgcaaggaagcttcggctcagtagcagaaaaaggaaccgacttaaagaggaaaaggctatctag

SEQ ID NO: 27223 - DNA, 657 bp, Zea mays
  Peptide Sequence Number=SeqID_70598
atgtctggtgcccttttcatatctgaattgggtgacaacctcaatcattttcatgatgtagggggcatgcagacaacccttgagtggggagcaagaggcatgaatgatttcttgccagatcatatcaaacacattcaatctctcattgctgttgggcttcatgaaagagagaagtaccttgctttcacccagaatgttcatttgatttccccctttgggaatgagagtcatcatgaaaagagagttgagatatctgtagtacttatgcataaagcgtggttcaagtcaaggccccgtctaccaagggacgcgacctcatccgagcccagcctcaggcaaggacgggtaaaactgacgacagcaggtctcgacctcccccgagttcagcctcgggcgcaacagggagctccgcctcgcccgacccctggcctcggccccggcctcggggaaggtctccgcctcgcccgaccccaggcctcagcctccggggaaggtccccgtctcgcccgacctcgggcctcggtcatagccttggcctcgggaggagtcacatcctcgcccgacctcaacctcggcctcaggagaagtctccgcctcgcccgacctcggcctcggaccgactacgctacatgggatacatcattgccctaccgctag

SEQ ID NO: 27224 - DNA, 144 bp, Zea mays
  Peptide Sequence Number=SeqID_70599
atgggagaggagctcggctcgacgcggaagggagcagagaggggcgtcggtctgcccttctcgaggaagaagggtgccgctgggacttccctggctgatttttattctgtcttgaaggcactgtttgagatacttagagattga

SEQ ID NO: 27225 - DNA, 339 bp, Zea mays
  Peptide Sequence Number=SeqID_70600
atggtggtcggcggcggcgtgggcgcacgggcgcgaggagccgatgatcggccgtggtgtgggcatacgggggcgaagagcgagtgggcaccggtggcggccaggctgtccagtggcagtgggggcggctcggtggcacgaccgtgttggttgcagtgggcggtggtggagcgtcaccggtggcggcagggcggtgtggtggaattgctacatgacaacaaaagtaaggcaacacaagttagagaatatcaatcttctccccttatccgaaagataattgaaggggagaagataagggataaagacgaaggtgcaatgaatcgcataagagaagaataa

SEQ ID NO: 27226 - DNA, 924 bp, Zea mays
  Peptide Sequence Number=SeqID_70601
atgtactcaggccagcaatctgatcaaggtcctagtgcaaatagtggcagagaattctccgaggcaaattggaattcttacacaatgcatcaaaagatagcttatagtggacaacatgggtttggaccttacggcatgggcttagaagataggctggggttgtatcaatcttcatctggtacattaagtcatgacatccaaatgagtgatgagcatagcggaggtgtgaagaagaggaaaggagtggaggactgtgtcacattgttgcctaatgcaggtgatcaacaaacagaaggttcatctcagccagaaaggaattcaatggaggaggggaacagaaagatttcgcccaaaatacaaagcaaggaagattcttctgatggtgatggtactaaagaggactatgttcatatccgggcaaagcgagttaatgaaactctgcagctgaggagaaaaaagataagtgagagaatgaagcttcttcaagatcttgttcctggatgcagtaagttcttgtcaatgaaactttcaactgttaaccctgaacttggctttgacattgagcagatcatatccaaacaaatgatgctttcacaagacagacatcttgctttctatggagtcgatccaggatcaagcagccttactgctccattcaaccaaggaatcgtgcagccagcaatgatgtgcaacatttctaatcctgccgatgttttgcacggaactattcatgacgtgtcaacaatgaaccaggtgatgggcttctgtgaaccttggacccagataccttccatgtgggaaggacttcagagcatgcctcagatgaacttcaaccctggtgtggcagctgatagcggcaccaacaactctggtatctatgtgatcctctctagtctcttctctgaaaaatacaaatgtccatag

SEQ ID NO: 27227 - DNA, 228 bp, Zea mays
  Peptide Sequence Number=SeqID_70602
atgtcattgactcatgtggacccacataagtgggaatggctgatcaagaaggaggattccagcaagatgaagaacaccatggagttgatgaagggttgtatccatgagtactgcccgcccctaggaatcattcggatattgcatttctctgatggacagagtcggtctcatcctggcctggggcagttagctagagctaggaggtggggcttctgggagctgatctag

SEQ ID NO: 27228 - DNA, 588 bp, Zea mays
  Peptide Sequence Number=SeqID_70603
atgcaggcggcatgcaaccgtgccaagtgggcgcaccccttcgactccaacgcgcccagcatggaggcccaggcccacacgtcatgcaaccggcgcgccggttgctacgtgcgagcaactgcaccgccactcgcaccactactgcgcctcctcgactgcgaaaccagtaccgcgactcgaggcaaccctgcgtatgacccaacagtgccagccaggcacgtcggtcacgggacaggcgacacctttggcaggagaagcgggcgacgcttcgccttcgccataatgaccgcgtcaaaaaaggtgtgccacgtcatttcgatttcgtatccttttcctcttcctctttatctatcttacaacagggaccgggaaaggggataccccgaaagggatccttcgccgcgaaggaaacgggccctgagcccccctactgatcagaggttcaaaggctggcccctcggaggggttcaacagccgcctcagagcgctcgggctccgcgcccactactggtcagaggttcgaaggccggcccctcagaagggttcaacggccgcctcaggccacttgggctccgcgcccactactga

SEQ ID NO: 27229 - DNA, 279 bp, Zea mays
  Peptide Sequence Number=SeqID_70604
atgccgcccgtcgccttgcgtctccgtgccgttttccctccgttccgccgtgcccttcacccaagagatacatataaccttcggtgtcgttccacacgcttggacttagcttatttccgcgggccatgcccgaacctcggtttttccgcccctgcgcccggggcgaaccccggcgttttcggccccaatggcaggccgaattgggcgtgccgaccccctaacgtcctgcccttcgggcaacgagtagatgccaccgtcggtgtcctggaatacgactga

SEQ ID NO: 27230 - DNA, 129 bp, Zea mays
  Peptide Sequence Number=SeqID_70605
atggctgagaggtaccaactcccatggagttgcgttcctccaacgaggaggcggaaaggcggcggataccccccatccgggggcttggaagatggatgtgacaccccagtgtcacctagggtttctctt

SEQ ID NO: 27231 - DNA, 741 bp, Zea mays
  Peptide Sequence Number=SeqID_70606
atgctgacgagggtgaacacgtacaccagtgtgatgtacaaggacgacccgaccatcttcgcgtgggagctcatgaatgagccgcgctgcacgtcggatccagccgggaacaagctgcagggcttctacgggccctcgtcgccgtcacggcttccggccaacccgaacgcctatgctggccaggtcggcaccgacttcatccgcaaccaccgcgtcctgggcgtcgacttcgcctccgtccacatctacccagacacctggatgccgggcgcgactctggaggcacggctctggttcgtggaatcgtgggatgggaggcgcacattcgccgaccgccgacggcacgctggggcatgccggtggagttcacggattttttttttgtccaccaccaaggcccgaagcggctgcttcaacgcgaccacgagagaccagttcatccaggcggtgtacgcacggctcctcaactccacgcggcgtggcggcgccggagcgggggctttgctctggcagatgctcccgctggggaccgactacatggacgatggctacggcgtcgtgcttcccagggcggcggccactgcccggatcatctcggcgcactccagggacctggccattttcaactcgaggtgcgcctggagctgccgctgggggtgcaggaggcgggggcacaagtcggaggatcctgatgttgatgatgacctgccgctcgtcgaggataaacaacgagaagcatag

SEQ ID NO: 27232 - DNA, 48 bp, Zea mays
  Peptide Sequence Number=SeqID_70607
atgtctagaggtagaggagtagattcctcacaccgggtacctccttaa

SEQ ID NO: 27233 - DNA, 657 bp, Zea mays
  Peptide Sequence Number=SeqID_70608
atggccgattctaaagatctcaacagtgcttctccaaacagcaacacaaggctgactaatttatcggccgctgagcataaaagaatagaagatgacatgaagaaaatagacgaggaggcccaccgacaaaaggatcaggtgctcaaggtggcggataagtggtacctctcgcacttcaaggtagacttccaccagaagaccgtccaagagagggagataaacgccgagtatatgttagccgtgctgcaacagctccccacgataggtgatgccaggtcagccgaggatatagagaggatggcacatgcattaggaaaaactcacatgcctaattttttatcacataagttaggcaatgaaacaattgcgtcaaacacatcggcggcaaatgggtttccccagccatattctggggcgccatggaagggagaggtggacgagctgttgctcgccgtggagcaggggagaggcgctgctgctgtttgtgagagctggagcttgggagagggagagcagaggcgctgcgcggggaagaagggcgccatggctggggcatcgagcttcatccctgagcagggcgtcggccccaggggaactgctccctgctcttgctgctcgctggaggaagaagaagagggactgctggggaggggatga

SEQ ID NO: 27234 - DNA, 585 bp, Zea mays
  Peptide Sequence Number=SeqID_70609
atggaggtggaggcggaggctgctgccaggaagcttgaggttgacttgccgaagctacagaagctgcagggtggttgtctatgtattgtgggatgtaaggtggatgatacgaagcaaacaagcaaaacagtttccttgattgatctccgaatcttccgccgaagcccctggcgcctctgccttttggagctggtgtccggaagaaagtttgttgttgccccgaaacctcggataggatcttcctccgaagcccctggtcatttcagaaaatctgaaggcctcctcccttctttggcgaaagtcattgtcaacacgaatgtactcgtccatcctttggagcagcttctccagggtctgaggaggcttcctagcaaagtattgagctggttggggtccagcgattgcagtgctgcagccccagtcgctgaagctttcttcggcgccatagcgagagtctatagcttccgaaggtcgcagcctgtgacaaattacaattatgccccttgcgaaaccgaagctgcttcttcgtgtgagaccttcggcgcaccgaagcacgaccccaacatttgcagaattatattctaa

SEQ ID NO: 27235 - DNA, 459 bp, Zea mays
  Peptide Sequence Number=SeqID_70610
atgcaggcggcatgcgaccgcaccaatggggcgcaccctttcgacttcaacgcgtccagcatggtggcccaggcccacacgtcatgtaaccggtacgccggttgctacgtgcaagaaactgcaccgccactcacgccactaccgtgcctcctcgactgcggaaccagtaccgcgactcgaggcaaccctgcgcacgacccaacagtgccaaccaggcacatcggtcatgggtcagttagccgcgggagaaggcgtgacggtcgatatggccagaaatgggccggcagtaatggcggtggcagacgggcggaagcagcggacaggcggcgcctttggcaggcgaagcaggcgacgcttcacctccgccataatgaccgcgtcaaaaagggatcgggaaaggggataccccgaaagggatccttcttcgcgaaggaaacgggccccaagcccccctactga

SEQ ID NO: 27236 - DNA, 1230 bp, Zea mays
  Peptide Sequence Number=SeqID_70611
atggacggcgggttctattttcgtaaaggctgggggctcgtatgtaaaactccgagtcgaagagcggtcagcacatgccgcaccccgcggcggcacttcgacgtcgcgaaacccgccgaacatccagagttcgcggatgacaaagtggtcgaggtgcctggatttatacccggacagaaggaggggggtccgcatcctacgcgccacggaaccggccccaacggccgagcggagacccagacccacagtgcgcgcggcgacggactcgcgttctgtgcgcgcgatgcgcgggctgttgcgcggaagaaggagatcctgacggcgcagggcccacctcacagtgacgccgacgcgctagggagcaaggactgggctggcgcaggagtggggagatggtgggccgaaaaggaaaagggcggcccagctaggggctcagactcagccctggccttagccgacggtctccgcctcgcccgacccaggggctcggactcgacctcggcctcggaagacagactcgacctcgacctcggaggagcctccgcctcgcccaacccagggctcggaccgaccacgtcacaggaggtgccatcattaccctacccgaagctaactcaggctacggggaacaagaccggcgtcccatctggctcgccccggctccagcgctcctccgacggccacaacaccacacgaacagggtgccaaaacctctccggctgccacgacgggacccccggggtcgaaacgccgacaattagataccctaaatttctgggaggccggggactacgatggaaagctgtgctcttgagctgtgtggatctttctttatattcaccggctatcgatatgtggagcatcggttgcatttttgcggagattttgactgggaagcctttattccctggtaaaaatgtggttcaccagttggatttgatgactgatctcctgggtacaccatcaacagatactatttcacagattcggaatgagaagacaaggaggtatctaagcagcatgaggaggaaacaaccaatacccttctcagagaagttccccaatgcagatcattcggcgctcaagctcttacaaaggcttcttgcatttgatcctaaggatcgaccaacagcagaagagccgaagctgcttcttcgtgtgagaccttcggcgcaccgaagcacgaccccaacagtagcccctttcgcggtgctagatcgttcttcgtaa

SEQ ID NO: 27237 - DNA, 1092 bp, Zea mays
  Peptide Sequence Number=SeqID_70612
atggggaacactcgcagtctttccgccttgtcgtcggaggaacacaacttcgcggaagttggtacctttcagccatcgttcgacttcaaggattttcatcaggcagcccggccgcatcccctcgccggtggtcacccaagacgcttcaaggatcttcatcatccttgctggggcggagagcgaggtgagccagggctctacctcccgcacgggtcggctggccacctcttcttccaacttctggtggtggaaaccatcctccagctctgcggaggaggcatcctccagccatgctggggaaggcgaactgttgctgcccagctaggatgcaacattccgtcctcctcctcgctttcgtggcgaggacgggagcgaggacctgccgctggaggaagcttccccaccgtcgaggccgtcagcgccacctacggaccgacctccggctctttggctttaatgtctggtttgattcccttgagtggggacacgaacgagagccttccggtggctgcgtccgtcctgggaccatggctgttgctgcagaggtcgctggcgagtcgcccggagcttgtcgccccacaggccccccagaaccctcggccgctcttcgatgagccaaagccggaggcagcggtgtcagcacagacagaggcggagttggctcgaaaagaagacttcgtcggccggagcctggccgggccgtccactggcgggaccgacgccggagtcgagttgccgaggccacgagccgggctgatgtccttgggggacagctggctgaggcttcgggatcctccgaccgtgttgccgtccgaggctaggtcggacttcgccgaaggtgttgtcgacgccgagggtgctgctgcttccccctccgtcgaggtccgagcctacaggatcggtttatcttgtaacttatttgtcggtaacagaattgtttgtccgagcgagagttacttttcacggaaggtgatgagtgagaaggtgatgagtgaggtatccgtatcctggaggcgtaggagtccctcggctcggtcagccttggctgcttacgtgtactccgtcgttttcaggatcccactttcgaagtag

SEQ ID NO: 27238 - DNA, 435 bp, Zea mays
  Peptide Sequence Number=SeqID_70613
atggcctccccaatatcgcgtggtaggttctcgaaccccgaccacctcgaacgtcaaagtccgactacggaactggaggcagttccgaggcaaaggggaaggtcgaacagtctaagggctgtagactccccatcgacacctccaagctcgacaacgataagatctgcttcatcatcaagagcttccgcccaatcctcacggaaaggagggggaaggattacgatccccgctccaagaaggtttgctactagtgtggcaagcccgggcatttcattgctagatgtccattatcaagtgatagtggacagaggcgacgacaagaagggaataaaggaggataggagatgtactacaggaagaagggcggcgatgcccatgtttgccgggagtgggattctgaatgagagttccacggactccttcctccgacgatga

SEQ ID NO: 27239 - DNA, 1371 bp, Zea mays
  Peptide Sequence Number=SeqID_70614
atgcaggcggcatgcaaccgcaccaagggggcgcaccctttcaacttcgacgcgtccaacatggaggcccaggcccacacgtcatgtaaccggcgcgccgattactacgtgcgagaaactgcaccgccactcgcgccagtaccgcgcctcctcgactgcggaaccggtgccgcgactcgaggcgaccctgcgcatgacccgatagtgccaaccgagcacatcggtcatgggtcagtcagccgcgggagaagacgcgacgaccgatacgaccagaaatgggccggcagtaatggcggtggcatgcgggcggaagcagcagtcagaacaggcggcacctttggcaggcgaagcaggcgacgcttcacctccgccataatgaccgcgtcaaaaaaggtgcgccacgtcgttcgatttcgtatccttttccacttcctctttctctctcttgctacaggaaccgagaaaggggatactccgaaagggatccttctccgtgaaggaagcgggccccgagcccccctactgatcagaggttcgaaggctggcccctcggaagggtccaacagccgcctcagagcactcgggctctgcgcccactactggtcagaggttcgaaggctggcccctcggaagggttcaacggccgcctcaggccactcgggcttcgcgcccactactgatcaggggttcgtaggctggcccccgaagggttctaacagctgcctcagagcacacagagtgagggatgaccctgggtacgttcgatacataaccaaggcttgggctacgctcccgaggctcgggggctgctctcgcaaacccggctctggccaaactgttgacagcgtcaacataccagcccgagaacttgggactcgactatgcacgggctacggccacctcgggcgccataggaagctccgcctcgcccgaccccagggctcaggcttaacctcgacgctggacgacgaactccgcctcgcccgaccacagggctcggacacagcctcggcctcggaagacggtctccgcctcgcccgacctagggctcggactcgacctcgacctcggaagacggactccacctcgcccgaccccagggctcgggctcaacctcgacgctggacggcagactccgcctcgcccgaccctagggctcggacacagcctcggcctcggaagacggtctccgcctcgcccgacccagggctcggactcgacctcgacctcggaagatggactccgcctcgcctgaccccaggggtcggactcagcctcgacctcggaagacggactcgacctcgacctcggaggagcctccgcctcgcccgacctagggctcggaccaaccacgtcacaggggggccatga

SEQ ID NO: 27240 - DNA, 81 bp, Zea mays
  Peptide Sequence Number=SeqID_70615
atggcgccgccgtggtcagcgcaggtgctgtcgttacttttgttctactacttaattgggttggtatttacttatacttag

SEQ ID NO: 27241 - DNA, 294 bp, Zea mays
  Peptide Sequence Number=SeqID_70616
atggcgctcgccttcgacgagttcgggcgccccttcatcatcctacgggagcaggaaaagatgacgcacatgtgggggcttagtgtagactgcccctgccgctacccagcgccccccctccgtgctaccgcacgcctgccagaccccgcacaacccgccgcaaccgaacgcccgccgccgccgcgaaatctgccgccgcacaacccctcctccgcacgagccgtagccggcccccgcttgcgtccccctcgcctataccgcgtcgccccaccgcccacgcctcagccgccctga

SEQ ID NO: 27242 - DNA, 528 bp, Zea mays
  Peptide Sequence Number=SeqID_70617
atgaggtgtcaggccatccttgcattaaatgctcctgcgatacggtcggtcggcgtggcgatttggccaaggttgcttcttggcgaaggctgggcctcgggcgagccaaagcaaaacccccctctcgcacgcccgccgacctcgcttccgcaactacctcccgaacgccctgccgtcctccgctacctaaacgccccgctctcctggtaccgttgttcggcgactccgacggatctaaaggacgccagcgccgccgcgccagggtccaacccgccggagtcgcccttccccagctgggagctcacgctcagtagctacctttgcgacaaggcgccgcctgccgcggcggggccatcctcgccgcccaaccccgaggcggcggctggcccggccgaagacgccgcggccaacgccaagctgtgcgtcgagcgggatttgctccacctcaccgcgcccaagcgcggggatccgcccggcgacgactcctccatggtaggtggtaagaagccccgcctagagtcactctag

SEQ ID NO: 27243 - DNA, 636 bp, Zea mays
  Peptide Sequence Number=SeqID_70618
atggagcaccgtcccgggttggagaggtcgttggagactgcccatctggagcttgacgggaagctgctcgtcaacacgcagcaggcccctacctggcgcgccaactatcggcgtttcgagaccggggggcgtaaggagaggatccaggtgtacaatgggggtgtagcagagtgctacgtgtctagcggggggagagctagcgccctaagtacatgccaatgtggcagccggagagatcttggcaccctgctgctaagagccgccgtcgtcacggggctagcggggcgccatcattgcctatctggcggagctagccagatgggacaccggtcttgttttctgcggcccgagtcggctcggggtagggtgatgatggcgcttcctgtcgacgtggctggcctgtgccctaggttgggcgacgtggaggctcctccgaagccggggtcgagtctgtcttccagggccgaggccgagtccgagctcctgggtcgggcgaggcggaggtcgttcggcaaaggccagggcggagtccgagccctagggtcgggcgaagcagagttcgtcgtcttctggggcctagcccgagtccgagccctgggtcgggcggagcggagttcgccgtcttccggggcctag

SEQ ID NO: 27244 - DNA, 297 bp, Zea mays
  Peptide Sequence Number=SeqID_70619
atgccttccactctgtggctcgtcattgggttcaagttcaagttccaacgaccgaggaaggatgagcaggacagagaggacctattgccgaggaaggtcaaacaagagagcaagtggcagaggtgccccgagtgcaagatatatgtggagaggatcggggactgtgtatttatcatttacagaacgctgctcgcgagcaggagcgaggagtacatgcttctgttctggctacctctcgacgaggtccatttgattgttggtcgtggtgccagctccaatcttgattctgcaagatag

SEQ ID NO: 27245 - DNA, 540 bp, Zea mays
  Peptide Sequence Number=SeqID_70620
atgttggcggcatcagatgtttctgtgcagggtcacggcggcggcgacatcggccctaagacatcgagcggaccgagattgcctcgacgcgaccccaggcgagagaccgatagcgaacaagtaccgcgagggaaagatgaaaaggactttgaaaagagagtcaaaagagtgcttgaaattacccgggaggaaagcggatgggggctggcgacgcgcacccggccgtatgcggaacggctcctgctggtcccgccgatcggctcgggggcgtggaccgttgtcgcccgcgccggcggccaaagcccgggggccctaggcgcccccggcagccgtcgtcggcgcggacggtatccgcgcgcctctggcgcgcccctcggggcgctgcgccgcaacggcctgcgagctccccatccgacccgtcttgaaacacggaccaaggagtctgacatgcgtgcgagtcgacgggttcagaaacctgagatgcgcaaggaagctgacgagcgggaggccctcacgggccgcaccgctggccgaccctga

SEQ ID NO: 27246 - DNA, 339 bp, Zea mays
  Peptide Sequence Number=SeqID_70621
atgtcgaaaactggagggtcccgcttgtcaaagactgttgctattctagcaaagggaagaaattgtgtcactttctatattttgtttgaatgttctccattttttatcatgatcatgaaggattctatcgatgagtattaccatcatacagaggaggaaaccaaagactatgaaccatgtacaacagtcttcaacccaagaatcaccaagcattgtgatcttaggggcgagggagtgggaaaatggagttgcttgcaatttggcagaggggattttatcggggctttttttgctttgtgcgagatgggagttgagggagctggtgggggggttttatag

SEQ ID NO: 27247 - DNA, 240 bp, Zea mays
  Peptide Sequence Number=SeqID_70622
atgaagaagattccagcaccatcccttgaggtcaaggaagaagctacaagcaccccgccagtaccaccgccctctgaggagctacaagagccagtcccgcttgaagaagagttcgaccctgtcctgccatctcagtcgccgccagaagaaggttcttgcctgaccgccatcgcagcaaaatcaacccaaggacctccctacactgaccactcccctactgcccttgcccctttcgggtaa

SEQ ID NO: 27248 - DNA, 207 bp, Zea mays
  Peptide Sequence Number=SeqID_70623
atggagcaggttcataccggagttagtgatgcgcagaatctcgcccacaacatcgcgtggcttggcggaagagaagcggctccggcacgacacctggcagtccccgaaggccgtaccccgtactggtgtcccggtgaccctccacgcgtcatggaggtccaccccgaccaccgacagggacccgtcttgaaaaaggagatcgagtaa

SEQ ID NO: 27249 - DNA, 375 bp, Zea mays
  Peptide Sequence Number=SeqID_70624
atggacgagggttgcactcaacccctctcaagtgatccaatggtcaacttgaataccacggtgttcctttttcttatcacttttcccgtttgcgaggaatctccacaagttggagtctctcgcccttacaacaaatatcaaagtgaaagcactagagtgccaaaggttcacaacaagccaataaaaagaccaagatgggttcaaataaagagagctaaagacatcccaaaaggcaccctggtctggcgcaccgggactgtcccggtgtgccaccgggacagatgtcccggtgcacctgggaactcgaagctgaacttgccacctttcgggaaaatgggagggcgctccgctataattcatcggactgtccggtga

SEQ ID NO: 27250 - DNA, 870 bp, Zea mays
  Peptide Sequence Number=SeqID_70625
atggccggtctgctcgtctccggcgagttccagccgcgggaccgagcggcgccaccacgcccaaacaacgagcagtccgaggttcctgagtgtgttgttggagacctccctgagcaacaacctgtcacctggagagactgcatcatcgcctgcacgaggagcaggagcgccgacgccaggagtaggagcagcaggactcttgcccctcgcctcaacgggaggtggagtctgagaggccgccttcctctgcacctcagccagagatgccccctacaccaccacagggcatcccggctgctggaggagaccccgacggagatggagacgacgacgccggtggcagttcgagccacggctcgtagcgttcggaggagccgaagccagagggatggatcgcgagacccatcactcgtgacgctgctcgcggaggccttctcagagcattattctgtcactgagagggacactgccgaggcagccatgcaagatgcagcacgacaggcactttctcagtattgctcgttgttcagtggggtagctgatggccttgacctgaagtactaccctcgtcgttcaaccgacagtgctagaggtgtgattgtctcgccagttggtgagggcaatcctaggctgagcagcatggtcaacttggtcaccatgctcaacacagagttggaccacgcccttgacgagttgggcaaggttcgggcggaggttgcggaattgtgtgctgaatgtgcagcacgccactatcttgatggtggttctcctgcccctgttgggattcagcacccttaccgttcaccgccccgtggtttcttcgactatgctaccccagactgtaggactcgcatatatttagatccatag

SEQ ID NO: 27251 - DNA, 294 bp, Zea mays
  Peptide Sequence Number=SeqID_70626
atggaggcacagagacgcgacggggcgacggtggcggagctccggctgtgcaagaaccactccggtgagcgcggaccagacagaccagagagggcgagggcacaccaaagggtgtcccgagtagctgacggcaaggcgaagcttaccgtggcacaggacggggcacgggcgcaacggcggccacggaacacgcggtggacgtcggcgggcggtggcggaggttctcggttcgcgtgggcagagcaagagagagggcgagagagcagggcagggggcgcaaatgaaagagaggag

SEQ ID NO: 27252 - DNA, 423 bp, Zea mays
  Peptide Sequence Number=SeqID_70627
atggccggaacctcgaaccccctgtgctcggcgcccctccctgcgagctctctgttctccttggtcgtggccttctctgctcctgcgcgggttgacaacgggagccctaccatggctggaccagccctagctcgagcagtggacttgccgtcgcccatggccgagccccattcctccctggccgcccagctcattgtccatgttgcccagaaaattccagcagcgggtccccggcgccctcccctgctcctcctctcttccccacaaaacagcagcagctcgcccaccttccctcgctgcgcagcccctcggcgaaacgccgctgttcctgcagccccggtaccttccctggcttcctcgctgctagcgctgcgcgcgtgccgcgtgttcggcaaactatccaagtggggtgttgagcagtga

SEQ ID NO: 27253 - DNA, 419 bp, Zea mays
  Peptide Sequence Number=SeqID_70628
atggctgctggccgattctccctgctggccgtcgtgggaaccagggaggaaggagacgacgtggggaggaagaagaggtggtaccctttacccacaagtcatgttacccatctaccaagggatcgcgacttcccatacacctctaccgaggaggcgaggcagggaatcccttgcaggaccgccatcgcagcaaaatcctcccgagggcctccctacactgaccactcccctactgcccttgcccctttcgggtaccaggatgatcttcaggtgactcgtgacctcactgctaaacgtagcaatacagacaagcatgcctcacgatcctgcgcggatggctcagattggatacgcaacccagcgaaccggtacactctcgtggccttcggatccaagaccaacgatcacgatctgacgag

SEQ ID NO: 27254 - DNA, 702 bp, Zea mays
  Peptide Sequence Number=SeqID_70629
atgaccgcgtcaaaaaaggtgcgccacgtcgttcgatttcgtatccttttcctctttctctctcttacaacagggaccgggaaaggggatattccgaaagggatccttctccgtgaaggaagcgggcctcgagcccccctactgatcagaggttcgaaggctggcccctcggaagggttcaacaaccgcctcagagcactcgggctccgcgcccactactggtcagaggttcgaaggccagcccctcggaagggttcaacggccgcctcaggccactcgggctccgcgcccactactgatcagaggttcgtaggctggcccccgaagggttcgacagccgcctcagacgcagagcgagggatgaccctgtggctcggactcggcctcggccccggaagacgacgaactccgcctcgcctgaccccagggctcggactcggcctcggctcggaagacgacgaactctgcctcgcccgaccccagggctcggactcggcctcggccccggaagacgacgaactccgcctcgcccgaccccagggctcggactcggcctcggcctcggaagacgacgaactccgcctcgctcgaccccagggctcggactcggcctcggccccggaagacgacagactccgcctcgcccgaccccagggctcggactcagccttggcctcagacgatggtctccgcctcgcctga

SEQ ID NO: 27255 - DNA, 204 bp, Zea mays
  Peptide Sequence Number=SeqID_70630
atggcgcaccggacactaaacagtgcctgtccggtgcaccaccggactgtccggtggcccagaagacagaagctccaacggtcagaatccaacgatgttgatcatagggcaatagatcttgccatgagaatcgccgaaaggatgttcctcaaaatgaaggaagatgaggcgaagaacatgattgaaaaagaagaaaatgattga

SEQ ID NO: 27256 - DNA, 498 bp, Zea mays
  Peptide Sequence Number=SeqID_70631
atggagattggatggccgaaatcaagcactggagggttgccggagctggggcgggtgtgggctacagcggttccgaggtcgccggggttggctaggatcggtgaggagaacccagcgaacacactggtggggttctggccacgaaaccggggccagagatgggagaacggtagagggagagctccgggcgggtcggggctgtccccatcccgagcggcttcgtcaaaaggtcgacttgcggagcgcggtcgtcggcaggcagcgacgctctggcttctctacgacaaccgcatcgaagatcgggtttcaagaaccggtggtggctaccacttcgcttcgtccgagctagcgacggtaggttcgtcgaagccttccttggtccctgtccacacactcaacgacttccacttcggttcatccgagggagcgatggacgcttcgtcgatgggttccttggcccccagtacgaacactcaggcagtggccacctcggcgtag

SEQ ID NO: 27257 - DNA, 318 bp, Zea mays
  Peptide Sequence Number=SeqID_70632
atggtcagcgttgtgcccacccgacctatcccgtccgagagcccggacgccgtctcggtggcactctgtgcccttagcctcgccccgcgtgggcggcgcaggaggcccagactggccccgccttttgaggccgacgaaataaggcgacatattgcgattcatatggggccaaacccctcatatgatgatatgtcagtcttctttgcatcctacgctgagctctctgtgttgtatgacatagagacgacaccctaccgtggtgactctcgcgacggcttcaacgcctttccacctcgattgaaccatgccccgcagtaa

SEQ ID NO: 27258 - DNA, 1353 bp, Zea mays
  Peptide Sequence Number=SeqID_70633
atggacattaagctctctgaaagtgtttccattttctatttgaagttattgtatgaaggtggtggcacgggtgggcaaacggagctccaaaagccatgtcatggtcgtgatatgacgagcgagagggaaacttcgaagttgcacctcagtcaaagcagcgtagtgcatcaaataataagtcccaaatctctgaacagatttgaaaatgctaaagtgaagttcatctcttctgaagaagtggcattattgagtagagagaggccaccatctgttacatcaagatttactttgtcgcagccaagcaaggcatcatctcctccaactacaaaacacttgtccaatatgaattgtgtatccccaagcaggagtgataaaaatgtgcaagccctgaaacgatgtgctgatgcaagtcatagtcaagcagaacttgaggataggtcatattctgctatgcagcaaaggcgggttcatcctgcatctccttcaagcatgaagcagccatccaatatgaaatcaacatcccctggtaggagagacatgcaagtgcaaaaccagaaacgatatgctcctatgcgggaaagtcaacctcatgtgaaacagttgtcaaataggactgccacgcaagtgcatgccaccaaacgatctgctacttcaagtcatgatcaggcaaatattgatgacataaacatggattgtgaagcaagatctggtggttccgtgcctatgatgcatgaatgtagaacaagtgaatcagtaaaagtaaaaatggactctctgattgaacacaaagctagagaaaagaagatagtgaatgcagacaaaggagaaattaaatctcagactgagcttgaacctagggaaaaggggaccttatgcacttcagatgaagatattggatgcaaatcagaaattgggagtctgaaccagaacaaagatgtgattgtcaccatggtttcaactgtgcagtattcaagacgcccagcacctacaaattgttggaggggatgctttcatgtcttcaatgctggagaaaagctaaatcttggtgaatttaaagcctactttccatcaaaagtgtcatccagagttattgatattgtcaagatgatgccaactgttttacagctggagttattacatcgaatggatgactggccaaaatcttttgagactatgcatccagttcatgaagacattggcttgttcttttttcctaataaacctgatgggtgtgaaaagaaacactctaatgtattagaagcttacaacaactttgttctaagggcatatatccatgacataaagttgttgatatattcctcggaagtgcttccccctgattctcagtgttag

SEQ ID NO: 27259 - DNA, 1842 bp, Zea mays
  Peptide Sequence Number=SeqID_70634
atgaacaaaaaaccctggcatgcgaagtgccattacaaacggaactccggttccgtctccacgggtatggacgacctccgcgccggggaagcccgtggagcgacaagctctgggcgaatcaccagcaaaacgcgggacgtctccgccgtagggccagagggcgattgccaccaccagaagctggaagaagaggtggtccgccgacccgcgcagaaggtggagccccggctcgcctcgctccccgccccggcgaggatgacgaacaccctcaacactgagggcgggatcgggatcacagcccggcccacgcgtcgcgcaaccggcgcgccggatgctgcatgcaagcaactgcaccgcctgcgccaccaccgcacctcctcgattgcggaaccaataccgcgactcgaggcgacccagcgcgtgacccagcagcgccagcctgacgcggcggccaacgcggccaaaggtgggcgggcagtaatgacggtggcaggcgcgcgggagcagcggtcacgtcgtcagccaagctcacgtcccatccgggggcagcgagagaaccccctctcacggcgtgaagacgacgtgcccgtgatccgttcctcgaacggctcgcgcacgcgcaacggctgccccgccaactactcgccccgtcgcattaactccgcgactggacaggcggcgcttctggcaggagcaacgggcgacgcttcgccttctccgaaacagccgcgccagaaaaggctccgagcctccttactaatcagaggttcgaaggctggccccccgaagggttcaacagccgcctcagatcgcgtgggccctacacccactactggtcagaggctggcccccgaagggttcacagtcgcctcagacgccgagcgagggatgaccaggggggaccaggtccggcagatcacccgcaggtacttttgggcgtgcctctgggcccctagccgacccctaacgaacgaggcacggacgtccactcggattacccgcttgcagctcaccggagacaccatgttcggtgtccatcgagggctcgggggctgctctcgcaaacccggctccggccaaaccgttgacagcgtcaacataccagcccgagaatttgggccccgaccgtacacccgggctacgaccagttcgcatgagggaaccaccagaccagccaaagcattacgcaaggcattaagacctcgaaggagtgaaaccactcctccgaggcctcgggggctacacccggcgggtgcgctcgcgcgcacccaccggaacaaaatgcaaccgagaaaggctggtccccttgcaaaaaagtgcgacgaaagcctccaagcgagtgctaacactcccttcgaggctcgggggctactgtcggggaccataattaggggtaccctcaagacgcctaattctcagctgagtgagactgacaggcagtcaggccttgccaaaggcgccatagcgaactccgctccgcccgacccagggctcggacttgggctaggccccggaagacggcgaactccgctccgcccgacccagggctcggactcgggctcagccccagaagacgacgaactccgcttcgcccgaccccagggctcggactccgccctggcctctgccgaacaacctccgcctcgcccgacccaggggctcgggctcggcctcggccatggaagacagactcgacctcggcatcggaggagcctccacgtcgcccgacctagggcacaggcccgccacgtcaacaggaagcgccatcatcaccctaccccgagccgactcgggccgcagagaacaagaccggtgtcccatctggctagctccgccagatag

SEQ ID NO: 27260 - DNA, 522 bp, Zea mays
  Peptide Sequence Number=SeqID_70635
atggggaagaggagcggcagcagtaggaaggacaagaacaaggtcattctcccaccggagctgccgccggaaatacacgacgatgaggtggatgtcagcgaggaagacatcgagttctatgccaccgacagcagtaacgttacacccttccgccacttcgacaagaagtccatcgacaggtatgtcgggagggttgccgggcgcgacgagggcgaggtcgagcgcctctacgaagagcgccagaagcggaaggccacagaatcgtcggggagaccccgcgaggatgatgattatttggaggtcgaccccgtcgacgcactccccaccaagacgctgcaaggggagctcgtctacaatagaggacgttattccaaggcctacctgcagaaattgatatcgttggagaagcagccctacttttatactgtggctgttcgttgcatgtgtgctttattagacactgccccacattttaacttccgtgaaagcctattggctagtgtgtgtcaagtctttgcctga

SEQ ID NO: 27261 - DNA, 366 bp, Zea mays
  Peptide Sequence Number=SeqID_70636
atggtgtgtttgggcctcggcggccgcagaaaacacacgctacaagataatccgatcctgcaggctcggatcttgacagttgaagggagcagcagcaccctcggcgtcaactacaccttcggcgaggtccgacccagcctcggacggcgacgcggtcggaggatctccactctgaagggcgggacaggcggcgcctctggcaggggaagcgagcgatgcttcgccttcgccataatgaccgcgtcaaaaaaggccggcccctcggaagggttcaacggccgcttcaggcactcgggctccgcgcccattactgatcaggggttcgtaggctggccctcgaagggttcacagccgcctcagacatag

SEQ ID NO: 27262 - DNA, 183 bp, Zea mays
  Peptide Sequence Number=SeqID_70637
atggggaaggaggagctccctgctaagccgaacagagcagtgaagggagtggtggcagtgagcagtggcagatggaaaaatatcgacattaggcggccatttttggcattttccttttggaatcggaccctagtcgctgtaaaagatatattccttgatgtacactctacaaatcttgtatag

SEQ ID NO: 27263 - DNA, 360 bp, Zea mays
  Peptide Sequence Number=SeqID_70638
atgcagaggcggggcgcctgggcggtgttccaggcgcggtcgcgtcgggtgcacaccggtaggggctacgcggccaggtcgggtgggggctcggggtggccgggcggttcggcgggtgcgcaggtgcggggcaggggcgctggatggcagcttctggcggctgctgaactcctggtggcgcggcttggggagaggaggtggagagagggcatccagacacctacccctttggttgtagcactaggagatggatctgctaaagacgaccccgcgacttcgtcggcaaacaacctctttgccagccatagtacagccagaggaagtggtcacaactcaaatcaaccaagtgatggttggtaa

SEQ ID NO: 27264 - DNA, 333 bp, Zea mays
  Peptide Sequence Number=SeqID_70639
atggctcaccgcgcaccctggctcgctgacgggcgggaccccctcgtcagcctctccctgccgtggcacatggtcttgtacaacactaactcgtgggggcccgtggtcagacccgtccctaaccctgtgggccgttgcaaccgccccgcgtatggcagcatgcgagctggggactggggtctccctacgctcagggataaaaaggcgtggcccggtggctccgctgcgaaacccaggaccatgatacttttgttgttagtgagaaagttcgccgcatggagtcctatgaaaagtactgtgattgctctaagctctgctttagcgtgcagctag

SEQ ID NO: 27265 - DNA, 780 bp, Zea mays
  Peptide Sequence Number=SeqID_70640
atgccctggatatgggacaggccatctgaggccatcaaggcaaggattggtgcacgtgggttcgataacttggggggctgtcacaactgcatcgtcgcctgcacgaggagcaggagcgccgatgccaggagcaagagcagcaggactcttcccccttgcctcagtaggaggtggagtctgagaggccaccttcccctgcacctcagccagagatgccccctgcaccaccttagggcatctcggctgctggaggagaccctgacggagacgatgacgacgtcggtggcagttcgagccacggaacggagctctcggaggagccagagctggatggatggattgcgagacccatcactcgtgacgctgctcgcgggtgtcacttccacgacgctctcgataccttgttgtgtcgggatttcgaccgacacacttggtctatccggggtagtcgatggccttgacctgaagtactaccctcgtcgtttgaccggcagtgctagaggtgtgattgtctcgccagttggtgagggcaatcccaaattgagcagcatggtcaacttggtcgccgtgctcaacatagagttggaccacgcccttgacgagttgggcaaggttcgggcggaggttgcggaattgcgtgctgaatgcacggcacgtcactatcttgatggtggttctcccgcccctgttgggattcagcacccttaccgttcaccgccccgtggtcgcttcaactatggtaccccagactgtaggacccgcatagatttagatccatag

SEQ ID NO: 27266 - DNA, 621 bp, Zea mays
  Peptide Sequence Number=SeqID_70641
atggcgcctcctgtcgacgtggctggtctgcgccctaggttgggcgatgtggaagctcctccgaagccgaggtcgagtctgtcttccatggccgaggtcgagtccgagcccctggttcgggtgaggcggagaccgtcggctgaggccagggcggagtccgagccctggggtcgggcgaagcggagttcgtcgtcttctagggctgagcccgagtccgagccctgggtcgggcagagcggagactttagcccgagtctgagccctgggtcgggcggagcggagttcgtcgtcttccgggactttagcccgagtccgagccctggatcgggcagagcggagttcgccgtcttccggggcttagcccgagtccgagccctgggtcgggcggagcggagccggtcagtggagcggcgaagtgacggcggtcacttcggctctgtcggctggggggcgcgcgtcaggataaagggcctcgggcgaaccggaaacatgttcgccgctggaggggggcctcgggcgagacggaaatcctccgggctttatgctaatgggggttaccagctcagaattaggagccttgagggtacccctaattatggtccccgacacctcctatcatga

SEQ ID NO: 27267 - DNA, 948 bp, Zea mays
  Peptide Sequence Number=SeqID_70642
atgggggtggctgcggagcaacagaagaccgacgaacggcgcgccgtcacccgctccggcagcggcgacgacgacgacttctgctccggggggccaaacagcggcagctatgacctcagggcggatgctgctgccaggaggcccccgcccatgcccaaactcgtgaggcaaggacgggcagaaggccgtagagttggaggtcctcccctacggcgcgggggctgggccccacacgtcatgcaagccggctcagagcagaagaagccaaaccgccgcgcgcggtgcgtgcaaccgcccagcggttgcaaccggctctccacttttgcccagaccaacggacgggagggcgagcagccatgcaggcggcatgcaaccgcgccaaatgggcgcacttctccgactcccgacacgcccggcatggagacccaggcccacgcgtcatgcgaccggcgcgccgaatgcttcgtgcatgcagctgcaccgccacttgcgccaccaccgcgcctcctcgactgcggaaccaataccgcgactcgaggcgacccagcgcacgacccagcagcgccagcctggcgcgacggtcaatacggccaaaaacgggccggtgccgggtggtggcaggcgggcaggagcagcggtcacgtcgtcagcccagcctatgtcccatccaggggcgatgagagaaccctctctcacggcgtgaagacaacgcgcccgtgttccgttcctcgaacggctcgtgcacgcgcaacggccgccccgccaaccactcgccccgtcacattaactccgcggcgggacaggcggcgcctctggcaggagaagcgggcgatgcttcgccttcgccataatgaccgcgttaaaaaaaagggaccgggaaagggggataccccgaaaaggatccttccccgtgaaggaaccaggctccgagcctccctactgatctga

SEQ ID NO: 27268 - DNA, 282 bp, Zea mays
  Peptide Sequence Number=SeqID_70643
atggcctcttccctcgccattgggttcgccgtggcgccctctccctctctgcccaactccggcgaccccggagccaccctagctcgcgcctgcctcaactccgtcgacctcaccaccgcggagaggagcggtgccacccgcagccatctgtttcctcggtctgatcccctccgtccgattcagatcgaacggctcggaccgcgggtaccgcctcgcgctcgcacctggcgccctggcctgcctgttagtgccattcgcagccgctcatcattcccggtctga

SEQ ID NO: 27269 - DNA, 438 bp, Zea mays
  Peptide Sequence Number=SeqID_70644
atgggccagccctgtcagctccgccctctccgcgcacacccctcacctcattttgcacagcttcaccctctctcgcgctctgcccacgccgccagccgtcgccggagacccgcgcccgcgtccccggccatccagctcgccggagaccaccccaagcctccccgagctccgccccgaggtgagacacctgttcccatgcccaatttcccttattgcgtcatgtgttcggccaatttcaccctcgccggtgttcggccgcggcggtccaccgtgctcgcgcggtgtccagccgatttggctcggtttagttcaccggaatcgaacggctcggaccgcgggtaccgcctcgcgcacgcgcacctggcgccctggcccgcctgtcagtaccattcgcaaccgctcatcattcccgatctaatttcccccgtccgatcttga

SEQ ID NO: 27270 - DNA, 520 bp, Zea mays
  Peptide Sequence Number=SeqID_70645
atggaggttcgctgccaaaccagcttttgccagaatgaagatggtttccccaagttgttgagagcatgcacagtccgcctcgaaatcaggagccagccagagtatgatggtcgtgaattcgtcgagcatggcacggagaagtgtgtcgtgattgaggagcagctgcttgaggacgaccccacagtcatgtacctcactacatacctgctcacccttgatacacagtatgatttcttggctcggcaccaccgtcagatgattgcccgagaagaagatgctgagaagcgcaaccgtaagctccatgtggatctcaccacagctcaagcccatgtagctgccttggaaagtcgtgaagtcattgctgttgaagccctgaagcaagccaaggatgagcttgtccagaagttgatgggggcctacttggtaacccataaccaacgtagagccctgcggatccaagagcccgctccatccaaccctgttcaacccatcaaagctaaagacccccagattcttgaag

SEQ ID NO: 27271 - DNA, 978 bp, Zea mays
  Peptide Sequence Number=SeqID_70646
atggtggccaatacagggaaggattgttcgtcggggcttgtccatcgccgatgggtcacccttctttgtgggcgctgtgctgaggcacttctaccggagggcgatgagattttgagctccgaggcgccgactccttgctctccggcgtggccactatgggcgtgtggcgccgccatgggctgggtggcggaggcggtggccgtcgcgcacgcaccgggggtggtcgtgggcagcgcgcggccgtcgtgcttcgtcgtgtcgccgcccttcgcgcgcgtcgccttcatcgagtccgccttcggctccgatgcctcgggttcgtgctcgggctccgacgccgacccagatgcctcgcctccgcggcgaggggacggcgccggacgcggcgaggagcgcgcggggaagtccttcccgctcaagagcgtgctggccatggagctcaactggtacaccagtcccgaggaggcggacgacagcgccgctaccttcgcctctgatgtctatagactgggtgtgctcttgttcgagctgttctgcacattcgaaacgatggaggacaagatgcgggcaatggcgaccgcgaatctgaggcaccgggtgttgccgccacagttgctgctcaaatggcccaaggaagcatctttctgccagttgctaatgcaccctgtgccagaaaccagaccgaagatgagcaaggtcactggagttgacgaagctaaagctgaacttgaggaaattgttcactacctacgagatcctaaggccgcacttgaagaaatcttatatcagtttgaggaaaaactccaagctgaaagagaggaagctgctaggaagcaggaagagttgcaagcacaagtacaagctcaacaggccgcatttgaagaaaaccaaagtttgctgcgccaggccaagcacaactaccttgctagaacatatctgtggttagaactttgtcagaactacgtgcaatctgtttga

SEQ ID NO: 27272 - DNA, 468 bp, Zea mays
  Peptide Sequence Number=SeqID_70647
atgaggaagcatagaggggcttcagcttccatggggaagaaggggagccgactgggtggaagacgagtagggcgctgcagggagggcacgacttctcctcatccaagcaaggcgagcaacaacaggggcgccatgggaggggaggagccgagctcggagaggggcgttgctgctgggcgccggccatggagttcctgctgggcgccatggaaggagaggaaacaacggccaggaaaggaagcgctctgcgcacgtacaggaaaaacagagggaagagacgtgggggaaaaatggagaggggcgctggcttcttgctgctggaggtacaaagaaagggggcgctgcgcagggaggaatgagggcgccactggcttgaggaagaagggcttgggcgccatccatgggagcggctgctccctgcttgcagctgtgtgcgcgctgaacagaggagaagagagctgtgcgtga

SEQ ID NO: 27273 - DNA, 183 bp, Zea mays
  Peptide Sequence Number=SeqID_70648
atggagcggcacggcggcgatgagggagctccagtgagcaatccaaaggcgcacgattccgttctggggttgaggaggtcacaagcgtctacggttatcctccacaaattaccagttgggtattacaagtcaccacttctcctagtggggacaccaacttcaccgttctcttatcacaactga

SEQ ID NO: 27274 - DNA, 438 bp, Zea mays
  Peptide Sequence Number=SeqID_70649
atgggcgacgacagctcacccgctcgaactagggggtcggtccggccacaggagagcaggggcgaggggagggggagctgctgctcggccacaccatgggagagcttcagcgcgccaagacagaaggggcagagagcacgcagggaggtggaggcgccatggggaggaggcgagcagagctgcttgctgcagccgtgggaagaaaatctccctgctgccaagcgccgtgaagaaggggactcggctgaagcaggcctgcgcaagggaggagcagggaggaagggcgctgcaatgagatttttgattcttgctctcacccccattatcataagttgtaaagctaagcaagagactccatttatttgtgtggaggtccttggggaacttggtgtccctaatgaagagaagaaaactcgaccggactttgtgaccgtttga

SEQ ID NO: 27275 - DNA, 432 bp, Zea mays
  Peptide Sequence Number=SeqID_70650
atggagttcctgctgggcgccatggaaggagaggaaacagcggccaggaaggaagcgctctacgcacgtacaggaaaaacagagggaagagacgtgggggaaaatggagaggggcgctcgcttcttgctgctggaggtacaagaaagggggtgctgcgcagggaggaatcagggcgccgctggcttgaggaagaagaagggcttgggcgccatccatgggagcggctgctccctgcttgcagctgtgtgcgcgctgaacagaggagaagagagctgtgcgtgagaggaaaaagggagaagagagagtggcggctaggggtagggagtgagcgaactagtgtttcgacgaacggacgattgagcgatcaattcagccgagagtttgatttgaattcgctcggaaataattccctaagcatgattcaaaaataa

SEQ ID NO: 27276 - DNA, 399 bp, Zea mays
  Peptide Sequence Number=SeqID_70651
atgccgtctccgttctgtgcgttggtgcgcttgctgctgctcccttggccacacctcatcgcactacgagtcttgcagcccggttcctttgcgcgcgactggtttccctgccgtcgcgaatcgcagcacgcagcaagccggtgccccggcgtgcagaccccgcgcgccctcgccctgctcattcgcgcagccacgtcgacgttgttcgtcgtcacgtcattatttagccgcgtgcgcgcgctcgcgtttgcttgcgcgcagtgcgtcgacgggactccgtctacgttcgcctacccttcgtctacccctagacgactctcgtctacccccgtctatccccccccgtctaaccccgtgagcgtttgtgtcgttcgccatcgcccgcgcgtcgcgcaataa

SEQ ID NO: 27277 - DNA, 237 bp, Zea mays
  Peptide Sequence Number=SeqID_70652
atgggcgattctgacgactgcgcgcgctgcgcgcgcattttatgcaccgcagggagcccgttggcgccgcagggagccggtttatccgcaggcacaccggacagtccggtgcacaccgggacagtccggtgtaagcctaattccctttcagaggacgtgaaggacgccggcgactgcacggcactgctcgacgcgttcgtctacatcgagacgtcttccgctgctctgcgcgtctag

SEQ ID NO: 27278 - DNA, 723 bp, Zea mays
  Peptide Sequence Number=SeqID_70653
atgcaggcggcatgcaaccacgccaagtgggcgcagccctccgactccaacgcgcccagcatggaggcccaggcccacacgtcatgcaactggcgcgccggttgctacgtgcgagcaactgcaccgccactcgcgccactaccgtgcctcctcgactgcggaaccagtaccgcgactcgaggcaaccctgcgtatgacccaacagtgccagccaggcgcgacggtcaatacggccaaaaatgggccggcagtaatggcggtggcaggcgggcggaagcagcggtcgcgtcgacaggcggcgcccttggcaggagaagcgagcaacgcttcgccttcgccataatgaccgcgtcaaaaaagggaccgggaaagggggataccccgaaagggatccttctccgcgaaggaaacgggccccgagcccccctactgatcagaggttcaaaggctggcccctcggaggggttcaacagccgcctcagagcactcgggctccgcgcccgctactggtcagaggttcgaaggccggcccctcggaagggttcaacggccgcctcaggccactcgggctccgcgcccactactgatcaggggttcataggctggccctcgaaggccaagtccggcctcaggcgccataggaaactccgcttcgcccgaccccagggctcggactcgggcttagccccggaagacgacgaactccgcatcgcccaaccctag

SEQ ID NO: 27279 - DNA, 906 bp, Zea mays
  Peptide Sequence Number=SeqID_70654
atggagacccgcttttgggaactgaggatcgcttttgggaactatcccagttcatctagagcacaaccttacatgttgctcttaataattgatagacttgaacacagcctggaacacatcaggccactgatatttcctgctaagaggcgcaaggttgtcactatgaagaagaggaaggaaagggtgtcctctgaatcaacccttcctttagtggtgggtatcactgcagaagaaagcactgcattgatacctgctgcttcagaaagtaaggcacaaaaggatcttactcctgttggaagagatgctttgtcacgaattaggggtcgagattttgactcagcatgtggtcttactgaggatactggagccttgattgtatggcaagcaccacctattctagaggagatggctgcccacaatcagttagactccaagcaggacccagatagtttcaggcctccggcgacctctgttattgagtaccagcgacaaggaccaactgcacaaatgaccaatatttcgtttatggttgggaactcatcccatgcaaggccgactgaccaggatgatgaaaacttgagaggagatgttctcacattgatcaatgagctggaagatgaaagagcagctgcacttgagaggacaagaatccttgaagagaggctccagcaagagttggaaaatgaaaggacagttgctgctgagaggactacaattcttaagagcaaggaagctgctattgagagaacaagagttcttgacgagaatttggaagtacgtgctattgagagaacaagagttcttgacgagagactccaaagagaatatgaaatcgcacgtactgctgcaagccagaatgaagctttaaaagaggagattttcaaacttcaggagttcgttttctaa

SEQ ID NO: 27280 - DNA, 195 bp, Zea mays
  Peptide Sequence Number=SeqID_70655
atggcgaggcggcaggcgtatggcaaggtcgccgatagtggtagcttgccggtgccgcgccgactcgctgttcttgtgtccttcaccatagcgcccatcccgctgctttctgctacatatatggagccctgtcttcctctttccgtcggcctgatttgctacgtagcagaagggcagacacgcgcaggtccttag

SEQ ID NO: 27281 - DNA, 1287 bp, Zea mays
  Peptide Sequence Number=SeqID_70656
atgggcctttcaacagtttactccccggccggaccgcgcctcgtgccggcccctctcggccgctgccgctctgcccagccccgccgcccgcgccgagccccgctcgccaccgtccggtgctccgtcgacgccaccaagcaggcgcaggatggcgtggcgacggcggtcgcgacggaggcgccggcgtcgcggaaggagtgcttcggggtcttctgcaccacctacgacctcaaggcggaggacaagaccaagtcgtggaagaagctagtgaatgttgctgtgtcaggcgcggccgggatgatatcaaatcacctgctgttcaaactcgcttctggtgaggttttcggacaagaccaaccaatagcacttaagctactcggctcagaaagatcgtttcaagccctcgaaggtgtagctatggaactggaggactcgctgtatccactgctgagggaagtcagcattggcatagatccttacgtggtctttcaagatgtagattgggcccttcttattggcgctaagccccgaggtcccggcatggagcgagctgcgctactggatatcaatggccaaatctttgctgaccaggggaaagcacttaatgcggtcgcctcgcggaacgcgaaagtcttagttgtcggaaatccctgtaacactaattgtgggttgcccttgacgcagtgcgctgatttgtttgaaaaatgccccaaacataccggcaaaaaactttcatgcattgacgagctggcactaaaagcaggtgtattttatgacaaagtatcaaacgtgactatttgggggaaccattcgacgactcaggttcctgatttcttgaatgccaaaattgatggaagaccagtgaaagaagtcattaaggataccaagtggttagaggaagagttcaccctcacagttcaaaaaggtgtgctcatccaaaaatggggcagatcatcagctgcatcgaccgctgtttcgatagtggatgctattagatcccttgtaactcctaccccagaaggtgactggttttctacaggggtttatacgactggaaatccttatggcatagcagaggatatcgtgttcagcatgccatgcagatcgaagggtgatggtgattacgaactagctagtgatgtgttgatggacgattttctctgggaacggattaaaaagagcgaagctgaattgcttgctgagaagaaatgcgttgcccatcttacaggagaggggaatgcattctgtgatcttccggaagataccatgctaccaggagaagtgtag

SEQ ID NO: 27282 - DNA, 138 bp, Zea mays
  Peptide Sequence Number=SeqID_70657
atgacagtggcctcgtacgtagagggaggcgtaaccacaggggcgctaggagagggtcgaggcaaggacgacaacacgttcttgttcccggacagcagccacaaccaccttaatagtggtgaagattacaaccaatga

SEQ ID NO: 27283 - DNA, 249 bp, Zea mays
  Peptide Sequence Number=SeqID_70658
atggggggcgcggatctttctctgttcgacgaccctcttcctccccgatctctctctgtgtgcaagctccaatctctctccgcgctattgttccatggcggcttagcttgtatcgcccggagatggttggcggccaagggatttatactagagcaagatgtaattgtggacattactccacaacccatcacactcaatcaaagatccaaatcatacaagtatcataagaacaagcactcaagtgtatag

SEQ ID NO: 27284 - DNA, 271 bp, Zea mays
  Peptide Sequence Number=SeqID_70659
atgtcggacgaccttgttgttcctgtccactttgaagttggtcaagaaccttgctttcgcctcctggatcatccgctccttgtgctcctcgaactggagctgctcgtcagccggcaagatgtggatgtccccagcggagtcgtcaaaaagtatgttgacgccttttcggagcgccaaatactcaagaagaaccggcggcggtgctctctggtcacgcgcggacggtccgcggcctggggccggacggtccgcgacctggcgcaggggctag

SEQ ID NO: 27285 - DNA, 291 bp, Zea mays
  Peptide Sequence Number=SeqID_70660
atgggcgtgcctgccatctgcacacgcagagcctgcattaaatgcgcggcagagagccgttggcgcgaagatagtcgttgctctggagttgcaccggacagtccgcaaagttttcaggacaacatgggagctctgtctagtcaatttgacaacctctctaccaatgataggatgcaagagatcagtcagaggcagcagcaactccaacaagactttggacagttctcctctctctttgacaccttcagcactcactactataacatgcaacctccaccaagtgatcagtga

SEQ ID NO: 27286 - DNA, 117 bp, Zea mays
  Peptide Sequence Number=SeqID_70661
atgtggagggtgtggtttgatcatgttacccatgtggttattgatgtgaaatgggtggaggcacctgatctttgctttgggagaagggatgtagcagcacggccaccacacttttaa

SEQ ID NO: 27287 - DNA, 399 bp, Zea mays
  Peptide Sequence Number=SeqID_70662
atgggtagagaaattgacccaaacccataccctaatagagcaaaaacccatcgggttttgggtagcgggtacccattgccatccctagttccgcccgtgtcgccgtctgaggtagggccagattctaccgagggtggaaacgacgacgaggccgaagtaccaagtctcccacttggaagcctcggggctgaacccttcgggcgtggtagcatcgcagagactgctgataccacgccgagtgtagtaaggccacatcctgagcctcttccagctgaagtccaggaactttttcccagtgaactgcaagccattgtcggtgatgatggagtttgggaccccaaagcgatggatgatatttgtgaagaatgccaccgcctgctcgaacctgatgctggttaa

SEQ ID NO: 27288 - DNA, 663 bp, Zea mays
  Peptide Sequence Number=SeqID_70663
atgtggaaacactcgcgacttggagtagccctcgtcgccgaggctgtggtcatcgtcggagcagctagagaggcagtagtcacatgcggacatgaagtctcgcatggcactgggatcacggagcccggagaaatcccaaccgaagtcggggtcgtcctcttcctcggaacccgcgggtgcgaggacaacacccgacatgtcccccgcaggggtgccggcgtcgtcgactctctctggtctgacagccgacgaggtgccgcctcctgcctggccaaggttgccccgtctcctcctcctccagcgaggagggtggcggtgcaaacccgggtgttcctcttccaccacggggggaagtcgtcgtcgagttcgccaccgccgggcgagccgacggccatcgttgttgtcgtgctgcaaggggaggagtaccatgtcgtagctgccgtcgggggacatgaactcgagactcctgaagtggagcaccgtctcgggctgaagaggctgctgaagactacccatctggaactcaacgggaaagtatttgtcaacacgcagcagtcccctacctggcgcgccaactgtcggcgtttcggacccacgaggaccctcaaccgaccagtgaatttgtcgctgcgtgtccctgcccagatgggtgagagcacctag

SEQ ID NO: 27289 - DNA, 90 bp, Zea mays
  Peptide Sequence Number=SeqID_70664
atggccgtcaggcgaggggtccctgcattggagcttcctagagctgtagcagctggtaacccccatcagcacaaagctgcaaaggcctga

SEQ ID NO: 27290 - DNA, 243 bp, Zea mays
  Peptide Sequence Number=SeqID_70665
atggcgccgccgttcctcagtaggcgccgcctggagttcgctgggaagtggaaaacacgtctcagccgtctgatccctagcaagagatccagattaaaaggaaagggggtagacttcactgatccgctcatcttagatggtagccgttggatggccggtagaccactcggattggcgactagcgtgggcggattctggtcatgggatccagatccgagggctcctgtcgaggcgggtttgtag

SEQ ID NO: 27291 - DNA, 1209 bp, Zea mays
  Peptide Sequence Number=SeqID_70666
atgagcgtggtggggttcgacctcggcaatgagagctgtatcgtggcggttgcgcggcagcgtggcatcgacgtggttctcaacgaggagtccaagcgcgagacacccgccatcgtttgcttcggggacaagcagcggttcatcggcaccgccggcgccgcgtcctccaccatgaaccccaaaaactccatctctcagattaagcgcctgctcggccgcaagttctcagatcccgagctgcagcgcgatctcgcctccttcccattccgagtcacggagggccccgatggttttcccctggtccatgtacggtacctgggcgaggagcggacgttcacctccacccagctgcttgccatggtgctgtccaatttgaagggcattgctgagggtaacctgaatgccgcagttgttgattgttgcattggtatcccggtctacttcacagatctgcagcgcagggctgttcttgatgctgctactattgcgggtctccggccattgcgattgttccatgagacgacagccactgctctggcatatggtatttataagactgatctcccagagaatgaccagttgaatgttgcatttgtcgatatcggtcatgcaagcatgcaggttagtgttgtcggttacaggaagggacagctcaagatgttgtcccatacatacgaccggtctcttggtgggagggacttcgatgaggccctgtttaagcactttgcagctaaatttaaagaggaatataagattgatgtgtaccagaatgcgcgggcatgtattaggttgcgtgtggcatgtgagaaacttaagaaggtgctgagtgccaacccagaggccccactgaacattgagtgcttgatggatgaaaaggatgtgcggggttttatcaagagggaggagtttgaacagatcagtgcctctgtgctggaacgcgtgaaagggccactggagaaggccttggctgaagctgggttgactactgaaaatgtgcactttgttgaggttgtcggatctggttctcgtgttccggctataatcaagataattactgatttttttgggaaggaaccaagacgtaccatgaatgcaagcgagtgtgttgcgcgaggatgcgctcttcaatgtgctattctcagccccactttcaaagtgcgagaattccaggtattagctcctcagcttacctatgtatatctgttttaa

SEQ ID NO: 27292 - DNA, 546 bp, Zea mays
  Peptide Sequence Number=SeqID_70667
atggaggtggtggaggcggaggggatgaggtgcgcggttttctctgtctactctcttaggttgcggaaacaaaagcagaaggcaagcgcaaatggcagggtaaagaaccaccaccagcccctcttccggggcaagcgacacctctggcaggcgaagcgggcaccgtttcacctccgtcatgatgaccgcgtcaaaaaagggaccgggaaaggggatatttcgaaaaggatccttctcagcgaaggaaacgggccccgagccctcctactaatcaggggttcgaaggttgcgcccagcggggttcggcaaccgcccctgagcactcgggctccgagccctttactgatcaggggatcgaaggctggcccctcggaagggttcgatagccgccccagagcatgcagagtcagggatgaccctgggtacgtccgttacatggctgaggctcgggctacgctctcgagggatcgcctgacaccttatcctgacatgcacgcctcagtcggcaaggtcgaagtgaccgcagtcacttcgaccctttactga

SEQ ID NO: 27293 - DNA, 762 bp, Zea mays
  Peptide Sequence Number=SeqID_70668
atgaaagaatgcgttgctccacctccaagtggttcagtctcccatgattatagcgtggctgagagcggatgcctgctccaggctgagacacattcagctttgttggggcattgggacctgactgctactgggctgccttctttggacattgcatcacctagtggccttgctctccacagtggaaacatgctctgtttccaacctgagctggtgctgcctgactgctctgctggtttgctggggcaggaagacgaggtgcctgctgattctgcctctagaactgacctcctcctgactgattgttctgacgattccgatactggtgctgaggatactgcctttggaactgctgatgctaagagggtcgaccaagcctctcaggaaacgatattgtcgcttggcgtcggtgttgacatcttcaggagcatagcgagacaactgcagaaacctgtcccgcacgcttgtccctgggcatctgaggcatctgaggctgaggtggggcctactgctgttgctgctgctgaatggcggccagagtctgaccgatggcttgaactgcctgagtctgcatcaggaacatctgctcgatggacatcgggggcgggggcggcagttgctgttgctgaggcacctcatcctgctgagcggcttgctcctgctgagcacgccttcctcctctgcgcctgttctctaacatctgcagaatgcaatcacacatcagaactgatcttgcgaatcttgcagcataagaaaagagtatag

SEQ ID NO: 27294 - DNA, 399 bp, Zea mays
  Peptide Sequence Number=SeqID_70669
atggaatcggagaacgaaaagctccgaaaagcactggctactttgtttagagttgttcaaaagcgtagttgtcacatcgttgatgtcgtcaacacagccttccagcctttcaactcaccattgttggatgaaatgaaccaagcattagttgagattgacgacctcgccaaggatcttgaagacgtagtagtgcaaacccagtggaaggtcgacaatatggatcagtgtgaagtaaacaaaattccgccacaagaggaggcagtagacgagcttctgatacaagatggttcagaagacgagcttctcatagaagagtcaccattaactatgacgaaattgtcggctatgacgatggtcgtgactactcaaccgacgacacatgtccctactagtatgtag

SEQ ID NO: 27295 - DNA, 1017 bp, Zea mays
  Peptide Sequence Number=SeqID_70670
atggcgccaaaaccacttgggttctataccaaaaatgtgggcgtatcctccattggaactcacacatgtgagatagccctaggtgccaggaagaggcctgcgccggattcatggcaagattcgcacgtttgcgatctctggagacgtttgaacactggaagaaacacacctccacgtgttcgacgccttctgcccgcgccagagcacgctcacgcgcgcccccgcatgcccagcgccgcgcccgagccaagccagcaccatggccgcgcccgcgcttataaaaccctcccagacttagattgttcccttccgcgcaccctcaaacctcaccggagtcgagctcgtcgccgtttgcccgtgcgcagcgagtccgcggccgcccaacccctctgccaccatagaccggccagtggagccattcccaaccccgtccagccctcggagaagactgggcacacctccgtgaagctccccgagcgaggaatcggagtttacttcgccggagaggccagtccacgctcgccggagctatcaaccccgccggagtacgtggaccgggtaaaccacttcaccgtccttcgattccttgtgcacacagtcgctacgttaccccatgaagctcaccgtgccctcggattgaaccagctcgccgtggtttggccggtatactcgccgccgacgaggacacccgcctgcacgcgtggaccgggtgattccggccatccccgacgtcaagccgtacctcgacgtgaccgccagagtctccccgagccaaccccacccttcgccagacctccctcgccgccgattgccctcctcacgcgacctgagacgaggtctcccattccggttatggtgggtacaagtgcggtcactgcacgacggccagtcggggtcagtgaggcattgtacgccaaggcggaaatggttgctggagtgacttggccgtccatcttgccaccgggttggactgtcgagtgggaccctgcctcggctgaggaggagcatgaggagtga

SEQ ID NO: 27296 - DNA, 789 bp, Zea mays
  Peptide Sequence Number=SeqID_70671
atggaatcttcacttccccttgacatcctcattaagatgcagatgcatgatattttggtttttatgtgctcagagggcaagtggtacattgagcctctaccttcaggttctgatggtaaattcgaatttgataacatgattattggacaagcaattccttcaaactttataccagcaatagagaagggttttaaggaagcttgcaattcaggctcgttgattggtcatcctgttgaaaatttaagaattgtattgactgatggggcttcacatcaggtggattccagtgaacttgcttttaagctagctgctatctatgcttttcgacagtgctacacttctgccaaacctgtaatattagaacctgtgatgaaggtggaactcaaatttccaactgagtttcagggcacagtaactggtgatatgaacaagagaaaagggatcattgttggaaatgagcaggaaggtgacgacaccattgtagtttgccatctattgaagaagttttctctgtctactaatgagcttaagacttttggatctttgaattattcaattattattttggatcaaacaaatgtttgcggtcataactttgttattgcttacacctttttaggcttccaaatggttccgctaaacaatatgtttggatatgcaacagctattcgatcagcgactcaggggaaaggtgaatttacgatggagtacctggagcataatgttgtatcgcaggatgtgcagatgcaactagtgacctcgtaccaggcggccaagggcacagagtga

SEQ ID NO: 27297 - DNA, 453 bp, Zea mays
  Peptide Sequence Number=SeqID_70672
atgggtcaccaaaatcaacatgccaacgtggttcccacccaatctaacactatcgatgttgatgcagaggagtcagttccaactagcatcatatcgaagaggccacttggtcgggattcttcgaaggaaaaggctaagcgaactcgatctgtcgacacatcttcatcagattcggagttcatgacatggatggaagatctttctttggagcgcctatctatgtacaaaacaactgttacaacagaggaaaagaagttggattcaatgaacaaaaacgagaggcaaaaactgctccttgaaaagaagaagttgaacctagagaaattaaggatggaaaggcagaaactgaaggaggacaaggaagaggagccaagcaacaagagatattggcaagagttactggctcatcctcatctattggtagtcatgacagtcctaatttcgcatggataa

SEQ ID NO: 27298 - DNA, 507 bp, Zea mays
  Peptide Sequence Number=SeqID_70673
atgcaggcggcatgcaaccgcgccaagtggacacgcttctccgactcccaacgcgccagcatggaggccccggcccacgcgtcacgcaaccggcgcgccggatgctgcatgcaggcaactgcaccgccacttgcgccaccatcgtgcctcttcggttgcggaaccaatgccgcgactcgaagacgacccagcggcgccagcctggcgcgacggacaggcggcgcttctggcaggagaagcgggcgacgcttcgccttcgccgaaataaccgcgccaaaaaagggaccgggaaagggggataccccgaaaaggatccttccccatgaaggaaccaggctccgagcctccttactaatcagaggttcgaaggctggccctccgaagggttcaacagccgcctcagatcgcgtgggccctacacccactactggtcagaggttcgaaggccggccccccgaagggttccacggccgcctcaggctacccgggctccgcgcccattactga

SEQ ID NO: 27299 - DNA, 252 bp, Zea mays
  Peptide Sequence Number=SeqID_70674
atggagttcaaatcgtgctcactgctgtggggagagagactgcagatcagaggtcagagggtgtcggcgtttcgagaccggggggtccctgagccgacgagtgagtgtgccgcgtgccccagcccagatgggtcgagcgcgtgggcgagcgcgaaggggggaagcgaggcggccggagacgggcgtgagagaggtggaaatcaggcggccttcgtgttcgtcccgcgcccaggtcgggtgcgcttgcagtag

SEQ ID NO: 27300 - DNA, 1923 bp, Zea mays
  Peptide Sequence Number=SeqID_70675
atggcaggatcctccagtcgaaggagacatcccttaatgtacagtcctgacgagaaacaacagcatcccttccgaaagcatcacatcgcccgccaccgcctcctcaaacgccgcctcctcctctctgggtcaccgctgccgcttgccacctcgaccacgacaactgcacaggaaaaagaacacggggattgttttaaggtgattttctgtggtggtggtgatgtgcgatcgcaggaacaatcaccaatcaccatccttaagaagatgatgcgatgcactgtaacgggcggcgggtgcgttgcttcgtggattggtgatcggaggtcgccggcggtcaaccccttcagcgtgcggatgtcgacgggcaacggtgggtggtgcggcggcctgaggtcgcgggcggcggaactctccggcctcgagatggcccatctacgtggcggcatcggggggctcttccgcgcgagcccgcgctatgggcgcttgcaagccacggccgcagttgaccctgaagatattccactggagaaggttcaagttaaatcctcaggacatgttatgccatatgttggtgttgcttgtttgggggctattctgtttggttatcatcttggtgtggtcaatggtgcgcttgaatatcttgcgaaggatcttggaattgctgaaaatgccgtcttacagggatgggtggttagcacatccctagctggtgcaacactaggttcctttaccgggggatctttggcagataaatttgggcggacaagaacattcatcctggatgcagccccactggctgtaggtgcattcttgagcgcaacagctcaagatatccgcaccatgattattggtcggttgcttgctggaattggtattgggatctcatctgcacttgtacccctttacatatctgagatatcaccaactgaaattcgtggaacacttggttccgttaatcaactttttatctgcattggaattcttgcagctttgttagctggattgcctttggcaggaaatcctgcctggtggaggacaatgtttggaattgctgtagttccatccattttgctggctgtaggaatggccttttcgcctgaaagccctcgatggctattccagcaaggaaaggttattcaagcagaatcggctgtaaaaagactatatggaaaagaaatggttaccgaaattatgtatgatctgagagctagtggccaaagttcttctgagaccgaagctggctggtttgatcttttcagcaagcgttactggaaagttgtgagtgtgggggcagcactgtttttgttccagcagcttgctggtataaacgctgttgtatattactctacatcggtgttccgtaatgcaggcattacatctgatgttgctgctagtgctcttgttggagcagccaatgtttttggcaccatggttgcatcttctctaatggacaagcaaggaaggaaaagccttctgatgacaagcttttctggaatgcaaatggagggttcatattcacttttttctcccttgaagggtgcttcaatgctactcctagcattgtccttcacctggaaagctctggcaccttattctggtattcttgctgttgttggcactgttctgtatgtgctgtcttttgctctaggagctggtcctgttcctgccctgcttcttcctgaaatatttgcctccagaataagggccaaggctgttgcattatctctaggcatgcactgggtatccaacttttttattggcctgtacttcttgagtgttgtcaacaagtttgggatcagcaatgtatatttgggatttgcatcagtgtgcgtccttgcagttctctacatagctgggaatgtggtcgagaccaaggggcgatcacttgaagagattgaacgggaactaagtgtagcagaatga

SEQ ID NO: 27301 - DNA, 585 bp, Zea mays
  Peptide Sequence Number=SeqID_70676
atggccgcgatcctggcgctgccgctgaccccgatcaccaaggccaagctcggcctgctgctcttcaagaagcgcgcctccgccgccgcgggcaggcgccgctgctacaagccgttccgccactacaactacgcctacgtgggcgagtaccagttctcgccctcccgctccccgctgctcccggccccgccccccggcgtcaccacctggcggagggccgccgccgccgccgccaggaggcgccggggcagggccaggatggtcctcgcctccctcttctgtggcggcggcggcgccgacgagctcgacgtcgccgtgctggacggcctcgcgcgtcgcaccgacgggcgcgcggagagggaccagctggtggtgctcgccccggctctcgagtgggcgcgcggccgcgacgacggtgcagcctacgcctgcagcagcaacgacgaggatgaggaggtggcggttgtggactacggggaggaaggcgacgtggaagtggacgaccgcgccgagcgcttcatcgagcggttctaccaggagatgaggctgcagaggcagcgctctctggtccagcgcctgctctag

SEQ ID NO: 27302 - DNA, 2778 bp, Zea mays
  Peptide Sequence Number=SeqID_70677
atggctgaggatctcgcgtcgagcgccggccacccgcgcgacgcggacgattctgttgaggaagggcgtctgactgcatgggcccatgtaccgggtcgccaccttctcttcgcgctcactgacaagggagggagggaggccacgcccacgctcgactctcttgcctccgtgtacctcctcgcggcgcgtgccgaggtggaggaggagcaggggaaggggagctacctgccgttgcgtgccagctactacaccttccagctcccggatcgaagcacgggtcggttaaagcacggggccccgagcggcacggccgacttggcagcagccagcaggctcttctccccgcgtcgcctcctcccttcgtccctccgctcctcgtccccacgcaggctcccgtgcccgcctcctgctgcctcgccgccaccgccgacgctgccacatccggccgatggggccgccccgggcgttgtcgcgcgcctcatgggcctggagtcctggcccgccaccgccaccgccgcgccgccgagaccgcagaagcagaggaaggtggaggcgtcgcgcgcggacggcgctgactcggcggtcgtgctcgtgctgcctacgacccggagccgtcgacctcccgcgtccgcgcccgtgccgacggcgaggagccaccacggggccgacctgccagcgcggagcccgaggcggacccgtctcgtgcacgcggccgcggcgaagctgctgcatccgggcgcgcgcgccggctcacgcgcaagcgccaggctggccctcgcgtacgcttgctcttcgccgcagcaccgcaaggatgaccacgccggcaccttgtttcaaggctccggaatgaccgacgacttcctatctcgctctgagagcttgcccttggagcgttctgcactgctacaggtacagcctcctggtcttcctgcggagacagattgtgacaccgctgttgtatcgcgtaggcacgaccattgttccactaataacgtcgatgcagcgatcagtgccagtacggtagtgttgcctagaatgggttttggtgatggaaacaggagtaaacggagctctgatgtggatgctaagcacaaggggagtggaattagaaatgacgtaacgcgcacttgtgccagggctagatcgagcggtgctgccgttcaaactggagatgagaggttgttgcgcaaacgagcaacacctactcggccggaggtttctgggatgccagagtctggggacttggctggttcgacgcgcctagctgggggtgctcgtgacttggtatctgctactaggaagtttgcacacggtggttctggtccaagaagagagttcgcgggatcgatcagtggacaagggagcacgacccacagggatttgaacagccaaaatgggttagcatccacaagtaggatttcaagcaatggatctgggcataaaaggggatcagggagaaaggtggggcatgatagagcaataagtaacagagatgacagaaatgcaattgcatttacttctagatcatctacaaagccagtggccagagcttcgtcacagagcaatctattgaagagtggatccccaaatagactagcacctgatacaactcgcacacgagttctggctcctgaaaaaagatacattgaagcttcaccttcttttatgtctacttccgagaaaggtgaatttagcaggctgttgaaagcaaaaatcaatgagcttggcatgtcggacaggattgagtgtacaccagatgattcaccttcaggaaaactgactgtacctgtgttgcaagagctcatttctgcccttacaaacgacatgagcactccaatctcccaatgtagcaactactctgctgcatcagcacccttaagttgcaatggaaatgttgactgcatcaatgaaccacattgtatattctccaatgatcaatcacctgatttccagaaatgctttaagggtgaacaagatgttgattcttctgccgcatcattaaacaatgagcccaatcagccaagtccaacgtcagtccttgaagcatccttctcaaatgatacttctttaggaagtccagttgaaaaaaatgaaggaaaagacttaatcatgtcaattgagaacaaaatggaagatctctttaatttggagtctgacattgtcgatttagcaatgtcaattgacacgaggaaaactgatgctgaagaaacacaccgtgacaatgacaagttatcatgtttacagaattttcttgcacatgatttcaacatcttagaatccaggctctgcagcattagagaagctatttcaaatgctgaactgcttgtgggcagtagcctctcgcgtagcacagcatcaggtctcccactccaccctttcattgtcgaaatgctggaaaacaccatggatatgtttagtggaggagagtattcaggtttcactgaagataagaagtatcaacgtaccaacttcctgtttgactgcatcatagagtcactggattcaaaattctgcaatttcggcaaatgtggatacaaggcctggctgagcctgcctctcagtttgagcgaggacctgctgaagcgccaggtattggaagacatcggcaactggagggagtcgagtgggactgctcttagacaagtctctgacaaagaagtggaccaagtgactgacaggtgggatgcaagccaggttgaagcatttgacataagcattgcaatcgagaacgacattcttgaggcgcttgccggtgagttcgcactcgacctgtggtga

SEQ ID NO: 27303 - DNA, 305 bp, Zea mays
  Peptide Sequence Number=SeqID_70678
acaacgggcagtctgtgtttcccaaggaagttgcagaagaagtccctgagcagcagtttggtgaaggcaaaggaatcagaggtgtagttgcttcgccgtcgtgccgtcaatggggtccaggcacagtgcttgctctgtcgaggctgagtgtcgagccaaacggggcatttgctgagtacgttgatgtgtactcatccttgctttaccacaaaacaccaggttgtccacattgcaaccactgctcaggagaagacgaagctgtggaaggagacttccaggagttccaagactacgacgagttctag

SEQ ID NO: 27304 - DNA, 1491 bp, Zea mays
  Peptide Sequence Number=SeqID_70679
cagcctacagggagtcagtgcaaaatctctagtctcgggctctcaatacatccatttccttcctcgcaatattctgatcttctctcatctgacctccttccaccgtttggcaaggcggagagctgtgtcgccaagaagggctcagcgcacctccttccaccgtttgccgaggcggagagcggcgtcggcatgaagggctcagcacacctccttgacgaggcggagagcagcgttggcgagaagggctcatcgtacctccttccaccgtttgacgaggcagagatcggcgtcggcatgaagggctcagcacacctccttgacgtggcggagagcggcgtcgacgagaagggctcagcgcacctccttgatgaggcagagagcagcattggcgagaacggcgcagcggacctccttccaccgtttgacgaggcggagagcgtcgtttggctggaagttacggaggagacgatggagggcggcgtcggcgagaagggctcagcgcacctccttgacgaggtggagagcagcgttgcgcacctccttccaccgtttgacgaggcgaagagcgtcgtttggctggaagttacggaggagacgacggagggcgacgtcggcgagaagggctcagcgcacctccttgatgaggcggagagcagcgttggcgagaagggcgcagcacacctccttccaccgtttgacgaggcggagagcatcgtttggctagaagttacggaggagacgacggagggcagcgtcggcgagaagggctcagcgcacctccttgacaaggcggagagcagcgttggcgagaatggcgcagcgcacctccttccaccgtttgacgaggcggagggcgtcatttggctggaagttatggaggagacgacagacgcaccaccgtttgacgaggcggagagcgtcgtttggctggaagttacggaggagacgatggagggcggcgtcagcgagaagggctcagcgcacctccttgatgaggcgaagagcagcgttggcgagaagggcgcagcgcaccaccttccaccgtttgacgaggcggagagcgttgtttggctggaagttacggaggagacgatggagggtggcgtcggcgagaagggctcagcgcacctccttgacgaggcggagagcagcgttggccagaagggggcagtgcacctccttccatcgtttgacgagagcgtcgtttggctggaagttacggaggagacgacggagggcggcgtcggcgagaagggctcagcgcacctccttgatgaggcggagagcagcgttggcgagaagggcgcagcgcacctccttctaccgtttgacgaggcggagagcgtcgtttggctggaagttacggaggagatgacggagggcggcgtcggcgagaagggctcagcgcacctccttgatgaggcggagagcagcgttagcgagaagggcgcagcgcacctccttccaccgtttgacgaggcggagagatag

SEQ ID NO: 27305 - DNA, 306 bp, Zea mays
  Peptide Sequence Number=SeqID_70680
atggagagcgtcgtttggctagaagttacggaggagacgacggagggcggcgtcggggagaagggctcagcgcacctccttgacaaggcggagagcagcgttggcgagaagggcgcagcgcacctccttccaccgtttgaagaggcggagagcgtcgtttggctagaagttacgaaggagacgacggagggcggcgttggcgagaagggctcagcgcacctccttgatgaggcggagagcagcgttggcgagaagggtgcagcgcacctccttccaccatttgacgaggcggagagcgttgtttga

SEQ ID NO: 27306 - DNA, 2247 bp, Zea mays
  Peptide Sequence Number=SeqID_70681
atgggggtgtctgataattttgctgtggagttgatggggacatgtgcggcccccaggggaaggatgtcttcgcccgagctccgggagtcttcggcgcgaatgctggaggttaccgagggtcgatggccaaagaatcttccgatcccctgggcggagggcgaagacatgtctacgtctcgtataactcgtggcttgaggattttcccttacggacggaatattgttgctgttgtgtcggcagtgatgaacaaggaccgtcaggacgctgtgcagaagcgtcaggcggtcattaggatcgcagatcctaggcgtgaggcaaagaaggcgcgggggagcacgaaggctgcggcccccggcagcagccagccgatgccggctgcgaaactggccatgcctggatccagcaagtcatcggcgagcgcgaagacagtcggcgccggtgggaccaagcctcccccggtcgaggctgcgaaagtacgggagctgccctcgccgggaaaacgtgttgccgacttcggcacgaatatcagcgtggaggactattttgttgggccgggtgagggacaaatggttgttgtcccgcctttggtggagaccacttcgccatcggcggtggtaagggcgaagggaactgcgcaggacctgtgggccgccttctgcacaagcggcgagattctgacagccgctgccgctaaggacgtggcaggcaccatgtcccagcggctgagggatgcatcgcagcggctgtcgcaacagctgagtcaagcggccgactttgccgaccgtgttgcgtctggcatcctcactgcggacgtggctgccgaagtcgagagacttcgggcgcagcacgcggacgccatccgggagaagtcggctgcggagagcaaaaaccgcaggctggcggagaaagtggccgccttggaggccgagaagacggatctccggcgccagctggtggaggaaaggaaggaggcgaaccacgccatcgctgaggcacaggctacgcaggcggaggccaaggtggcgcgggcggaggcaagtctcgccagccagcgcgccgaggagtgggaggcgaggttcaacgccctgcacggccgcgtggacaaggtcgaggcctctacgcgctcggaggttgagcggacgctcgcccagttcgtgaactcgtaccgcgagctgggtgcgcgtactgctgacttcgaggtgcccgaccgggaagcgggccttcgcttcctcgagtggttacaggaggagttgctggtactcccgaccatcgtcgagggtttcatgtcctttgcctccctcgtcacctgcgagggggccatgaatgtgttgtctcgcgagggctgcagacactacgaggtcttcgaccaatcaaacgagagctttgagcgcgagatcttcaaggccgaagaccctgttgtgaagcagtcagcgggggcactttttgataggatgtgggggggcgcatggtcgggaggctgtcagggagcgatccgaccgggcgagagagctggtgaaggttattatttttgtgtgatggagcgtgccaaggacgtcgaggaccttggaggtctagtcggcgtgccgcccgaggctgcagagggcaatccggtgctacccttggatgccggtgaaggcccctcggccgtgcccgtgcctgctatggccgacgaagaccctgcgtcagcccctgagccgacggtcgaaggtgccccggaggtggtggcggagccggcagtcgaagaccccacggccgcggtcgtgccttcgcaggttcagggttttgggcctgcgcacgcaaccgctactaacaatgctaattttgtggtggcttcgaccgtggttgctgaaaatgattcagatgattctgtgtctaagatttttgagtctgatgattctgggagttcggttgtgtggacgaaagagtcttcagatgaggacttggattattttgcggccttggatgtggctgtggcggaggcttctccacgtgtgatagatgctaaacttcctggtccgagtgctgggcataggcggcgaagggcggtggcgaagcggagagtgagtgaggtggagggtggtcgtcttcgtgtggacggggctagcaagcgggaattgttgtccttgccggttggggcgagtgtaggtgagggtgagttgcgaaatctttttgagggtgaggagttgaggataatgttgttcaactatagggagatgggtatcatcccgaaggttgagccaatgtaa

SEQ ID NO: 27307 - DNA, 1236 bp, Zea mays
  Peptide Sequence Number=SeqID_70682
atgcacgtggtcggcgactttctaaagcaccggatcgcgccgatgcagaggagggcgcgcctatgttgctggttgaccggcgcgaacgacatcggtaggatccagcgtgggccgggcaccaacctatcctgggacgagctggcggtcctggtgggagggattaccggagaaacctttgtccctgagtccctgatcctcccccagaacatcccagcgctttgcgacgacctagggctaaggacggcgatcttggccatgttgccgaccctcgacgagagcggcatagcggtccgccaaactggaggccgggacccccactacaggatccggatctccgatgcaccggctggaggtccccagccctctagtgcggctcccagcgcccccgctgtggcccccagccccttggataagggtaaaggggctgcaagcaatgcctccgcccaggtggcatcggggggtcggaggaagagaggcgacgccgcctgcgtcgcgctgacgggtcgctcgtttcagagcctccccagaagcgccagaggaccgcaggcggggccgaggaggcgagctcccaggaccatggcacgcagaggcgcgtcagtcctccagtcccgccgctaccaccaccatcgggcccgccaccaccaccaccaccaccaccatcggtcccgccgccaccaccaccaccatctgggggtgatctcccccaggggcaccaacagcaacaacaacaatagcagcaagagcggcgatcttgcttccaggggcttcctccccctcaactcccaaggccatacctcctccgccggtttccaggcccaccgacgggtctggctctcagcagcaggcatctgctggaagtggtgccagcgatctacccccagctgctgccaagacaacgccagcagcttcccatgctccagccgggggtccggtggcagcggcgccagtgtcgggcagcgtcgcagcggcggaggaggccctagttgggggtccacgccacctccggacgctgagggcgatgtaggaggcgcgtccagctccaaccctccgcctgctccggaggagatggaggtggtgttcgggcggcgcctccagtcaggtgccgagcaagaagcggcaccagtcccgctccctcgcatgttgtcccgtgcccaccaggtccttagtgacactggggtggcaatcttgcgggagtgggaggcgctagaggatgagcaccaacgcctcagcgactag

SEQ ID NO: 27308 - DNA, 366 bp, Zea mays
  Peptide Sequence Number=SeqID_70683
atgtgccacctcatcactcggccattttcctcaaagaaactcgaagaagctggctatcactcggcgttgcctctaaaacgccgaccatgggttcaatcgctcggcgttacttctaaaatgtcgacgccgactttcaaccactcggcgctgcctctaaaacgccgaccacgtgttcaatcgctcggcattgcttctaaaatgccgacgccgactttcaaccactcggcgctgtctctaaacaccgaccatgtgttcaatcgcttggcattgcttctaaaatgccgacgccgacattcaatcactcggcgctgcctctacaacgccgaccacgtgttcacacgcccagcattacttctaaaatgctga

SEQ ID NO: 27309 - DNA, 660 bp, Zea mays
  Peptide Sequence Number=SeqID_70684
atggccttgctagaccctcccgagtgcttccagtccgaggtggcactcaacttggtgcgcaacctgctcggatggggtgcgctagcgctcgccggaaggatccgtgtcggtgcctctcccctcggcgatctcgccgccagggagttcgtcctcttcgtctccaacttcccctgtgggttggtgctgccgatctcgtccttcttcgtgctgctgctggaggagctcggcctccaacctcagcacttcacgccctgcttcatcctccaagcagccgtcttcgcctacctctgcgagatgtccgtgggagcgacgctccttccgctagcattcggacgaaagggtgctgtgcagcgaccttccaggggtggaaagcaagctgagctgtggctccatcttttgcgcctccatctctttggctctaatggcctcgatgtcacctccaatggtgaccgttggtccgattgccgatacggaagacgccgtccgggagaccaatcgatcaggcttacgagggcggacctcacccggctggcatacacatatgcacaacctagttacaaaaagaagaaaccccaacccctcagacttgctcctatgtatagaactttcgaagatgctctatgttccaaaggttgggaagaggcactccttcagttgtag

SEQ ID NO: 27310 - DNA, 354 bp, Zea mays
  Peptide Sequence Number=SeqID_70685
atggccggcgaggcgagcacggcactagtgccgctagggatgagccctattccggtgtcggagttgccgacgtctatctccgacatgcttccggtgctagacttcgccgctgatcgcctccgacgcctggaccaaattcttggtgcccgcttggaggcaaagggtggcaagctctaccgggcggtgattgaatacgtcttgacatgcttccggagtcatgacccggccatatctttggagtcggtgatcgctggtccggaggccgccactgaagacgccgcccgagagagcgtacaaaacgccatggagctggtggccgagcgcttccagcacgaccctgctgatgacgagtag

SEQ ID NO: 27311 - DNA, 453 bp, Zea mays
  Peptide Sequence Number=SeqID_70686
atgggcaagaacaacaagcgtaagcgtgagccgactcctccatcagaggagttcggcgactcggagtactcggaagaggagttctcctccgagcccgaggggtctccggctcccgtctctcccccggcgtcgtccgatgactcggacgactcccaggggatagccgcggaggtctggacatacatccgggccgtcgagcgctccgggctcgaaggctcggatgagtcggagtactcctcggatgaggaggactcggacggcggcgaggagggtgaagacgacgacgacgacgacgacgacgatgacgacgacggcggcagcggtggcgggggcgacggcgacggcagaggcggcaccaagggcggcagcggcggcagcggagatagcaccaggggcagcagcaggggcagcacccgcggcggcggtggcggcaggggcagggccagtggctag

SEQ ID NO: 27312 - DNA, 1065 bp, Zea mays
  Peptide Sequence Number=SeqID_70687
atggacgagggttgcattcaacccctttcaagtgatccgatgatcaacttgaataccacggtttttcctttagatgattattcccgtttgcgaggaatctccacaagattggagtctctcgcccttacaacaaagatcacaatgaaagcacggatcagcgagaagggctcagctcacctccttgacgaggtggagagcagcattggcaagaagcacgcagcgcaccttcttccaccgtttgacgaggcggagagcgtcgtttggctagaagttacggaggagacgatagagggcggcgtcggcgagaagggctcagcgctcctccttgacgaggcagagagcagcgttggcgagaagggcgcagcgcacctccttccaccgtttgacgaggcggagagcgtcgtttggctggaagttacgaaggagacgatggagggtagcatcggcgagaagggctcagcgcacctccttgatgaggcggagagcagcgttggcgagaagggcgcagcgcacctccttccaccgtttgacgaagcggagggcgtcgtttggctggaagttacggaggagacgacggagggcagcgtcggcgagaatggctcagcgcacctccttgacgaggcggagagcagcgttggcgagaagggcgcagcgcacctccttccaccgtttgacgaggcggagagcgtcgtttggctagaagttacggaggagacgacggagggcagcgtcggtgagaagggctcagcgcacctccttgacaaggcggagagcagcgttggcgagaagggcgcagcgcacctccttccaccgtttgacgaggcagagagcgtcgttttgctggaagttacggaggagacgacggagggcagcatcggcaagaagggctcagcgcacctccttgacgaggcggagagcagcgttggcgagaagggcgcagcgcacctccttccaccgtttgatgaggcggagagcgtcgtttggctggaagttacgaaggagacgacggagggcagcgtcggtgagaagggctcagcgcacctccttgacgaggtggagagctga

SEQ ID NO: 27313 - DNA, 474 bp, Zea mays
  Peptide Sequence Number=SeqID_70688
atgggtaggggtaagaggcgcaggggcttgcctcgccgtgccgatggcaagcgcaagcgtgccccaagtcctccctcggaggattttggtgactcggagtacttggaggaagcttccaccgagctcgacaggtcggatgactcggaggaggtctcctcagaagaggtggactcctccgactctttcgaggagtggagcggcagagaaggtgacgacggcgaggacgatggcagcagcggcgatgacgacgacaagggtgacagtggtggcgaatgcgaaggtgacgacggcgagggcgatggcgacgacaaaggcgacgacggtgatgacaagggcgacagtgatggaaagggagatgacggcaacaaaggcgacgacgatggcagcaagggcgacggcggcgagggcgacgatgacggcatgaagggcgacgacggcgacgacaaggccagtggcataatgctgctggtttag

SEQ ID NO: 27314 - DNA, 2463 bp, Zea mays
  Peptide Sequence Number=SeqID_70689
atggcgtttcacgtcgcgtgccccatcacttgcaggagggtgtgcgactgcgagctagggttcggcgcgtcggcgtcgaggaagggaggaggtggcgcgttggcggcggtatgggcgggcacggcggcggctctcgaggattttctcgcggatccgtggttgctgcggccggcaggggccgttgacgcggatgcggcgacggtgcaggtggaggtgccgccccttgagccggcccctgaggatggggaggacgaggcccgccgggcggcagcgcagcgcggcgccgccgcggcagaggacctcgccaggcgcttcgagagcggcgcctacggatcgccggaggcagaaggagatgaagacgagtgggatcgagaggatcaaggaaatgctgctgtcaagaccttttccactggagctcatgggtctgtccttcttgccgcagttgtgaggttggttgtctttctatttccagctattatcatgaacttctacccctcagtcaagtttggcctgttcattcttgttcttgtgctatgtttgaatttgcatcttgatagcatttatcacttctgttacatggtgtgccgacgtcctggcgaccccaacaagttgatgttctgtaaaaggtgtgatgacccttatcactgttattgtcagcaaccatcgcacaagaatgttacccatgggccatatttatgtccaaaacatacaaggtgccacagctgtggatctggtgtgcctggtagtggccatagcacaaggtggtttttggggtacacatgctgtgatgcgtgtggacgattgtttgtgaaaggaaattactgtccagtttgcttgaaggtttatagagactctgaagtgatacctatggtttgctgcgatgtttgtgaaaagtgggtgcatattgagtgtgatggcatcagtgaggaaaagtaccaacaattccaagctgatcaaaaccttcagtatacatgtgcagcatgccgtggcgaatgctcccagatcagggacactgaggatgcaatccgggagctttggaagaggagggatgttgctgatcatgagctcatgattactttgcgggctgctgctaaactgccttctcttgaagatgtgtcaccgctttatccaaactcggatgatgagaaacttggtgcatacgtattgaaaagtgagagtagaaatacactaaaattttcattaaaaagtaacagtagtaagcctccaccggatacacctgagcaagagaaggttgtttttaagagctctggatcaaataaaaagccttccaaaaagaaaggtggtcagggtaataaaacaaatgatggccatgatgaaatatttctggagaggaggcatgatgttaaatcatcaaatagccgtttgggagatcaaagtatagatggcaatcatgatatgagcccttttaagaatgatgataatgcctatatttcatcttcaactcgaagttcagaaaagaatttgaaatctccatccatgaaagctgtgacaaacaatgctgatatgatacccaaagtcaagattaaaggcagtaaggtttcgagtttgcattacaaagatggtgaagaaaatacttccaaggctgacactggaaaagctaccaagttggttatccatcttggttcacggcataaaactaggagtggctctcctaagtcggagctgtccaattatcaaagagagcaagatttaggatcaatacatggacggaaattagatgtcacaagccagctgaaaggttcaagaagcgaggtaaaagagagaagtgtaatgaagttagttagagagactggggtacaacaaagaaatagccttttgggtgatcttggtacctcaaaaaagcatgcaactgggaaaaggagcaatgctctaatttctggaatggagaatggaaatgaaactggtactagaaaccggccatttgcacagaaacaatctcattctagtcaggtggacgagaaccagggaactgctgactctcctgataacttgaagccatcattgctcaaactcaagtttaagcgtccacattatgagcagctaaacacccaggcctctcaaccagaggagccgacctcctgggtttctcagcaagaagaccagttcaatgttgctaaaggccagagatcaaagaggaagaggccttcgatggagaaggcagatggtttggatggtacgactccagccaagaggcatcatcagagcactgatgatgaagtgatggacgcaaattggatcctacgcaagttgggcaaggatgctatcggaaagaggattgaagtccatctaacttctgatggcaaatggcatcaagggatggtgtcgaatgtcatgggtggcacactgtgtattcagttagacaatggcaggtctgagaacgtggagctggggaagcaggccatccgcttgattgcttcaagatcaaagggccggaagcgatga

SEQ ID NO: 27315 - DNA, 480 bp, Zea mays
  Peptide Sequence Number=SeqID_70690
atgagcccaccatgcaaggggaggaacctccccatcgagaagcacgacgatgaaggaacagacgtcggaacatgtggcaacatcatgaagccgggtaacgggatccgacgcagcctgtatcccgagacgaagcctcagaggtgggagaaactcctgacgaacgagtgcacaaagaaaggtgcaactctcgctgccgcgatcaccgataagcccaagaccgggagcgagagctggccgagcagaacgctaggctttggcgagagaaccctctcctcgctcgaaacctcactcactccgcgtctccgggccatccggtggcctcccaacttcaaggtctccaacatcaacaagtacgtgcctaagaaggacccaggcaagccatgctgcattggctctgacatctacctcggcactgcatcgatgattggagcaactttagtgtggcggaactgcctgaattattccaacttaagtgcctaa

SEQ ID NO: 27316 - DNA, 486 bp, Zea mays
  Peptide Sequence Number=SeqID_70691
atggagcagaggattacccggtctacgttcaccggcggtcgggcaaagtccggcgaccgtggactggcttctccggcgaagcaaattctgattccttgctcggggagcttcaccgaggcgcgggcgcgagcaggcgacgcaggcatggcttggcgtggcgcggggcgcgtggggtcgggcgcgggcgtgctctggcgcgcgcagaacgcgtcgaacacgtggaggtgttcatctacccgtgttcaaaagcttgctcgcgcctatggctatctgcccatgtgcaaacgtgcgaatcttggcaaaaatccggcgcagacctcttcctggcgcctatggctatctcttgtatgtgagttccaagggaagataagccctaggtcagaagatatgcggacaccaaatctggcttgtctcactgcccacttcgcgacaaaaaacttaggtggttttggtgccatctacaaggtgaacacggtggatctttag

SEQ ID NO: 27317 - DNA, 168 bp, Zea mays
  Peptide Sequence Number=SeqID_70692
atggagagtcatgatctccgggcagaatgggaatcacaacttgtgggtaatgtgtgcaacctctgcagagtgttagaaactggttgtcccgactgtattcagtgctcaggaggagatgctggcaacatggagaactttgaggagttccaggattacgacaagttctag

SEQ ID NO: 27318 - DNA, 504 bp, Zea mays
  Peptide Sequence Number=SeqID_70693
atgggtcagaggacacttgccttcaccaagctgatgctcagggacttcttctgcaacttcctcgggaaacacagactgcccgttgtctacgcaaacagggagcaagggagggaaaaggagagggcaggggagattccttacctcaaggcgtaccccagggacctctcggtggcggcgaaggcgcgacgacggctcgggtcaacggtggcggaccacggcggctgcgcggaggacggcggcgtggggggggggttgagaagaggttctgcaggtgcgcaaatgagggagggagagggtgagcggggctctagggctcaagtggccgagggcggggcggttgcgagctctacgcgcgacgtggacgcggagtcctcggtgcgcgcagctcgggcgggcggttacgcggggacgagggagctgacagagggggcccgcgagcagagagagcgagggagcgggcgcacgcgcgaggaaagcggccgcgctgataggcgggcccgctag

SEQ ID NO: 27319 - DNA, 978 bp, Zea mays
  Peptide Sequence Number=SeqID_70694
atgcatgagctgcgactagagcttcgcatttggagctccgagaatgggctgatgctacgaaagcccaaaacgaaggaccctttatatgcagaacccgcacgagcccagtctgatgtggggctcatactcccagattgcgtgcttgagcctttaccaaaaaatcgcatctttcgggagtctccacgcaaaatctcgcagaaccacgcgctagccgcctttgccccacagagagaccttgtccagaaaaccctactcacgcagagacccatcagcaaaaccgcctcgcttaccctcctcctctctgtgctcctcagtccgcacctctccccgccgcccgtgtcgcccgcgcctccaaatccacttccaaacgcaaatccaaccaaaccatccccgaatcctgcccaaatttcctcaaaacgcgtcaaaccccaccccttccgcccgaattcatttcgaatcagactgacgcgaccacccatctgggctctggccgcctcggcccccatcgcctccctcccatggcgtttcacgtcgcgtgccccatcacttggtaagctccctcagtctctgtctcatcactcctacctcttctttataacgcccgcgcgctctgatgggcgggtggcatcgccgcctccctccctctctctgttcctctgcagcaggagggtgtgcgactgcgagctagggttcagcgcgtcggcgtcgaggaagggaggaggtggcacgtcggcggcggtatgggcgggcacggcagcggctctcgagggttttctcgccgatccgtggttgctgcggccggcaggggctgttgacgcggatgtggcgacggtgcaggtggaggtgccgccccttgagccggcccctgaggatggggaggacgaggcccgccgggcggcagcgcagcgcggcgccaccgtggcagaggacctcgccaggcgcttcgagagcggcgcctacggatcgccggtcagctga

SEQ ID NO: 27320 - DNA, 1848 bp, Zea mays
  Peptide Sequence Number=SeqID_70695
atgaggagtccaggtctgaatattggacaaccaaggcccgtagcgtggcagcggtcggcatatgctacggagttggtggtggtgttgtgtcgcttcggcgagtctaaggctgggaaaacacttgcattctctcgtccttctcggattgacgtctggttgttttgtatctcctcgtcggacccagcgttccagtcgagcatggcttcgattccgcctccgtcttcctccgtcgctgccctcacccgccaaccggcccagttcttgaaatggtgcagtgtatccaaggagacaaaggcatcggtctgcagtttcttggctacaaattcaaacagcactagggtgaaatcagtgggcttgagagtagcattatccttcaaaaatgatggtggttatccagctgacggtttctctgggaatggcaacacgctattgccaaaaagcacatccgttcgtggcgaggaccatccggttgctgatcctgtactcccaatggattcaatgatgacgccagaaatcctctctgctaatttggcacttgttatggacaagttctcagatgatgacacagatactgaacttgatttggatagcccgacagagggcttcgcgtcgattccagatgccattgaggaccttgtgattgttgttgatgacgaatcaagggaaaatgaaggagatctgataatggctgcctccttggttaccccagaggcgatggcttttatagtaaggcatggaacaggaattgtttgtgtcagcatgaaagaagatgatctggaaagactgagccttcctttgatggttaccacaaaagaaaacgaggagaagctatgcactgcttttactgttacagtggatgcaaaagagggcacaactactggagtatctgccaaagacagggcaaaaacagttatgactcttgcatctcctgactctaggcctgaggacttcaaccgccctggtcatattttccctttgaaatacagagaagggggtgttctgaaacgagctggacacacagaggcatcggttgaccttgccatgctggctggattacctcctgttgctgtcctttgtgagattgtggatgatgcagatggttccatggctcgcctgccaaagttgcgtgtctttgctgaaagggaaaatttgaagattatatctattgctgacttgattaggtataggaggaaaagagacaggctagttgaacgtgcttctgttgcacgcttgccttcgcaatggggcaatggccatggatattgctacagatctgctattgatggcatcgagcatcttgccatggtgaaaggtgatattggtgacggccaagacattttggtgagggtgcactctgagtgcctcacaggcgacatttttagatccgcaagatgcgattgcggtgaccagcttgcaatggcaattgagatgattgagaaggccggaagaggcgtaatagtttatctccgtggacacgaaggacggggtatcggtctgggccacaagcttcgtgcttataacttgcaggatgatgggcgtgatactgtggaagctaatgaagaacttggtcttcctgtggactcacgagaatatgggattggcgcacagatactacgggacctaggagtccgttcgatgaagctgatgactaatagccctgcgaaatatagtggtctgaaaggttatggactgagcattgcgggcagggtgcccttggttacgccaattaccagcgagaaccgtaagtacctcgagaccaaaagaacaaagatggggcatgtatatggattggctaatgcgcaggttaaccagccaagtggtagccagagcacagaagagaagcattga

SEQ ID NO: 27321 - DNA, 495 bp, Zea mays
  Peptide Sequence Number=SeqID_70696
atgggcaagggtaacaagcgtaagcgtgagccgactcctccgtcggaggatttcggcgactcagaatactcagaggaggaattctcctccgagtccgagggatctccggctcccgtctctcccccggcgtcgtctgatgattcagacgactccgaggggattgccgcggaggtctggacttacatccgggtcgtcgagcgctccgggctcgagggctcggatgagtctgagttctcctcggacgaggaggactcggacggcggcgaggacaaagatgacgacgacgacgacggcgacgacgacgacggaggcggtggcgacgatgacggcagcaacggcggcgggggcagcggtggcaagggcagcaccagaggcggcagcagcacgggcagcaccagaggcggcggcggcaagggcagcaccagaggcggcagcagcacgggcagcaccagaggcggcggcggcaagggcagcagcagcaaggccagtggctaa

SEQ ID NO: 27322 - DNA, 141 bp, Zea mays
  Peptide Sequence Number=SeqID_70697
atggcggttctggagggaaccattggtggctcctggtgtcaaagaaaagggtgcttcaaggagaagcaatttcgtgtggagctgtcctacactgttggacctgaggccgtcacctctactcctgcttcctggcgtttctga

SEQ ID NO: 27323 - DNA, 573 bp, Zea mays
  Peptide Sequence Number=SeqID_70698
aaccctgggctctgtataactattggaagccccgaccacccaccgaccagggcccacgatcccacccacgcgctcgcagttatccaatcccacgccgccactataaaaacacccccacgccgccagggattaggttttagcggcggcggtggttccctcaagcgtgcgagcgtcagtgatcctaggggccagcagcggtgccgccccgaggcaggcgacctacggcggcgctccaccaggaacgagcgacagcgacgctcccgaggtgggcgcgcaagcggcgacggcgttctcgaagcggacggacggcggcagcgcaccctaggcccgatggcaacgacgtttgtcccgttcgtctctgcgatggccaccaccgctgccgctccaacgtctgtggcgtcgtcccctgcgccaaaggccaacaacagcaggaaggcggtggtgcctaggatgactgggtacaagctgcccaagcgcgtcaaggagtcggcggtgctcagggatatcctcgtcgtcatcatgtcatcggagaacgtgcccacccgcatcatcccgctgcctggaggagtttga

SEQ ID NO: 27324 - DNA, 540 bp, Zea mays
  Peptide Sequence Number=SeqID_70699
atggatgaacaaagtgcaaatcacaagttaagttgctcatggttgatggaaatggattgctccatgcgcgagagcttagatggtcagtttagtaatatatctactgatccaataaatggtgctaaattggaggctgaagttgcaaccaagacaattgaaatgtctaaagtacacaggctgcaagatgggtttgagcaaccattggctgatgctagctgtgatgggcaagaaaactctgacgcccctgtttctcatccagcattagatacaaaggagcaggtgcgtcgtgaggcgacggaggacctggccgaggatctgtcagaaggcgagaagggagacaccatcgacgagtttgcgccggttgagacgaccaagaagaagttccagaggaacttctctgaccttaccgtctggtctgacgacaataaggagaagaagctttacattgtgctcatcagcatgcatggtcttgttcgtggagaaaacatggaaataggtcgtgattctgatacaggtggccaggcctgggtttctctttga

SEQ ID NO: 27325 - DNA, 1287 bp, Zea mays
  Peptide Sequence Number=SeqID_70700
atgaacaaaaacactggcattcaaagtgccattacaaacggaactccggttccccctccgcaggtacgaacaaccccactcgataggggtgggcctgcggagcaacagaagaccgacgaacggcgcgccgtcacccgctccagcagcggcgacgacgacgacttctgctccggggggccgaacagcggcagcactgacctcagggcggatgctgctgccaggaggcccccgcccatgcccaaacttgtgaggcaaggacgggcagaaggccgtagagttggaggtcggtccgtggccggccttggctatctcgccggcggaagaacctcttcaagctgctgtggcagacgtcggcgccgcgagcggctccgaagccactcgcgtccgagagccaggcacggtgcagctgccggcgccacggacgacaaccgcccttccctcccatcactgagtgaaggagcgggccgccgcccacgcaggggccgaccccaacttggcacactcccctccccagccctggtgatgaaaatccttgaggctgagggaggggcagaggccgcagcccggctcgctttcccccaccatcaagctggaggtcaccatcttgggagaagcgggcgacgcttcgccttcgccgtaataaccgcgccaaaaaagggaccgggaaagggggataccccgaaaaggatccttccccatgaaggaaccaggctccgagcctccttactgatcagaggttcgaaggctggccccccgaagggtttcaacagccgcctcagatcgcgtgggccctacacccactactggtcagaggttcgaaggccggccccccgaagggttccacggccgcctcaggctactcgggcttcgcgcccattactgatcaggggttcgaaggctggcccccgaagggttcacagccgcctcagacgccgagcgagggatgaccaggggtacgttcgatacataaccgaggctcgggctgcgctcccgagctcaccggagacaccatgttcggcgcccatcgagggtaacatggcgctttcccccctcctccttgcggaaaggcgacgcaggggcgtatgtaaaaaagccgagtctgtccctgatcgccctctcgccctgtgcggaggctcgggggctgctctcgcaaacccggctccggccgaaccgttgacagcgtcaacataccagcccgagaacttgggccccgaccgtacacccgggctacggccaatacgcatgagggaacaaccagaccagcctaagcattacgcaaggcattaa

SEQ ID NO: 27326 - DNA, 627 bp, Zea mays
  Peptide Sequence Number=SeqID_70701
atggggaaagctggccaaagatttcacaccttcgctggaagcacatctactaataccaaacttgcttttttagacttgccacttgaaataaatgagaaggcacctcgatgtcaccccaacgcgacgctctctccaattgaagctccagagttcaggatcaagtcagaagcgaatgggtatacctttcttaagtgctctgctgtgtggtctgcatttttatgtacttctgtagcttcaagctccaggaaattcttttttcctcaaccacaactccacaagtatgccgagagcccgagaggactgcaacgactccttaatctcttccaccagtcgtacaacgatccggggctagaaatgccacgtaggaaggacagattggcccaagaaaggatcctgccccacgcctcggcagaaaatgggcagtctttacataaatgggccacagtttcctgtgataagttgcataggcaacaaattggattgcaaggccatccccgctttcggaggttgtccgcagtcagaatcctgttatgcaacaaggtccatgcaaagaagcgacatttgggctcagttctcgccttccagataggacagattttcattttacaaaagttcgtggtgaactga

SEQ ID NO: 27327 - DNA, 2073 bp, Zea mays
  Peptide Sequence Number=SeqID_70702
atgagtttggaacctgttaagccgaaggaaggagaggatgaggccaagtcatcatgcccttatgccctgggcggcacacgtgctacaatgggcgggacaaagagtcgtgatctcgcgaggatggacgaaggcaggtgccaagtcctctacaatggcatcatcatatgcatccacgattcaatcatcctggatccacttgctgttttgccgcggctaccccgatcttccgcgatggagcaccaagacgccgccatctgcaagctgctcgatgaaatgcgactcatggaggcgcgtctgtccgagcgcatcagcggacgctgcgacgacgtcgagcaccacctggacgagcaccgtgaagagccctgtgacgagacgtctcgcttcgacaagggcatccgcagaccgcaggaggacagagaacttgtccagcccccgcgacgagtcgagtcggctacttgcgtcgagtcaagcgttcccagggcctccagcaccgagctggacagggagttcatcgccgcctccgccttcgtcacagcatcagttgcctccagcaccagtgccctcgaggcaggcgcacacgtggacgtggctggcgaaccggagtttccgcctcgtgtcaccctcgatggccaccccgacgacgaactcctccatgtcgaaggggcggtggtccggccacttctcgaagagcgtgagcagcagcacggcacggcccagagggtcatcgttgcgcggggacaatcggtcctccaccgtcagtaccagctggactcgtccccgctcgactcctgcaacatcttcgctcctgaaagaccggccgaccgggagatggtcgaggcgtcagccgtcatggtggtgtgggcgtacgacgccgcgtgcgaccgcgtcggcgtgcaggaggtgaagcacgcgtgcgaggtcggatgcagcggtggcgagatgtgccttttcacggacctcctcggcgacttgctctgccgcattcaccgctcgccggactccctcatgttggtcgtggagacaacaatcggcaccaacagcacggagatcgccggaatcgttcgcggctgcgccaagaccgccgtctctgttggcaccacccagcaggccaaagacgaccccatctacaccaaggttggctccatccttggcctccgcgtctcgcccagccactggaggaagggcatggggaagaagctagcggatcgggaggaggacgaggttgtccaagcctcatacacgtacaacatctacaacaactgggctccattggaggatgcactcagactgtttgatagaatgtgcatggagcatgactcgcccaggacaagtgctgtgaaccttgggagctttaatgtgatggttgatgcatactgtcatgctggaagaggtcaatatgcgattaaggtgtttgggaagatgccgagaagaggcctgtgccagatgtactcctccaataatctgattgactggctagggaagaataaacttgttgggaagtctgaaggatggtacatggaggaagctgcaagagctgtattgggtgagtggaataaagcaatcatggccaccacctgtgcaaacggaaagatagctacgatttgccatgatgcaagtattgcccactctgagcatcagtacgttgctactgggatgcctacagaagttgttctggaggttttggttgagaacatgggacttcctggtggttataccccatctttcgattcatctgatttgcgaaggagttgtcagtggtggaataatctggccaagagagtagcaactctggaatttgatcgcactcgaaagtcaatgggagttattgtgaaagcaaactctgggaagaactcactgcttgttaagggagctgtagagaatctgctagagagatgtacctacattcagttgctcgatggatctgttgtgctattggatgatggtgccaaggcactcatattatttacactccatgacatgtctgccagtgccttgagttgtttgggttttgcttacaaccctatgaaggtcaaactggcatggtccggcatggatcctgccttgcccacctag

SEQ ID NO: 27328 - DNA, 1407 bp, Zea mays
  Peptide Sequence Number=SeqID_70703
atggcggacctcgaccttgcctgcccatcggctgtggtggcgcctatggatatgggtaccacgacatcgatatggtgccaaggtgcacatgtctcttcaaggggcaagtatggcgatgatgtgtacggaaaaggagatgtgctagggttgtacatctctgtacctcatggggagaggtttgagcttcaagacacctcggggcggccgttctcggcgcatcggaagccgacgtcgaggaaccccaccgccgccgccgccgccagcccagacccagtccccgtcgaacaggtcgcactcctcgccgccactccccgccgccgcaatggagaccccaccggcccagagcctcccgcgcgcggcggccgccgcggccagccccgccatctcggccttctcccgccgccccttggccgcccgccgcagcaggcacttcaccggcgagcgtggcagcattgccgccgcctacctggtgcctcagcgcgcggggctggccgcgcgtatctcccaaccgagctcctgcttccagccgtggtcctcagcgcgcggggctccctcctcggcctctgctcctcccgcgcccggttcccatcgccgctctcttccccagccgcgccctgccctctgttctgctctgctcgccgcgccctgaaccttgctccagctcgccggctggatctccctagtgtcgcgcccctgctcatcttcctcgcgcgcgcctcctccccatggccggcagcaggcaggcaggtcctagcagactgcttgcgtcttggcttaccgctctcgagggcgctacatgatgaaggcgtgggaccaatcgacctacctttcatgcttctcagggccatcacaaaagatttctctgatactcaactaattggcaggggtgggttcggagaggtttacaagggagtgcttccaaatgggatggtcgtcgccgtgaagaagcttcttgacaagatcgatgtcctagaggcgaatttccaaagcgaggttgcttgtctcatagaggtcaagcacaggaacatagtccgatgtctaggggggtatttggcacctgaatttctgagcagcaatgcaatcacattcaaggcggacatatacagtctaggtgttataatcactgagattctgacggggcataaggaatgcaccagtgttgacaagtgtacgccgcgcctctctcccctcctagttcactctgtgcgctcctcggcgcgtgccctcgtctcccgccgcttccacgagctcatacccgttttcgactccgtcctcgtccgcgtcgactgcgttatcccgacaaccccctcctcctcgtcctcctcgtcgacgccgtcctctcctacagcgtccgtgcgcacccgcggggtcttctcacagattgcgcgcatcgtgctcggcaacatc

SEQ ID NO: 27329 - DNA, 690 bp, Zea mays
  Peptide Sequence Number=SeqID_70704
atggggcacgtgcgtccactcggattacccgccagcagctcactggagacaccatgttcggtgccctccaagggcaacatggcgcttttccccctcctccttgcgggctcagactcgggctcagcaccggaagacgacgaactccgcctcgcccgacccagggctcggactcgggctcagccccggaagacgacaaactccgcgtcgcccgacccagggctcggactcgggctcagcctcggaagacgacgaactctgcctcgcccgacccagggctcggactcgggctcagccccggaagacgatgaactccgcttcgcccgaccccagtgctcggactcagccctggcctcagccgacggtctccgcctcgcccgacccaggggctcgaactcgacctcggccttggaggacagactcgacctcgacctcggaggagcctccacctcgcccaacccagggctcggatcgaccacgtcacaggaggtgccatcattaccctaccccaagctaactcaggctacggggaacaagaccggcgtcccatctggctcaccccggctccagtgctcctccgacggccacgacaccacacgaaccgggtgccaaaacctctccggctgccacgatggcatggccctcttacagagggttggccgcgcggggaaggacgggacggcgctcgcgtaa

SEQ ID NO: 27330 - DNA, 447 bp, Zea mays
  Peptide Sequence Number=SeqID_70705
atgaacaagacaccagcactcaaggtgccattacaaacggaactccagttccgtccccgcgggtacgtacaaccccccacattggagggcccgcgggacgacaaggctccaggtcgcccaccgtcgcccgctccagcagcagcgacaacgacctccgctccgggtggccgaactgcagcagcgatggcctcagggtggacgccgctgcaacaatgccctcgcccacatctacgctcgaggggcgtggacaagtacaaagagccggaggcccggagcgcggatggtggcggtgatcccgtcggcgacgaggacttctccagccgccgccacctcggcaccgacgacaggagccgtctgcccaccggcagatccccactcggatcctcccggacgagcggagcaccgacctccgtgcagaggcgccgtaccggagcaaaggcaggatag

SEQ ID NO: 27331 - DNA, 345 bp, Zea mays
  Peptide Sequence Number=SeqID_70706
atgggtcgtccgatcaaaacccaagcgccaggattcaatcctacatatgatgaaccggccgcgcaaagtcgatcggacgatccgaagatcgcccccaacctcagcccaacgggggagcgccgccgagacaaccccacggcggagctggtcgctgatgcccatcgtccgacgcccccgagcccgaatcccatgattacttgcccgcgcacaaccacccgaccccctgaattcgaagaccgacagcagggtcaagcgcctgcgccaatggcggagtccacggaacttataagcttacacgcccccgtggatctccatgtgctggtgcaccatcccagggccacctga

SEQ ID NO: 27332 - DNA, 150 bp, Zea mays
  Peptide Sequence Number=SeqID_70707
atgggggtcgggggctgcggggcagcgtgggggcggggcggctgggcggggctggcgcggagcggcgtcgggcaggacggctggcgtcggcgttattatgagagtgaaggtagacgtgctgctacttccctcattcccaacatgaattaa

SEQ ID NO: 27333 - DNA, 312 bp, Zea mays
  Peptide Sequence Number=SeqID_70708
atgtgccatgccgagcagtcggtcgatgtcgtcccgccattgcttcatagcccctgggtgaggtcgtggagcttggagggtgtcacagcaactccctggctgctgacaatgctcccggagtcgccctcgacagagtccgggatgtctgtgcggcgtgcacagcagcagtgcccggcacagggtggttgtgaacctgtggtgtggaagaagcagcttcttcctccaccacgaaatccaccgaagtctcggcgcggtgctcaacgatttgcaccatcatctgagcgagaaaacaagcaaaaacctaaagcctag

SEQ ID NO: 27334 - DNA, 363 bp, Zea mays
  Peptide Sequence Number=SeqID_70709
atggcgcagaggactcttaaaagaaaccagatcccgactcctgggagggaccccattagggaggacggattttggggttgctttggggtcggcagcgagggtgaagaggaggcagcgagggtgaagaagaggaaatctgaagaggaggcggcggcgggtacaagggtggagaggagacaacagcggctgcacgagggagataaggagacggcgatgggaacaccgggaaattggacccgtggatttcaaggccagggaataagccggaatccttccgggatcccagactaccaaaggaggcctcgtgatcgcggagccgcagagtcgttgcctccaacggctgaggaacgtgtgacttcgtaa

SEQ ID NO: 27335 - DNA, 237 bp, Zea mays
  Peptide Sequence Number=SeqID_70710
atgcaactcaggagctacacggatcgtggacggactgtgaaacgggtaagaaagttacagcttgatcggtggggcgcagagtcgctgcttccaacggctgagaacacaaccaaccaattaaccaacttcgctctggcgctctgcaagttccaagagttacggaaccaacaagcaatatgctgtgttggatgcaacaagtgcatgcatggccgcatggaggacgcatctgggggctga

SEQ ID NO: 27336 - DNA, 738 bp, Zea mays
  Peptide Sequence Number=SeqID_70711
atgacttacaaccttaggcctgtcattgaagaaattcaaaggtccgcggaggatagtggtgacaaacgaaatttgaagatgtgcttggggatgctaaagtccatgagaaatcgctgtgatcagaactttgttgcttatagaaagggtcttggtgttgtttgcaacaaaaaaggtggattcggtgtagatgactttgttgttgaattctttggggaggtttacccttcttggagatggtatctggcggcgaagagcgaggctgatcactacaacagggagctgcagcgcgagcaggacgagatcgacaccgtccccgacgtcgaggccgccgagatcgccgacatcctgtcggagtacgggctggggccgcaggagtacggccccgtggtgacctccctccgcaacaaccccaaggcgtggctggagttcatgatgaagttcgagctggggctggagaagcccgagccccggcgcgcgctggtgagcgccgccaccatcgcgctgtcctacgtcgcgggcgggctggtgccgctgctcccctacatgttcgtgccggaggccgggcgcgccatggccgtgtccgtcgccgtcacgctcgcggcgctgctcttcttcggcttcgtcaagggccgcttcacgggcgaccgcccatttttcagcgccgtccagaccaccgtcgtcggcgcgctcgcctccgccgccgcctacgccatggccagggccgtgcagtccatatga

SEQ ID NO: 27337 - DNA, 807 bp, Zea mays
  Peptide Sequence Number=SeqID_70712
atggggagcgcccgtgttgctttcgtcttgctgctgttggaggagcgcaacctcacggtggttggtacctttcagccatcgctcggcttcaaggattttcatcaggcagcccggctgcatccccttaccaatggtcacgcaggagggggagaggtgctcaccggcctagcagagggggcggacttcgacaacgcggggccgatcggccgcaagcgtcctggctctggcgcagcttccggtgccacctcccaccgctgggcggagtgtggctatctgcccgccgtatgggcggttgttgcaccgcgcgcaccgggggaccgctcaagacgtcgcatgccgctagggcggcattcgtgttcttgggttgttctgcccttgctccggcacgacgcctctgcgcggaggtcggtgctcgcccgtccgggaggacttgagtggggatctgccggtgggccggtggctgccgtcgtcggtgctgaggtggtggcagccagagaaggcttctccgccgacgagaccgtcagcgccacccgcggaccgaccttcggctctttggctttgatagcttgtcctcgcccctcgagtggggacacgggcgagggccttgtcacagcagcgtctgccctgaggtcatcgctgctgctgtttagccgcccggagcggaggtcattgtcgctgctgatggagcgggcggcggcgagccaactggagtttgtcgtcccgcaggcccccccgatgtggaggtattttgggtgcaataccgtgtttcttcctcatttcgagcaccaggactcgcctgtcggctag

SEQ ID NO: 27338 - DNA, 915 bp, Zea mays
  Peptide Sequence Number=SeqID_70713
atgggagcatgcaaggtgccatcattacttgtttaccggggtgagcctgatgggacgccggtcttgttccctgccgagccctggggtcgggcgaggcggagaccgtcttccgaggtcgaggttgagcccgagccctggggtcgggcgaggcggagaccgtcttccgaggtcgaggtcgagtccgagccctggggtcgggcgaggcggagactgtcttccgaggtcaaggcaggggccgagccctggggtcgggcgaggcggagaccgtcttccgaggtcgaggcgggggccgagccccgaggtcgggcgaggtggagcttcctatggcgcctgaggctggactcggccgctgtcagcctcaccctagcgggtggcacaacagtcggagcagggcaggcgacgctgttttcctgtcaggcgatccttgcatcgaatgctcctgcgatatggtcggttggcgaggcgatttggccaaggttgcttcattgcgaagcctgcccgagctggggcctcgggcgagtcgaagcttgtgctgatggtgatttccagccgagtttaggagtcttgggggcctcggcctcagcctcggcctcggaagaagatctccgccttgcccgagcccaacctcggcctcggaagaagatctccgcctcgcccgagcccagcctcggcctcagggctcaaggcacttctccgatggccacattagctcgtgtacagggctcaaggcgcttctccgacggccacattagctcgcagctataccccattacagacgttgcaacgctgccaacgttggtcggcgccctctcgctctcgccctcgctgtctcgtgacgcttgtaacccctactacaagcaccccgaggtgcctggggcttccaccataagtttggaagctcagggctcccaatag

SEQ ID NO: 27339 - DNA, 534 bp, Zea mays
  Peptide Sequence Number=SeqID_70714
atggccaggatcccatcgtccccaacacgggccgcgcgcgacgacggcgagttcacaacagggcactccggcgacgacgccgtcactacggtgagaagcgcctccgccacgcagaggaactccaatgagcaattcaccggcctcctccgcaccaccggtcccgatttcccacggtcacgctcttcgtcaacagggaagtcagcccgaccacttattgcctccggcgcggcaatgcaagcgctcggtcacggcggcggcagattcgctccccacggcgacgagcggacgagggacgaggccgaggtgaggatttcggtcaatggctccgaggttcgcggcaagctccgccacggccgggattccgttgagggcgatgggcagctgacctacgcggctgacaggtgggtccctgatgtcggtgctcctctgttagtggctgctagtggggccagcggatcagtgataggcagccacgcgtgggcggagtgggtgaagggccgcgcggcgtggtttgctgatgggccaaattcgtag

SEQ ID NO: 27340 - DNA, 225 bp, Zea mays
  Peptide Sequence Number=SeqID_70715
atggcgccccatggaattgtgagatcgggagcgcgtggatgggaccagcagcggcaacagccagcaggttcctacatgatcatcgcgcaggcggtagccgccgcgcgctcggctagtgacgcctgcgctggatccacccgctcggaaggccaccgtcgcgcgttcagccagcgccgctcatgctggatccacccgcacgcaaccgctgccgcgctgaaaccctaa

SEQ ID NO: 27341 - DNA, 153 bp, Zea mays
  Peptide Sequence Number=SeqID_70716
atgtcgcgcgcgttcgatgactactatatcaagaactatggcgtcatctcggggccggagatgacgcaaaggaggaccgacaacaatgaccagtttgtcatcctcgccactatcggggtgcgggacatgctctccaatgatgagaccatgtaa

SEQ ID NO: 27342 - DNA, 690 bp, Zea mays
  Peptide Sequence Number=SeqID_70717
atggactgggcctcaataacagaaaatagcaggggctacggtgcaaatattcctaagactcagaaagtccctggtgtggacggcgggttgatttatcaatactggaagggctcttttctgcaaaatggcatggcgaaaggggtatcggttgattatggccgttggattaaaagccgagcgctcggattaaatcgtagcccccgcgaaccgatcagaaatggacggcccggattcgccgtccgcgaatcactatgtctaatcgatctgagccgcacagtcaagatccgatggccaggatcccatcatccccaacacaggccgcgcgcgacgacggcgagttcacaacagggcactccggcgacgacgccgtcgtgcgcggtagagccccacgagccattcccaacgcgcctattcgaagtacagaacaaagtaaaccgcatgggtgaggtcttaccacgcgacagtgagccggtgtcgcagactacggtgagaagcgcctccaccacgcagaggaactccaatgagcaattcaccggcctcctccgcaccaccggtcccgatttcccacggtcgcgctcttcgtcaccagggaagtcagcccgaccacttattgcctccagcgcggcagtgcaagcgctcggtcacggcggcggcagattcgctccccacggcgacgagcggacgaggtga

SEQ ID NO: 27343 - DNA, 477 bp, Zea mays
  Peptide Sequence Number=SeqID_70718
atgcaggcaatcaagccaaaaaaagcctatgctgcatgtgcggctgaggatgcagtactggtttggaaatatgcagggaaccaaacaacgtccaccgcttggtcaacgcacgggaagagcctgcgttggcgcgtccagacaaccaatcagatggatacacacgatgcagggaagggaaaggaaacagttggaggcggccgagtttgctatgcgagtttgtttcggtcggtacatgcgctcgcagggattcagttggcgaggaagaaggttctcgatctcgtcttggcagaggcgatgctttcggttcgaggggacaaggagtctcgtatatttttataccagatgcaaggagaatccaggtggaaagggtcggtcgggcgatctcatctcaatggaattcgttatgcgaaatacgacgacctcagtactaactttgcaatggacttgaggaggaagagacccaacgatcctgcatga

SEQ ID NO: 27344 - DNA, 1101 bp, Zea mays
  Peptide Sequence Number=SeqID_70719
atgggacttcttgccagccacagcattcaagccaacttcgcatcaaggagcaactatgcgaaatcgaatccattgaagatgatggtgcggctgggtggactacgggatccgatgaggtacctcggctgtggaggtgttggccacaaggcctggcagtgcccgaacaagcctgcctcgacaactgctgctactttctctccatcccctcatgtgccccctgcctcgacagttcgcatttcccacccctgtgccaggcaagcatggcaaggcccggcgatgcagctgagcgtccgcaagaaacatctgttgttcctgcttccactcggggcatggataaggatttcttcatcaacttcgagcaccagcaccaccgtgacgcggcggtggcatgacgcgatttcacctacgacaacattgacattcgggttaggccatggcagctccctattcacggtgaccgcatcaacttcgactaccatgttcgtctctgcctcgaaggcattccctctacatgcgtggaacgagggcatcaccaagcgggcggtggctaagagctgcgtgctagactacgtcgagtctcagtcactgcgaaaggaggacacaaggacactcaacctctgggcgtggacgcggaacccttcagacatcccaaaggtaacttggctaaccattgttggcaggaacatcattgtccacaatgtgccaccggcgggacaaagtggcttaaccttcagggtcatcgtccaccttgaccttgtggagggttccccgggcaacgagggtcaaggaagtacacatgtgttcgactggaggcttggagttgttgatggcaagaggtcacgtcttgaccatcgacactacacttccaggaggtacatgtccggtgacgggcctggaggtgtaaggcaggtccagcaacctcgccaagttgctgctatgccagcggccgcgtcccacatcggcaccccaggtcgtggcgtggcgaacatgggttctcgtccacacactgggctcacgcaccagctgcatgatggctccttggtgacgcgtgggcgcagccgcacgcgccatctgccccagggcgctggtcgacgtacatga

SEQ ID NO: 27345 - DNA, 174 bp, Zea mays
  Peptide Sequence Number=SeqID_70720
atgtggaatgctatagatttaatggttaagagaagatctgagcagacggaggaaggagttgaaatagactccaagcccaggcgacatccagatcctgttcccgggtcaaagggaactttcaggaatctacacaatttcggagtctctcacccttacacaattgatcacaattaa

SEQ ID NO: 27346 - DNA, 414 bp, Zea mays
  Peptide Sequence Number=SeqID_70721
atggcgagcctcgagggagagggcacgcagacgtggctcctgcgcacgccgtttagaagacggacttgtgacgacgcgacgagcccaacacccgagcatgggtcgccgctgcgcaccggtgacacagggacggctgaagcggctgggcaagcgcgcgaggcgcgcaacgcggctgggcgagcggtcctgctcgcgcgccagggcgcaggccgaacggcgaagtgggccgccgcgtgggccacgagcgaggctggctcgagcgaagtggccgctctcgagaattcaccggcgacgtacggctataattcaccggactgtccggtgtgcaccggactgtccggtgagccaacggtcggccgggccaacggtcggccgcgcgatctgcgcgggacacgtggccgagccaacggctag

SEQ ID NO: 27347 - DNA, 1446 bp, Zea mays
  Peptide Sequence Number=SeqID_70722
atgtcctcgccgtcgccgctgtgcgccgcctcctgctccaccgctctccgcgcgccgccgccgcctctccttcgcttccgccgctcttatgctccggtagccgcctccgtgccgcgcacggcgcctgccgtctccgatgacctcgtcctacgcatcgccgaacagctggaggactcggtgacctccacctccccgctcctggaccccctccgctccgcctctgcgctctccctcctctccacacgctggcccactcgccgttccagcgaggccttccgcttcactgacatctcctacctccgctccctccccatctccctcccgtccagggagcccgacctcaagctgccgtcctcccctttctcttcccacgtgctcttttcggatggaatcctcgtctcttcctctggtgcccatgtcagcgccctcgccgatcttccccctggccgcgcccgggaccgcgccgccgccgcgctcgcggccgccgctgaattcgcccacaaggacctcttctatgacttcaacgccgttggggcgagggacgttgttgtcgtgcacgtgcctgagggggtcaaggtggccgacgacccaatacacatcatgttcgcctataccaatagcttcgctgagagtatgctgatgtcaaatccaagggttctagttgtggccgagaagtcagcagaggtggctatagtggaggagcattttggggctggagaagaaggtggttgctattgggccaatccagtggcagagattataattgacgagggcgcaagagtggttcattcatacgtgcaacatcaatcatttgctgcagcacatactaaatggacagtcgtccagcaggatacaactagtaagtatgagtttgttgaggtcagcactggagcaaaattgaacagacacaatctccatatcgagcaattaggtcctgagacagagacagaactatcaacacttcacttaacgtctcagaataagcagatacatgatctgcatagcagactgatacttgatcaccctagaggtttctcgcgacagctccataaatgcattgcttgtggcacaggaaatagcatatttgatggcaatattaaagtcaacaggtatgcacagcaaactgatgcggggcaagaaaccaagtgccttatcctatcaccaaaggcacttgttaatgtcaagccgaaccttcagattattgctgatgatgtgaagtgtactcatggtgccgccatcagtggtgagcttgatccaaacgagctcttctacttccaggctagaggcatcaacacggaaactgcaacagatgccctgttatacttctttggagcccatgtgataaagcgcataccgtttaagcaaataacagagaaggcattagcacagttcaaagagttgcttgcttcatccagacaaacaacggacgaggcccttcgttcgtga

SEQ ID NO: 27348 - DNA, 1368 bp, Zea mays
  Peptide Sequence Number=SeqID_70723
gcagttcctaaggtgccaggttggggtgctgaatatgggggatacctcatgagcagttccctgctcaggcagaggaataaccgcgggaaagaaaagggcggcgcggcttaccggcggcgagggaggtccggcgaagggtggggtcggcttggggagactctggcggtcacgtcgaggtacggctcggcgccggaggtggccggaatcgcccggtccacgcgtgcaggcgggtgtcctcgtcggcggcgagtataccggccaaactacggcgaactggcgcaatccgagggcacggttagcatcacggggtcacgcaacgactgtgtgcacaaggaatcgaaggatggtggagtggattacccggtccacatggctcgtcttagacacactgcacggaagtccgtcatccccttcttaccctctcgccttgctgagcgtccgcttcgccgtcctgtggccagtcagtccagccatttggagaggctgcaccaccgcctgcatgaggagcaggaacagcagggctcttctttctcgctccagcaggagatagagtctgtgaggagctgctcccccgtgcttcctctggagtcgccccctacaccaccactgggcgccccagcctctggagtagctgctggaggagacccagacgacggaggtggcgatgacagttcgagccacgacaccgacttccctgctgaccaggagccggaaggatgggttgctcgacccatcactcgcgacgctgctcgtggatgtcacttccacaatgcgctcgacaccctgctacgtcgggcacttgatcggcgtacttggtccatcgagtatcgctgtgtggtctaccagcatagtcgtggtgtctacccagaccgctgggaggcgacctgcttggtgcgccgtccggagaatagtttccagggtgcggaggcctcctcagagcactattctatctctgagcgggactcagctgaggcggccatgcaagatgccgcacggcatgcgctttcgcactactgctcggttctcggtggggtagctgacgatctcgacctgaagtattacccccgccgtccatcttgcagcacaggaggcgtgattgtctcacctgtcggtgaggacaatcctaggttgagcagcacagtcaacctagccgctgtgctaaacacggagctggaccatgcattagacgagctgagtagggctcgtgctgagatcgccctgctgcgggctgagcacgcggagcgtcgtcacctggacgatggttcccccgctcccatcgggactcagcacccgtaccgctcacctcggcgtggacaccggtcttatggcaaccctgactgcaagaccaagataaatttagaaccatag

SEQ ID NO: 27349 - DNA, 333 bp, Zea mays
  Peptide Sequence Number=SeqID_70724
atggctctgttcagccaaagtcagctcggtctgggtgcaccggactgtgtccggtggtgcaccgaacagtgtccggtgcgccagactggctctgatgaacttgctgccctctggacttcgacggcggtgtacggttataattcaccggactgttcggtggtgcaccggactgtccgtcttgtgtgtgttgctcatccctcccttactccgtgcttctttgtgaacttcaagtgtaagggcgagaggctccaagttgtggagattcctcgcaaacgggatatagtaaagcaagcaaaacaccgtggtattcaagtgggtctttggaccgcttga

SEQ ID NO: 27350 - DNA, 597 bp, Zea mays
  Peptide Sequence Number=SeqID_70725
ccgcgcccggccccggcgccccgcccccgtcaccgacctcagccgcccccgtccccgacctcggccgaatcgtccccgacctcggccgccctgtccccggccttggccgcccctgccccggctcggccgccccgcgtccgcctcgtcccggccgcgccgccccgtgcccggcccccgcgcccggccgtaccgacccggccgtacccccgccccacccgtgcgccgtgcttgcccgcccaccccggcgtgccttgctcgcgtcgtgacggccccggcgcggccctcgagctcggccccagcgtgcctatggtgcgcggccttgagctcggccagcgcgcggccccgacgtgtgtacggttagttcgcggcgcgtgcgtgcggccttacgcgcgtgctcgcgtaccgtcgtgccgtcaatggggctcggtgtatgcgactcgctctgccaaggttgatttgtcccttggggaggagtgcgagacatcttggtttacaggtggcaatgagactgatggttttggttatgactatggtgctggagaagatgaagccatggaaggagacttccaggagttccaggactacgacgaattctag

SEQ ID NO: 27351 - DNA, 744 bp, Zea mays
  Peptide Sequence Number=SeqID_70726
atggtgatctcggccgagccgcccccgccgcctcccccagatcccgtcgccgacgccgcggcggcggcggccacgtcgaacgcccgccaggcggcggccgcgttctcctcgttcccgtcgctcaagacgtgggggagccaccgggccctgcgctgcgcccacgtcaaccgcgccggcgacgccaccgccaccgccaccgccaggcgctcccccgggaagctcgccgccgttgccggagagaaggcgctggggaacctccacgaggtggaagcagggagcagcgacgcggaccacgtggcggccgcccccgccttgccaccgtggaagctgcgcacccgacgacggcgccccacgcccacggtggcggcgccgtccgcgagcacgtcgcgaacgcccgagcggaggccgtcgcgggcctgcgcggaggccctgggccgggcgcgcttctccgtggcgctcacgcgagaggagatcgaggaggacgtcttcgccgtgaccggcgcgcggccgcgccgtcgccctaggcggcggcctcgccccgtgcagaagcagctcgatgatgctagtagcagtcccaggaagcagcaagtgactttatcagcttgtttatctttagcaaaagtacaaatgaaacccactcatgactcgttcggtacaataggttttagttctaacctcaacgattccaaggcaagcatcagggaggcagagctagttgacacatttaagtcccatttggtttaa

SEQ ID NO: 27352 - DNA, 651 bp, Zea mays
  Peptide Sequence Number=SeqID_70727
atggagtctgccgggtttgatggccgactcggcctcaactcattcatacaaacaggacagattttgtcccatattcatacccatgggacaatttttgtccaatacccgtaccataataggggaattccccatgggttatcgggtatcgggtccccattgacatctctagtcgcaagcctccctgcacttgcggccctggccctggcccaggccagagagtacgaacagaaatctctaccgggcagtctgtctaccagttgtctcttttcaggcatggcaacagcggtgaatacaacagtccactggaccctcgctgtgaatgttagcagtacactcgcagggtgcgcgttagatgccgctgctttgatagaaattggcacgcatcgcacttctagactaactcagctacatcattcttcgctgtcgaatctaccttcattttcgcttaggaagaaatccaagataattattgcttgtatgacattgcataactttattcgagacaatgctctacacgatcgagacttcgaccaacttgtacctactacccttgctcatgatgtacccatagatgagagtagtagtaccatatctgatgagttagacatgagtgcatttcgagatgcaattgctaatgcattagtgttgtag

SEQ ID NO: 27353 - DNA, 471 bp, Zea mays
  Peptide Sequence Number=SeqID_70728
atgatggtcctcacctcagttgccaccaccttgttcgtcatgctgcttcttttctctctcccctcatacctccacctccgcgccaccccattctcggcagagggcgtaggagcatgtgcctcctctccgtattcgtccgacaccagccccgacaccgactcgcgcagtggctattgcacatccacgaggacgtttcacatcatgcgcgcaccatcgttttcgctgttgtcggacatcccgttcatcttcccgaccttcgcactgttcttcctccccaacctgctgcccccgctcacggtcgcagccgcgagccgaccgacgctcgtcaacgcgggtacagcgcgagtcggacatgctcctggcctttctccattcatgtcgtcgaggaggacatggtggcgcctgccacacttgggttatcttggcgatgaggagtctaggtctgagatattggacaaccaaggcccgtag

SEQ ID NO: 27354 - DNA, 699 bp, Zea mays
  Peptide Sequence Number=SeqID_70729
atgccccctgcaccaccacagggcattccggctgctggaggagaccttgatggagacagagacgatgacgacgctggtggcagttcaagccacgacacgatgctctcggaggagccagagccggagggatggatcgctagacccatcactcgtgacgctgctcgcgggtgtcacttccacgacgctctcgataccctgttgcgtcaggccttcgacccacacacctggtctatcgagtaccgttttgtagtctaccagcatcgtcgcgggttatacccggaccagtgggaggctacttgtttggtgcgtcgtctagacgatgatctccggggtgcagaggccttctcagagcactattctattactgagagggatacagccgaggcagccatgcaagatgcagcacgacgagcactttctcagtattgctcattgttcagcggggtagctgatggccttgacctgaagtactacccttgccgttcgaccgacagtgctggaggtgtgatcgtctcgccagtgggtgagggcaatcctaggttgaacagcatggtcaatccagtcgccgtgctcaacacagagttggaccatgcccttgacgagttgggcaaggttcgggtggaggttgtggaattgcgtgctgagtgcgcagcacaccgctatttggatggtggttctcctgcccctgttgggatttag

SEQ ID NO: 27355 - DNA, 936 bp, Zea mays
  Peptide Sequence Number=SeqID_70730
atggggcgcgcgggggggacggctgggccggctggggcggcccacgctaaagttgtgtacagatccaggtctcggcgaggctgcctcccgagagtcgttgacaactctttcatacacgttggtatccaacctcgacacatcaagcccgcatcccaggcagggggccaggagtaccttacaaaaataggaaaaagcctgagggccggttctaaagaacgggtgcccgttccatggggtggtctggagcctgtgtggccgcaggagtcgcgctggaagctaggtctgagcagcctcaccggcagcggcgaccacctctacactgacggttcgccggcgacagcgaccacctctgcaccagcagcgacaactacctccgctccgagcggcttgccagcggtggcgaccaccttagggtgtgcgccattgcaaggaggtcctcgcccccattctcctacggggggcgacaacgaggccattaaagccaaagagtcggagactcggcggcaggtggctttgatggtcccgccagcggaggcaaccacctctacaatgggtagccccaccagcggcggcgaccaccttagcaccgacgacagcgagcacctctgcaccggtggacggcggctgcctcagcgagcgcgaaggggtcctcgctctcgtcctcccatgggagtgaggacaagaccatccaagaacgtggccgccacctccatggcgtgcgacgtcttgtccagccccccaggcagtgtcggaacaatgtggccgacggcgcacgggacgctgcgggtgcggcagacctgcgcacggcgtgatcgtcgcccgcgcggtggacggacagctctgccccgcttggcggcaggaggcagcgttggaggcgacaccaaagccatccagcccaaagggccagacacactgcagctgacggcctgcagctag

SEQ ID NO: 27356 - DNA, 849 bp, Zea mays
  Peptide Sequence Number=SeqID_70731
atggcggccgcggagcagctgaaggagctgggggagaagctgcaggcggtggtgccggctcctgcggacgaactcgccaagctcctcgagatgacggaggaaaaggtggggcggatcttcgtcggcgggctgtcgtggaacaccacggagcgcacgctcgagcgcaccttcggtcagtacggcaaggtcatcgaggctcagccagccggccggtggctgtggctctggttcgaatgttcacaaggggtcaaggcgaggggccgagggcgttgccgctgcgggctgccggatgcggcgggcgttcacgtgagccgctcgccgccggcgccgggcgactcgttgttgacgctgcgcgcggctgtcagccagtctgtagccccacctcattcgatgcagaggcagagcgcgccgccgccgtctcaattgcggcactgccgccacgccggaccggagccagcctcgtctgcgccgctggcgcctgccccgccctcagatgtggaggttacgtattttgattctacgattgattctagggagctgagacgccgtggacgacaatccatatcatcgtcttcacagatggagtatcagaggcagcacgctgagtaccggaagaaggacgggatgccgcctccgaaccttgcactgccgctgccaatgatgtcgcctccacctccgccacaattccatgtgggttttgatacacctcccgcttcagttgtcgcacctagagatgtgtctggtcaagacgacgcctcgacttcttgggtgaacaacattttcaacacccagagtctagctggaggaagtggctacaactccgaccaaccaggtgacagatatgtgtga

SEQ ID NO: 27357 - DNA, 636 bp, Zea mays
  Peptide Sequence Number=SeqID_70732
atgggggcggtctcgagggaggtgtcgtcagcatgtgagaggctctgcttcatttgcccatcactgcggacgaggtcccgccatccagtcaagcgctacaagaagttgcttgcagaaatcttccctcggacacaggatgaaggaccaaatgatcgcaagatagggaaactgtgcgaatatatttcaaggaatcctatgcgtgttccaaagattacagtttacttagagcaaaaatgctacaaggaatttagggctgagcgctatggttcagtgaaagttgttatggcaatctatcgaaaggtgatatgttcttgtcaggagcagttgccactttttgccaacagcttgctaacaattgtagagacattattggagcaaaatagacaggatgacttgcggaaattagcatgtcaaacactttttgactttataaatagtcaggttgacagtacttacatgttcaatttagaaaaccagattcctaaactatgtcatctggcccaagagatgggtgaaaaggagaagatatgcattcttcatgcagctgggctacaagctctttcatctatgtgcaatgatacacaactctcctgcgtattccaggaaaagatatgttgcctcttaggacctgcttga

SEQ ID NO: 27358 - DNA, 549 bp, Zea mays
  Peptide Sequence Number=SeqID_70733
atggctgctgctgccgcagcccctccgtgggcctccttaggccctgacaaaacatgtggtcagaaccaattaagatgcatcaacttcactgcctatccacttgatgtttcagggatacagcagaacccagaatcggttagaagatggatgtttagagacaagcatggacagagcttacatactaagatgatgattgagctacacaaggcaggagagttacatcctttcctagacggcaggccccgtccagcagaggtccaactactcctaccttgtcatgtcatagttgttgtatcgtacgcggtgcacacctccaatgtgcacagtggtgagtatgacgtgccaatggttggtacgggaggccacgccgtcgagtatggcgtagtgctcacggtgtcgcctcttgcaataaatgtgaagaacgagagccttatctcaaccactcgacgtcacgcggccaacctagtcaggggagcacatggtgctgaggccgtgccatcaagggtcgtgcccgaaggcatcttggaagtgtcgggggctcctacataa

SEQ ID NO: 27359 - DNA, 396 bp, Zea mays
  Peptide Sequence Number=SeqID_70734
atgacagttttgaataaaaaagtatgtactgctgaatttggaactgaagaagctgcgataccacctgatctgaaccaagcttctgttgtaaacggtggagaagatgatatatcagttgagtttgaggatggacaaatccatgttgtccaagatcaagaagataatgcagccttgatcagtgaagaccgaacacattttgatctcaacatgagtgcagctaggcatcgactgtacggaggaatgggaatgggctttgcggtgagggggaatgagaatgatagatatagaatggaactttttgacctggctaacaagattggtgaaggtggttttggttcagtttacaaggtcccgttgatcacccaccctcatattggattgggcaacaagacatag

SEQ ID NO: 27360 - DNA, 288 bp, Zea mays
  Peptide Sequence Number=SeqID_70735
atgtacgacaagctacggcgcagccgccgcttggacgcagtgcagagcggctgctccgcgctgtccatcgtcaagcagggagacctcatggtcatcgccaacgtcggcgactctcggcctagccaagagtcatcagtactcggtatgtcgcgcgcgttcgacgactactatattaaggactgtggcgtcatcttggcgctagaggtgacgcagaggaggaccgacaacaatgaccagttcgtcatcctcgccaccgttggagtaacttttgtgccggcttgcctttga

SEQ ID NO: 27361 - DNA, 396 bp, Zea mays
  Peptide Sequence Number=SeqID_70736
atgtcttcatcacgtggttttggtggtctccgcaagaaacttgcaggtcgctttaaatcaaagcgccctcgtggcaatgatgatgattatacaccgaccactgattcagaggcccaatcctcagctgggggcactgaatccatggatgctgaagattttcttcatgttcatccagatgatcccatcatgtcaaggctgaataatatgcaacaaagttttcaagataacatgggtgctctctccagtcagtttgacaatctttctacaactgacaacctgcatgatataagtcagaggcagcagcagctccagcaggactttggccagttctcctccctgtttgacaccttcagcactcattattacaacatgcatcctccgccgagtgatcagtaa

SEQ ID NO: 27362 - DNA, 453 bp, Zea mays
  Peptide Sequence Number=SeqID_70737
atgatggtccttgtctcagttgccaccacctcgttcaccatcctgcttcttttctctctcccctcatgcctccacctccgcaccaccatattctcgacagagggcgtaggagcaggcgcctcctctcctcccgacacctactcgcgcagtggctattgcatgtccacgaggacgtttcacatcatgcgtgcaccatcattttcgccatcgtcggacatcacgttcgtcttcccggccttcgtcatgttcttcctccccaacatgttgcccccgcccacggtcgcagtcgcgagccgaccggcgctcgtcgacacgggtacggggcgagtcggtcatgctcctggcctttctccgtgcgtgccgtcgaggagggcatggtggcgcctaccacgcttaggttatcttggcaatgaggagtccaggtctgagatattggacaaccaaggcccgtag

SEQ ID NO: 27363 - DNA, 1401 bp, Zea mays
  Peptide Sequence Number=SeqID_70738
atgccgcgtggcttcctccccaccaacgacaccctacccaaaaccctcgacgcgctgctctcgcccagatcccgcacgtacgcgcggcttccttcccccggctgccgagatgcatccctcttccccagctgctctcccccaccaaaccctcgatgcgcggcttcaacagagccccagcccgagcccatcccaccttcaatgccggatcacgccccatcgccaccaacggtgccccaaaccctcgacgcgcggcttcaacggagtcccagcccgagcccatcccgccttcaacgccggatcttgccccatcaccaccaacgacgctgtcaagcctctggatcctccgcagacgacgtcaagtggtccaacatcgatgtccaagagttcatcgccttcgatccggtctacgggccccagaccatctattctgaactggaacacaggacgctgcgcaagctgttcaaggtggatgccgctgactatatgttatcactatgtggaaatgaggctctcatggaactttcatctcctggtaagaatggaagctttttctacctaactaacgatgatcggtacatgataaagacgatgaagaaatccgaagtgaagatgcttctgaagatgctcccggcttattacaatcatgtccgggcatttgagaataaaatgatgaaatttggtaggctctcgattctcgccactacattattgcttatagtggataactttggggaaaataatctggatctgccatctctagaatcagcacccaaaagtttttttattgttctttcacaactaattgacacattcagtcagtgctggaaaaaggtgaggattgcaatagcctatctcctggctgcagtatgtgaaatctggctcaagggagacgacgatgtagattctgggtatggtttgctgaggagataccgctaccaattgtttgtaggattggtcctctctatagcgtactctattcttctatatggcatatacgttccagactgggagtaccagatagcaggccctggttccagttccacaaagaagtcgttctttgaatgcagtatagattatctagagaatgggcctcttccacctgatgctccatcgtggtgccaggcgccatttgatcctgaaggcctcctcagcttcgttatggcgattgtcacttgcttgatcgggctccagtttagacatgtaattatacatttcgagaagcaccggggaagaatcgccagttggttggtcccttccttcagcatgctagctctagccttcgtaatggacttcgtcggaatgcgaatgaataaaccactatacacgatgagctacactctggctgctggcgctgcgggtcttctcttccctggaatctatgttcttgttggcccctcttga

SEQ ID NO: 27364 - DNA, 222 bp, Zea mays
  Peptide Sequence Number=SeqID_70739
atgccatcgaccccggttgccacagtctgcaacgccctcctatgcgtgcttagggatagaaggattataggagggggaaggtacaagatgagttccgtgaaagcaaagaggggtttggtatttgttcttttgcttgttgttttgcctgcgctttcgatcggagaaaggaagttgaccgatgaaaaggaccacaagttatatattccgtcagggagttattaa

SEQ ID NO: 27365 - DNA, 198 bp, Zea mays
  Peptide Sequence Number=SeqID_70740
atggaaggaaagccatcgcgagaaaggaagtcggaactgaaacgagtgtctcctccactggcgggggtgggtgaattcatctgcggaagggaattaaaggtaaagattatggcggaaggaaaaaagaaaaagagagcccggatggttctaaagaagctgtggcggaaccacccgaattattccagcttaagtgcctaa

SEQ ID NO: 27366 - DNA, 297 bp, Zea mays
  Peptide Sequence Number=SeqID_70741
atggcatgtcagggtactccgaccccacacatgacaatcgtccccatcgattccccgttcgcgtccaggcctcaacgccttggcatacaatgctccactgaccccggttgccgccgtgcagtgaccgcacttgtacccaccatagctagcatgggagacccagtctcaggtcgcatgagggataaagtccgcgcccggcttcactcaggcatcctccctggatccaagtccatagaccaacatagatcccgttatcaagatgaatacaatcaattcctgacctcgcgcgagtgctag

SEQ ID NO: 27367 - DNA, 468 bp, Zea mays
  Peptide Sequence Number=SeqID_70742
atggcaggtgatatggacatttttgacccaaccgaacgttatattggaggcatcattcaacacttgccttcatatgccggtaaattcgatcctcatgcatacattgattgggagctcaagaggacagtttgttgtcaagaagaggagaatgatgagaacataacctgctcaaatatgaccatgtcaatggctcctgctgcgaaggtggaactcttccacaatataactaccatcgatatatttgaagaattgatattgcaccgtaaagtgcatcaagaatcaatgacagaaaccaaacaaggcgtccagaaattgccgagagagtttcgttctccattagaacttctttctattcctctatttaagcaactagcagccaccaaagaacttgggtttttgtttgatgttcaaggctattcttggcacggcaagagcagcaacaacaagagccggtgtaactatcgctaa

SEQ ID NO: 27368 - DNA, 279 bp, Zea mays
  Peptide Sequence Number=SeqID_70743
atggcggaaatgatgccactgcgcgagtcggtgtcggggctggtgtcggacgaatacggggaggaggcgcgtgctcctacgtcctctgccgagaacggggtggcgcggagcctcctcctccgacctcgccacagtgaacagtgttgggccaggttcgcgcgcgccatcgcctctgtgtccctgtcgccggccacgacgctgctcactggcgagcgcctcatggtcttcctcttcgcggccccgacacacctcgccgcatcacttgcaatcctcatgtag

SEQ ID NO: 27369 - DNA, 324 bp, Zea mays
  Peptide Sequence Number=SeqID_70744
atggcccaagggcacatttccctttcactctccctcatcggcgacctcccctcactggcaaccaccgatcctccggcgatctccagtctctgctcttcctctgattgcctaccgagttcgtcgtcacgcctctcgtcctcgctcctcccctcctaccactcccaccactgctaccactccaccacctacttcgcctgctcccttcactcctacgccatccaccacctcagccatacccaccacctctactactccagcttccactgctccttccgctcccctttccgctccacctatcccacctgcttgcttctaggagcgtga

SEQ ID NO: 27370 - DNA, 1923 bp, Zea mays
  Peptide Sequence Number=SeqID_70745
atggcggaagtggaccacctcgctgccgagagggccaccgcgcgcttcgacgtcgaggagatgaaggttgcgtgggccggctcacgccacgccgtccacgtcgccgaccgcatggcgcgcctcgtcgcatccgaccctggcatgttcgttccagctataaaaggccaaggaactgaggagcagcagcacaagtggttaccactggcttacaagttccaaataattgggtgctatgctcagacggaacttggtcatggctcaaacgttcagggccttgaaacaactgctacattcgatccgaagactgatgagtttgtcatccacagtccaactctcacgtccagcaaatggtggcctggtggcttggggaaagcttccacccatgcagtggtgtacgctcggttgataactgaaggaaaggactatggcatacatggtagtgttttgcttttgggaaatgcctttcttgatgcagtactgtcttcctttgtgacttatggtattacgcatgtcggtgttccaggtttcattgtgcaactgcgaagcttagaggatcactccccacttcctggtgttaccctcggtgatattggtggaaagttcggtagtggtgcatataacagtatggataatggtgttcttcgatttgaccatgtgcgcatcccaagggatcaaatgttgatgaggctttcacaagttacaagggaggggaaatatgttcactcaaatgttccaaagcagctgttgtatgggacaatggtttacgttcgccagtcaattgttgcagatgcttctaaggctttgtcccgtgctgtttgcattgctgtacgatacagcgcagtcagaaagcagtttggctctcaagatggtggccctgagactcaggtccttaattacaagactcaacagagcagactctttccattgctggcttcagcatatgcatttagatttgtgggtgattggctcaactggctatatacggatgtaactcagaaactggaagccaaggacttctcgaccctgcaggaagctcatgcatgcactgctggtttgaaagctgtgacaacatcagtaacagctgatgcaattgaagaatgccgaaagctctgtggtggacatggttacttgaacagcagtgggcttcctgagttgtttgcggtctatgttcccgcttgcacttacgaaggagacaacgtcgttttgcttttgcaggttgcaaggattctaatgaaaaccgtttctcagttggcatccgggaaacagcctgttggcacaatggcctacatgggcaaagtgcagtatttgatgcaatgcaaatctgctgtcagttcagctgaagattggcttaaccctgatgccatacaagaggcatttgaagcaagagcgctcagaatggcgattggactactctgggagacaggctcaatgacgatctcattccctgcagctgcaggtttctatgagcggtccccagatttgcttgaggctgcggtagctcacatccagctgattatcgtgaccaagttcattgagaaggtgcatcaggagattcctggacacggagtgaaggaacagctccaggccctctgcaacgtgtacgcgctgtacatcctccacaagcacctgggcgacttcttggcgactgggtgcatcacgcccaggcagggagcgctggcaaacgagcagctgggcaagctgtacgcgcaggtgcgtccgaacgctgtggcgctggtggatgcgttcaactacacggaccactacctggggtctgtgctggggcggtacgacggcgacgtgtaccctgcgctctacgaggaggcgtggaaggacccgctgaacgagacggtggtgccggaggggtaccacgagtacctccgcccactcatcaagcagcagcagctcaagctctcgaggctctga

SEQ ID NO: 27371 - DNA, 672 bp, Zea mays
  Peptide Sequence Number=SeqID_70746
atggcctgctggaaggtgaggacggaggaagcggaagagccccgttggttggcagcggacacggtggaggaggtggaggcgtcgccgtctgcggcggatagggggaggcgagggcgtcggcatgggcggtggcgaggagcacagaagcggatggaggctggaggaagcaaagcggagggcgccgttagtagcggggtgtgccgggaggcggcggtgggggagaggaggggaggcggaggagccatcatcaaggtggggagtgcctgccaggtggaggtagaagaggataagggaggaggagacggacaggctgttgcagcagcagaggcgggaaagaagaagatgctctatcctcgcgtggagctcacactaaggttgtcgctgcctcgcctggagctcgcgctagggccagggtcctctcacagcagcctctgtcctcacctggagctcacgctagggttcctctcgcagtcgtcgctgctgaggtcagactctgccttctcctctcaccctccagctctctccctttcccatctcctctcgccctccagctctccctctcctgtttcctctcctcgctccgaacactggctcgggccgtcccgatctgcccatgctggcgccgccgcctcatgcctggttcgctttctggttagagacgtcgcgacgtga

SEQ ID NO: 27372 - DNA, 306 bp, Zea mays
  Peptide Sequence Number=SeqID_70747
gttggatttcgaacccctgggttggagcggagcggagttcaccgtttttccggggtcttagcccgagtccgagccctggggtcgggcggagcggagttcgccgtctttcaggtcttagcccggagtccgagccctgggggtcgggcggagcggagtttcctatggcgccttcggcaaggcctgactgcctgtcagtctcactctatcaagtggcactgcagtcggagtggcgcaggcggcactgtccttctgtcagaccgctttatgctgatgggagttaccagctgagaattaggcgtcttgagg

SEQ ID NO: 27373 - DNA, 642 bp, Zea mays
  Peptide Sequence Number=SeqID_70748
atgggccttattaaaaagaatgaaacacttaaggctaagttagctagctcccaagaagccattgaaaatttgctagggaaaatggaaattcttatcatacacaatgatgagctaactactaagctagaaaacattggtagcatcccagaagtatctttggttgaaatacctaaaattattaagaaagatgcttctacttcttgttttgatttaattgatgattataacccctgcaatcaagtccttgtcaagaatgaaaggaaaatccaaacaaatccaacctcacaggataacaccactacgagagtgaacaagcctgtggagggcgaaaatgtgatttgtgggctatgtcacaaagaaggccacaagtatttccaaagcaaggcgaagaccggggataagcaaaagcaaaagctcaagaaaaagccaacaagcaaaatctccaacacctacatcaacaaggtggacaaaatggctcctacaccatatttaatcaagaagaaaaagaatggaaaggtgatagcaatcaaggccaacaagcaagccaacaaagggaaaggggtcaaacgcatctggatgccaaaagaaattatttcaaccttgaaaagcaccaagaaggtttggatgccaaaagggaagtga

SEQ ID NO: 27374 - DNA, 426 bp, Zea mays
  Peptide Sequence Number=SeqID_70749
atgggcaagagtaacaaacgcaagcgcgagccgactcctctgtcggaggacttcggcgactcggaatactcggaggaggagttctcctccgagtccgaagggtctccagctcccgtctctcccccggcgtcgtctgatgattcagacgactcccaggggattgccgcggaagtctggacgtacatccgggccgtcgagcgctccgggctcgagggctcggatgagtcggagtactcctcggatgaggaggactcggacggcggcgaggacgaggatgacgacgacgacggtggcgacggcgacggtgacggcagcggcgggggcagcggcggcggcgacgggagcaagggcagcaccagaggcggcagcagcaagggcagcactaggagcggcggcggtggcagcagcagcaaggccagtggctaa

SEQ ID NO: 27375 - DNA, 1710 bp, Zea mays
  Peptide Sequence Number=SeqID_70750
atggagttgccttcctccaacgatgaggcggaaagacggtgggtatcccccatccgggggcttggaaggtggaaagacacgatgcataagggagcgcgaagacatggtcgccttccaaagggggtcaccctccttttaaaggcaactctccctacttgcgcccacaaccgtcgcgggctgagtcttctccaacagactccaaggtcctcccctgcggcgcgggggctgggtcccacacgccatgccaaccggctcagagcagaagaagccaaaccgccgtgcgcggtgcgcacaaccgcccagcggttacaagcgaccctccacttttgcccagaccagcgggcgaaagggcgggcagccatgcaggcggcatgcaaccgcgccaagtgggcgcacttctccgactctcaacacgcccggcatggggcccaggcccacgcgtcatgcaaccggcgcgccaaatgcttcgtgcatgcaactgcatcgccactagcgccactaccgcgtctcctcgactgcggaaccaataccgcgactcgaggcgacccagcgcgcgacccagcagtgccagcctggcgcgacggtcaatgcggccaaaaatgggccggcagtaatggcggtggcaggcgggcaggagcagcggccccgtcgtccgccaagctcacgtcccatccgagggcagcaagagaaccctctctcacgacgctccgagcctccctactgatcagaggttcgaaggctggccccccggaagggttcgacagccgcctcagatcgcgtgggccctacacccactactggtcagaggttcgaaggccgacccctcggaagggttccacggccgcctcaggctactcgggctccgcgcccattactgatcagggcgggaacgatcttgtaacggaatcccatcagagggaggcatcgagccctcggaccccgtcgccaggggaccggctcaccggagacaccatgttcggcgcccatcgagggcaacatggcgctttccccccgtcctccttgcggaaaggcgacgcaggggccgtcaacataccagcccgagaacttgggacccgaccgtacacccgggctacggccagctcgcatgagggaacgaccagaccagccgaagcattacgtgaggcattaagacctcgaaggagtgaaaccactcctccgaggcctcgggggctacacctggcgggtgcgctcgcgcgcacccaccggaacaaaacgcaaccgagaaaggctggtccccttgcaaaaaagtgcgacgaaagcctccaagcgagtgctaacactcccttcgaggctcgggggctactgtcggggaccataattaggggtaccctcaaggctcctaattctcagctgggctcggacttgggctcagccctagaagacgacgaactccgcctcgcccgacccaggggctcggactcgacctcggccacggaagacagactcgacctcggcttcggaggagctttcacatcgcccaacctagggcgcagaccagccacgtcaacaggagaggaattggttcgacccgaaatggccgataaaggcaaaggcaagggcatcgtcattggcgatcctcgcatgtcaattatatcacaaaaggagattgctcgaaaggcttcgagcgagaaggctaaaaggttcgaagacgccggggggcaagcacaattaatgaaccaaacacgttag

SEQ ID NO: 27376 - DNA, 387 bp, Zea mays
  Peptide Sequence Number=SeqID_70751
atggcgttcagggctgctgtcatctaccaccgaccaagctctggcctcgaccctaacggaggcagcgcaggacgctgcttgactaaggagtctgcgcttgacgtcgcctgggcggttagcatgtaccatcccgaaaagaaactcaatgccatgttacaacccttgattgaagagttaaaggggctttggaaaggagtcaaagcatatgatgttttcaaaaggaaacacccctttaggagtaataagaaaaactttataaagaacaatctggtcacgaaaggaacaccaaaatgtttgaaggcaaccaaaatttatgctcaattgaataaccttgtcttaaatgaagaagggaacaagtaccaaggattcaaagttgagaacaactag

SEQ ID NO: 27377 - DNA, 525 bp, Zea mays
  Peptide Sequence Number=SeqID_70752
atggcaagcattggttcacatgtcagtcctatgcctatttatgaatacggtccaataaatgatgacaaagaaggggaacatgtccatgacaaaaactattctaagttatctcccaagtttagcgagaagaagaattatggccaggtacccttgagcaaacagaaaagtcaaggccatggtggaaaaaggaaatctataccggtggccaagatttactcaagccaaccaaattcaacaactcatgccattgatttaaaggagcctgatcatcaaagttcacttcccagtaaattctctaagaggaggaagcaacaactccaaaaatcatcttctatttattctcgaaagaaaatggacccttacctcggcgtcatcactattggcgccgtgtttacacgtctcggcgccaaaatagatggcaccgagatcttgctccggagcgatgatgtggcgtctatgtggcaaagggtctgcgccgtcactattggcgccaacccccggcgtctgcctcggctcatgcgttga

SEQ ID NO: 27378 - DNA, 165 bp, Zea mays
  Peptide Sequence Number=SeqID_70753
atggcggctctcagcccccttacggaagcaagaggacgtcagcaaggactcgacagccccgacagctgtccttccgccgggctccagcgctcctccgacggccacgacaccacacgaaccgggtgccaaaacgtctccggctgccacgatggcatagcaagataa

SEQ ID NO: 27379 - DNA, 997 bp, Zea mays
  Peptide Sequence Number=SeqID_70754
aacaatgcgtacgactgcggtatcttcatgctgtattacattgaacagtttataaagaaggcaccggcaaggttcaccaccgataaacttggcatgtttaatcgcagttggttcaagcctgaagaagcatccggtctaaggcagagaataagagagctactgctgcaagagtttggaagtgccaggccggatgaagctgcatcagaggcagatgttgctgctaagagaaaagaaggcatcagtgctgcagagtggaacgaggaggaggcaggccgtgtcgtatcagaatcagactcatgttcatacggcgccggagacgaaaaaggtacagtaaaggcagattctggcagcgcagaagctgagaaagaaggtgggctggttgtgactgcatcatcgcagaaaagatcgaaggggacggcggaggaggaggaggaggtccgtggtagtagcatgccagtcccggatgcagtttgtgagatcactgggaccaaggtgtggatcaagagggtctacagacgaacagggtggccacctggaaattggtgctggagcagtggcggatccagcagggatgcacgcagggcgttcatagaacaattctctcgaaacgccgcctgcgccgcaccgactgctgagccactcgacagagtgaggctgacagcagccaagtccggccctaggcgccatgggaaactccgcttcgcccgaccccagggctcggactcaggctcagccccggaagacgacgaactccgcttcgcccgaccccagggttcggactcgggctcagccccggaagacgacgaactccgcttccgcccgaccccagggcttggactcgggctcagtctccggaaggacgacgaactccgcttccgcccgaccacagggctcggactcgggctcagccccggaagacgacgaactccgcttccgcccgacttcaggctcgactcggctcagcctggaagaagacgaaattcgctcgccgacccag

SEQ ID NO: 27380 - DNA, 615 bp, Zea mays
  Peptide Sequence Number=SeqID_70755
atggccggttctaaggatcacaccaagatctccaccaccaacatcatcaagctggccatggaggcgctcccggctgatgaccaaagaccctttgaagaccttgtaatgcgtgatgagaaggaggtgatgcggcaatggaacgaacaatgcgacaaggaagaggcggaactgctgcataaactctctgaacggcgcaaggaggcggcggaaaagtacttgtcacacttcatggtggatcgccaccagaagatcatccgtcaaggggagatcgatatggaatctctcctacctccacttcagggtcccgctccgcaaccactaggcacgcgacaggtactggacgcggccggaccgtccgagcatcatctcagacactccggttataccgcggaccgtccggtgtatttcgccggaccgtccgacccgatgcaggtccgcacacaaaatgctcaggtcgcaccgtacatggccggaccatcagggtacaaccccgaacaattcggccccatcacagaccgtccggtgcatcacaccggaccgtccggatatgttgcggaccgtccgccatcttacatcggaccgtcaggatatggcatgaaccggccgacgtattga

SEQ ID NO: 27381 - DNA, 108 bp, Zea mays
  Peptide Sequence Number=SeqID_70756
atgtcacaggaggcgccatcattaccctactccaagctaactcaggctacggggaacaagaccggcgtcccatgtggctcgccccgttcctaccagggatggcaatga

SEQ ID NO: 27382 - DNA, 333 bp, Zea mays
  Peptide Sequence Number=SeqID_70757
atgtcgtgcaaaccagctcagagcagaagaagccaaagcgccgcgcgtggcgcacacaaccgcccagcggttacaagcgaccccccacttctgcccagaccaacgggcggaaggagtgggcagccatgcaggcggcatgcaaccgcgcccaaagagggatcgggaaagggggataccccgaaaaggatccttccctgtgaaagaaccgggctccgagccccccttactgatcagaggttcgaaggctggccctccgaggggttcaacagccgcctcagatcgcgtgggccctacacccactactggtcagaggttcgaaggccggccccctga

SEQ ID NO: 27383 - DNA, 231 bp, Zea mays
  Peptide Sequence Number=SeqID_70758
atggagccatgccctagcatgaatagagcttcggactgcgtaatcatcgcaccagacatggtaggttatcgggcactagggagtgtagtggctagcgtcagcaatgtccaccaccgtggggaggccggtgggctaccgtggatgcgactagaggaagaagataggcgagcgccgttgatccggtatggaacgactaagattagacgtctcggtgccccttcacgtgtctaa

SEQ ID NO: 27384 - DNA, 2010 bp, Zea mays
  Peptide Sequence Number=SeqID_70759
atgtcttcgcccgagctccgggagtcttcggcgcgaatgctggaggttaccgggggtcggtggccaaagaatcttctgatcccctgggcagagggcgaagacatgtctacgtcttgtatagctcgtggcttgaggattttcccttacggacagaatattgctgctgttgtgtcggcagtgatgaacaaggatcgccaggatgctgcgcagaagcgtcgggcggttatcaggatccccgatcctaggcgtgaggcaaagagagcgcgggggagctcgaaggctgctgcccccagcggtggccagcctacgtcggctgcgaaaccggccgcgcccggatccagcaaggtgtcggagagcaccaaggcggtcgtcgccggtggaaccaagcctaccccgggggaagcggcgaaggttcgggagctgccttcaccggggaaacgcgttgccgacttcggcacgaatattagcgtggacgactatttcgttggtaaggtcgggcgaggggcaaatggttgttgtcccgcctacggtggcaaccacggcgtcaaccgcattggttggggtgaagggtggcgctttctacgcgagcggcgagatttcgtcggccgctgccgtcaaggacgaggcgggctccatgtcccgccggttgagggaggcctcgcagcagctgtcgcagtagctgtcgcagcagctaagtcaagtaagttgagcaggacttcggcggtcgacttcgccgaccgcgtggcgtcgggtgcccttactgcagatgtggctaccgaagtcgagagacttcgggcgcagcacgcggatgccatccgggagaagtcagctgcggagagcaagaaccgcaggctcgcggagaaggtggccgccctggaggctgagaagacggacctccagcgccagctggtggaggaaaggagggaggccaaccaggccatcgccgaggcgcaggctgcgcaggcatatgccaaattggcgcgggcggagggaagtctcgccagccaacgcgtcgaggagcgggaggtgaggttcaacgctctgcgcggccgcgtggacaaggccgaggcctctacgcgctcggaggttgagcggacgctcgcacagctcgtggactcgtaccgcgagctgggtgtgcggactgctgacttcgaggtgcccgaccgagaggcgggccttcgcttcctcgagtggttgcaagaggaattgctggtactcccgaccatcatggagggtttcatgtcctatgcctccctcgtcacctacgaaggggccatgaatgcgctgtctcatgagggctgcagacactacgaggtcttcgaccaatcagacgagagctttgaatgcgagatctttaaggccgaagaccctattgtgaagcagtccgcgggggcactttttgataggatgtggggggcacatggtcgggaggctgtcagggagcgatccgaccgggcgagggagcagatggagcgtgttgaggacgtcgaggacatcggagctctggtcggcgcgccgcccgaggctatgaaggttcagggttttgggcctgcgcacgcaaccgctgctgacagtgctaattttgtggcggcttcgaccgtggttgctgaaaatggttcggatgattccgtgtctaagttttttgagtctgatgattctaggagttcggttgtgtggacggaagagtcttcggatgaggacttggattattttgcggcattgtatgtggctgcggcggaggcttctccgcgtgtggaggatgctgaagttcttcctggtctgagtgctgggtgtaggcggcgaagggcggtggcgaagcatagagtgagtgaggtggagggtggtcgtcttcgcgtggacagggctggcaagcgggaattgttgtcctcgccggttggggcgagtgtaggtgagggggagttgcgaagtctttttgagggtgaggagctaaggataatgttgtttaactacagggagatgggtatcatcccgaaggttgaaccaatgtaa

SEQ ID NO: 27385 - DNA, 1746 bp, Zea mays
  Peptide Sequence Number=SeqID_70760
atggagacgaaaccggagccgcaccgccagaaccacgtccgccacgaggaagcccaggagggggagcaggcagcagtcatggaacacggcgctctctcgctgcagcgcggagtcaccaacttgttcggcaggcggcacgacgagaagcaggcggtcggccgccggggcgagatcagggaggtggacttcttctcgagggtctccagaccccgggaccaggacagcggcggcggcggcgggcgcggggtgtccggaggcggacgtgacgacgtctacatcgagctcgacctgctgaccaccaccacagctgccacgacctgcgccggcgacgaagtgatgcagaccaaaaatcaaaagatagaggcttcagctgtggaagcggagctcaggcgggtagtggaggagaaccggcggctgcgcggaatactggaggagctcacccggagctatggcgcgctgtaccaacagcttctccttgtcacgcagggtcagcaccaccaacatcgactgcatcctgccgatctcatgatcagtaggccatcactggctcatacccacctgaccagcaccgcggcctcgcagtacagcgcgtccactcggctgctgctggaggcgcgcgcgtcgtcctccgccgtggcgcagccgcgtgccgtcgaggacgaggttgtcagcggcgccggcgacggagccggggtcgtcgaggcgtcgccttcgctgagcaatggaggaaacaacgacaacgacgccgccgcggccgacggcaagaggaagacgtctccaccgagagagagtggcgagcaggcggcggcgtcgtcggagctgccgggccggaaggcgagggtgtccgtgcgcgcgcggtcggaggcgccaatgattagcgacgggtgtcaatggcggaagtacgggcagaagatggccaaaggtaacccatgcccgagagcatactatcggtgcacaatggctgtggcatgccccgtgaggaagcaggtgcaacggtgcgccgaggacaagacaattctggtgacgacatacgagggccaccacaaccacccgctaccgccggcggccacgaccatggcgaacaccacgtccgccgcggctgccatgctcctctccggcccggccaccagccgcgacggcgcggctgccctcctcggccacccggcggcagcgctgttccaccactccagcagcagcatcccctacgcgtccacaatggccacgctctccgcctccgcgccgttccccaccatcaccctcgacctcacccagcaggcgcccggaggcctgctgccccacggactgcatcgcccgcccggaggaatgcaccccgtggtggccgccccggcggcggcgatgccgtttcctgcaccatcgccgctggcgatgttccttccgcagcgagcgcccacggtgccgaccgggctgccggtcgcgccgcggcagcagcagcagcagcagtcggtgatggagacggtgactgcagccatcgccgccgaccccaacttcaccacggcgcttgcggcagccatctcgtcggtcatggcaggagcagcgcatcaggctcagcagcctactccacgtgcgagcaacatcatcggcatccccggggatgaggccaacggcggcagcgcgggtgccgccacagcaggtccgagtccgacgacgacggcagccggagcacatgcggcgtccggcggatcgcctcggttcgcgacgcagtcctgcaccacgtccacaacttga

SEQ ID NO: 27386 - DNA, 219 bp, Zea mays
  Peptide Sequence Number=SeqID_70761
atggctacaaggcggattgcattgactcatactacaaggtcccatccctatactgttgggggccttcgtcttccgaaggtaccttcggactcggatcagaaccatagtgtgagaagcacgaacaatacgaaggttgacgcagcgccgaagctacgcacaaggaagcttcagcgtgacaacaggaaagggaaccgacttaaaggggaaaaggctatttag

SEQ ID NO: 27387 - DNA, 1602 bp, Zea mays
  Peptide Sequence Number=SeqID_70762
atggcgtcggacccggcccctgacgacgcggccgcggccgtgaatgggcacggcaacgacaacggacacggtaacggcccgtccccgtcgaagcgcccccgggcggtgatctcggaagccgagatccgcgtcgagttcgcacaccacgacgcagccgtggcgcgcgtcaacaacggcagcttcggctgctgcccggcctcggtcctcgccgcgcaggcccactggcagcgcctcttcctcgcgcagcccgacgccttctacttccacgttctccagcagggccttctccgctcgcgcgccgccgtcgccgaggtggtgggcgctggcgacgtctccgaggtctccctcgtcgataacgccaccacggccgccgccatcgtcctgcagcacgcagcctggagcttcgccgagggtcacttcgcgcgcggggatgcggtgctgatgctccactacgcctatggtgcggtcaagaagtccatccacgcgtacgtcgcgcgtgcgggggccaccgtcgtcgaggtgcccctcccattccccgtcgcgtccgccgacgcaatcattgccgagttccgtgctgcgctcgcggtcgccaaggaaggagggcgtagggtcaggctcgcagtcatcgaccacattacctccatgcccagtgtcgtcatcccagtcaaggagctcgtcgccatctgtcgagaagagggcgttgacaaggtatttgttgacgctgcccactctattgggcaggtgcctgtggacgtgcgcgacattggagccgatttctatacaagcaaccttcataagtggttcttttgcccccctgctgtggcctttttgcatactcgcaaggatgacccgatagcctcccaactccatcaccctgttgtttcccatgagtatgggaatgggctgcctatggagagcggatggattggaacacgggattacagtgcccagcttgttgtgtccgaggctatagattttgtgaatcgatttgagggtggaattgaggctatacgaaaccggaatcatgagaaagttattgagatgggtaggatgcttgctgaggcatgggggacttttcttggctcacctccggaactgtgtggtagcatggttatggtggggatgcctggttgccttggtgttgagagtgatgatgatgcaatgagagtgaggacaatgttgagaaaggatttccaggtggaggtgccggtatactacaactcaagaagggtggaaggacaggagatgacaaaggataaaaatggtgatccagtgacagggtatgtgaggatctcacaccaggtttacaatgtcacagaggactatgagagactgagggatgttgtcaataaacttgtttctgaagggttcaccagcagcaagttgcggccttctgagaagtgtttggtgccaaagaacagaaatgaaaggaagccaaatactgacgagcagataagaaaaatgaagagcaaagagttaacagggggggggggggtgaacattcagatgaggagttcatctcaggacggtgaacaggaactgctgctggcgatttggagaagaggccgatcagctgccggtgctgggaaacagaagcgttga

SEQ ID NO: 27388 - DNA, 81 bp, Zea mays
  Peptide Sequence Number=SeqID_70763
atgcagcttcatacccttagagatgatgtggttttatactctcagaggtgcttgttgctcatcaagggaagtgggaagtag

SEQ ID NO: 27389 - DNA, 585 bp, Zea mays
  Peptide Sequence Number=SeqID_70764
atggccgccgccatggccggctcgagatactttggtacaggtgacaatgagattgatggttctgattacgattatgatgctgctagtccactacagccaaacaggatacttgctgagtatgttgatgtgtactcacccttgctctacacaccaaacaccccccaggttgtcagcattgcaaccactgctcaggcgaagatgaagctgtggaaggagacttccaggagttccaagattacgacgagttctaggtgtgggttagcggcaacccccagtcggctgcctgtgaaggccgcggttatctacgtttcttttccgcactttgatttattgattggcctcatgttcctctttgaaggagttatatctggcgcagaggatgctaggaaaatactcaataatcatggtacatgtccaattctaagtatgacgaatcgaggagagaagaaaaagaaagcaagtgtcagatgggatgccattgctcacagggcatggatagaaatagttctagaagaaattgctgcccataacagaccacaatgggttttgaatatcataggaaatgctaaccttgttgctaagtga

SEQ ID NO: 27390 - DNA, 459 bp, Zea mays
  Peptide Sequence Number=SeqID_70765
atggatgcaggagataggggtttcagaactctatcagctcatgtgtctctgacgccgctatccacctatgctgcttcggtcagcaatgctgctaggcgagctctgtggtctctcagccacacttacaggcagcagttgcatgacatgaggtacaagcatcttcctctacgtcttcgtggagaaagccagaccagcattgttccaagtgaagctggagaagattgcctcaacgcccttgttggtgtggtggcaggtcttaacaccgacctagatagtgctaccctagacctctccggggtacatgaggagctagaagatgcacatgcaaggattgcagccctggaagctcaacttgaaggaaggaccccccctgaagttgaagtccctaccatggctgtgtctctgcccggcaagaggatccgctatggagaactaggatctatcaccaggctcctttag

SEQ ID NO: 27391 - DNA, 801 bp, Zea mays
  Peptide Sequence Number=SeqID_70766
atggtgtcgagctacacgcagaacgggaggcatgaggaggcggtgcgcacgttcctggacatgtgggacggggccggggtgcggcccaacgagctcatcgttagcagcgtcctgcccgcgtgcgctgcgctcggggccctcgcgctggggaggaaggtggagcgctactctagggggagagggatgctcaggaacgtctatgtcgccaacgccttggtcgagatgtacgccaagtgcggcagcatccgccgggcttggaaggtgtttcggggcatggggacgcggagggatctttgttcttggaactccatgatcatggcgtttgccgtgcatggcctctggacggaggcgctggccttgtttcataaacttaggatgacaggggcaaaaccagatggcattacatttgttggagtcattttggcctgtactcatggaggcttggtggatgaaggcaagctgctcttcaactcgatgagaggggagttcggtcaggtatcggtggagctgcagctcctgcgcgagaagtgggggctcctactggccgatctgatctttcagtcttgctctgtttgttggtacttcacagatagctgggagcaattccgtatcagtggcagcatagatgtgattgatgcttctactacagaccctaccaagctccagcacaaggagaaagcatggttttcaagttcagtgaagtcgagattgcagtactttggaccacagccaggcattccggttctagatgatgagcatgtgatgatgagcatgttaagggcgttcatctcgatcctttag

SEQ ID NO: 27392 - DNA, 459 bp, Zea mays
  Peptide Sequence Number=SeqID_70767
atggcgggttttatttcctactcatcgggggcctatctgcaaatgcgaccgaccgaagggtatcgggggggatctggccgtccgatctacgttgggcgaccaggattacatccacacgtgattgaaccggtacgcgccatgggcccttggatcacaaatctgcggtcacggtttaacgcgttgaaccaatgtctgagatttaatctcgaccgcacaccgcatgatcgatggtggggcgcctttccccctattctaaatgcggagctcggcggcgacccgaaccacagcggcggcgacatcaccggactcggcccaaactacgaatctgcgcctaaaagatcccttacgaagtggctacacgaagcgggggcaatcttggagctgtatgatgagttctcaccagaaatcacttgtgatgaagccctgcccacggcgataagcggacccacgacaacttga

SEQ ID NO: 27393 - DNA, 276 bp, Zea mays
  Peptide Sequence Number=SeqID_70768
atggagaggagaagcggagcccaggggactaccctttatggtcgcaacaagccgcacgacgcggagaagaaggaaggaactgacaaacgggggccacccacctgtgactggccgagacgccaaaacagggtcgttggcgtgcgctgggccgaggggtggaaggggaagtgggccgcgaaggagaagagaatgggccagccagggaaggaaatggccgaggcgcagggccagactgcgctgggggctgaggtcgcgcagggggcgaggctgcgctag

SEQ ID NO: 27394 - DNA, 168 bp, Zea mays
  Peptide Sequence Number=SeqID_70769
atggagagtcatgatctctgggtagaatgggaatcacgactcatgggtaaagtgtgcaacctctgcagagtgttagaaagtggtatatcagtcgtgctcatgtgctcaggaggagatgcaggcaacatggaggactttgaggagttccaagactacgacgagttctag

SEQ ID NO: 27395 - DNA, 261 bp, Zea mays
  Peptide Sequence Number=SeqID_70770
atggcgcagcggcgttcacgagtgaaattgagggcggggattgaggctacacggccatggctcgtattagatgcactgcacgaggtggagtctgggagacagccttcccctacacctcagccagagatgccccctgcaccactacagggcatcccggctgctgaaggagaccctgacggagacaaaggcgaagacgaagacggagatgacgatgacgacggtggcagttcgagccacaacatggagctctcagaggagtag

SEQ ID NO: 27396 - DNA, 318 bp, Zea mays
  Peptide Sequence Number=SeqID_70771
atgggcttggctgttgcttgtgcattgtgtaggtattgttgttcgtgtgctctgccctgttttaagttgtatttcaacttccaacgatatttggatttaagtttgagcttgtatgttcaggtgtcatatcgtcttcaaggggcctggaccggaaagcacgacgacccgatgaccaggcactgtgcttccgcaaccgccgctgccatccacaccaacctccagagcaacggaggactgctatcgacgttcgaggcgatgcgggacatggccagggatgggcagatcgtgttcgtatgcatctcccaggtgctcttctga

SEQ ID NO: 27397 - DNA, 216 bp, Zea mays
  Peptide Sequence Number=SeqID_70772
atggagcatttatttgctattgtacgccaaatgcttgctctactgcacattgagttactatataaccttgtacatgttagcagaaggacttggcttgtcagggattgtttctatattattcacagggatggttcatctatatgggtttcgatattgccatggaagagcatagctggtcacatgttggcttcatcttcttctcaattgtatccttaa

SEQ ID NO: 27398 - DNA, 807 bp, Zea mays
  Peptide Sequence Number=SeqID_70773
atgccaaatgccacatcctgttcctatgcattcctcacagtcacagacgactggtcatcacctagtctgcatttgtcccttgctcacaactgcccagtggaagtctacatggatgcctacacctcaacatgtatgcatgaccagcaggagtatttaattgccacaaaccttgtaaagcggccacacatagtggaaaaagtaggcttcttgtatggaaagcgtgcttctctgaagccaattactcaggtcacaggtcagccaacaagtaaaaggaataaaccattctttgcaaactttggggctatcgtaacttttgcaattcttgggacattcattgcttctgttgtaacaggagttcttgtctatcttggtgggctgacatttctaatgtacaaacttccactggttgaatgccttatgtttggtgctcttatatctgcaactgatcctgtcacagtgctatcaatattccagatacctaagctgcagtgcaaaatgaacaagagatggcttgcagtcctgcacactgcacatactatcttgaacttaaagttacctgaaaaggaaaaagctcattcccactatctgataaaaaaagggcgtacccagtgccgtaggcttcccgcactgtgcggggtctggggaagggtatctttaagcgccaagccttacccgcataatatgcagaggctggggctcgaacccgggaccatccagttacagacggaactgggttctgatgttaacttgtatgctttggtgtttggagaatctgttttgaatgatgcggtctgcctctggctctga

SEQ ID NO: 27399 - DNA, 363 bp, Zea mays
  Peptide Sequence Number=SeqID_70774
atggcggcggccatggcgccgagcggcgaggggaaaggggaggggggatgggagagggaggagagagggaggagggggggctcaccagcgttggagagcgacggcgaggggcggccggcagggggcggcggccgagcagggggcggcggcggcttagggcaggggcggtttttagttgaaaacagaagctatgggcagacagtcaggtccaaggccccctctttggtgtggctcctgggtgcaacggctcctcaactacagcagcactgtagcaggagtggaaggagccctatgaaaaccagacccgctggctccttcctatggttcattttagaccagcaggagccagagctagagctttaa

SEQ ID NO: 27400 - DNA, 681 bp, Zea mays
  Peptide Sequence Number=SeqID_70775
atggcgcttcgaggcgggcaaccggcggcgacgctccccagatcaagcgatagtgacgctccagaaacaggcgagcaagtgccggcggctggctgcctccccagcagctactgcccactaatacattggtcaagctggcaagccgccgcgccacccgcccgcactagcccactccggagtccggccctcgccctgctcgccgcaatgcatcaccggccggagaagttttttgaagtggagatgaaggtgcgcgactatgaaattgaccagtatggtgttgtcaacaatgcaatctatgctagctactgccaacatggtcgtcacgagctgcttgagagcgtaggcatcagtgcagatgcagtggcgcgcagtggggaatccctggctctctctgagttgaacctcaagtactttgcccctttgaggagtggcgataagtttgttgttaaggtgaggcttgcaggcatcaaaggtgtacggatgatattcgaccacatcattacaaaactgcctaatcatgagctaattctggaggcaaaggcaacggctgtttgcctgaacaaagactactatcctacccgtattcctcgtgaactattgtccaagatgcagctcttcttacccgtggacagcagagggtcaaatgaagacgttaataatcggaataacagctgcaactaa

SEQ ID NO: 27401 - DNA, 372 bp, Zea mays
  Peptide Sequence Number=SeqID_70776
atggcggtgccaatgcctagttccaccctgcaggcgcaccgtggtggtcgagcccctctccagcgcatacagcagtccatgcgcacacctgatgtttatgttcgcgatcgggtcttggtgcccctaaaacccgggtgtgacatcggcgcaatggcaaatccaccactagccaagagtatgtttgacaaggatgtgatcaagcagaagtacctccacaaggccaagctcaaggagtgtgcctttctcgactccttcaacgacctcgacaatgactacgaccatatttcatctttattgagcaatgatgagctcaagaggcgggttgaggacaagttgaatgaacttagtttcttcatcgacaccaccaaatga

SEQ ID NO: 27402 - DNA, 723 bp, Zea mays
  Peptide Sequence Number=SeqID_70777
atgcagcagcagatggccggcctcgttcatcatcaggccatcgggatggtgagcttcagctccggcgccaatgcccgccaccacgtggcggtgcacgccggccgggcgcgtctcggcagggtcacggcggctgcgcggcccaagtactgcccgctccggggcgcggctgccgtcgccgcccccttggccagcggccgcgagctgctcgaccaacacactcgccctagcaacaccacatcgagccagcagcttactaccaccgtcaggaaggacaagtttttcgagatcgagatggaggtgcgcgacgacgagcttgacgagtacggcgtcgtcaacaacgccatctacgccagctacctccatagcgattatcttactgagccagtaaggtacgtttcaggtcgtgacgtggtgcttgagaagctgggcatcagcgtggactactggacatccacgggcaacgccatggctctttcagagctcaacctcaagtatttcgcgcctttgaggagcggcgacaggttcgtcgtgaaggtgaagcctgtccaaatcaaaggcgtgcggatgattgtggagcacatgatcgaggccctgccggatcgtaagctcgtcatggaaggcagagcgaccgtcgtttgcctcaacaaggacttccgtccaactcgggtattcccggagttagcagcaagagccaaggaagttttctcctgcaaggttgcataa

SEQ ID NO: 27403 - DNA, 1755 bp, Zea mays
  Peptide Sequence Number=SeqID_70778
atgtcttcgcccgagctccgggagtcttcggcgcggatgctgagggttaccgggggttggtggcctaggaatgttcctatcccccgcgcggccggcgaagacttttttacgtctcgcatggttcgtgaatggagagtgtttccttacgggcggaatattgctgctgttgtgtcggtagtgatggacaaggatcgccagggaggtgcacaaaagcgtcaggcggttgtcaggcttcatgaagccaggccgaaaaggcagcggggggctgcgaaggctgcggcccccggcggaggcaagccgccgctggcggcgaagtcgggcgtccctccatctagcaaggcgccggaggcagcggcaggcgccggaggctccaaatcgacgaaggctgtgccgccgtccggcagagtggcggaggtcgcgaaggcggcccgagtgttgccgtcgtcaggcaagcgcgtcgccgatttcgccaccgatattagtgtggacgactatcttggtgggtcggacgaaggccaacttgttatagttgcgcatgccgcggcgaccatggcggctgccgtagtgccgaaggcgaagggcggggctcttggcgccggaggcgagatgtcggcactcgcggccgtcagggatgaggcgggcgctgcgtcccgtcggctgaaggaggtgacggaggcactaagtcaggtggctgacttcgccaaccgcacagcgtcgggggccctcacgacagttgtgtctgccgaagtcgagagacttcggacgcaacatgctgacgctgtccgtgaaaaatcggccgccgacagcaagtgccgcaagctggcggacaaggtggccacgctggagggggagaagactgacctccggcgccaattggcgggggagaggagggagaccaacgaggccctcgccaaggcgcaggctgcgcaggcggaggctaatctggcacgggcggagggcaatcttgccagggagcgcgccgagcagctgcaggagcggctcatcgccctggagagccgcgtggagagggccgaggccgcgacgcgcgcggaggccgagcggacgcgcaaacagctcatggatttgtaccatgagctgggcgcgcggaccggtgacttcgaggtgccggagcgagagcccggacttcgctgcctggagtgggtacaggaggagttgcaggcactccccactatcgtggaggggtttatgtcgtatgcctccctggtcacctgcgagggggcgatgaacgcgctctctcgcgaagggtgccggcacttcgaggtcttcgaccaagctgacgaagactttgagcgagatatctacaaggttgaggaccccgtagtgaaggaatccgccggagccatctacgactggatgtggggtccgcacggtcgtgaggtggttagggagcgggccgagacggcgagggctcaggcggcgcgtggcgagagggtggatgacttcggggcgttgaacagcgtgctgcctgacccggagccgaccccggcggaggccgtgtccggggccgccctggagccgcccccggagactgcggaaggcgcatcggatgcccccgcatccgctgcggctggcgaagacctgcccccagagaccgccgaaggcgcgcctgatgcccccgcagccgctgcgccgagtgctgaagtcctgcgacggttcaagattttgggcctgcgcacgcaaccgccactactaaatttttggcggcttcgaccgtggatggtggagctcggttga

SEQ ID NO: 27404 - DNA, 1521 bp, Zea mays
  Peptide Sequence Number=SeqID_70779
atgagggcggcgcccttcagtgccgacgggaacggggcggggaccatagaggcgctgctttggccgcacgggaagggcggcggcggagggcacctgctgttggagccgacgtcggtgctggactgcagacggagcccgagcccgccgtactcgacatcgacgctgtcttcgtccctgggcggcgccgcgggggactccttttccggcgtggcggcggtttcggagaacagcgccgccgccgccgccgaagccaccaaatgggcggcgccaggcgagcacggcagcggcggcggcggcggcggaagcggtggggggaggaaggaggagtggcccggcggtgacctaccgcccataccgggggccctggacatcggtttcgtcggggaggagggctgggatgccatgctcggcgacgccgcggcggcggccgggcaggaccagacattcctcaactggatcatggccgcgccgggcgacatggagccgccgccgccgccgccgccgctcctcggtaatgccgccggcttcgggttcccggcaccggacccgctcgggttctccctgcagcatcaccccggtggcggcggcgcctcggccggggcgctggcctccgacctgtcgtccccaggcgcaaggtcgctcagcggcagcagcggtagcggcagcaaggccacttccactttcggcctcctaccaaccgaggcggtgcttcagccgccgccgccgccggcggccacgaccatgcgtttccacgacggtgccgacataaagcccccgcttctgggagtcccgtcggcaggtctacttcatcaacaccagacgctgccggcggcctccttcttcatgccgctcccctccttccccgaccatcagcaccagccacatctcccgcccccgccgaagcgccaccactctatgcccgacaacctgttcctcctccaaaaccagctccagccgccgccgtcgcagggtctaccattcccgccactgcataccaccacgcccttccagctccagccaccactgcaaccgccgcggggagcgatgaaaacaaccccggcggcgcagcaacatcaacagctcctggacgagcttgctgcggcggcaatggcggctgaggtcggcaactccatcggcgcgcgagagatattggcgcggctcaatcagcagcttcccccaatcgggaagcctttactccgctccgcttcctacctcagggaggccctcctcctcgcgctcaccgacggccaccaaggctccactcgcgtaacctccccgctcgacgtcgccctcaagctcggtgcatacaagtctttctccgacctctcgcctgtgctccagttcgccaattttacggccacacaggcgcttcttgacgagatcgcctcaacaacttcgtcttgtatccgcatcattgatttcgaccttggagctcgcataccgccgtggaactgggaacggtcccctgccaatgttgaagctcacagccttcgtgtcaagtgcttcccaccacccgcttga

SEQ ID NO: 27405 - DNA, 1491 bp, Zea mays
  Peptide Sequence Number=SeqID_70780
atgtcttcgcactccatgtatcgcgtccttccaccttccgagcccccggacggggagcgctcgtgtcgcttttgtcttgctgtcgttggaggaacgcaacttcgcggaagttggtacctttcagccatcgctcggcttcaaggattttcatcaggcagcccggctgcatcccctcaccggtggtcacccaagacggtgaccaccagttcgatggtggggagaagtgagctgggctgcgacctcagtcccgccctcagcttcaaggatcttcatcatccttgctggggcagagagcgaggcgagtcggggcctgccttcgcgtggactggcgtcccgtctctttcagcttctaggggtgggaaccatcctccagctctgcggaggaggcgccccctagccatgccggggaaggcgaactgttgctgcccagccagggtgcaacattccgtcctttgtccgggcgatggtggccagccgcaccgggaggtggacgccgccgtcggtgctgaggtggtggcagctggagaggtaggcttttccgccgacgagaccgtcagcgccacccgcggaccgacctccggctctttggctttaatatctggttcgcgtcccttgagtggggacgcgaacgagagccttccggtggctgcgtccgtcctgggaccatggctgctgctgtggaggttgctagcaagtcgcccggagtctgtcgtcccgcaggctctccgatgtggaggttgttcatacctgcaggggcggaaccggagttccgtttgtaatggcaccttgagtgacggtgtttgttcattgtggctgtcggggcctgaacatgaatccctcggctcggtcggccttgccgcccgaggcttcacttgcttagtcaaagaaaccctcggccgctctgcggcgagccggggtcgagggcagcggtgtcagcgtggacagaggcggagttggctcgaaaaaggaagcttcgtcggccggggcctggccgggtcgtccactagcgagaccaacaccgcagtcgagttgccgaggccacgagccgggctggtgtcctcgggggacagctggttgaggctttggggcgaccggccgagccgtctgcttgggccgggttcctggaggagaccctggcgacgatggcccgggcgtggtgctgacgtcgtccttcggagcggagatcctccgaccgtgttgccgtccgaggcccggtcggacttcgccgaaggtggagttgacgccgagggtgctgctgctccccctccatcgatgtctgagcctgcaggatcggttcgcctgtatatcagggcttgctcgtcggtagcagaatcatttatccgagctagagttacttctcacggaagaagtccaggaactttctgcagtgaactgggtgccgttgtcggtgatgatggagttcaggaccccgaagcgatggatgatgttggtgaagaatgccaccgcctgttcggacctgatgctgtttag

SEQ ID NO: 27406 - DNA, 954 bp, Zea mays
  Peptide Sequence Number=SeqID_70781
atgcaggcggcatgcaaccgcaccaagggggtgcaccctttcgactttgacgcgtccagcatggaggcccaggcccacacgtcatgtaaccggcgcgccggttactacgtgcgagaaactgcaccgccacttgcgccagtaccgcgccttctcgactgcggaactggtgccgcgactcgaggtgcatggcccaacagtgccaaccaagcatatcggtcacggggaccggaaaaaggggatactccaaaagggatccttctccgtgaaggaagcgggccccgagcccccctactgatcagaggttcgaaggctggcccctcggaagggttcaacagccgccgcagagcactcgggctccgcgcccactactggctggcccccgaagggttcgacaactgcctcagagcacgcagagcgagggatgaccctgggtacgttcgatacataaccaaggctcgggctacgctcccgaggtaccctaggacattttccgagaccgacgggaacgattttgtaacggaatcctaccagagggaggcatcgagccctcggaccccgtcaaaaggggaccggctggtaaaccccatcagcacaaagctgcgaaggcctgatgggcgcgattcaggccaaggctccgctcaaaggacacgatcccgcctcgcccgagcccgacctcgggcaaagacagccgaccccggaagattcacgcctcgcccaaggatcccctcaagcaacggacgcaccgtcgactcgcccgaggcacagctcggcgccgcctgccctgctccgactgccgtgccactcgccagagtgaggtcgacagcggctaagtccagcctcgggcgacataggaagctccgcctcgcccgaccccagggttcggcccccgtctcggcctcggaagatggacttcgcctcgcccgaccccagggctcggactcaaccacgacttag

SEQ ID NO: 27407 - DNA, 669 bp, Zea mays
  Peptide Sequence Number=SeqID_70782
atgcctcattcgagcactataaattgcaacgaccagggccagcagcgagcaggcgccgtccggctcggagcggcgcggcgtgcggtcagcggggctgtccgggctagcagcagcaggcatctgggccccgtgcgggcgctcgtctccgaggaggccgccggcggcgagcgggcggcggagggcgagggagaggacgtcgaggtgaggctgttcgtgggcctccccgcggacacggtggtctctgacggccgcggcgtgggccgccccagggccgtctcggcgagcgcgctcaagctgctcggcgtcgacggcatggagctgccggtgtcctgggccgtcgcgcagcccgggcccgggggatggtttgagtgggtcgggtaccgcggcgtcgctgccatggtccgcgacgcggggctcgacctccgcgtctcgctccgcaccgacggcgacgcgctccccggatgggtggccgacgcggcggccgccgaccccgacgtcctcttcaccgaccgctccggccaccgccgtgtgggttgcctctcctttgccatcgacgagctcgccgtgctcgtcggcaagtcgccgctccaggcctacgaggccttcttccgcagcttcgctgacgagttcgatgacttgttcggatcaacgatcacgagggatatatag

SEQ ID NO: 27408 - DNA, 300 bp, Zea mays
  Peptide Sequence Number=SeqID_70783
atggggtggtccgccgggctgtggtggcttttggcggcggtgtgggtggtggtggcggcggctgcgacggcggagggtgaggtcgcggtcggggcggcgccgaggcggcacgcgtacgcgtcgatgatgtacatgggcacgccacgggactacgagttctacgtggccacgcgcgtcatgatgctgtccctgcgccggctcagccccaacgccgaccgcgtcgtcatcgcgtccctcgacgtcccgccgctctgggttcaggcactttcaagtttcattgtattcgtcacatttccttaa

SEQ ID NO: 27409 - DNA, 876 bp, Zea mays
  Peptide Sequence Number=SeqID_70784
atggtggagcggagggcgaagaagcggatggtgttcgtgatgaacaagctcatgtggctggtgtgcctcttcatctcggtggccttcatcgcgctgacctacgtggtggtggggcacgacgactggtggctggcctggtgcaccatgggcatcggcgccgcgatcatgctcaccaccctcggctccatgtgctactgcatcgtcgcgcacaggttggaggagaagaacaccaggaagatcaggagggcctccgcgagccagtcccgcggctcgtggtcccgatcagtcgactcggacaaggagatacttaacagcgagtacaagacgaagataggctgcggcaccacatcagtcttcttcaaccaaaggactgaaggcccttcctgcggaaccaagttcaggtcacttgaccgtccgatgaggcgcggcgcctacaagcagtgtgtcgacttcagcccctcgcgccgccaccgcgaggatggcctcctcgccctctgctgccttgaccgcgacgttgggctcttcaagcgccgtcatgacgagcctgctcctgccgtcgctgtctccgattcgactcctacacccttgaagtcgacgcacccgctcatgtccaaggaactcttcggctacttcgttgcgccgtcatcttccccatattatggtcgccacaccactgtccctactgctcctggcggtcgccctgccaaccgcaacgtcgtcgtctgcaacatcgacgtcgtcgtccctttctactcaacaggcgtcattttcttcggtcctcttggacacggcttcttcagctctcctccaggctccagctgcgcctcggtcacgtgcccactggtctccagtcgtcgtgtggtaatcttcctgtga

SEQ ID NO: 27410 - DNA, 1011 bp, Zea mays
  Peptide Sequence Number=SeqID_70785
atgccccaggtggacctggtgtgcggcgcgtcgggcgccggcgctggcgccggggacaggaaggtgtcgtgcgagacggtcatcgcggggggcagcggcgacgcctcgccgccgccgccgccgccgccggacccggacttccctcccgactcgataaccatccccatcggcgacgacgcggcgttctcagagctgaacccgatgtacgagcgggacgactccaccaagggcagcaccaaccccaagtccgcggccgccgccgtcgccaaccccatcgtcgcggccaagacgcggtccaactccacgcgcgccgcggggggcgcacccccgcgcccccccgcgtccggcaccactttcttcggcctcccagccaggatccgcccgaccttctcccggcgccggccgtcgcagtcgcagtcgcagtcgcagtcgcagggccggatcttgcgcgacaagcgcgcgggcggcgaggtggagccgcggtcgcccaaggtgtcctgcatcggcaaggtcctctccgaccgggagcggcacgggcggcgccgtggctggtggcacggcgtggcggccatgttccggtgcgacggctgcgcccgcgttgcccgcggcgcgtccaggaacatggcggcgctggaggacgatggcgtggagcagcagcagcagcagcaggcgggcgttgcgggaatgcggaggttcaagtccgggaggagagctgcttcgtggggagacgaggcgctggccacggcggcggttgtggcgagaaggcgggaaacgactggcgtcgccgggacccgccgactgtggtcgccgataggtgagaccgactgcccgaggcgtctcgagttggtcgtatcgtccgtctctgccagggatgggcgatcgcagactggcctagaacttcgagttttggatttcggtggattgtttctgcatgcaatttcgcaacccctttggaagggattgtttgttgaaaaattcaaccggtcgtcggggaacgctgtgtataaatag

SEQ ID NO: 27411 - DNA, 84 bp, Zea mays
  Peptide Sequence Number=SeqID_70786
atgacggatgcggagaagaaggagacgaggaaatgcaattgggagagttacgacgacaaaggagagagattggatgtggcgtaa

SEQ ID NO: 27412 - DNA, 315 bp, Zea mays
  Peptide Sequence Number=SeqID_70787
atgcctaagataaagacaagccgtgtcaagtatcctgaaggatgggagcttattgaaccaacaatccgtgagttggatgccaaaatgagagaaggttacgagcgcctttgctgcctccggtgcatacagacacgtgatcacaacttcgcaacgacatgcgtctgccgcgtccccaagcatctgagggaggagcagaaggtggagaacacccggtacagatgcccacgcctcctccctgttacctacattgaccggacccaattgggtaagagcgaaaagcacgacacatcctcttgcgtcagggtactgcactga

SEQ ID NO: 27413 - DNA, 318 bp, Zea mays
  Peptide Sequence Number=SeqID_70788
atgcgggacgccatcattgcctatccggcggagctagccagatgggacgccggtcttgtttcctgcggtccgagtcagctcggggtagggttgggcgaggtggaagctcctccgaagctgaggtcgagtctgtcttccgtggccgaggccgagtccgagcccctggtcgggcgaggcggaggtcgtcgtctgaggccagggcggagtccgagccctggggtcgggcagagcggagttcgccgtcttccgggacttagctcgagtccgagccctgggtcgggcggagcggagttcgccgtcttccgggacttagcctga

SEQ ID NO: 27414 - DNA, 1005 bp, Zea mays
  Peptide Sequence Number=SeqID_70789
atgactcggctcgaggacgagttttgccacgtgctgtcggcgcgcgcgctcgacctcgagatcgaggcgctgtccagcctcagctcgctttcgatggccagcgactggagtaactctgacgccacagaagcggccgctggggaggaagacgacggctccgtgtcgtcctccgtcggcaggcgcagcagctaccgctccctgcagagcatccgcgagattgacctcttccccgtggatgcaatctccgacctccatacaaaagtccgatctgctcgtgcatgtcacccatcgccgataatgagaactgacattattttgtttctgaaggaaggatcacaaggatggctcctggcccttgtcatgctttcaagcgtccctccgattgccattgccggtgcaattgtttcaaagttgatgacaggactctccacccgaatgcaagcaaactacagtgatgctggaaacgtcgtggagcaaactcttggtgccattaggacgctatggtcacttatcactcctgtaaatcctgcaaatacctggggtccacttatatttatctttgctgtttctgcaaccaaagaggcatgggatgactacaacaggtatatttcagataaacaagtgaatgctaaggaagtgtggattgttaagaatggtacccggaaacacattcaagctcaagatatccgtgtcggtaacatagtttggattcgagagaatgaagaagtaccatgtgatcttgttttgttgggaacttctgaaccacaaggcatctgtcatgttgagggaggattaccaccagaggcagtatacaatatcataattgatccaaagaataaaagggtgttcatgatcagtaagtttccatctgaaaaggaagagatggccagcaagtattgttccacagagcaagttccagatgagtgggtttttggtaatgcttttactaagctaaagatgatgcgtccatttgtaaacagttgggattccactgtggctatataa

SEQ ID NO: 27415 - DNA, 705 bp, Zea mays
  Peptide Sequence Number=SeqID_70790
atgggggagggcctgcggagcaacggaagactgacgggcggctcgccgccgcccgctctgacagcgacgacaacgacccccgctccgggtggccgaactgcagcggcgcaggcctcggggtgggcgctgctgcaatcttgccctcacccacgccgacgctcgaggggcgaggacaagtacaaagagccggaggcccgaagcacggatggtggcggtgaccccgtcggcgacggggacttctcgagccgcctccaccttggcaccggcgccagaagccatcagccctctggcagatccccactcaaatcctcccggacgagtggggcactgatccccgcgcggaggtgccataccagtgcaaaggcaggaccaccccagaacatgaacgccgccctagcagcgtgcggcgtcttgggcggaggggccgccaagggccaagccgacgagctcgacacgctgggggtgacgacgcccgccgtcgaccagccccgcgttgtcaaagtccgggccgcccgcagggacagcgagcgccctctccctcgaacgccgcaagagagggcgacccacgaacccgcgcgggaggtagagctccggctcagcccggcctccaccccagcgaggatgatgaacatccttgaagctgagggtgggaccaagatcgcagcccggcttgcttctccccacccaggggctggtggttactga

SEQ ID NO: 27416 - DNA, 402 bp, Zea mays
  Peptide Sequence Number=SeqID_70791
atgcagactgcaaacgttcatccggtgtgcaccggcgcgggtgcccgaagcagtggcaccacagctgccaccggtggcgcgcaactcggctcggccgactgcgggcatcggctgcaaaagcaaggagataacgcgcggcagactgcgggcgtcggctgcgcctgctggatgcatgggcagcagcggctcgtcgttgctatcacttcgtcgccgcgggtcgatagcaaagcttggcccgcttgcgcatcgcggctgccggacccggacgcacgcggccgcctggaggcgggcggctcccttccggcttccgcggcgcctgaggagttagaaatgcgaggtgtttgcctgtggtctgccgagctagatgtcaacagcgtgctcgtgctcgtcgggaagccgtag

SEQ ID NO: 27417 - DNA, 1401 bp, Zea mays
  Peptide Sequence Number=SeqID_70792
atggggctccgcgtccgcgcctcctccctcctgctgtcactggtcctcgagctcgccgtcgcgctcgtctcagaacagcatcaactcttcgagtgcgccagtaacgtattgccccgcgtgtgcgttaatctggcagtgtcggcgcagcacaagttcgggatcaactacgggcagatcgcgaacgacctcccggacccggcgcaggtggcgacgctcctgcagtcgatgggcgtgaacaaggtgaagctgtacgacgcggacccccgggtgctgacggcgttcgccaacacgggcgtcggcttcaccatcgccgtgggcaacgaggacctgcaggcgatggcggccagcccggacgcggcgcgccgttgggtggcggcgaacgtgcagccctacgtcccggccacgcgcatcacctgcgtcaccgtcggcaacgaggtcctgtcgggcaacgacacggcggcgatggccagcctgctcccggccatgagggccgtgcacgccgcgctcggcgacgcgggcctcggccagccggtcgccgtctcgtcggcgcactccgtggacgtgctcgccaccagcttcccgccgtcgtcgggcgcgttccgggaggacctggcggggtacgtgcgccccatcctcgacttccacgcgcagacggggtcgccgttcctcgtcaacgcgtaccccttcttctcgtacaaggcgagcccggggccggggccggggggcgtgtcgctgccgtacgcgctgttccagcccaacccgggcgtgcgcgacccgggcaccggcctcacctacgacaacatgctgtacgcgcagatcgacgccgtgtacgccgccatgcaggccgcgggggggcgcgcggacgtgggcgtcacggtctcggagaccgggtggccgtccaggggcgacgacgacgagcccggcgccacggcgcagaacgccgcggcgtacaacggcaacctcatgcggagggtcgccgcgggccagggcacgccgctcaggcccgccgtgcccgtcgacgtgtacgtgttcgcgctcttcaacgaggacttgaagcccgggcccacgtcggagcggaactacggcctgctctaccccgacggctcgccggtgtacgcgctcgacgccggcggtccgggcccgggcggctcgctcaacccgtactacacgtccatgttctcctcctcctcctcgtccggatcggcggtgggcaaggacagcgccgcctgcgccgcgccgactgcagtgccactcgacagagtgaggctgacaggcagtcaggtcctgcagaaggcaccacaggaaactccgctccgcccgacccagggctcggactcgggctcagccccggaagacgtcgaactccgctccgccccgacccagggctcggactcaggctaa

SEQ ID NO: 27418 - DNA, 255 bp, Zea mays
  Peptide Sequence Number=SeqID_70793
atggctggggcatggccgcaaagggctggccatggctggagcatggccaccgggcttcacaccgctgtcgtgcagggaagatggcatcgcaaggcgcgctgtagccagggcacgtggggcacagcggctgggagccaggccgcagcgcaggctgccgcacgcagaggcactcatggcagggcagttctgtcggctaggggaaggggcacggggcccgacaggcacgccggcaatgctcgttgcgaccgcgcgtag

SEQ ID NO: 27419 - DNA, 1215 bp, Zea mays
  Peptide Sequence Number=SeqID_70794
atgagacggaaagacggcgggtatcccccatccgggggcttggaaggtggaaagacacgatgcataagggagcgcgaagacatggtcgccttccaagggggtcaccctccttttaaaggcggctctccctacttgcgtccccagtcgtcgcgggctgagtcttctccaacacaccccaaggatctcccctgcggcgcgggggctgggtcccacacgtcatgcaagccggctcagagcagaagaagccaaaccgccgtgcgcggtgcgtacaaccgcccagcggttacaagcgactctccacttttgcccagaccaacgggcgaaaggagcgggcagccatgcaggcggcatgcaaccgcgccaagtgggcgcacttctccgactcccaacacgcccatcatggaggcccaggcccacgcgtcatgcaaccggcgcaccgaatgcttcgtgcatgcacctgcaccgccacttgtgccactaccgcgcctcctcgactgcggaaccaataccgcgggcaggagcagcggccccgtcatcagccaagctcacgtcccatccgggggcagcgagagaaccctctctcacggcgtgaagacaacgcgcctgacaggcggcgcctctggcaggagaagcgggcgacgcttcgccttcgccataatgaccgcgtcagaaaagggaccgggaaagggggataccccaaaaaggatccttccccgtgaaggaaccaggctccgagcctccctactgatcagaggttcgaaggctggcccctcggaagggttcgacagccgccttagatcgcgtgggctctacacccactactggtcagaggttcgaaggccggcccctcggaagggttccacggccgccttaggctactcgggctccgcgcccattactgatcagggctcaccggagacaccatgttcggcgcccatcgagggcaacatggcgctttcccccctcctccttgcagaaaggcgacgcaggggcgtatgtaaaaaagtcgagtctgtccctgatcgccctctcgccctgtgcagaggctcgggggctgctctcgcaaacctggctccagccaaaccgttgacagcgtcaacataccagcccgagaacttgggacccaaccgtacacccgggctacggccagctcgcatgagggacgaccagaccagccgaagcattacacgaggcattaagacctcggaggagtga

SEQ ID NO: 27420 - DNA, 288 bp, Zea mays
  Peptide Sequence Number=SeqID_70795
atggcgcgcctgaccttcggatcgcgagtgtggcgagtatggtggggagtttgcgggtggatgagaggggcaaggaggggcggctcaaatacccacggacgtggccctctgccaaaatgccggtcgaagctgaaactgggcaagcagaaaccgaagctacgcaagctccgcaagctcaggctgaagccgaagccgggccctcagcgcctgtcgcagcgaagcctgccgcgcatgaggaaaaaacaacaggacatatttgtcggcgttttgagaccggggggtccctaa

SEQ ID NO: 27421 - DNA, 166 bp, Zea mays
  Peptide Sequence Number=SeqID_70796
atggcggctcagaggcggcccgatggggcagaacccaaggcgcaggcgcgggctagcagcggcgcgagggtcagccgagcacggtggtggctcgcccgccgacggccgaaccgtcaaggacgctccgcggatccgagcgcgagggagagggaagcagacgtcgtgg

SEQ ID NO: 27422 - DNA, 966 bp, Zea mays
  Peptide Sequence Number=SeqID_70797
atggttttgctgggcctccctcgtggccgtgggctggcaagactcgcttatagactgcccccgcctccgcctccgcccgcccgcctgcccgacctccggaaatcccgcctccgcaaaccacgccgacgcctcctctttctcccctgcagtccccgaccctccgccgctccgatctgccttcgttgcggaggccgttgcggccacccatgcccggttccgcctctggtgctaaaccccttcctctcggcgaacagggccttcgccgactgcctcaccgaggtgctgtgccccgacgaggacctcgtctggatccacgactaccacctcctcgcgctcccgaccttcctccgcaagcgcttcccgcgagccaaggtcggattcttcctccactcacctttccccttgtctgagatcttccgcaccatccccgtgcgggatgacctcgtccgcgccctcctcaacgccgacctcgttagcttccacaccttcgactacgcgcgacacttcttgaccgcgtgctcgcggctgctcggcctcgactaccagtccaagcgcggctacatcggcatcgagtactacggctgcaccgtgacagtcaagattctccccgtcaggatcgacatgggccagctcagatcggtggtctcggcgccggagacggaggatgcgatgcggcgggtgaccgaggcgtacaagggacggcgcctcatggacggtgtcgacgacgtcgatctgttcaaggggatcgggctcaagttcctggcgatggagcagctactcgtggagcaccgggagctccacggccgcgccgtgctcgtgcagatcgccaaccctgcgcgcagcgagggccgcgacgtgcagggcgtgcaggacaaggccagggccatcagcgcccaggtcaatgcgcgctttggcacccccgggtacacgccgatcgtgctcatcgacgccccggtgacgctgtag

SEQ ID NO: 27423 - DNA, 708 bp, Zea mays
  Peptide Sequence Number=SeqID_70798
atggacaaaagaaacgtcagccaaaattattttccccaacccaagagccgcattatccaaaaccacccgtgcgatttcttgattcctataaccccaattcttgccaaaagcagagcacaatgtgaatttgaagagacaacagaaaggggcaatggggtgcaatggggtctggggggtctgggggctcaacagcaccgtgccgacgctgcaagccagaatggacaggaagtcgtgacgtcgcaggaggctgccagcactgacatcacgaccatggcgttaaggcgtcaagaggagcaggtcggcgcagggcagccgaaggaaaagcagaggaggaggaggagggagcagcttgtaaagattcatgaaagttcggatatccgtttacacccctacagggcagccgaagaaaaagcagatgaggaggaggaggacgtagccatggaggagaagatcaaactggtggaggcggagatgccggagctgcaagaggtgaggctgcagagcagcgaggtcgcggagacagaaacggaggcccatgggcgcacggacgatggctcaccagtcgtcgttggagaagaagcagcaacacctgagggagaagacgagcttgcaaccagcacgacgaaagagaagatcatcgaggagatccagcgagcagaggcgactgagaacttggggcagggctggtgtactggttcgtctgggtga

SEQ ID NO: 27424 - DNA, 168 bp, Zea mays
  Peptide Sequence Number=SeqID_70799
atggctggggcatggccacagagggctagccatggccgaagcacggccacccggctctgcgccgctgccgcgcagggaagatggcatcgcaaggcgggctgcagccggggcacgtggggcacagcggctgggagccaggccgcggcgcaggctgccgcacggtattga

SEQ ID NO: 27425 - DNA, 327 bp, Zea mays
  Peptide Sequence Number=SeqID_70800
atggcggcatccaacaagaagcccattgctgccaccgcgctcctgttcgtcgccgtggcactcgggaggggagaggggagcgcgctcagggtcagggaggcgaagatgatcgaggtggtgctgaacgaccgcctggggaagaaggtgcgggtgaagtgcaacgaggacgacaccatcggcgacctcaagaagctggtggcggcgcagacggggacgcgccccgagaagatccgcatccagaagtggtacaacatctacaaggaccacatcacgctcaaggactacgagatccacgacgggatggggctcgagctctactacaactag

SEQ ID NO: 27426 - DNA, 774 bp, Zea mays
  Peptide Sequence Number=SeqID_70801
atgcagcccggctgcacccctccaccggtggtcaccccagatggtgacctccagcttgatggtgggggaaagcgagccgggctgcggcctctgcccctccctcagcctcaaggattttcatcaccagggctggggaggggagtgtgccgagttgaggtcggcccccgcgtgggcggcggcccgctccttcactcggtgatcggagggaagggcggtcgtcgtccgtggcgctggcagctgcaccgtgcctggctctcggacgcgagtggcttcggagccgctcgcggcgccggcgtccgccacggcagcttgaagaggttcttctgccggcgagatagccaaggccggccacggaccgaccttcaacttctacggccttctgcccgtccctgcctcacaagttttggcatgggcgggggcctcctggcggcagcatccgccctgaggtcagtgctgccgctgttcggccccccggagcagaagtcgtcgtcgtccccgctgctggagcagccgggttgtccgtcagtggggccgacgccagagttgaccagccgaggcctcggaccgggctggcgccctcgggggatggttggccgaggctcctggggtaaccggccgagccgcctgctcgagccggattcccggagaagtccctggaccgcgtcgccgtccgaggctgggtcggacctcgctgaaggtgtcgtcgaagccgagggtgctacagcccccttccagcgtgaagacccgagcctgcaggatcagattgtcttgtag

SEQ ID NO: 27427 - DNA, 720 bp, Zea mays
  Peptide Sequence Number=SeqID_70802
atggggcaacagcctaagccgcccgcgtccccatccccaccgccgtgcccgccctcggacccggacccaggcagcggcttcgaccccatcgaggagtggctcgtggacttcgacccagccatgttgagcgagctagaggccaagggccccgaactcgctgagcaagcggcggttccgcacacgctggagacggcggcgcaaaagagcttcgacctcgagtttggtgtgaaggaccagaaggtcgaggtggtgagcagcgaattggacgggctgcttgccctagatcaccttcttgtgtctgggatcgacgatttggccatgagagaggatattccagagaaagcggttgctatgaagatggctgccacaccgcctgcagctgctgatactgagatgaatgccacgatatccgttgaagtggaatcggaaggtggcaaagaagggcaggaggcaccggccacacctgctgatgctgagatgatgaataccatggtgtccgtggaagtggaagctcaaggtggcaaggaagggcaggagagcagcgatgaagagtcggaattagagagtagcgaggatgatgacgagctgtcatccagcgaggattcctcaagcagcgaggacgagaaagagcagggggtcaacaacgatgaggaatcaagtgaagcctcaagcagcgaagaggaagggcgggaagttaggaggcatggtggtaactggtaa

SEQ ID NO: 27428 - DNA, 513 bp, Zea mays
  Peptide Sequence Number=SeqID_70803
atgaccgttggtggaggctgtctgtcgtatggtgcaccagacagtccgatgtacactggaaatgcccgcctggatgtccggtgcacaccggacatgtactattcaatgtctggtgtgccagcgcgcgcgtgcctgacttctgcgcgcttctggcgcgcattaaatgcgctgcagattcccgaggctgccaagttccagagccgcgtcctcttggagcaccggacactgtccgcacctcctgccgtcgtcgtgctggggttcgtcgccgtgttgtgtgcgtccctcggcgcggctgcccgggccagcggcctgcgcggctcgcctgtgcccgtgccctcggcgtggctagtggcctgcgcggctcacccgtgctcgtggccagccggcgcagccagcccagcgtggcggcccggcgcggctcgccagcgcagatgcctcgccgacacgtcccctgcacccggtcgttgcgtggaggagctgcgcagcctcgccatcggcacgccgtcgtcgaac

SEQ ID NO: 27429 - DNA, 798 bp, Zea mays
  Peptide Sequence Number=SeqID_70804
atggccgaaaggtaccaactcccgcggagttgcgttcccccgacgacaaggcgggaagacggcgggtatcccccatccgggggcttggaaggtggaaagacgcgacgcataaggaagcgcgaagacatggtcgccttccaagggggtcaccctccttttaaaggcggctctccctacttgcgtccccagccgtcgcgggctgagtcttctccaacacgctccaaggtcttcccctacggcgcgggggctgggtcccacacgtcatgcaagccagctcaaagcagaagaagccaaatcgccgtgcgcgagggaggcatcgagccctcggaccccgtcgccaggggaccgggtccggcagatcacccgcagaggctcgggggctgctctcgcaaacctggctccagccgaaccgttgacagcgtcaacataccagcccaagaacttgggacccgaccgtacacccgggctacggccagctcgcatgagggaacgaccagaccagccgaagcattacgcgaggcaataagacctcggaggagtgaaaccactcctccgaggcctcgggggctacacccggcgggtgcgctcgcgcgcacccaccggaacaaaacgcaaccgagaaaggctggtccccttgcaaaaaagtgcgatgaaagcctccaagcgagtgctaacactcccttcgaggctcgggggctactgtcggggaccataattaggggtaccctcaaggctcctaattctcagctggtaacccccatcagcataaagctgcaaaggcctgatgggtgcgattaa

SEQ ID NO: 27430 - DNA, 792 bp, Zea mays
  Peptide Sequence Number=SeqID_70805
atggcgcctcctgttgacgtggccggtctgcgccctaggttgggcgatgtggaagctcctccgaagccgaggtcgagtctgtcttccgtggccgaggtcgagtccgagcccctgggtcgggcgaggcggaggccgtcagctgaggccagggcggagtccgagccctggggtcgggcgaagcggagttcgtcgtcttctggggctgagcccgagtccgagccctgggtcgggcggagcggagttcgtcgtcttctgggacttagcccgagtccgagccctgggtcgggcggacttagcccgagtccgagccctgggtcgggcggagcggagttcgccgtcttccgggacttagcccgagtccgagccctgggtcgggcaaagcggaggttcctatggtgccttcggtcgggcctgactgcctgtcagcctcactctgtcaagtggcaccgcagtcggagcggcgcaggcggcgttgtccttctgtcaggccggtcagtggagcggcaaagtgacgacggtcacttcggctctgccggctggggggcgcgcgtcaggataaaggtgtcaagctacctttgcattaaatgctcctgcgatttggtcggttggtgcggcgatttggtcagggttgctccttggcgaagacagggcctcgggcgagccagaaatatgttcgccgctggaggggggcctcgggcgagacggagatcctccgggctttatgctgatgggggttaccagctgagaattaggagccttgagggtacccctaattatggtccccgacagtag

SEQ ID NO: 27431 - DNA, 138 bp, Zea mays
  Peptide Sequence Number=SeqID_70806
atgccgaactatgcattctttgattgcttagagatggggctcgagcggtttctcgagtgcctctccgtaaggacctgttctatggatgaccgcccgagaaaacagtgcaaccatgagggtggaatgggatgcccttag

SEQ ID NO: 27432 - DNA, 330 bp, Zea mays
  Peptide Sequence Number=SeqID_70807
atgacggtcacccgatcggccatcaccaagcgaaggaggcggcggcggagcggacaaggcctaggcgagacccgttcaacacttcgcccgaacccgccgcgaaattcaaaactcgaagggctcggactcagcctcgacctcggacgacggactccgcctcgcccgacccctgggctcggactcaacctcgaccccggaggacggtctccgcctcgctcgacccccgggcccggactcagcctcgacctcggaggagcctccgcctcgcccgacctcgggctcggacagaccacgtcacaggggggccatcattaccctacccctagctag

SEQ ID NO: 27433 - DNA, 441 bp, Zea mays
  Peptide Sequence Number=SeqID_70808
atggcggacgacggcagtgtctcctctggtgtgcgcacggcgcgaggcgagggcgagagctctgaggaggttgcacatctttacccacaagtcatgttacccatctgccaagagatggccaatcccatacacctctaccgaggaggcgaggcaggcatctacggcgacgacatcgtcttccacccaacagcccagacgccgtcttcctccctcgtgctcgcactctacggcggcggcccagccgatcccctacggctgaacaccataaccgagccagcacgcagttccgtgttcgccgtccaagccctaacttctacccggacgacctcgttcgataccccggtgttctgcgcgatactcgagcgacccactacaatctataccctgacgataccttgtgatgcttcacgaaagatcgccaccgaggaccctcctgcatag

SEQ ID NO: 27434 - DNA, 393 bp, Zea mays
  Peptide Sequence Number=SeqID_70809
atggctgggaaaaatcatctgagtatctacggcgacaacatcgtcttccacccaacagcccagacgccgtcttcctccctcgtgctcgcactctacggcggcggcccagccgatcccctacggctgaacaccataaccgagccagcacgcagttccgtgttcgccgtccaagccctaacttctacccggacgacctcgttcgataccccggtgttctgcgcgatactcgagcggcccactacaatctataccctgacgataccttgtgcgaaaaacatagcagcaaggatagcggaaaaagaactcaccccgccgagacaaggtagaggctgggcgcagtttggaaggtatgaaagtacaggtgtgacgcacgagcaaatgcaatcagcgtga

SEQ ID NO: 27435 - DNA, 237 bp, Zea mays
  Peptide Sequence Number=SeqID_70810
atggacttgccttcgtcgaagctttcttggcatgagagacctatttctgggaggtcgggatcctacccttcttctggagctacgatttccggagagtcggatcctcttcgccttgcaaaaacagccactggagagaggagggagaagctcaccggagagaagggaggcgacggcgccgagctcgattggttccaggggaggggagaggaagtggccgaggccagtgcggggagatga

SEQ ID NO: 27436 - DNA, 6258 bp, Zea mays
  Peptide Sequence Number=SeqID_70811
atgacacagactggcaattatttattatgctcattactttcatttttatcctgtaaaatgtgcaataaatcaaggtgtaaagctggtatggatctaagcatggcaagtttgaacttgtcagaacctcgagactctagagaatcaacttcgcccgcaccatcaacatcatcttctatatcaagagaaaaaggtgacctggcagaagttgatgatcctgaaagtgcaatgtccactgttgctagattgttggaagacctccatgctagcatggtgtctccatcggggaaggaagctacaaccagaaggttacttgaactggctagagcgaaaaaggaggcaaggattttgataggtagccattctcaggcaatgccactactcatatctacccttagagttgggtcatctgcagcaaaagtaaatgctgcagctctacttagtgcactctgtaaggaagaggacttgcgtgtgagggtcctcttaggaggctgtataccacccttaatctctcttttgaagtctgagtctgctgaagcgaagaaggctgctgctgaagctatttatgaagtatcttctggtgggcttttggatgatcacataggcaggaaaatatttgtgactgaaggtgtggtgccaactctgtgggacttgcttaatcctaggtctcaccaagatagagtagttgagggctttgtgactggggctttaaggaatctttgtggggacaaagatggttattggaaggccacacttgaggctggaggtgttgaaattattactggtcttctttcatccaagaatactgcttcacagtcgaatgctgcttctctgttggcacggtttatctctgcttctggtgatagcattcccaaagttatagatgctggggctgttaaggctctccttcaccttctaaatcgagataatatcatttctgttcgtgaaagtgcggctgatgctttggaggccctgtcttccaagtccagtattgcaaagaaagctgtggtggatgcaggaggccttcctattctgattggagctgttgtagcgccctcaaaggaatgcatgcagggtgggacatgtcattctctgcaaagccatgctgtccgtgctttatcaaatatttgtgggggaacaacttctctgttgctttaccttggtgagctctgccaagcaccccggtcacctgttcccctcgctgatattcttggagcgcttgcttattccttgatggtttttgacggctctgatgataaatcatttgaccctgttgagattgaaattactttggttgcgctcctaaaatctcatgacagcaagcttgatcgtattcttgaggctttagcaagtctatatgggaatgattgtttctccgacaggcttgatcactcttattctaagaaggttcttgttgggctgattaccatagctcctgctgatgttcaagagcttcttgttcgtgccttaactagcttgtgttgcgatggtgttggaatatgggaggctcttggaaagagagaaggggttcagttgctaatatcattacttgggctttccagtgagcagcagcaggaatatgcagtttccttattggctatcttgagtgatgaagtagatgacagcaaatgggcaataacagctgctggaggtatccctccacttgtccagctactagaaacaggatctcaaaaagcaaaggaggatgcagcttacatcatgtggaacatgtgctctgacagtgatgatatcagggcatgtattgagagtgctggggctgttatggcgctaatttggcttctaaagagtggtagccctggtggacaggaggcatcagttaaagcactgaagaagttgatacgatcagcagattctgctatgatcaatcagttactagcattactgctcagtgactcattgagctcaaaggcccatgtcattactgttctcgggcatgtccttgtgctggcgcctcagagagctctaatccagagtggagctccagctaataaagttcttaggtcactggttcttgttcttgaatcatcaaatgaagaaacacaggagattgctgcaactgtgttggctgatattttcactatgcgtcaggatatttgtgatgtaatggcaattgatgaaattgtccagccatgcatgaagcttttgacaagtggaaaccaagtgattgccacacaatctgccagagctttaggagcactgtcatgttcagctagttccatgtcaaaaaacaaaatgtcttgcttaactgaaggtgatgtgcgacctcttatagagatggcaaagacatcatctattgatgttgctgaaacagcatttgctgcattagcaaatctcctatcagatgcacagattgctaaagaagcattagatgacaatattgtcttggctttgactagagtgctcaaggatgggagtttagaaggcaagattagtgcttcgcggtcacttcgtcagttggtcaaccagtttcccctcagtgaagttctcccagattacttgcagtgctgttttataattcatgcactgttggtatgtctatctggcatcagtttagaaaatgttacaagtttggaaccccttgatgttcttacattgatggctacaacaaaggagggttcgcattatagcccccctctatgcactggttttcttgaagttccagaaagcttagaacctttagttcgctgtattagtattgggcttccacctgttcaagataagtccattcaaatcctagcaagtctctgtcagggtcgaccttcgctacttggtgaatatttaaacagaagtcaaggatgcatcacttctcttgctactagagttatagagtcaaatgacatggaaataaggatcagcagtgcagtcatcctcatatctgcaatgagggacagcagagaacggtccatcgatgttctggaagcatcaaaagttctgaagaatctgatatctgcactcattgatatgctgaagcaacattcctctttaacatccctagacattgaaatctggaaaccttccacagaaaaaagttcgcttaattatgagcaggatgttttgagtgtgcctgaacttggaaaggtttctgaagaaactgttgcactatggttgctctcactgatttgttcttatcatggaaggagtaaatatactgttatggagctcaatggcgttgacacagtatctgatagacttgctagctatactgctaaccgacaggcactggctagccttgtttccactgggagcagaggtatacagcttgctattgcgaattctggtgcagttttgggtgctgtagcattgatcggacaggtagaatctgatatgccaaaccttgttacaatggctgaagaattcaagttgtcagacaatccatgtcaaataatgttgagaagcctttttgagcttgaagatgtctgcactggtgcttccgcccggaggtccatacccttgctagtggatctacttaaaccaatgccagataggccaggtgcacctctgattgctttgcaccttctgactcaactagcggaaggtagtgagtcaaataaaattgctatggcagaggctggagctttggatgccttgactaagtatctatctttaagccctcaagactcaactgaaactactataaccaatctgttggggattttatacactaatcctgatcttctttaccatgaatcatcacgtagcacttcaaatcagctggtagctgtcttgcgtttgggttcgagaagttctaggcttagtgcagtaaggacgttgcagaaactctttgattcagagaatataagggacaccgaagtggcccggcaagctattcaaccactacttgacatgcttgagtcaggaactgaaatagaacagcaggcagcacttggtgcgcttatcaagctttctgctgggaacatcgctaaggattctgctatgtttgatgtagaaggcaacacacttgaaaatctttacaaagttttatccttcagttcgtcattggagctgaagaaggatgctgctcaactctgctatattttatttgagaactcaactgtacgtgcatcaccaattgcaacagaatgtcttcaacccctgatatcactgatgacatcaggatctagtttggctattgaaccagcagtttgtgctctaaacagattactggatgaggactacaatgcagaaattgctgcaactagcgaagttattgatcttcttgtcagttttgttcctggtacaaactatcagttgtctgaagcatgtatcggtgctctcataaagttgggcaaggatcgtccaaactgcaagcttgacatggttaaagctggtatcattgagcatgcacttgatatgattcttgatgttcctgtatctgttagttcatccattgctgaattgcttcgcattttgacaaacaacagtggcattgctaaaagttctgctgctgcaaaaatggtggagccacttttcttgcttttacgtcgccctgatgttactatgtgggatcagcacagtgccttgcaagcactcgtaaatattttggagaaacctcagagtctagcagcattgaagttgactcccagtcaaataattgagcctttaatatcatttcttgagtctccctctcaagcaattcagcaacttggcactgaggtgctctcacatcttctagaacaggaacattttcaacaggatatcactacaaaaaatgcagttgttcctctggtgcagcttgctggtattggaatcttgagcttacaacaaactgcagttaaagcacttgaaaacatctcacagagttggcccaaggcagtagccgatgcaggtggaatttttgaactttcaaagagtaccgtcacgatagctctcagtgctctacttgttcaagagaaaagtagctcacgctgtgctgtggccatggctgaggctggggcagtacgggcactcttggagctcctgaagagccatcgatgtgaggaatctgcagcaagattgcttgaagccctgataaacaattcaagggtccgtgaaacaaaagttgccaagtatgctattgctccactggcacagtacctgttagatcctcaatctaagaaccagtcagcaaagtttctggttactcttgcactaggtgacattttccagcatgaagctcttgcaagggcaagtgactctgtgtctgcctgccgtgctcttgtaagcctacttgaggaccagcctacggatgacatgacaacagttgctatttgtgcactgcaaagcttagtgatgcacagcaggacaaataggcgtgctgttgctgaagctgggggcattttggttgtgcaagaattgcttctttcaccaaatgtggatatttcaggacaggctgcccttctaatgaagtacctattttcaaatcatacgctgcaagaatacgtgtcgaatgagcttattcgatctcttactgctgccttagagagagagctgctctctacgtcaactatcaatgaagttattctgaagaccatatatgtgatattcagcaacttcaaaaaggttcggttttctgaggccgcaaccttgtgcataccacacctggtttgtgctttgaaggatggaaatgaggctgcccaagagagcgtgcttgacaccctttgcttgcttaaagaatcttggccgcaaatgaatgaagacatcgctaaagcccagtccctgatttcagctgaagccatacctgtactacaaatgcttatgaagacatgtcctcccagttttcacgagagagccgatagtttgcttcattgcttgcctggttgcttgacagtgaccatcattcgtgggaataatctgaaacagacaatggggggtacaaatgcattttgttgcctgcaaataggaaatggtcctccaaggcaaactaagttggttacttatgtctgtgctgaacgtcaggtggtaaaccacagcatgtgcccagcttggaacgagggtttcacttggttatttgacgtggcccctaaagggcagaagctctacatcatatgcaaaagcaaaaatacgtttggaaagtcaacccttggaagagtgaccatccagatcgacaaggttgtcaccgagggtgtatacagcgggttcttcagcctcagccacgacggaggcatgtttgtttacctgtttggttctggctacgcaaaactttttttttacatccaccttgccatagccgtaccagcggcataccttcagctttacaagtga

SEQ ID NO: 27437 - DNA, 603 bp, Zea mays
  Peptide Sequence Number=SeqID_70812
atgccctcctccacctcaccctaccgacagagcccccaggcgatgagatctcggccgccgcatccaatattccgctgggcgctggcagaaagtccgttgaagacaaagagcgatcccctgccgccggcggcgcgccgccggccgcgggaggcggatgcggctggtgggcgcaattggggcagaggaagcacgtcgggcgagctaagggagggcagtgaagccgtgacggtcggcggcgggagcgctggaggaggctgggacggcggtggtcggccgcgaggacgacggcgcggcaagaagaggaggatggtgtcgcgcggcccgtcaaaactcagacgggtggagctcagcgtcagcgaaaccccagtggccccacgcgagttgctacaattgggcgatatcgacggacgcgagatcgagaagggggcgtggactcaccgttggcgggtggacggtggtgggcgacggcggcggttcgtctcactgtcgctgcactcgctcgcccactgcgctggcgccacctgcgcgtccttgggcaaattccactttggctgtggacagctccgatacggtgtacagtcgtataatgtacgtgcagcataa

SEQ ID NO: 27438 - DNA, 915 bp, Zea mays
  Peptide Sequence Number=SeqID_70813
atggctaaaaatttggcagcaaaacagtacaatagcaatgaatgttgtgattatacctttcctgctcagaaaagaggagttaaaaggaaaactgcagttgcaacctcctccaccgcactgaagctaaagagggcaaaagttttcacccaccgaccaaagtcgtattactcggagcaagctgcaaaactgtcagttgctgaaacctctatggtagaaaatgccgaagcagttgaagacaccacttcgccttcgaaggagatgaaaggaatcggggcgactgcaaggtggtaccctttacccacaagtcatgttacccgtctaccaagggattgcgacttcccatacacctctaccaaggaggcgaggcaggtagtgatcaagggcacaacttgcctgagacttgagattccagggccgcacatcttgtatccaacggttcgcatgatctcggccactttcttccccaccagaggacccatcgcgaaggcgggcaacccccgcggcggcgcgctcgccggagaccgcgccccagtgctcccgtgccctcgacacccacgtgatagctctacagaaaattcaatcgaccgcaaactccaaaataaacctattacccgtagcgatgcagtgggggggtcccaacccacgacgatgtgcagtcatggcagccggaaactttccggtgagaaatcccagaggcgttcgccgagggccctacgcggcgcatcaaataataccttctatcggtccttaggaaggctcagagcatacctcggtggtccggtcgagggctttacagaattagcttcagaaaagagccatggggtggaagaacaaccaaaggttcaagatctgccaaaggtaaggttggaccttcggaatctaatccatgagaacaaaattttgaaagcctactag

SEQ ID NO: 27439 - DNA, 381 bp, Zea mays
  Peptide Sequence Number=SeqID_70814
atggctgggcttgctcggtacggcgataaggtaatcatcatcggaatcagcttcctcaatatctccttcctccgcttcggcagcagcttgttctgtatcggcaacagtctgttctgtctcggcagtggggattccttccgaggtaagaaggtgaatcatcaggatttttacaccaggcaaacagctgctcgcacccgctgcgcggtgggccgcaaagaccaaatagtaaacctgcagggtgggaccgttacgcgctcggaaactgtatcgtttctcgacaacaagctcagggaaggtgtttttcggaccttcggcttcctgaagcctaagagacttttttcacggatcaagctcgttacgaaaaacgatctagcaccgtga

SEQ ID NO: 27440 - DNA, 165 bp, Zea mays
  Peptide Sequence Number=SeqID_70815
atggccgtgatgggttcaacatcagaaaagatgtacctctaccagaataagataacacgcaatgggagtggagagatggtaagagtagcgtgtaccctctttggcaagaggctagacggtggtgtatctatgctctcgattggcgtgaacctgatctggtcttaa

SEQ ID NO: 27441 - DNA, 576 bp, Zea mays
  Peptide Sequence Number=SeqID_70816
atgccgccatgcatgaggaaaaccgcgcgcaagtccactggaccgattggcgtgcttcgccatcagttggctccaaggcatgaggatagcagcagcggcaacaatgaccccattagagatctagaagcccaggtggagcagcttcgaatggagctacgtcacagaaacagtgtgtgggttgaggatggtcagtgtataaatgaattaagaactgacatccgacatctacaagacgagcttgccgaacgggatttggcagtcgattgggtcgtcaactcacgttccattgcttgggaccgagaagctaaagctcgagcccgtgtggaggagcttagcacagccgttgataacttgcaggtgtactgcaatacattgcatgaggaagttcatgaattgtattcgcgactgcaccccaacgtacctgccgatcctatcggaatgggagctggaccttctggaacagcaggtgaagcgcttggtggggaacttgatcttttcaagccccctccttcaatggacctggctgatgaatggtctcctacacccgacaatgaagctactaaggatgataaatag

SEQ ID NO: 27442 - DNA, 159 bp, Zea mays
  Peptide Sequence Number=SeqID_70817
atgaccgtgatgggttcaacatcagaaaagatgtacctctaccagaataagataacacgcaatgggagtggagagatggcgagagtagcgtgtaccctctgtggcaagaggctggatggtggtgtatctgtgctctcggttggcgtgaacctgatctag

SEQ ID NO: 27443 - DNA, 423 bp, Zea mays
  Peptide Sequence Number=SeqID_70818
atgacgttggctcaccggacagtccggtgcaccatcggacagtccggtgaaattatagccctggtgatcagcgagatcgactcgtcagccgctacctggctgcaggccgtgaagttgctcgctctatacctcactggagacaaggttagtgcgcaggatctaaactatgttgcctctgatctggctttaatcgcgctctactggtctggacctgggtcgttggtacccgagtgcctaccgtcctcagacaaggacgtttatgccctcgggaacccagagtatcttcagaatattcccccaaggggagacatcgtcggagtcttgccttcgtcttgcaatggagaagagcgaagggttgccgcggagtccaatcccgaagtcctcatcagaccggcgtcattgtcatcgttggtgaagcggtag

SEQ ID NO: 27444 - DNA, 2073 bp, Zea mays
  Peptide Sequence Number=SeqID_70819
atgtcttcgcccaagctccgggagtcttcggcgcagatgctggaggttaccgggggtcgatggcctaagaacgtccctatcccccgcgcggccggcgaagacttctttacgtctcgcatggttcgtgacttgagagtgtttccttacggacggaatattgctgctgttgtgtcgacagtgatgaacaaggatcgccaggaagctgcgcagaagcgtcgggcggtcatcaggctccccgaagctaggccgaagagggcgcgggggactgcgaaggctaccgtccccggcggtagccagcctacgccggcggcgaagtcggccgcccctgggtccagcaaggtgccggagagcgtgaaggcggccggcgccggcggaaccaagtctgccccggacggagctgcgaaggtccgggaattgccttcgtcggggaaacgcgttgccgacttcggcacaaatattagcgtggatgactatctcgttggatcgggtgaggggcaacttgctgttgttccgcctgcggtggcgaccacggtgtctgccgtggtgcctggggtgaagggtagcgctctcagcgctggcggtgagatttcggcggcggtcgacttcgccgaccgcgtggcgtcgggggcccttactgcagatgtttctgccgaagtcgagagagttcaggcgcagcatgctgacgccgtccgggaaaaatcggccgcgaacagcaagtgccgcaagctggtggagaaggtggccgccctggagggcaagaggacggacctccggcgccagctggtggaggagaggagggaggctaaccaggccatcgccaaggcgcaggcggcgcaggcggaggccaatttggtgcgggtggagggtagtctcgccaaccagcgcgccgaggaatgggaggtgcggttcaacgctctgcaggcccgcatggagagggccaaggcctctacgtgctcggaagttgagcggacgcgcaaacagctcgtggactcataccgcgagctgggcgcgcggactgctgacttcgaagtgcccgaccgggaggcgggccttcgcttcctcgagtggctgcaagaggaactgttggcgctcccgaccattgtggagggatttatgtcctttgcctccatcgtcacctgcgaaggggcgatgaacgcgctgtcccgcgaggggtgcagtcactatgaggtcttcgaccgatctgatgaagattttgagcgcgagattttcaaggtcgaagaccctatggtgaaggactccgcgggtgccctctttgaccggatgtggggcccccacggtcgggaggtggtgagggagcggtccgaccgggcgagggatcaggcggcgcgtgccgaggacgtggaggacttcggacccctgaacagcatgcgacccgaagcggaggccaacccggtggtggccgaggctgaggtcgacccggcaccacccccggaaaccggtgaaggctccctcgctgcccctgcagctactgtgtctagtggtggctccacgccaaccgctgtgccgagggtggaggatccccttaaggcggcgacagagccggcagcggaggatacaatggcggcggctgggtcttcgcaggttcaggattttgggcctgcgcacgcaaccgctactgctaattttgtggcggcttcgaccgtggatgctgggaatgaatcggatgagtctgcgtctaagttttctgattttggtgactctgggagttcggttgagtggacggaagagtcttcggatgaggacttagattactttgcggccttggatgtggctacggcggaggcttctccgcgtgttgcggatgctgaagttgtgcgtggtccgagtgctgggcgtaggcggcgaagggcggtggcgaagcgtagagtgagtgaagtggatggcggtcggcttcgtgtgggcagggctggcaagcaggaattgttgtcctcgccggctggggcgagtgtaggtgagggggagttgcgaagtctttttgagggtgaggagcttaggataatgctatttaactatagggagatgggaatcattccgaaggttgaaccaatgtaa

SEQ ID NO: 27445 - DNA, 1827 bp, Zea mays
  Peptide Sequence Number=SeqID_70820
atggcgcctcctgttgacgtggctggtctgtgccctaggttgggcgaggtggaagctcctccgaagccatggtcgagtctgtcttctgtggccgaggtcgagtccgagcccctgggtcgggcgaggcggagaccgtcggctgaggccagggcagagtccgagccctggggtcgggcgaagcggagttcgtcgtcttctggggctgagcccaagtccgagccctgggtcgggcggagcggagttcgtcgtcttctggggctgagcccaagtccgagcccctggtcgggcggagcggacgagggcgtctacatgcttcaccatgcccccgccagcgcagaccacgccttcgctcgcgatgcccttgccctgctcgcgtccgcagccacggccgccgcagcccgcctgagatccgctgcaacaaatgatgtctcccccgtccagctcgatgccccgcccccactatctccgctctctactgctctctacgcgccgtcggcaaaaatggcatgggagatccgccacctcaactccccattaccgcggtcccatatctcctctccccattactgtggtccatggatttctcgagtcagtgggaggtccgtcatccatggaagttatgtatcaaatgcagtttggatatttgatggtagaacaacatatgttcgttcattgcaaccgataggaaaagatgaagaggggaagcttcatgtagaagggataacacagtgcgctgcttggcacgggcacactgttcgccagcagacccagcaagcgtgccgcctgctggatgaccttgacgccgcctaccagcggatgggacgggacacattaaatgctgagagggcacgtcgcccgctcggcccgatggcttatgtcatgggccacaagcagcgggccttcgcctgcgcggggagcggagagcaaggcctgcacatgtgtcagcaccggacccctgcataccccaaggtcctcctcgttccggaaccctgctggggttcggacctacccgggggctccggacctatatgtatatataggggcccggtgaccctctgtgggggtctggtcttactgaggcatggtgcctttcctcgccacatggcgccctttggcccgcccatccgatggagtgcgtcggtgttctctggagggatccgcgtcaaggctgtctcttccggtgacttcaccgtcggagagcgtgcactcgtggtggtgtcgccgatcttgtcttctttccgctgctgttggaggggtgcaaccccatgggagttgccatccttccaccaccatttggcttcaaggattttcatcatgcagcccggctgcaatcccccgctggcagtcacccaggaggatgaccaccagccttgtggtggggagaagcaagccgggctgcggcctcccaccctcagcttcaaggatgttcatcatcctcgctggggtggaaggcgggttgagctggggccctaccctccgtatgggttggtgacccgcttcttcctccagcattcggaggggaagggtgttcaccaatcctacaatcctgcgggggggcttgtctacatggggccggccgactacaggctatcagctgcaacgtgtctagccctttggggctggatggctctggtgccgcctcctgccgtctggtcggggcatggttgcccatccaccgcatgggcgacagtcgcgccgtgcacgggtttgccacatccatggcttcccctgcccgccgggcgcactggggggccgtacaagacgtcgtacgccgcggcggtggcggcggcgttcttggatggtcttgtcctcactcctgttggttga

SEQ ID NO: 27446 - DNA, 1116 bp, Zea mays
  Peptide Sequence Number=SeqID_70821
atggacgcgctgaagtgtaacaacaacagcgccccgccggaggagaccgcggaggacgccgacgccgccggggcgctcgtcgagaaagacgggttctcggtcgaggacttgctggacctcgaggagtttggcgagcctgacaaggacggcgccgagcctgaggacgatgacgccccgccggtacccgccgcggccgaggagaggtcgaaagacgactcgcagccgttgtcggtcgtgacgtacgacctcccgtcgccgccgccggagatggttgaactgccgtcgcatgacgtcgaggagttggagtgggtgtcccgtatcatggacgactcgctctctgagctgccgccgcaggcgcagcctccccccgctgtggttgcgtcgttggctgggcggcccccgcttgcgcagcagcggcggccgttcgcgcacgacggtgcgtaccgggccgtggcgccgccgcccggcccgctgcggacgccgaccatctgtgcgctgtcaacggaggcgatgataccggtgaaggcgaagcgcagcaagcggtcgcggggcccggcgtggtggcggtcgggcgccccgttcttgtccgactcggcctcgtcctcgtcgacaacgaccacttcctcgtgctcatcgtcaggttcgttctcgccgttccttcgtctggactcgtccccgttcggtgggctggaggtcggcgagggctattacggccacctcctgccgcggccgccgtcgaagaagtccaagcacggcgccaagggcagcaagcacaagcccaagaagcgcgggcgcaagccgaagcacctccctaccaactcgtccggcgccggcgcggccgcgtcgcagcccgggccgagcgaccgccgctgcagccactgtggcgtgcagaagaccccgcagtggcgcgcggggcccgagggcgcaaagacgctgtgcaatgcgtgcggcgtccgctacaagtcgggccggctcctgcccgagtaccgcccggcgtgcagccccaccttcgtgagcagcatccactccaactcccatcgcaaggtcctcgagatgcgccgcaagaaggagggcgacatggtcgccaccgccgcgccggccgtggcgtcgttctga

SEQ ID NO: 27447 - DNA, 411 bp, Zea mays
  Peptide Sequence Number=SeqID_70822
atgcaggggaagcttcttgtagaagggataacacagtgcgctgcttggcacgggcgcactgttcgccagcagacccagcaggcgcgccgcctgctggatgaccttgacgccgcctgccagcggatgggacgggacacattaaatgctgagagggcacgtcgcccgtacattgagactgcaatagtcaccaagaagagatacaatgatctaaagcggggttcaggtgcaagaaccaaacatgtgatggttttctactgcccaactcaggataagcagttgaagtctcatcctccaaagaacgttgaatcgaaaatcttgtgtgagcatatcaagaaagagagggaggcagcaaaggctggaaaacgaccatactatctgaagaaatgtgagttcctcaatcccaatacctga

SEQ ID NO: 27448 - DNA, 567 bp, Zea mays
  Peptide Sequence Number=SeqID_70823
atgccttcgtcgcctcgcttcaccaatgatgccaaggacgccgacaacaccccccaagaagcctccgaagacgaagctctcagcaagagacagcgccacgaacaccccactcccgaaggcaccttacgcacctgcagctccggaggactaccacaagtaccacccccaggcttcgctccaccagagggcgaagacgcagcagaggacgacgaagtcatcgacatctcagtcgaagaacagttacagctacaggccctgcgcatcaagaaccgcaacctccaaaaacagaaagacatcctcgaggccaagcgccaacatgtcactgcgcaagccaaggtgcaccagatgatacgagacgaggagcagagagctcgggagctcaagcaagagatcgcgctcatgcagagcgaaggccaacacgatctgcagcacgatccgctcctccaacagcgcgtcccagccggagacttattcataccccagcgcgggcccttcatcccgcatgtcgcagctttccaaggcatcaactaccttgacgagcgaagccccctggctccgcaactctaa

SEQ ID NO: 27449 - DNA, 519 bp, Zea mays
  Peptide Sequence Number=SeqID_70824
atggcgaacagatcaacggtcaaggcgcttcttccccaatcggctgacccaaggtggcgccaccgagccatcacggcggtggactcccacccaccacgcagggcggaaccacagcagtgttcacacatcgttgaggaattccggtcgccctggaggtcgaagtgggccgatagcgggatcaagggagatgggccgccgatggaaatttcggcccatgtgaggtttaggggtccctcctgggaggcgagatctagatctactgtgaaggagacgacgctctgcgccatcgtggaccgtccggccctgtgccgcggaccattcacgcctccgcagagagcacgccaggtggttcgagtgtttggcgcccagattggtgccaaaagcatcgtcattggtgatcctcgcacatcaaatatatcgcaaggagggcttgctcggaaggcgcctgacaagaagactaataagtccggaggcgcctggggcgcaggctcaattgagcagccaagcatgactccctga

SEQ ID NO: 27450 - DNA, 789 bp, Zea mays
  Peptide Sequence Number=SeqID_70825
atgcgtcggaaaggtaatgaggatgatccgcaagaatctaatgggtgtgcccctgcaggtttgctagaaaaatttgaaacacttgcaaatttaaattgtgacctatcaactaaaattgagcaattagagtctagtgctccatccactgctaccgatgatgaccttattaaaaagaatgaaaaacttaaggctaagttagctacctcccaagaagctattgaaaattttctagggaaaatggaaattcttagcatacgcaataatgagctaactactaagctagaaaacattggtagcaccccaggggcatctttagttgaaattattaaaaaagatgcttctacttcttgctttgatttaattgatgattcttacccctgcaaccaagttcttgttgagaatattattgtagaaacatgttcggatgaggttgcaaaggaaaatgagcaattaaggcaagaagtggctcgccttggaaaggctttgtatgacaagaaaggcaaagccaaacaaatccaacctccacaggataacaccactacgggagtgaacaagcctgtggagggcaaaactgtgatttgtaggctatgccacaaggaaggccacaagtctttccaatgcaaggcgaagaccggggataagcaaaagctcaagcaaaagccaacaagcaaaatatccaacacctacatcaacaaggtggacaaaaaggctgctacaccatatttgatcaagaagaaaaataatggaaatgtgatagcaatcaaggccaacaagcaagccaacaaatga

SEQ ID NO: 27451 - DNA, 219 bp, Zea mays
  Peptide Sequence Number=SeqID_70826
atggagcacacagtcacacacacacacagagacatgaccgctaaggatcaggagaccagcatcttctcgtcaactgaatcacgcaagtctgtgcgagcgattgggctgcagggattgttaattggtgaagggaggattctttggttgcgtcgtggattctcgcatatctgcacccacttatctttgagccagacgaccactggattctcatgcttttga

SEQ ID NO: 27452 - DNA, 423 bp, Zea mays
  Peptide Sequence Number=SeqID_70827
atggacggccacagcagtaataccgccgtgaccgtgccagaaagcttttcgatggtgtgcctggacggcgtcatggtgcgggtgcccgtcccggaggacagcgccagcctcatccccttggccggcggcggcttcaagttccccgcgcacgacgggcatcgcgcgatgatcaagacggcgaagcagatggatcactaccagcgggtgcggcgcaacgcgagggggatgccggaggtggcggcgcggctcggaggcgaggacgcgctcgtggaactgatgtacggtgacgtcgacgaggcctgcagcgtgtttcgggtccccccgatcgcgccaacgacaggcccgtacgcgaactactacgtaccaagaagctgctcatacacaagagaagatgccgctgttcggccgtcagccgcgcgctag

SEQ ID NO: 27453 - DNA, 1095 bp, Zea mays
  Peptide Sequence Number=SeqID_70828
atgaccgggaaaaagaccacgacttcctctgacagcggcactccaaagaaagccaaggtcaaggctccatccaagggacacgatctcgcctcgcccgagcccagcctcgggcaagaacagcagacccaggtggattcacgcctcgcccgagggcctcctcaagcaacggtgaaagggcggaccaccatgcaggcggcatacagctgcaccatggggatgcaccctttcgacttcaacgcacccagcatggaggcccaggcccacacgtcatgtaaccggcgtgccggttactacatgcgaaaaactgcaccgccacttacgccaatactgcgccttctcgactgcggaaccggtgccgcgactcaaggcgaccctgcgcatagcccaacagtgccaaccaggcgcatcagtcacagatcagtcagccgcggaagaaggcgcgacgatcgatatggccaaaagtgggccgacagtaatggcggcagcaggcgaacggaagtggtggtcaaatcgtctgcaggctcacgtcccctcctggggcagcaggagagccctctcccatggcgtgaagacgacgcgctcgtgttccgttccttgaacggctcgcgcaacagctgccccgcgagccactcgtcccgtcgcattaactttgcggcagggcaggcgaccacctttggcaggctggcccctcggaagggttcgacaaccaccccagagcactcgggctccgagccctcctactggtcagaggttcgaaggctggcccctcggaagggttcaatagccgcctcaggccactcgggctccgcgcccactactgatcaggggttcgaaggctggccccccgaagggttcgacagctgcctcagaacacgtagagcgagggatgactctgggtacgtccgatacatggccgaggctcgggctacgctcccaagaggctcgggggctgctctcgcaaaccccgctccggccaaaccgttgacagcgtcaacataccagcccgagaactcggaacctgactatgcacccacgctacgaccagttcgcatgagggaacaaccagaccggccgaggcgtcacgaaaggcactaa

SEQ ID NO: 27454 - DNA, 504 bp, Zea mays
  Peptide Sequence Number=SeqID_70829
atgtaccccctgcggcgtggtcggcccgagcccgaggtcgggcgaggtggtgactcctccgaggtcgaggctgagtccgagccctggggtcgggcgaggcggagaccgtcttccaaggtcgaggttgagtccgagccctggggtcgggcaaggcggagaccgtcttccgaggtcgaggttgagtccgagccctggggtcgggcgaggcggagaccgtcttccgaggtcgaggctgagtccgagccctggggtcgggcgaggcggagaccgtcttccgaggtcgaggctgagtccgagccctggggtcaggcgaggcggagaccgtcttccgaggtcgaggcgatccttgcattgaatgctcctgcaatccggtcggctggcggggcgatctggccaaggttgcttctccgcgaagcctgcccgagctgggcctcgggcgagtcgaagctttgtgctgatggtggttaccagccgagtttagaggcgccttgggggtacccctaa

SEQ ID NO: 27455 - DNA, 423 bp, Zea mays
  Peptide Sequence Number=SeqID_70830
atggacggccacagcaataatgccgccgtggccgtgccagaaagcttttcgatggtgtgcctggacggcgtcatggtgcaggtgcccgtcccggaggacagcgccagcctcatccccctggccggcggcggcttcaagttccccgcgcacgacgggcatcgcgcgatgatcaagacggcgaagcagatggatcactaccagcgggtgcggcgcaacgcgagggggatgccggaggtggcggcgcggctcggaggcgaggacgcgctcgtggaactgatgtacggtgacgtcgacgaggcctgcagcgtgtttcgggtccccccgatcgcgccaacgacaggcccgtacgcgaactactacgtaccaagaagctgctcgtacaccggagaagatgccgcagttcggtcgtcagcagcgcgctag

SEQ ID NO: 27456 - DNA, 1926 bp, Zea mays
  Peptide Sequence Number=SeqID_70831
atgctgctcgtccatctcgggcgcgcctgccgggctcgccggcctcgatcgccatcctcatcctctccttccaaggtacggtcgatatgcggcatcacgttcaccttcaccaaccgctgcggcgacacggtgtggccgggcctgctgtccggctcggggacgccgccgctggagaccacgggcttcgcgctcgcgccggggcagttgcgctcgctgtacgcgccgcaggggtggtcgggccgcttctggggccgctccggctgcaccttcgacgcctccggcaaggggtcctgcgccacgggcgactgcggctccggcgaggtcgagtgccgtggcgcgggggcgtcgccgcccgccacgctcgtcgagttcacgctcgacgacgacggcggcaaggacttctacgacgacagtgtttgccattgggtgcaaggagaggtgggttccttaaatgatgccaggtacttggaaaatatcctcctccttttgactggtcgacaattggacacggccactgaaattgctgcctcaaggggtgatgttcggttggcaatcttgctaagtcaggcaggtgggtcaatgtcaaatcgatctgaccttgcacaaacactggatcagtggaaaatgaatggtatagattttgattatattgaggaagactggttaaaggccgcttttctagatttaccaattgactggaagaggtaccttggtttgattatgtggtatcaattatcacctgatacaccactcgatattatcattcgttcttacgatcaactccttggtgagggcaaagttccctatcctgttcctgtatatatagatgaaggaccacttgatgaagcacctcagtggtcctcgggtgaccattttgatatctccttctacctaatgcttcttcatgccaataaagacgagaagtttgggctgctaaagactatgttcagtgcattctcatcttcattcgaccccttggattatcatttcatatggcatcagcgttcaattttggaggctgttggagctttcagttcaaatgaccttcacttgctagatttaagttttgtttatcaattgctttgtcttgggaggtgccattgggctatctatgtcattctgcacatgccgtatcttgacgatgccccatacattcatgagaaattaatcagggaagttttatcacagtactgcgagtcatggagtagagatgatgctcaaaggcagtacattgtagaacttggtataccagaagaatggatgcatgaagctctggctctttatcacgaatactatggagataaacagggcgcactggagaatttgattcagtgtggcaaccggaagaaagctcatactattttcgtgacttctgttgctcattctatgtttctgtcatctaaccatcaggaggtctggaggatcacaagtgccttggagaaccacaagtatgaaattgctgactgggaccttggtgtcggaatatacatagacttctacgttctgaagaactcaatgcaagaaagaaatgccatggatgattcgggttcactcgaggagatgagtgaatcatgcagaagtttctttggccgattaaacaagtcgttgttagtctggggaagcaaattacatgttgagtcaagctcatcagcaccatttggaattctgaagcattcttgtttaggtttatatttggagtattctctcactgggcttgctgacagtgtcgtgtttgacagggcatgctactcgaagatggcagaggagctatgcgcgcttctggtggacaccccaagcgagacgctgaacctacccatggggtgtcttctaacgatgctcaacgctccagttccggacgagagcaggtcgtcgtacctgcaggacgcactctccgtcttcaccgaaatcctttgcagcgatccgtag

SEQ ID NO: 27457 - DNA, 582 bp, Zea mays
  Peptide Sequence Number=SeqID_70832
atgggggacttcgacatcacatactaccgcagccgtgaccccgggcgggcgcgcctgttcgaggacgtgctggaggaggtcgagcagatgggcatcatcaagtacggcggcctgccgcactggggcaagaaccgcaacctcgccttcgtcggtgccgtgcgcaagtaccccggcctgccgcgcgcaagtaccccggcctgccgcgcttcatgcgcgtcaaggacgcctacgaccccgatggcctcttctccagcggcggcggcgagcgctgcggctagctgcgcgcactggtcctgctcgtggagcacgacgtcggtgagcggggccagcgccgcgggcggtgcgcgcacggaggagtccgggtcccggacacggcgcagcgcggcggccaggagccctggcacgagcggcgcgatggcgtcccgcgggtgctccccggcgacgagcgccagcagccggagcgagtgccgccgcagcggcgtcctgtcggttgcggaggtggttggaagcactgcggggcgtgacctgaacctcatacgtgcacgccagagcaagatcaacactcccgaatcaagatcgtaa

SEQ ID NO: 27458 - DNA, 132 bp, Zea mays
  Peptide Sequence Number=SeqID_70833
atggcgacaatgaatcgaacctcaccatattttgaggccaactcggaagcgaatatgacactcttcttagaaagggtgcgagaaatggattgcccgatttcatttcctggttcaaacataagggccaaatag

SEQ ID NO: 27459 - DNA, 150 bp, Zea mays
  Peptide Sequence Number=SeqID_70834
atggcagtcggggtcagtgaggcattgtgcgccaaggcgataggttctctggaggacatggttgctagagtgacttggccgtccatcttgccaccgggatggactgtcgagtgggaccctgcctcggctgaggaggaacatgaggagtga

SEQ ID NO: 27460 - DNA, 666 bp, Zea mays
  Peptide Sequence Number=SeqID_70835
atgacttctcacggatcctcggatgaagggaatgcacagtcccacactgacgggcttgcacgagagggtttcccttgtatcttgtgggaggtacttcagggagctggttacacgacgcctccccaggctgagggtactatggaggcaattgctcttcatggactgaccaccttctgcggattccaccccttggagttgtccactcaccccattggccagactgctcacttaacggtgcggtgcatgaatgccctgtatcgtctgcaagtgatgcgtggagaggcaatgtcccatctgatggcatttttggaggtgaccaagatcactttggataacagagaggaacttgtggttgacttgtccactgagatggtggaaaaagacctacaagtggaacaattgtcaaatgagatccaagagcttgaggagctagtgggaacgagggagaacaccatcgaggttctcgaggatcagcttatcaacactcagcagcaactcgcagaggctaaccaacatctggatatgcaccaccaggagatccaggacatggaggccaacgaggatgtcgacatcgagggaggagaggagcctgcctccagtttggacactgctggctcagggagaccaccttcccctgagtcgagcgttgcctcgtttgctcactag

SEQ ID NO: 27461 - DNA, 348 bp, Zea mays
  Peptide Sequence Number=SeqID_70836
atgtccggcttcagtgaacgccaatccatctacctgcactccgcttgggacggcacctggcctagcagatttggtcctgcttctagttttgatgagcatgcaatattggcaccggtgtctcaccctgctgaacacccgtacggcaccagacttcggcacaatatttgcaagcccaagcaacacacagatggcacttttacatactctgtggtacggtcctctgattcagctcctacttctcacatttttgctcttaatgatcctctttggagacgggctatggatgatgagtattgtgctcttgttaaaatgctacttggcaccttattcctcctcgacctgggttga

SEQ ID NO: 27462 - DNA, 2382 bp, Zea mays
  Peptide Sequence Number=SeqID_70837
atggccactgcaacgcaccacagcgacgccccgggcctgaacggggccgagggcatggagatgatggcagaggccaacgagctccgccggcggggcaagcccagcgacgaccgcacggcgtcgtatggggccggcgcggaggaggacgaggcggcggccgcggcggcgccgtcgtcgtcgtccgtggagcgcgcgttcgcggaccagcccgtgccgtcgtggcgggagcagctgacgctgcgcgccttcgtcgtcagcttcttcctggccgtcatgttcagcgtcatcgtgatgaagctcaacctcaccacggggatcattccgtcgctcaacatctccgctgggctcctcggattcttcttcgtccgcctctggaccaaggccatcgagagcgtgggcttgctccggcagcccttcacgcgccaggagaacaccgtcatccagacctgcgtcgtcgcctcctacggcctctcgttcagcgggggctttggtaactacctattagccatgagtgataaaattgctgccatggtaactgaggcaaacaatgctcaaaatataaagaatccacaacttggatggataatcggtttcctgttccttgttagcttcatcggactcttcggtcttgtgccactgagaaagattatgatcgttgactacaagctgacttatcccagtggcactgccacagcctaccttataaacggctttcatacgccccagggtgccaagctcgcacggaagcaagtaaagaagctgggcacgttcttcgtccttagcttcgtttggggtttcttccagtggttctatactgctaacccggacgaatgtggattccaaaaatttccatcactaggcctgcaagctttcgacaacaagtttttctttgatttctctcctacgtatgttggggtgggaatgatttgctcacatattgtcaacgtatccattctcctgggagctatcctctcatggggaataatgtggccgctcatagccaagaaaaagggagtttggttctccgctgatctcgacgacaacagtcttcacggaatgcaaggttaccgggtcttcatagccattgccttgattctcggggatggtctatacaacttcctgaagatattcatcctcaccgtggtctcgttaagatctcaagtaagaaaagctaacgctagcacacttcccatctctgacgatggcacagttaccagcaccgcacctacctcatacgacgaagagcggcgcaacgaacacttcctcaaagatcaaattccttggtacgctgcacttggaggctatgtcgccattgccgccatatctatcggtactgtcccacaaatattcccacagctgaagtggtaccacatcttggtggcctacatttttgctcctatactcgccttctgcaatgcctacggaaatggcctcacggactggtcgctggtcaccacctacggcaagctcgcgatcttcgcattcggtgcatgggtgggcgcctccaatggaggcgtccttgcaggcctggctgcctgtggcgtgatgatgaacattgtgggcaccgctgctgacctgatgggggacttcaaaaccgggtacctgacactagcctcaccgaggtcgatgttcatcagccaggtcatcggcacggcgatgggttgcgtcattgcgccctgcgtgttctggctcttctacaaggccttcggcaacatcggcgtcgctggcagcgagtaccctgcgccaaacgccgttgtcttccggagcatggcagtgctcggcgtggatggcttctcctcgcttcccgagaactgcctcactctctgctacgtgttcttcgctgcagcgatcgtcatcaacctgatcagggacctggtgcccaagaaggtgtcgaggttcatcccgatcccgatggcgatggcgatacctttctacatcggtgcgtacttcgccgtggacatgttcgttggtacagtgatactgttcgtgtggcaaaggctggacagagccaaagcagacacgttcgcgcctgcgattgcttccggcatgatctgtggtgatgggatatgggttctacctcagtcagtgcttgctcttgccaagtgcacagacgccgtgtggggcgaccagtgcacggacgccaagttcctggtggacgagctcaagatggttgtccgcctccgcgggccgctgcggcgggacgccgtgtgggaggcggtggacgccgacgtggcggagcccgtggccgatgagatgctcgccagcgccaggaggtggagcgcggcggcgtgggacgcaatggcgcccgacgggtcctcgaacgtgctcacgcgcctcagcgcctgtctaggcgttcgtggacaaggtgtccccgcgagctaa

SEQ ID NO: 27463 - DNA, 339 bp, Zea mays
  Peptide Sequence Number=SeqID_70838
atggccatcacagaattcttcttggatggttgtcctgattcaaatagactgcttaaaattcttggtgattttaaggtaatggagtccggcacctgtggttggaggtggaaatcatggagtctaaacaagagggagacgaattcctcgatctgtaccgtggaggtttcttggcgccatgccatcaagccaactgtcgtgccagaatttggttgtcttgccatctccaacggtgacgatggtggaggcgctaaagaggagcctgtccgcaaggttacaaggcacatcaaaccctttccaagggtgatcctctgccgtccagctcttccaaagccatcttag

SEQ ID NO: 27464 - DNA, 232 bp, Zea mays
  Peptide Sequence Number=SeqID_70839
atggcgaagcctggccacattactcctcctggtcctcacctgcggaagcatacaatggatcaagcagtctcattagctgcgagaagcagacgatttgaatcaagttttaaccttgcaaggactcaccgccttggcatacagtgctccactgaccccggctgccgccatgcagtggccgcacttgtacccaccatatctgaaatgggagactacgtctcaggacaagtgaggg

SEQ ID NO: 27465 - DNA, 762 bp, Zea mays
  Peptide Sequence Number=SeqID_70840
atgggcgtcgcctatgagacggccaagagtggcgtcggcgtcgcctccatgggcgtcatgcgcctcaagcttgtcatgaagtccatcgtcctcgtcgtcatggccagagtcctcggcatctatgacctcatcatcgccgccatcatctctgccggccttgctggcctcgccgtcggcatggccatcaggatcatcagagacaccagagtcaggcgtccacatctggttctgtcgtcgcgcttcctccgtgctccccccgcggcttccttcattggccagccccgcagcgcctccctcgaatcctgctcgcggatccctcaccctcgttggccagccccgcagagattagtgggactgcgggaggaggagcagggcaccggccgcttggggctgtgccacatgccgctctgggggaccgccgcgtccacgcagccggcagccaagggcgacgctgcctgcgcgcccttagggtccggcggcggcggtgtcaagcacggatggcccgtggagaagaaggcgcctttcaaccatgaatccggtaagcaagtccggagcgctgtcaggatcaagaacatcagcaagtctcatgtggctttcaagactcgggagccgctgcggcagcagcagattcacttcaatgggaaggaggtagaacacagagaagctcagtgccgctggggtccaacaatgttgtcgaatacttttgttgcagatgatccaaatgttgttgctatccacatgaagaaaggcgtgaggcgatag

SEQ ID NO: 27466 - DNA, 303 bp, Zea mays
  Peptide Sequence Number=SeqID_70841
atgacggtggcaggcgcgcgagagcagcggtcacgccatctgccaagctcatgtcccatccggaggcagcaagagaaccccctctcacggcgtgaagacgacgcgcccgtgacccgtacctcgaacggctcgcgcacgcgtaacggcaacctcgccaactactcaccccggcgcattaactccgcggctcgacggaaggcgccacgggtgggagcggctggcgacgtttcgccttcgccaaaacgaccacgccgaaaaagggaccgggaaagagggtaccctcaaagggatccttccccgtga

SEQ ID NO: 27467 - DNA, 720 bp, Zea mays
  Peptide Sequence Number=SeqID_70842
atggagcttgacggagggacagctgttggaacagctgtgctcttgctgacgtctccctgctttcgtaagggagctgggagccgccgtcgtcatggcctagtgagacgccatcattgcctatctggcggagctggccagatgggacgccggtcttgtcctctgcgacccaagtcggctcagggcagggtgatgatgacgcttcctgttgacgtggcggtctcgtgtcctaggtcgggcgtcgtggaggctcctccgaagctgaggccgaggcggagtccgagccctgggtcgggcgaggcggaggtcgtcgtcttccggggccttagcccgagtccgagccctgggtcgggtggagcggagttcgccgtcttccggggccttagcccgagtccgagccctgggtcgggcggagcggagttcgccgtcttccggggccttagcccgagtccgagccctgggtcgggcggagcggagttcgccgtcttccggggccttagcccgagtccgagccctgggtcgggcggagcggagttcgccgtcttccggggccttagcccgagtccgagccctgggtcgggcggagcggagttcgccgtcttccggggccttagcccgagtccgagccctgggtcgggcgaggcggagtttcctctggcgcttttggccaagcctggctacccgtcagtcttaccttttgcgttgaaggccccagggatttga

SEQ ID NO: 27468 - DNA, 522 bp, Zea mays
  Peptide Sequence Number=SeqID_70843
atgaggtttatcacttctcacttaattgaatcactaccaagggtcactgggttaagtattgcctacttccaggacctgccgctgtcgcaaataacggataatcttgtaatgctggaagatgtgccaactgaaggttattttgctcacgaacaagagactgagctgattggtccagaagttgaaataccggaatcttgcttcagggctctcaataagccaaatggaacgacatccgattttgtgaaaaataaaaccaatttgaaggcacagacctcatgttgtgcacattatatgacaagtttgaaaagtcaaatggggattgcttactcgataagccaaatggaatgcagtcatccaaggaccttgcacacacttaacatgacatcagataaatgctttcgttcttggaactatgaaaacattgacagcaatgttagatgtagccgcttaattacttcaatgataaatggcagtagatatattgttgtagcattgatagaaagtgataaagtttatgcctaa

SEQ ID NO: 27469 - DNA, 888 bp, Zea mays
  Peptide Sequence Number=SeqID_70844
atggcgagggagaggatggggcgagctcgaaagttgtccttcccccacgcgggaaaggcgtcgtcggttccgccgccggcgggcgggttgtcgaccgccattgtcgctgtcgcgcggcggtggaaggagtaccatgtcggagctgctgtcgagagacatgaactcgaggctcccgaaacggagcaccgtcccgggttgaagaggtcgttggagactacccatctagggcttgacgggaaaccgctcgtcaacacgcagcgggcccctacctggcgcgccaactgtcggcgtttcgagaccggggggtccccgagccgacgaaggcagagtccgagccctgggtcgggcgaggcggagatcgttcggcagaggccgaggcggagtccgagccctgggtcgggcgaggcggaggtcgtcgtcttccggggccttagcccgagtccgagccctgggtcgggcggagcggagttcgccgtcttccggggccttagcccgagtccgagccctgggtcgggcggagcggagttcgccgtcttccggggccttagcccgagtccgagccctgggtcgggcggagcggagttcgccgtcttccggggccttagcccgagtccgagccctgggtcgggcggagcggagttcgccgtcttccggggccttagcccgagtccgagccctgggtcgggcgaggcggagtttcctctggcgcttttggccaagcctggctacccgtcagtcttaccttttgcgttgaaggcccccagggatttgagcggttggcgcggtgatttagtcagggttacttcttatcgaaggcggggcctcgggcgagccggtgatgcgtctgctgtgaaagaggagacctcaggcgagacggagtcatcttag

SEQ ID NO: 27470 - DNA, 906 bp, Zea mays
  Peptide Sequence Number=SeqID_70845
atggccgcctgcccctttcgcccgctggtctgggcgaaagtggaggactgcttcccggctgcacccctccaccgggcggtcacccaagagggcgacctccggcttgatggtgggggaaagcgagccgggctgcggcacccgcccctccctcagcctcaaggattttcatcactaggccaagagggaggacgaggcgaatcagggggctgcctccgtgtgggtcggttgccctcttcttccccgttcgttgggggagaacggcatcctccagcatcgcggaggccccctccagccatgctgggagaggcgggttgtcgccgcacagccagggcgccatgccgcgtcctccgttcggacgacgattgcgccgcgcaccgcgagggcagtgcctacgccctggacggccctggcatgggcgaagacctgctggcgcattccgaggcgtcagcggacggaggtggcatctctaccgatgagattgccgattccgccagtagccctggatttccgtctcctggcctggatggtagcgcctcatcctcggggggtggcacttcgaatgccagtgtttccgttcattacggctttcggggcctgaacgagtccctcggctcggtcggacctgttgtccgaggctcctctagctcagttaaagagacccctcggccgctcttcgacgagccgaggccaggggtagcgatatcagcaggaacagaggtggagttggctcaaaaatgggacctggttggccggagcctagccgagttgtccgttggcaggttcagcgtcggagtcgatcagccgaggcttcgggccgggctggcgccctcggaaggtggtcggccgaggccccggaggtggccggctccgaagaagtccctgacagtgattgctcgagcgtggtga

SEQ ID NO: 27471 - DNA, 423 bp, Zea mays
  Peptide Sequence Number=SeqID_70846
atggccggttggggtgtatttatagcccccaacacaaatagagccgttggagaaaagctgctgctttctgtgtcacaccggacagtctggtggtgcaccggacagcgcactgtagcctatccagtgcgccaagccattgtcctatcagagcaggtgatcgttggcgccgcaggctttccacaccggacagtccgatcctcacaccggatagtccggtggtcttctctccgggtgccacctggaactagccgttgggctgctattccttggtgcatcggacagtccggcgtgtgggcaccggacagtccgactgtctggtgcccagggtcatacgacttcaaacttgccacctttgggtttctgaaaaagctgctccgctataattcaccggaatgtccggtgtgccaccggagcaacggctag

SEQ ID NO: 27472 - DNA, 876 bp, Zea mays
  Peptide Sequence Number=SeqID_70847
atgtcttcgcactcccttcatgcatcgcgcccttccaccttccgagcccctggatggggagcgcccacgttgcttttgtcttgtcgtcgttggaggaacgcaacttcgcggaagttgggcgaaggccgggctgagccggagctctacctcccgcacgagttcgtgggtcaccttctccctcagtactcaggggagagggcgctcaccggcctagcggaaggggcggactttgacaacacggggccgagcggccgcaagcatcgtcagctcccacgtgcccggttcgctggctcagctggctctggcgcagcttcctgtgccgccttccaccgctgggcggagtgcggccatctgcccgttgtacgggcggctgtcgcaccgcgcgcaccgggggaccgcccaagacgtcgcgcgctgctagggcggcgttcgtgttcttgggccgtcctgcctttgctccggtacgacgcccctgcgcggaggtcggtgttcgcccgtccgggaggacccgagtggggatctgccggtgggcagacggctgccgtcgttggtgccgaggtggtggcggctggagaagtcctcgtcaccgacgagatcgcggccaccatccgcgctccaggcctccggctctttggctttgatagcttgtcctcgcccctcgagtggggacgtgggcgagggccttgtcgcagcagcgtctgccctgaggtcatcgctgctgccgtttggccgcccggagcggaggtcgttgtcgctgctgtcggagcgggcgtcggcgagctatctggggttttgtcgccccgcaggccctccaatgtggggggttgttcatacctgcggggcggaaccggagttccgtttgtaatggcaccttga

SEQ ID NO: 27473 - DNA, 201 bp, Zea mays
  Peptide Sequence Number=SeqID_70848
atggcccgtacggggcgtgctcaaaaaaatcggagtgtagggccgcgaaggccgcgacgttgggcaacatccgcgccgggttggtcgggcctgggcgaggcctgccgccgtgggctggccgccggcatcgacaagctcgccgacgccgtcagtgtcaccctcggccccaaaggtgaaaagagagtaagaaaacagccctag

SEQ ID NO: 27474 - DNA, 570 bp, Zea mays
  Peptide Sequence Number=SeqID_70849
atgcctctccaaggcgtcccgagcctgcatccgctcgcgggcccgagcctttttcgcgtccttcttcttctccgcagcaaccctccgcgcggctcggtccaccgcgtcctccgggaccggtggcagagaaggtttgtgaaaccccaactcctggagacggacggaaatctcggctgtgagaaccaagggcaatctgacacaagaaggaagaaggagcggacactcaccagagatatgcacccgcgctcgggacgcatcgagggctgggtaagggcaccggcgtccagccttcctaccatgccggctacccgcctgtggaggtcatcggcggggagggggaccgaggacatctgcgaaccctccaagtcgacccccggcgtcatctccgaaagcagcagccgccgctccgtcaaggggagcaccctccggcgatggatggcggcgaccacccacgcggcgggaccgggaaaggggatactccgaaagggatccttccctgccaaggaagcgagccccgagccccctactaataagaggttcgaaggctggcccctcggaagggttcgatag

SEQ ID NO: 27475 - DNA, 285 bp, Zea mays
  Peptide Sequence Number=SeqID_70850
atgcctcatggaagggagtgtgttgccgccatgagagaggaaacaactgccattaccaagcacgcagagagggatgtggaagtcgcctccattgctatttgtctacgccgctggttgagcccagccgatagccccaaggggttcgcgggtgaacacggatcatgtgtgtggcctcaccttgctcggagtttacgtgagcgtatagcgattgctcgttggggagttcttcgtcgtggtgccgtagtacaccgtcgcctggacccctcgctacctcagtcgcggtaa

SEQ ID NO: 27476 - DNA, 246 bp, Zea mays
  Peptide Sequence Number=SeqID_70851
atgagctcgagggatgaagagaaaagggagaatcgagatgaaatcaacagcgagttagatcgacttcacctcacaccaagggtccttcaaacaattgaaggagatgcgatttcaggtgcgagaggtgaattgaatgctcttgttttagagttggtcagtcaagaattcgtggagagggcagaagtgaatgaagagagagagtgtgaggggtatataaaggagcccccaaaagctggtggccgttga

SEQ ID NO: 27477 - DNA, 144 bp, Zea mays
  Peptide Sequence Number=SeqID_70852
atgacaggaccggttgaactgccccctagggcggttgaactgccccctgacaactctagtgatctgactgccagcctaactggcagactgcagatggctccccctaaatgtgtgcatgaatgtgaatcaagtgagttgacataa

SEQ ID NO: 27478 - DNA, 624 bp, Zea mays
  Peptide Sequence Number=SeqID_70853
aaagccaagagcaaaagctgtgcagtgccactgtgccaggccggccaaaaagaagaaatcggagcctcccgcccacgccgcccgcacgcgtccgtggcgacgtccgcccccgacgcctgcctcgcgcaccgtctacagcgaccgcttcatccccagccacaccggttccaacctcgcgctcttcgacctcgccccctcgccctcctccgccgcctcgtcctcgcacgacggcggccccgcggcctcgtccggatctgcgcagcccgccgcgtcgccctactgcacgctcctccgcgccgcgctcttcggccctgacacgcccgactgcgtcgcgtcctcggccgccgcgtgctcctcgtcctcctccccggggccctcgcctgtcggcacccccgccatcgggaacatcttcagattcaaagacggagccggaacgccaagagggcgctttttttcgggagaccaagaggaggacgcactgttccccggcattttcaccaccacgggcgcgggagcaaggaaggtgccaaggtcgccgtacaaggtgctggatgcgcccgctttgcaggacgacttctacctcaaccttgtcgattggtcttcacataacgtccttgctgtcgg

SEQ ID NO: 27479 - DNA, 81 bp, Zea mays
  Peptide Sequence Number=SeqID_70854
atgcggcttcataccctcagagatgatgtggttttatacccccagaggtgcttgttgctcatcaaggggagtgggaagtag

SEQ ID NO: 27480 - DNA, 161 bp, Zea mays
  Peptide Sequence Number=SeqID_70855
atggctatgtgccaaattatgaagtttgggtgcatcatggtgaggagcttccccgtggatatgctccagaagataatcctgaggatcctcaaccgccggaagttaaaaaattctttgaacttctcaaggcagcagaagagccgttgcacgaacacacgaga

SEQ ID NO: 27481 - DNA, 435 bp, Zea mays
  Peptide Sequence Number=SeqID_70856
atggcgcgcaggctggagatcccccagtggaaggccgacggcctgccgtcgccgacgagcccgctgggaccgcgcgtcggcgtcgccccgtgggtggcgccaccgcgacgcccctgtgcggcggcgtcggcccggccccccgcccggcccggcggcggcgcggcgttccgcgtcgcggagttcctgtcgtgctgcgacatgtgccggcgggcgctggacgggagggacatcttcatgtaccgcggggagaaagccttctgcagcatggagtgccggtaccacgccatggtgagcgacgagttccagcaggagaaggagcgcaagcgccgcgccgccgtgtcccggacttcggccgcggagatggccgggtcgccgtgcagcggcggcggcggcggcgggcagatcttcttcaccaccggcatcgtcgccgcctga

SEQ ID NO: 27482 - DNA, 474 bp, Zea mays
  Peptide Sequence Number=SeqID_70857
atgggtgtgggcaagggacggcttggcaagaacaacaagcgcaagcatgagccaactcctccatcggaggattttggtgactcggagtactcagaggaggagttctcctctgagtctgaggggtctccagctcccatccccctgcgtgagtcgtctgacgactcagacaactcccaggggctcacggcggaggtctggacgtacatccgggccgtcgagcgctccgggctcgagggctcagatgactcggagtactcctcggatgaggagggctcggacggtggcggtgaggacgaggacgacgacgacgaaggcggtggcgacggtgacggtgacggcagcggcaggggcggcagcagcgacagcaaggacggtgacggcggcgacagcaggggcgacagcggcggtggcggcagcagcagaggcagcaacaggggcggcagcggcgacggcaacaacagggccagtggctag

SEQ ID NO: 27483 - DNA, 297 bp, Zea mays
  Peptide Sequence Number=SeqID_70858
atgtttacaggttcgggccgcttagagatgcgtaacaccctacgtcctgtgacctttagtcatatagatcctggagggaaacttgttatgggctgtcggaaggccacaaatactgtcagtctgctagactcacagatttcagctattgcggatggttcccttctcagtgagacactcttttctactgcaaatgaaagcataggagtagagacagagaagcatctttcagacatggtgaactcaaaatctctgactgcgaagatcgacaatgttgttgtctcgatagggcgcccataa

SEQ ID NO: 27484 - DNA, 165 bp, Zea mays
  Peptide Sequence Number=SeqID_70859
atggggaaaggcccctatctggtagtatcttcgtcaagacccggttcctacagattaaaggatatggacgacaacgacattcctagatcgtggaatgcgggacgagcttcggcgttttttcttatggcacccttttcctttccaaagggggagaaaggtttttaa

SEQ ID NO: 27485 - DNA, 162 bp, Zea mays
  Peptide Sequence Number=SeqID_70860
atggagggtggctgccatagggggagggggcgtccagccaagggggagaaaaagggggtggcggccaagagggggggatacaagattaagggtctgtttggttgggctgtggctgtggaaaaagttgctgtgggctgtgagctgtggaaaaagctgctgtag

SEQ ID NO: 27486 - DNA, 1036 bp, Zea mays
  Peptide Sequence Number=SeqID_70861
tgatgccctgctggatcaccttggtagtgatcaatggagagtcatgatctccgggcagaatgggaatcacggcttgtggagacattgtggtacaggtggttatgagattgatggttctggttatgattatggtgctggtaagtggtattctttccgtttggaaaggatggctcgacttagacacactgcacgaaagtcagtcatccccttcttaccctcccgccttgctgagcgtccgcttcgccgtcccgtggccggacagtccagccacttggagagactacaccaccgcctgcgtgaggagcaggagcgtcgacgacaggagcagcggagctcttccctctcgctccaccaggagatagagtctgtgaggagctgctcccctgtgctttctctggagccgccccctgcaccaccactgggcgccccagcttctggagtagctgctggaggagacccagacgacggaggaggcgacgacagctcgagccacgacaccgacttctctgccaaccctgagccggaaggatgggttgctcgacccatcactcgcgacgctgctcgcgggtgtcacttccatgatgcgctcgacaccctgctacgtcgggcatttgaccggcatacttggtccgtcgagtatcgctgtgtggtctaccagcatagtcgcggggtctacccggacccgctgggaggcgacttgcttgctgacggtcttgacctgaagtattacccccgccgttcatctggcagcacaggaggcgtgattgtctcacctgtcggtgagggcaatcctaggttgagcagcacagtcaacctagccgccgtgctaaacacggagctggaccatgcattagacgagctgagtagggctcgtgctgagatcgccctgctgcgggctgagcgcgcggaacgtcgttttctggatggtggttcccccgctcccgttgggactcagcacccgtaccgctcacctcagcgtggacaccagtcttatggcaatcccgcctgcaagaccaagataactctagaaccatag

SEQ ID NO: 27487 - DNA, 90 bp, Zea mays
  Peptide Sequence Number=SeqID_70862
atggcgatggcgcagttttctatttctctagactgggcgtcaaaaacagagaaacataggggcctcggggtaattcttcctaagacatag

SEQ ID NO: 27488 - DNA, 864 bp, Zea mays
  Peptide Sequence Number=SeqID_70863
atgggccctgatggtatctcaattgaggtgtttgctgacacgttggttaagcaagcatatgctgattggatcaatgttctagaatatgatggcaaggcgctattaaagttcaaccagaaaaagaaatatgttacaactagaagtgaaacagcgaaagcttcagcaagctaccctgcatcaaacggtttagtgaactcacagaaagaactgcctggaggtcctgtgaatgctgagcaatcttccctgaacaatgctagccaagatagaactagaatcccatccatgtccatggggaaccaggtagcaagagagtatgcaggcaatcctcagcacatgacaccaagtattaccatgcaatgcgacacgaggtcattgatccccggaggccagttcagtggtggttcctccgtgcagactcaaacttcacgaagctccaacatgcttgcgctgcggccaacgcagcagcctcaaaacttggacttctctgggctaggtcagtccacacagccttcagggaccaaccctttcgccgactggtctcggttgcaggagagcagcgtcgatgagtacttgatggatgagataagggcgaggagccacgagctattggagaacgatgagatgcagcatatgctgcggttcctgagcgtgggcggggcgccgaccggcctgaacaacgttgacggctttctttcatacccgtctcctgccccagccttcggatttgatgaggacgaccgcgctcgctcgtccggcaaagctgttgtcgggtggctgaagatcaaggctgcgatgcggtggggtatctttgtcaggaggaaagctgccgagagacgggctcagcttgttgagctggaagactag

SEQ ID NO: 27489 - DNA, 921 bp, Zea mays
  Peptide Sequence Number=SeqID_70864
atggctggaggaagtctccgcgaaactggaggatgccattctcccccagacgccaggggaagaaaagggcagccgacccatgcggaggcagccccccgactcgcctcatcctccatcttggcctggatgacgaaaatccttgaggccgagggaggggagaggccgcagcccggctcgctttcccccaccatcaagctggagaccaacgggcggaaggagcgggcagccatgcaggcggcatgcaaccgcgccaagcaactgcaccgccacttgcgccaccatcgcgcctcttcggttgcggaaccaatgccgcgactcgaggcgacccagcgcacgacccagcagcgccagcctggcgcgacggtcaatgcggccgaaagtgggccggcagtaatgacggtggcaggcgggcgggagcagcggtcacgtcgtcagccaggctcacgtcccatccaggggcagcaagagagcctcctctcatggcgtgaagacggcgcgcccgtgatccgttcctcgaacggctcgcgcacgcgcaacgaccgccccgccaaccactcgccccgtcgcattaactccgcggcgggacaggcggcgcttctggcaggagaaggcggggcgacgcttcgcccttcgccggaccgggaaagggggataccccgaaaaggatccttccctatgaaggaaccgggctccgagccccccctactgatcagaggttcgaaggctggccctccgaggggttcaacagtcgcctcagatcacgtgggccctacacccactactggtcagaggctggcccccgaagggttcacagtcgcctcagacgccgagcgagggatgaccagggggctcggactcgggctaagccccggaagacggcgaactccgctccgcccgacccagggctcggactcgggctaa

SEQ ID NO: 27490 - DNA, 930 bp, Zea mays
  Peptide Sequence Number=SeqID_70865
atgaactccgcttcgcctgaccccagggctcggactctgccctggcctctgccgaacgacctccgcctcgcccgacccaggggctcgggctcggcctcggccacggaagacagactcaaccccggcttcggaggagcccccacgtcgcccgacctcaggcgcgggcccgccacgtcaacagggagcgccatcatcaccctaccccgagccgactcgggccgcagagaacaagaccggctccgccactcctccgacggccacgacatcacaccgactgggtgccaagatctctccggctgccacatcggcatggccttcttagagaaggttggccgcgcggggacgaggacgagaccggcgctctcctggggccgctcgcttcgctcacccgcgtggacgctttacaatggatcaagcagtctcattagctgcgagaagcagacgattcgaatcgagtttttatccttgcaagtgaccgcacttgtacccaccataatcggaatgggagaccacgtctcaggtcgcgtgaggggtaaagtctgctgcaagatcctcgagggcagtctctggtgctggatcctgggctacctcctgagcaactccttgctccggcacaaggatgcgggcgagctcgtcggcggcgtgtgctccggcctatccacggcgatacaggtcaatccaagggcacggggagcttcatggggtgctaaggagtctacccgtgcaaggaatcgaagaataactcaacgtggagctcggtctatgttcgtcggtggtcgggtgaagtccggtgaccttgatccggcgtctctggcgaggcagagctcgattcctcgctcttggagcttcaccgagggcaaactctggcgatctcgtgctccgatgaggtcgagagcacgcgaggggctgaagccttggctggctttatag

SEQ ID NO: 27491 - DNA, 774 bp, Zea mays
  Peptide Sequence Number=SeqID_70866
aggcatttacacaagctaacaaaaaatatgagcgctgtcatcatccaagaagaagcgctgctcagccttgatcctgtcgcagctgcatgctcaatgatgaatcaaactattaaggatgcaggcatccagaacgacgctctcctgagtgaagtgttgtacgagtgcaagaaggaactcatggaaaagtctgcaatcgaagagacaatttctgaacttatggatgttaagatccctatgctgcaagctgaacaactcccggccatggagaatgagaagcgttccattcctgaatgctcgctccagaaaagtgttagttctggatgcctcaactcggcagatcggatgaatggagctgtcaggccaaactttctagacttccaagggctggactttgaggcaacgtttgggctgaggagagcttacagtgaaggagacattcagaaccttggagccaacacgcctcgaccagcagcaaatgtttgtgtgaccatcagtgacctcaaggccgaagaaaggaagcaaaagctttctaggtatagaaaaaagaagatcaagcggaactttggcaggaagattaaggaaggctctggcagacagccagccaagggtgagagggagatttgccaagatcgaagaatgcgacttgctgctgctgaattcaggcacttatatggaggttcaatcgatcattcagctgttcaaaatccacctcctctacccagccgttttggtgcgagccgagggagtgaagagctgaaagtggtggtagtctag

SEQ ID NO: 27492 - DNA, 66 bp, Zea mays
  Peptide Sequence Number=SeqID_70867
atggggaagggacccataccgtcaatctcgcagtgcagcgccctgaccacggaggtttacatttga

SEQ ID NO: 27493 - DNA, 213 bp, Zea mays
  Peptide Sequence Number=SeqID_70868
atggacggtcggtttcccccgtgcccgagttcgactgatggtccccggaatcgtagaggctacaacggattcgagaaggaactactcgtcactaaccatcccgagctgaggtcgttctaccgcatgcgacgacgacctcgccataccgacaccgacgataggcgtcccaacacgcccgaaacccggaagtctcggattaaggatagagtctag

SEQ ID NO: 27494 - DNA, 963 bp, Zea mays
  Peptide Sequence Number=SeqID_70869
atggagaagctggtgggagttcaccatcaccaccactcgctctcccatcgggctcctcgcaccccaacccgcccgcagccgcagccgcacccgctcctccaccatctcccgtccaacaggttccgggatctccactcccagattcacaatcacattcaccccacggtccccgcggccagcagggtgctccgcgccaccccgcccttcttcctcatcctcctctcctccgtctacctgctcgcctccgtcaccatcttctctgcccccacgccgctgctccgcctccgattggcctctcccaggccgctgatcctctcgaagctcgcgccgccgcggcctgcgccggagctctttgatctagacggcgggagtgtccgggtccacctcaccaatgtcggcgccgctgtcacctcgttcctcgtcccggacaagaacggtgcgggttctctttggtacctaccttctgtttgcttgtgctctacaatggctctgactcttccgtttcacgatgctcggctcgtcttcctcccaggggttctcgctgatgtggtgctcggattcaactcgctggatccgtacctgagaaaaggctacaagcttgttgccatcaagctgattgtcccatccaaaggattcgctgagaaacactaccatgatctcaaggaaaggcctttcttcaacaagttgtgtgacttcctcagctctggccctgtacttgcaatggtttgggaaggagagggtgtcatcaagtatgggagaaaactaattggtgccacagacccacagaaatatgaaccaggaaccatcaggggcgatcttggcgttgttgtgggaaggttagtaaggcacaaggaaaggaaggaatacaccgtgaaatttgttaatcttcatgagtctgtttttgctcttgttttcattaaggcacaaggagtgcagtgccaagcaagcagaggggagagctga

SEQ ID NO: 27495 - DNA, 1425 bp, Zea mays
  Peptide Sequence Number=SeqID_70870
atgtcggaggaggcgacgctggaggacacgcctacgtggatcgtggcgtccgtgtgctccgtcatcgtcctcatctccttcgtcttcgagcgcgcgctccaccacctcggcaaggcactggagcgccggaggaagaccctgtacgaggcgctgctaaagctcaaagaagagctcatgctgctgggcttcgtctcgctgctcctcgtcgtctcccaggacttgatacagaagatctgcatcgacgacagcctcatggagcactggatgccgtgccggggtgcgagcgccaccgcctcggctcattacggtgtctcctcctcctcctcctcctccgcggtcggtggcgggaggaggatgctcaaaggcggcggggcagctttcgggcactgttcaagcaagggaaaagtcccgttgctatcacttcacgccttggagcaggtacacattttcatcttcgtcctagctatcacgcaagtcgttctcagcgtcgccaccgtcctcctgggacttctgcagatgcggatatggatgcactgggagaacaccattcagcaagagggcagctctgctcccaagatgatcgcccgtgtgcagaaaatcaggttcatccaggaccggtgtaaggggttttgttcttcggaatctatgctttctgtaactttattctgcaactggcgcattagtgacttgcctcccaatattgtagatgggtggcactcctacttctggatctcattagttccactggctctgctgcttctgattgggacgaagctggagcacatcataaacaggctggcctacgaggtggcctcgaagcacgccgccgggcaaggcgaagggggcatcgtggtgagcccttcggacgagctgttctggttccgcagcccacggctggtgctcgtgctcatccacttcatcctgttccagaacgcgttcgagttcgcgtatttcttctggacactgctacgccgtcgagtcgtcgtcgtcgttcgtcgacccaatctggccactgggccagtgacgacctgtgtggcagtattcctgaatcctgatccctacgatgatgtcgatgttcatcgacctgacgccgttttctggtggttgcatggctgctggtttttgctcttcagcgtcgtcgtccaggtgctctgcagctacagcacactcccgctctacgccatcgtgtcccatatggggagttcgttcaagagcgctgtgttcgcggacgacgtcgccgacaatctcagagggtgggccgacggcgcccggaggcgcgtgcggagatctgccacgggtgtcgacgccagttgcctgggtacgccggcggcggcgggacggggctgggaaggcgccgccggctggagattgattgccgggaggccgagccgcccaactcagcagcctcggagcatctccttctga

SEQ ID NO: 27496 - DNA, 489 bp, Zea mays
  Peptide Sequence Number=SeqID_70871
atgccgatgccgatgacaagaaagaaagcaggagctgcctgcctgccgaggcggcagctatggcagccaggggtgggggctgccaggcgcatacaaaagccgaggagatggcagcgagaagcacgtccgagagggcaggccgcaggcaggcacagcgtcgcagcgattcaggggcggtgcgggcagccgcccaggggggacgaacccccgcctggatctcgtcgaaaagcccctcccttctccgccaagtccgccttgccagaacttgcacgggggccgatgactaattgcgccagatgcactgcatcggggcggtccaacccctctctgtctctcgcctctctcctctgcctgtctctgcgtgtgcgtcagtgcgtctgcgtctccctcgctgcgagcctgcgactgcgtgtatgtgtatcagtcacaggattggttcttcctacgaccgagctaaaactggcatgtggacaccaggacatgctatga

SEQ ID NO: 27497 - DNA, 156 bp, Zea mays
  Peptide Sequence Number=SeqID_70872
atggcctgcggcttcctggagatggggaccgtggtctgctccttcctggggatggggaccgtggcctgcgccttcgtggagatggggaccttggcctgcgccttcgtggagatggggaccttggcctacgccttcttggagaccttcgaattgtag

SEQ ID NO: 27498 - DNA, 249 bp, Zea mays
  Peptide Sequence Number=SeqID_70873
atgaaggtccagggccctcttacaagaggggttggccgcgcggggaaggacgggacggcgctcgctcccagtccaaagcggatgcctaccctagtcacccgcgccccctccactccgcccccgtttcctccctcggaggcggctgcggcatcggcgtcagcgaagatgtcgggcggccttttccgggggacgtgcgctgaccaggacacacgcttctccaacaagcaagccaagctatttaagacgtag

SEQ ID NO: 27499 - DNA, 1086 bp, Zea mays
  Peptide Sequence Number=SeqID_70874
atgcaggcggcatgcaaccgcgccaagtgggcgcaccccttcaactccaacgcgcccggcatggaggcccaggcccacacgtcatgcgaccggcgcgccggttgctacggaccgagaaagggggataccccaaaagggatccttctccgcgaaggaaacgggccccgagcccccctactgatcagaggttcgaaggctggcccctcggaggggttcaacagccgcctcagagcgctcgggctccgcgcccgctactgttcagaggttcgaaggccggcccctcggaagggttcaatggccgcctcaggccactcgggctccacgcccactactgatcagggcgggaacgatcttgtaacggaatcccatcagagggaggcatcgagccctcggaccccgtcaaaaggggaccgggtctggcagatcacccgcaggggctcgggggctgctctcgcaaacccggctccggccaaaccgttgacagtgtcaacataccagcccgagaacttgggacccgacccctcgggcaagggcagccgacccggaggattcacgtctcgcccgaaggcccctcaagcaacggacacacctttggctcgcccgaggccagtcttcggcaagaagcaccttggcccgatcgccacgccgaccgaccataccgcaggagcatttaatgcaaagggctcggactcgggctcagccccggaagacgacgaactccgcctcgcccgacccagggctcggactcgggctcagccccggaagacgacgagctccgcctcgcccgacccagggctcggactcgggctcagccccggaagacgacgaactccgcctcgcctgacccagggctcgaactcgggctcagccccggaagacgaagaactctgcctcgcccgacctagggctcggactcgggctcagccccggaagacgacgaactccgcctcgcccgacctagggctcggactcgacctcgacctcggaagacagactcaacctcgacctcggaggagcctccgcctcgccctacccagggctcggaccgaccacgtcataggaggggccatcttaccctacccctag

SEQ ID NO: 27500 - DNA, 2118 bp, Zea mays
  Peptide Sequence Number=SeqID_70875
atgccgtcctcgtcttcttccgctgccgctacgccgccggccgatccctcgccgtcggccgccgcctcgtctgaggagacgctgggtagtttgatggcggaggatttgcgcgccggcgattctgttgattttggcgtgtcgcggatgtcgtcggtccgcgtgcaggatatgcagcggttgggttacttcggcggcggagttgctcgagtcccggggacggaggaagtccccgagccggagggcgagttggttgtttttgaggcgttctttgccgccggactccgcttgcctgcgcaccgatttgttggcgaagtcggcggacagccatcggtcgaagtgtttgcgaagtattattgtttgcactggcagaagaagatgattggagacaaagtcgctcagttcgggtcctgcacattcacgccgaagaccggcaagaccacgatgcaggtggtcgagttggttccttgcgcccgcaacaagtggggcaactggaatgaatattggttttacgttgctgagggtaccgtcgaaggccatgagggactccccgtgtccgagatgtgctctcatttttactcagtgtacccgccctttgaagtggcggagggggatgtggacgaaggggcccttcggtgcgccgccggcctgagcagtgggcgcgacttggttgaagaatttgtggcgtacggggtatggcccttggcgcatggctgggcgttgggcgaagtgtgccctcgccagatgccttcccatggtgggaagatggtgcgaagtcctgccttcgcactgagtctgcaaaaccgcgactcggccgcctttgtgcgtgaggcggagggtggggcggtgcggctcgttggacgttacgtgccgaggacagagggccagcgcagctgggatatccgcgggtcgaatgaccgtttgaacatgagagctgatgaggacgtgcgcggcccccgggggaaggatgtcttcgcccgagctccgggagtcttcggctcggatgctgaggtgatggacaaggatcgccagggagctgcacaaaagcggcaggcggccgtcaggctcgttgaagccaggccgaagaggcagcggcccccggcggaggcaagccgccgctgtcggcgaagtcggggcgcccctgcatctagcaaggcgccggaggcaacggcgggcgccggaggctccaaattgacaaaggtggtgccgcctgccggcggagtggcggaggtcgcgaaggcggcccaagcgttgccgttgtcaggcaaacgcgtcgccgacttcgcccccaatattagtgtggacgactatcttggtgggtcggacgaaggccaacttgctatagttgcgcctgccgcggcgaccacgatggctgccatggtgccgaaggcgaagggcggggctcttagcgccggaggcgaggcgtcggccttcgcggctgtcagggatgaggcgggcgctgcgtcccgccggctggaggaggtgacggaggcgctgagtcaggcgtcccgccggctgaaggaggtggctgattttgccaacccgtacagcgtgggggggccttcccggcggctgtgtttgccgaagtcgagagactttggacacaacatgccgacgccgtccgtgaaaaaattggccgccgacagcaagtgccgtaagctgacggacaaggtggccgtactggagaaggagaagggtgacctccgacgccaactggcaggggagaggagggagatcaacgaggccctcgccagggagaaggctgcgcaggctgaggccaaattggcgcgggcggagggcaatattgccagggagcgcgccgagcagctgcaggagcggctcactgccttggagagccgcatggagagggccgaggccatgtcgcgcgcggaggcagagcggacgcgcaaacagctcatggatacataccgtgagctgggcgcggggaccggtgaattcgaagtgccggaccgagaggccggacttcgctgcctggagtgggtgcaggaggaattgcaagcgctccccactgtcgtggaggagtttatgtcgtatgcctccctggtcacctgcgagggggcgatgaatgcgctctcccgcgaagggtgccgacacttcgag

SEQ ID NO: 27501 - DNA, 1425 bp, Zea mays
  Peptide Sequence Number=SeqID_70876
atgtccgtaccgggcttgtgggcagcggtagccgccgtggccgtcgtgatcatcgacgctctcgtgcgtagggcccaccggtgggcttgggaggcttcgctcggcggcagcaggcgggcacggctgcctccgggtgacatggggtggcccgtcgtcggcgcgatgtgggcattcctctgggcattcaagtccggcaacccggactctttcatcggctccttcatccgacggttcgggcgcacgggcgtgtacatgaccttcatgttcagcaagccgacggtcctggtggccaccccggaagcgtgcaagcgggtgctgatggacgacgacagcttcttggaagggtggcccagggccaccgtggcgcttatcgggcgcaagtccttcctcaccttgccctgcgaggagcaccggcggctgcggaagctcacagccgcgcccatcaacggcttcgacgcgctcaccacgtacctgggcttcatcgaccggactgtcgtggccacgctgcgcgggtggtcggacgccggcgagatcgagttcctcacggagctgcggcggatgacgttcaagatcatcgtgcagatattcctgaccgccgccgatgacgccacgacgctggcgctggagagcagctacaccgacctcaactacgggatgagggccatggccattaaccttcccggtttcgccttccacagggctttcaaggcatgcccgatcttgcaagcaaaatataatcaatggagattattacttgatttaaaaaaagtggacacggcacggggtgtcctgaacgagaggagggcgaggaaacggctcccccggtcgagcgtagacatgatggaccgcctgattgatgcggaggacgagcacgggaggcggctggatgacgaggagattatcgacatcctcgtcatgtacctgaacgcggggcatgagtcgtccgggcacatctgcatgtgggctaccgtgtatctacagaaacacccagagatatttgcaaaagcgaaggccgagcaagaggagatcatgagaagcattccgtcttctcagatggggctaagcctgagggatttcaggaggatggagtacctctcacaggcacgcggcttctcaaatgctcaacgtattttaaccatatattttaacctgtggtacagaagtgtgcacatggatcctgaagtttatcgtgactccaaagagtttaacccatcaagatgggagggttatacaccgagagccggcacattccttccttttggacttggtaccagattctgccctgggaacgatcttgcaaagctggagatctccgtcttcctccaccatttcctccttggttacaagtacgcaaaccacacaatcaaaattatcttttgttttattgtttctccgtgtacaatttcagatttaggaggtgtttaa

SEQ ID NO: 27502 - DNA, 1026 bp, Zea mays
  Peptide Sequence Number=SeqID_70877
atggagctgcgatacgcgaacgtgattttagccgccaagacgttgctcgcggcgctgaggccgccggcaggtgacaacgaggaggcgcacgaagggatgatcgacctgtcgaagagagacgcgctgtacaagatgctacccgtcggcatccgcaaggccatgaacgctaagctgagagagatctggaagaaagcgcaaccggtggacgaggtgtctgccgcggcatcgaaggatgcggtggagtgtctgctgcggtggttgagcccgatggcgcacgacactgtgcggtggaacgacgagcagagtatggagcgggcgcagcggttcagcatgcagcctcgcgcgctgatggtgcagacgttgcacttcgccgaccgcaagaagacggatgctgctattgttgatgtgctcatcggcctcacctgcgtatgctgccaacataatcaagatgatcccacttccatcgcagttcttatcaatgaaccactcctagtcggtcagccatccgcgcacaagcagggggactgctctgatgcgcagcttcaagaatttgttgcacatattgctttaccaaaagatcagccgctaatccattcacctcctattgatatcccagacagctttagtgcattattggggcaatccactgaatctgctgctgttttgtctaatcagactactaccttcaaaaagaggtccagtattagactagctgccaagaaaaagactatgatggggcgttccagggatgccatatccaaagcccaggacatcctgatagctaagctcaataatactgcaacaaatcagaaacaaaaccaaaactctattgcttcatgttcctctaaccaagataattcttttgaacagattgctcgccttttctcaaggccgctaaccaaagagcagatggaggcaatcatggaattggtcaaccaaggggtagagaagacagggcataagaggaggggacgcaaggtgactcccattgcttccccaaccatcagggctgtgggggatgcctga

SEQ ID NO: 27503 - DNA, 987 bp, Zea mays
  Peptide Sequence Number=SeqID_70878
atgaacaaaaacaccgacattcaatgtgccattacaaacggaactctggttccacctccgcaggtacgaacaaccccactcgctggggggggtcctgcggagcaacggaagaccgacgaacggcacgccgtcaccggctccagcaacggcgacgacgatgacttctgctccgaggggccgaacagcagcagcgaagacctcagggcggatgctgctgccaggaggcccccgcccgtgcccaaactcgtgaggcaaggacgggcagaaggccgtagagttggagagttgcgttcctccaacgacaaggcgaaaggactgcgggcatcccccatccggggcttggaaggtggaaagacacgatgcataagggagcgcgaagacatggtcacctttcaagggggtcaccctccttttaaaggcgactctccctacttgcgtccacagccgtcgtgggctgagtcttctccaacacgctccaaggtcctccccctacggtgcgggggctgggtcccacacgtcctgcaagccggcctagggcagaagaagccaaaccgccgcgcgcggtgcatgcaaccgcccagcggttacaagcagttctccacttttgcccagaccagcgggcgaaagggcgggcagccatgcaggcagcatgcaactgtgccaagtgggcgcacctctcctacttccaacgcgcccagcatggaagcccacgcccacgcgtcatgcaaccggcgcgccggtcgcgacgtgcaagcaactgcaccaccactcgcaccactgccacgcctcctcgactgcggaaccagtaccacgactcgaggcaaccctgcgtacgacccagcagtgccagccaggcacgacggtcaatgcggccaaaaacgggccgacagtgatggcggtggcaggcgggcgggagcggcggtcacgtcgtcagccaagcttacgtcccatcctggggcagtgagagagccctctctcacggcgtga

SEQ ID NO: 27504 - DNA, 165 bp, Zea mays
  Peptide Sequence Number=SeqID_70879
atgttctgggagccgtacattagaagtgaagatagctactccaaaggtacacaatgttcactaacatcattatccttggtcttcacctacacctacacctaccgaacatcagtattggatgagatgtgtcttattatgactatggatgaggcttttgtgatgtaa

SEQ ID NO: 27505 - DNA, 354 bp, Zea mays
  Peptide Sequence Number=SeqID_70880
atggcccccaagcgagctagttcgaaggctgtcccatccattgacgatgcggcgaaggcagcattgctggtagaaaagaaaggcaaggcccttgcacaccccaccccccaagaggccttcgaagacgacgctgtcaatagcaagagacagcgccaagaccaccccacccccgacggcactgtatgcacctgcagttccgagggcgcaccacgagcgccacctccaggcttcaccccgccaaagggcgaagacaccatcgaggaaggcgaaaagcagaaagaaatcctcgaagccaagcgccaacgagtcaccatgcaagccaaagtgcgtcaaatgatacaagatgaggagtag

SEQ ID NO: 27506 - DNA, 168 bp, Zea mays
  Peptide Sequence Number=SeqID_70881
atggccggacggcctgctgatcagccggccggcgagattgccgcgggaaagtgtggaaccgacaacaagattgctgcatgcaggagatcgacagagggtggcgggccgggtgaggcggagctacaggggcattgggcggtggcagcgaccatgagggaatacatgtag

SEQ ID NO: 27507 - DNA, 804 bp, Zea mays
  Peptide Sequence Number=SeqID_70882
atgaggctcactgatgctggtgatggtcagatgaaaacccttcatctggatgatggtcttcgagtatgtttcaaatggatcactattcgagcgattgcatgtgaaaattatatacctagaaagcaagacaacttacaacttgtaatggagagagtacatattaagaaaaggtccaacactcaaaaggatgctgctggtgaaattgctgctgaattacaaggtactccagacttcataattggaaactacagtgatggaaatcttgtggcatcgttgctatcttacaagatgggaattacccattgcaacattgctcatgctctggaaaagactaagtatccagattcagacatattttggaagaattttgatgagaagtaccatttctcctgtcagttcactactgatataattgctatgaacaatgctgattttatcatcaccagcacataccaagaaattgctggaagtgggcatctggatgaccggtcaaagcccatcctcttctccatggcaagactcgacagggtgaaggacataacagggctggtcgaagcttttgctaagtgcgctaagctgagggagctggcaaaccttgttgtcgttgccgggtacaatgatgtcaagaagtccaaggacagggaagagatcgtggagatagagaagatgcatgaactcatcaagacccacaaattgttcaggcagttccgctggatctctgcccagacaaacagggcccgtaacggtgagctctatcgctacatcgttgatacccatggtgctttcgtacagatatattcttga

SEQ ID NO: 27508 - DNA, 162 bp, Zea mays
  Peptide Sequence Number=SeqID_70883
atgggacacttagtccccacaaggaccaccacacaattggtgtctcttgctttaattacaaaggtcttggaaacaagaatagaggaagaagaaaagcgatccaagcgcaagatgtcgcagaacctcccaagttatcaggttttcaaatacatgctagcttaa

SEQ ID NO: 27509 - DNA, 345 bp, Zea mays
  Peptide Sequence Number=SeqID_70884
atggaagaaactgaggccgagcatagtgaacgacgaccgatgctggggaagaagcgcaggaccaagctggaggaatgctggagaagcgaccatggaagacgcaaggagctgggtggctgctacagactgggagaaacggactgggagaaggcacctgttgaacggtctcttgtattgaatgtgttggctgaaaacttggattccttgaagcgcgttctaagttaccccatggtctggattaaactacaactgtttgagttagtatctctgagtctgtacaagtctggaccgcaatgtgtagctgaattagctgacttcgctcggcattgcatcaccttgagatga

SEQ ID NO: 27510 - DNA, 189 bp, Zea mays
  Peptide Sequence Number=SeqID_70885
atggaatttccgctgcaaatgttggtgtgtgatttttgtttacttaatcctgcgatcttggcggctgcgatatggaatatttacttttctgggattcagtaccccatggatgtgtatgggtatacaaacatgggaatactgagaagtgtaatgtatttgcaacgacgcacctacgctcaggtacactaa

SEQ ID NO: 27511 - DNA, 297 bp, Zea mays
  Peptide Sequence Number=SeqID_70886
atggcggcagcggcaatcacatctccctgcaccccccatccatgcgcctacgacaccaagctatacacggcttcggctggttggggggtcataatcctcgtgctttatagcgtcgcggcggaattcggccagaggggatcatggggtggggttcggagtttgtttcgagttgagtttgttgtggctcacggcgacaaagtggcacacgacgcgatgttccgagaggatgaagaagggggggccgcggcttccatttatagccggagagggagcctcggccaggcctcaaccagctga

SEQ ID NO: 27512 - DNA, 444 bp, Zea mays
  Peptide Sequence Number=SeqID_70887
atgggcaagaacaacaagcgcaagcgtgagccgactcctccatcggaggagtttggtgactcggaatactcagaggaggagttctcctctgagtccgaggggtctccggctcccatccccctgcgtgagtcgtctgatgactcagacgactcccaggggcttgcggcggaggtctggacgtacatccgggccgtcgagcgctccgggctcgagggctcggatgagtctgagttctcctcggacgaggaggactcggacggcggcgagggcgaggatgacgacgacgacgacggcgacgacgacgacggtgacgacggcgacggtgatggcggcaacggcggcggaggcagcggcggcaaggacggcaccaagggcggcagcagcgtgggcagcaccggaggcggcggcggcagggccagtggcttatcgccactggtcttttag

SEQ ID NO: 27513 - DNA, 267 bp, Zea mays
  Peptide Sequence Number=SeqID_70888
atgaagacccccaacgacttcaaggatcgggcggctgaggccgcaaagaccataaggctttgtccccctcaacgcgaggagggggccatgttccaacatttggcgcccaccgttcgtgcgacgaaacaacatcccacgatggcccccaagagagcaagctcaaaggccgccgcttccattgatgacgcagcgaaagcagtgctcctggcggagaagaaaggcaaagccctcgcagatagcaatccttcaggaggccttcgaagatga

SEQ ID NO: 27514 - DNA, 828 bp, Zea mays
  Peptide Sequence Number=SeqID_70889
atgccgaaattcgggccgttggccggattgcgcgttgtcttctccggtatcgaaatcgccggaccgtttgccgggcaaatgttcgcagaatggggcgcggaagttatctggatcgagaacgtcgcctgggccgacaccattcgcgttcaaccgaactacccgcaactctcccgccgcaatttgcacgcgctgtcgttaaatattttcaaagatgaaggccgcgaagcgtttctgaaattaatggaaaccaccgatatcttcatcgaagccagtaaaggtccggcctttgcccgtcgtggcattaccgatgaagtactgtggcagcacaacccaaaactggttatcgctcacctgtccggttttggtcagtactgcaccgaggagtacaccaatcttccggcctataacactatcgcccaggcctttagtggttacctgattcagaacggtgatgttgaccagccaatgcctgccttcccgtataccgccgattacttttctggcctgaccgccaccacggcggcgctggcagcactgcataaagtgcgtgaaaccggtaaaggcgaaagtatcgacatcgccatgtatgaagtgatgctgcgtatgggccagtacttcatgatggattacttcaacggcggcgaaatgtgcccgcgcatgagcaaagggccgaacatcatgccgaaattcaaaaataaccccggacaaatctggcgcggaatgccctcacatggcatggacacggctgccattttgaaaaatatcggctacagcgaaaacgacattcaggagttggtcagcaaaggtctggccaaagttgaggactaa

SEQ ID NO: 27515 - DNA, 2406 bp, Zea mays
  Peptide Sequence Number=SeqID_70890
atgtcagataatggacatgtatcaggaaccaatatatcacttccaaggttattgaaatcgtcacagattcttgatgtgcagagcattgcctgtggagagaaacacgcggcaatagttactaagcagggtaaggtattctcttggggtgaggaaaatggagggagattgggacacaaaacaagtgacagtgtctctgaccctaaaatcattgactctcttgcctccacacctatgaagactattgcattgggggcaaagtacacctgtgcagtttcagtttcaggagaactttatgaatggggtgaagggattcacagcctagggttcaagaacaatcagtgtcaaagaagcccatggttcccacataaattgatcagaacttcagatggtatatctgtggcgaagattgcatgtggtcagtggcacacagctatagtatcctccacaggtaagctgttcacatatggacatgggacatttggtgttcttggacatggtgacacacgtagtgttgttcagccgaaagaagtggagtccttgagggggttaagagttaagtccgtcgcatgtggaccatggcacactgctgctattgtggaaacatcaggaacacccaagagcaatgctcctggtgggaagctattcacatggggtaacgcaagtggagagaagctgggccatactgacaaaaagtcgaagcttgtaccaactcgtgttgaatcactcattgattgtgattttactcaggtatcatgcggtgtcgtatttaccattggaagcaaggaccatggtcaattagggaatcctcgatctgatagcgcatgtatttgtatggttgaagggccacttaagactgagtttgtcaaagatatatccagcggaaattcccatgttgcagtcttgacaatgaatgggaaagtgtttacctggggcaaaggcacagaagggcaacttggtttgggggattaccttgacaggaccttcccaactctagtggaggccctggaagataaacaggtggacagtatagtttgttcttccaacttcacggctgtaatttgtgtgcatggggaaatctcaagcaaggatactgtatgcagcagttgcaggttggcattccggtttacaaggaagaagcacaactgctacaactgtggttccatgttctgcaattcttgcagcagcaacaaggttcaaagggccacccttgcaccagataagagcaaaagatgtcgtgtgtgtgatgcttgtttcaatgaactgaataaaacagctgagcatggcaaaatgagttgtgaatcaaagatccaaaaagaaccgcctttaacagaaacaagaacatatacaccaaagttatcacgaatgcttaaggaagcaaatttcatcatggaaaaaatgggttccatacgaagtcccaaccagagaaatcaggaatcagccactctgaatcaaatgcaaaaacaaaggtggggacaggtagaatgccccgatcaattcaaatgtgcaagagacaacatttcacattgtttgacatcaaagaagcagccagttgatattggtcgtatagggagaatgaatgatccagtctcacaaaagactgctgcccctttaacacgaactactgataagaggaggaaagaacaagatttgatagaaaagataatgttggaggaggtcaaacagcttcaagcacaggtaaccactctagcagaagaatgccggcataggagcctgaaagttcagttgtataaacgaaaacttgaggaaacctggttgatagcaagggacgaggccacaaagtgcaatgctgcaaaagagattataaagattttaacaaatcagaacttttctgacacagtggtgagaaatctttcctctgagccaaaggtcctatgttcgatgcagcatctctgcaaaaatgcagagagaaatgctttatcaaataaacttttagatgatttggaactagatgattccaggatcgtccctgacccacccgacaaaactcctgtcaccggcaaaattccaccgctaaacagcatcagggatcaacacaacatagaggaagtggatatgcaatctacaacgtcttctaacactgttgtggcggatgactcggctgtgcatcagaatggcagaagagcctccaatagcagcagaggttatgacgggggaacagatagcacagttgctcctactgactccagtggaatgatcgagcaaattgagcgtggggtgtacatttcagtcgttacatcccccgatggtaagaagggaatcaagagcatccggttcagccggaagcattttggggagaccgaggcacagaaatggtgggaagagaatgagagcagagtatttgcaaagtacaacagcatggaatacttggcagcacaatgtcgataa

SEQ ID NO: 27516 - DNA, 69 bp, Zea mays
  Peptide Sequence Number=SeqID_70891
atgacaacaagtgtggatcttggtgagaaggcaactggcgcaagggaggcggcagcaggaggggattaa

SEQ ID NO: 27517 - DNA, 588 bp, Zea mays
  Peptide Sequence Number=SeqID_70892
atgcagcgtagtggtgcgacaattgcatttgacttctttagaaacaagctcttaacagaagttagcacctcacggggtaatgaaagtggtaaagatgtagccaaggtcaaatatgtacctgacaacaaggctgaaacagtacacaagctttttaagtttattgaagacggggacttatggagatggaaaattccaaatagcaaggccttcagcagtggacttaaagatttggacattgaattcaatgtcaatgcaaataataaattgtttgatcagttgttggagttggatcctgagcatgtcatttcccatggacaagcgacattattagagaagcaaagattaatagatgattgtttggagaaatcctatgaaatttccctgggatgtggccagtttgggagttgtctgttttgctctactagcaggggtattggggctgttgtatacaaagttcctgagttgaataatgaccagatactgaaagaatatggtggtgggggacatcggaatgcaagctcgtttattttgagtgtgactgagtttgacaggtggaaagtcggatcttctcgaccaaaaggtgcataa

SEQ ID NO: 27518 - DNA, 463 bp, Zea mays
  Peptide Sequence Number=SeqID_70893
atgacctactttatggcgaacaccgatgctttggcctctaggtacatgtcgaaggacatcttagatgccatcgtcgagccaacggaggagcccagtagactctttgaagaagctgttgaaggagccattgaaagagctataccaaagagacttccagtcgcggtcacaggtgtgatttgccaggaagacggggcgaattcgtggtgctacctaaaagagaccccatctggtgcggttctggggttcgaggagcggcgaggcaggtgggaaatgagggatgtggtcgtggttgacgaagattgcgtccgcgtgcttgggcccggtccggaggccaacgaggcgttggaggaccacagccaagtggagacaggctctgccgcaactttcgtaggcgtctacgacggtcatggcggcgctgaggctgcccgcttcatatctgaccacctcttcgcacacctcattc

SEQ ID NO: 27519 - DNA, 168 bp, Zea mays
  Peptide Sequence Number=SeqID_70894
atggacggtggcctggacggcgagttggaagacgcgggcttcctcgacgaggtattacgcgcgacggacgaggtcatcgcctcccgcaaccctaaccccgctcccgctcccgctcccatccccatgctcggcaacctggcggagcagactgtgtgccgccagagctag

SEQ ID NO: 27520 - DNA, 465 bp, Zea mays
  Peptide Sequence Number=SeqID_70895
atgggcaagagtaagaaaggtagcggttcttctcctcgctctggtgacaagcgcaaacgtgagccgactcctccttcggaggacttcggcgactcggagtactcggaggaggagttctcctccgagtccgagggatctccggctcccgtctctcccccggcgtcgtctgatgattcagacgactcccaggggattgccgcggaggtctggacctacatccgggccgtcgagcgctccgggctcgagggctcggatgagtcggagtactcctcggacgaggaggactcctcggactcgtccgaggagagcagcggtggcgatggcggtgatgacggcgacgacggaggcgacaacggcaggggcggcgacggcggcaggggcggcgacggcgacaggggcggcgacggtggcagcaagggcggcaatggcagcggcagcaagggcagcaacaaggctagtggctaa

SEQ ID NO: 27521 - DNA, 348 bp, Zea mays
  Peptide Sequence Number=SeqID_70896
atggcaaccggcgagaccgccgtggatcgttgcaaggaccctctcggcccccgcgacatggatttgtcaggggaggagcacgtccccaaggcgcggaagccgtacacgatcacgaagcagcgggagaagtggacggaggacgagcaccggcggttcctggaggccctacagatgcacggtcgcgcctggcgccacatacaagagcacatcggcaccaagactgccgtgcaaatccggagccacgcgcagaagttcttcaccaaggtcgtgtacccattctggccattcattcgcctctctccccagtcccagcgcaaacgaaaacgaattctttcatctctgccatga

SEQ ID NO: 27522 - DNA, 234 bp, Zea mays
  Peptide Sequence Number=SeqID_70897
atgagttacagctttcccctcaagaagcctttaactaagacatttcttgtggaattggcaaagtcatatttggaagcccatggagggatattgagaaaaaggaaatatcctcagatgaaatctggaaagaagctttctgagaaactgcttagtgttctgttaattcatctcacagagttacatctgtatttcgtggaactctttgctagccctttattttctgtggaattctga

SEQ ID NO: 27523 - DNA, 291 bp, Zea mays
  Peptide Sequence Number=SeqID_70898
atgtcgcgcgcgttcgacgactactatatcgaggattgtggcgtcatcttggcgccgaaggtgacacaggggaggatcgacaacagtgaccagttcatcatcctcgctaccgtcaagcccagatgggtcgagcgcgagggcgagcgtgaaggggggagagcgaggcggccggagaccggcgtgagagaggtgggaatctcgcggccttcgtgttcgtcccgcgcccaggtcgggcgcaaggagaggatccaggtgtacaatggggggtgtagcagagtgctacgtgtctag

SEQ ID NO: 27524 - DNA, 663 bp, Zea mays
  Peptide Sequence Number=SeqID_70899
atggctgaaaggtaccaactcccgcagagttgcgttcctccaacgacgaggcggaaagacggcggatatcccccatccaggggcttggaaggcagaaagacacgatgcataagggagcgcgaagacatggtcgcctcccaagggggtcaccctccttttaaaggcggctctccctacttgcgtccccagccgtcacgggctgagtcttctccaacacactccaaggtcctcccctgcggcgcgggggctgggtcccacgcgtcaagcaaaccggctcagagcagaagaagccaaaccgccgcgcgcggtgcgtacaaccgcccagcggttacaagcgaccctccacttttgcccagaccagcaggcgaaaggggaccgggaaagggggataccccgaaaaggatccttccccgtgaaggaactaggccccgagcctccctactgatcagaggttcgaaggctggcccctcggaagggttcgacagccgcctcagatcacgtgggccctacacccactactggtcagaggttcgaaggccggcccctcgaaagggttcaacgaccgcctcaggctactcgggctccgcgcccactactgatcaggggttcgaaggctggctcccgaagggttcacagccgcctcagacgccgagcgagggatga

SEQ ID NO: 27525 - DNA, 213 bp, Zea mays
  Peptide Sequence Number=SeqID_70900
atggcggatgacaactcaattaaaggactaacaagtgtactaagtgtgaacaggtgcttaagtgagactcgggtgcgtagctcggagacaactgatcaagccaaggacggaggcaagaagagcttcgaggtaccaagtgcatgggagaaggtcaaggaggctgaggaacccaaagccaagggtgaagaagaaggcttgcaaagtcaagggtga

SEQ ID NO: 27526 - DNA, 534 bp, Zea mays
  Peptide Sequence Number=SeqID_70901
atggcgcgcaagctgaggtggtcgccaccgctggagaggctgcccggcgcagaggtggtcgccgccgctgaggtggttgcgtccgctggcgagccactcggagctagctacccacgtggccctactggtgtggagaccagcatacctaaaaagagtttggcgatggcccccaggaggtacttggacacccatcgcagagtggtggagcgtgcaggcccacggtacgggaccaggctgagcggctacacgggctccagaccaccccaggagacaaaccaacaggccgggcttatgagggcggacctcaccgggttggcgtacacagatgctctagtggtcaggaagaggtactcctttagtcatagcaagatagttacccccgggtcggcgtattcccgtcaccttggagggtccttcccagttgagggagagttgcagagcccttcctgccatttctgcatggacctgtcagaagcctggacccatggggagtccaggagggtttccgggggaaggcaggcttcggccccgtag

SEQ ID NO: 27527 - DNA, 480 bp, Zea mays
  Peptide Sequence Number=SeqID_70902
atgggggtgaggacaagaccatccaagccatggagctgggagcacggcggaatgcgatgcttgcggtctggccgggaccgcgtagccgaagttcgcgtctttcacaaggctggtgatcatccttttcctccgaatgctggaggaagaggcgggcaccagcccatgtgggaggcgaagccgtggctcaactcgctccccaccaccgcgaggctgatgaacatccttgaagccaagcaccggtggaagagcgccgctcccacaaggccgcgcacctccagcagagggaagacaagaccggcggtataccattttgagcactcactcagtttaggcgcgctcgggatgaagtcacaaggccatggcaaacaacggcaacacgaagcggaaaccttgaaggcaaaggggcgcggagagctcggagagaagtcgcaccgccgctcgcgccaatgccgcgtctcctcgggccatagcaaagactga

SEQ ID NO: 27528 - DNA, 396 bp, Zea mays
  Peptide Sequence Number=SeqID_70903
atgacaaatagcaagcgtcatgtcaggttgagcgacgcttctgctacaagtgtggtgagcagggtcatatatcaaaggtggaatagagaagatgagcaagaaatgaagcaatcaggacttgggtacctctgtaagtcaagaaattggtatctcaagtttattatatgtgttgcatcatatggactagtgtttccgctgcatcatggtttgattcttgacacaatgcattccaaaattgctaaggatgacaactcaattaaaggactaacaagtgtactaagtgttgaacaggtgcttaaggatgttggagccaagaaatgtcaatctagatcaagtcaagccgacttgatgatttatgagtccaacatcaaagctcaagcatgtgaaatgctatag

SEQ ID NO: 27529 - DNA, 288 bp, Zea mays
  Peptide Sequence Number=SeqID_70904
atgcctcacttgtttggaggttggcatgtggtggacaggcgacgagcgttctttggtagccgctccggtagaatagcaaggatgccaagtggtagggctattttagcatgtggtgataaatcaagagaagaagcaggcacaaaaatatatggacaaagcgacttgtatgtaaaggctgacattacaccgagcaacaatgtttatacttcaacatattcgtatgcctcggagaagcctctccaacaagacaagccggatgaagaaggttacgtggacaattgtttttag

SEQ ID NO: 27530 - DNA, 2091 bp, Zea mays
  Peptide Sequence Number=SeqID_70905
atgaagcaggaggggcggaggcggcaacaccaacaccaacaccacaggccgccgccgcgcctcgagctggctatggcgcacgcgcggggcggcgggggccacggccacggccacgaggaggaagcggaggcggccgtctgcctggacggcgactccgaggcgggcgaagcgcgcagcgcggggcgcgcgccgccgtggcgggaccagctgacggcgcgcgggatggtggcgagcctcgccgtcggcgccatgtacagcgtcatcgtcatgaagctgggcctcaccacagggctcgtccccacgctcaacgtctccgccgcgctcatcgccttcgtcatcctccgcgggtggacgcaggcgctcgcccgcttcggcgtcgctacgcgcccgttcacccgccaggagaacaccgtcgtccagacatgcgccgtcgcctgctacagcatcgccgtcggaggtgggtttggctccttcttgcttgctctgaacaagaggacctacgagatggctggggaggacacggaaggcaaccttccgggaagctacaaggagcctggcattggctggatgaccggcttcctcttcgccgtaagcttcgtcgggattgttgcgctaatacctctaaggaagatcatgataattgactacaaattaacttacccaagtggtactgcaacagctgttcttataaatggattccacacaactcatggagatgcaacggcaaagcagcaagtgaatgggttcacaaaatactttgcaatcagcttcttttggagcttcttccagtggttttactcaggtggagacaactgtgggttttcacagtttcccacttttggacttagagcttggaaacaaacatttttcttcgatttcagtctaacatatgttggcgctgggatgatttgctctcacctcgttaatctatctctccttcttggtgcacttctctcatggggaataatgtggccactggtcagtgatttgaaaggggattggtatcctgcagatatgccagaaagcagcatgagaagcctgcaaggttacaaggccttcatctgcatagcgctcctcttgggcgatggtctttacaattttgttaaggttgttgcattcactgttaagagtctacttggcagatcaagactgaagaatgcaaagaaagaggaagacattccagtgcttgatgaaattcagcgcaatgagatttttacaagagacagtatccccacatggctagcctactctggatatcttgcactatcagctgttgctgtgtttgccattcccttgatgttccatgagatgaaatggtactatgttattatagcatacttattggccccggcattgggtttctgcaatgcctatggtgctggccttactgatatcaacatggcctacaattatggaaaggtcgcgctctttattcttgcggcctgggctgggaaggactctggtgttgtagctggcctagtgggttgtggtttggtgaaatcactggtgtcaatatccgctgatctgatgcatgacttcaagactggacatcttacattaacatcacctagatcaatgattattgctcaggctattggcactgccatgggctgtgtcattggaccactgacatttttactgttctacaaggcttttgacattggaaaccctgatgggtactggaaggcaccatatgctctaatctaccgcaatatggcaattcttggtgtccagggcttctctgctctgcccctgcattgtttgcagctgtgctacggattctttggatttgcagtggcagccaatctgatgagggacctcttgccaccaaagtacggcaaatgggttccattaccaatggcaatgggggttcccttcctagttggtgcgagctttgccatcgacatgtgtgtggggagcttgatggtcttcatctggcacatcattgacagaagtaaagcatctttaatggtgccagcagttgcatctgggttgatatgtggcgatgggctttggatcttccctgaatccttgcttgccttggccaagatcagtccaccattgtgcatggcattcaggtcttcacactag

SEQ ID NO: 27531 - DNA, 519 bp, Zea mays
  Peptide Sequence Number=SeqID_70906
atggctgagaagccgagtgttcttcctccccgcgacccgtggcctatctcctccgtcaccgacgaaaacttgcaggccttggtggatgcaggactgctccaccccccgctcctacgaggtgcaccccgagtggttcgcttctcgctctcctccacccttccccatcctcaagcccctgacgaccatcagatttcctacagtttgtcgcttggctctggatcctctccttctacacccgaatctggtgtcccaatctgctttgggaactgttctgcatcgtcccacggctggcaggctctgcggctcgactgcagctgccacaatgtcttcgtgggcaccaggttcctccggtcctcgtcgcgacccctcgctctgccactattggacgacatccctgcctttgcatctctagatgtttggggccactccggctctagggccgacctggtaccccacccggtgtcctcgaggattgtgttgccaagctttggcacccttctcggcactaggtctttgtga

SEQ ID NO: 27532 - DNA, 195 bp, Zea mays
  Peptide Sequence Number=SeqID_70907
atgggaactaatgggcatctcgacctcgacggggaggtaagtccgtggatcaaaaggtgccgaaagttcatctataactatgctaaatcgactgtccggaataccgtagattattccggacaggagaagctttttggaaaaacaggccaagcgcggaccgtccgggcccttgcggcggaccttccgcaactctag

SEQ ID NO: 27533 - DNA, 411 bp, Zea mays
  Peptide Sequence Number=SeqID_70908
atggcgagtaccgatgactttttggctgggctgctaaacgaagtgcaccccgggctcatcagcgagaacaacccgagagtcgccggcgttggcaacgactatgaggtccctcgtttgaatatggacagcggtgtagccgctctggaccgcgtccaagtgagggctgcgtcggagcttgccgaacatagcgacgcatgcggccaagtaggactgctttcagaggtcgaactggcagttgtcaagcttcttctcatcgtcgatgagcgacgccaacgcgagcgcctcctgccagtggtgtttgttcggggtttccaagcgtgggatgcacgtgggaatgagaatgagctttgcggggagaggaaaatgagaaaagacagtgcggggaagggggcgcatggggaatgggaatga

SEQ ID NO: 27534 - DNA, 768 bp, Zea mays
  Peptide Sequence Number=SeqID_70909
atgtggggccgcacctatgcgcgccaaaagcgagaggccgcagggggcgctggcagcagcgcgtgcaaggaaggcacgagcgctggcagcagcgcgcgcaaggaaggcatggcaaaggaaagcgcgcacaaggaaggcatggcaaaggaaagcgcgcgcaaggaaggcatggcaaaggaaaaaccaagcctgcggcagaggggtataacctcgccggagaagacagctatcctcatggaccgaaggtccatgacacctggtatcagctccaggttatcctcaccaccaccagccgcccatccctcaccaccaccagctgccgcgccatcagccgccgcaacgccctcccacccgccctctccaactccagatgcattcactcggctcaaagagagttttggccgcttcgcagagcagtgggatcagttcgttgtgatgttccaccgctacaaggagaagacagagaaggaactccaagcagcggtgcggcttcagacggcagcgcgagggttcctggcacgccgccaggtacagtcccttcgtggggagaagcaccttgttgtgccctccagggccaccccatggccgtcatcacatgagcaggccgtggtgcgcttgcaagccgcagtgcgcctgcaagccgcagtgcgcgacttccttgttaagcgggcgaagtcgagatctgggtatgcagtcccactgcacggccaaagagggttgtctccttcattcgggcacctgtcttggtgctggacagacccaacataa

SEQ ID NO: 27535 - DNA, 915 bp, Zea mays
  Peptide Sequence Number=SeqID_70910
atggggagcgtcgcgcccgccgaactggtcctgaaggcggcgtgcgagcgctgcggtgcagcgtcgggactctacgcgacgtcgtgccggcacaccacgctctgctccgactgtggcatgaccttggcgctcgcccgcgggcgttgcaccgtgtgcagcgcccccgttaccaggctcatccgggagtacgatgtccgggtggatacctccgcggagaaggagaagacccactacatcggcaggttcaccaccggcttgccgcccttatcgaatgagaggagcgcagggaatagatggactcttcgcaaggatgtcccccatggacagcagcttactgggaatatgcgggacaagcactacagcaagatgccatggattctggaggatgagacgggggaacatcagtatcagggccaaactgaggatccacctgccacatactattcgcttacgcaaaaaggcaatgacatgattgctgttcaagttggttcctggtacaacttcagtaaaattgcacagtacaaacagctgaccttggaagaagctgaagagaaaatgaatagaaggagaagcagtgcatctgggtatgaacgatggatgatgaaggcagctacaaatggacctgatgcctttagttcagttgtgaagaggcttgatgatgtaaatagaggggcaacaaacggtgttcaccccaagaaaggagataggaatgagaatggaaatcaatctgacaaagttgatgacaaagaagaagagggagctgcaaggaaaaacaggcttgggcttactatgaaggacatgggcgaggattatgaggatagtggaaacgacatagaatttgatttggatgatgaaattgagaaaggtgtatacatatcaaatactacccggaagaatgagtattacttttgctaa

SEQ ID NO: 27536 - DNA, 957 bp, Zea mays
  Peptide Sequence Number=SeqID_70911
atggggtggccctggagggcacaacaagttggagagggcgggtgggagggcgttgcggcggctgatggcgcggcagctggtggtggtgagggatgggcggctggtggtggtgaggataacctggagctgataccaggtgtcatggaccttcggtccatgaggatagctgtcttctccggcgaggttatacccctctgccgcaggcttggttctagggggtttccacgtgatgattgggagcacgaggagatcttcactgatgatgatgaggttgtggatgttgatatagagcaaagacctgagttagctgatcctgaggctgctcctcctgaaattaaacaggatgacaacgaggatgaactaggctgcagtgacaacttgagcaagtccggccaggagctaaagaggctgctccgccgagctgctggggaaaatgagtctgatgttgacgacaaaagcacatatgaagatgacctaccctcgccaaaacctgctccaaaacttgtacccaaaagtgaaccagatgatagcagccctgctaaaccaacaccatcagggcacgctcagagcgctacaccttcatccaaatccactcaaaagaggaaatcagggggtggtgatgcaaatatttctaatggtgcaccctcgaaaaagataaagatggaacatgaaaccggaacattggctgtcaaggatgaaaatccgtcttatttggaaccaacttcgaaagcatctctttcagcaagaagagaatcatcacccattacagaggaagaagtcaggacagtacttcgtgcaatttcacccacgacaagccaagatctggtgtcgaggttcaagactcgtctaataactcaagaggacaagaaagcatttttgggcattgtgacgaaaatatctcgcatacttaagcacaacggcggtaggtatatcgttcttcggcacgaacatatgtga

SEQ ID NO: 27537 - DNA, 144 bp, Zea mays
  Peptide Sequence Number=SeqID_70912
atggctggcaagcggggcctagatgccagcgcctggaatctagggtttagcacgcaccagagtggacgtggggttgggccgcgtggagagggaaatagtgcagtgggccgagctaaagggatttggcccaacgagttgttttag

SEQ ID NO: 27538 - DNA, 192 bp, Zea mays
  Peptide Sequence Number=SeqID_70913
atggggctcggtgtatgcggctcgctctgccaaggtggcaatgagactgatggttttggttatgactatggtgctgcagacccaaaaccggttcaaccggttataaaaccggttcaaccggttttgcagcagtgtgaacagttaaagcgcgcagaaaaagatgctgactacgcggaattcctgccagactga

SEQ ID NO: 27539 - DNA, 912 bp, Zea mays
  Peptide Sequence Number=SeqID_70914
atggctcgtagaagatcccaaaagaacaagaagacccaggagaataaggaggtaactcttgagatattactttccgattgttctaattatgattcatggtctactagagtgataaaagcttttagagcaatagaccctcaattagaacaaattttagacaagagtattattcctcctaactatgctagggaaaatgcctccgaagaagatttaagatgtattcgcctaaactatttagcttatgacatcttaagtaaatcccttagcaaagaagattatcatgccttcataataaaatatgacaaacccatttgtgatgtgcatgatatttggactagaattaaaagcaaaattaataaatccaaacatgatagttcattttgtgcttctacttcctttggtatttgtgatactaacccttgcaaggaagaagaagaaaatgaacggtggagaccaaacgatgaatccacctctgcaaaaggtttgtcttcccatttcaattcccacatgtgttgtgtggctaatgcaaatgatagcggaagcacaaatgaggatgaggaggaagaaagaagctttatgcatctctacgctcgcctaagccaagaagataaggcggtcatgctcaaacttctagaaagagcgagagagcaaagcgaagctcgtcaaaggctagaagatattctctccataaagatgcaacactttgacgagttgactaaagaacatgaggagctaaagtgctctcatgttgatttggtccaaagcaaatcttcttttgagctagaatttgcaggaacaaatgatgatacatatcaaaagctcaaagaagaaaatgagaggctaaagatgagcttgacacaacttaaagggaaatgcattgcccaaccttctcaagataaccgtgatcacatg

SEQ ID NO: 27540 - DNA, 686 bp, Zea mays
  Peptide Sequence Number=SeqID_70915
gtctgaacattacaattattggtcacaatgatttctattcttatagaaagcagattgaagcacgtggtctccctcttactccggaggtactgctttcattgcctccattctcttcaattacatttaactcagaggttgctaatggaacaatgactggagagaaatgtaaacctgaagtagccaaaactggacttgggtcatcagctgccatgaccacatcagttgttgcagctcttcttcactatcttggtgctgttaacctctcatgttcaggacaatcttctggcgacaatgcaagtggacgagaacttgacttggttcacgctattgcccaaagtgcacattgtttagcacaagggaaaattggcagtggttttgatgttagtgctgctgtctatgggagtcaacgctatgtaaggttttctccagaaatactctcctcggctcaggctataggtgggactgtcttgccagatgtagtatcagatgttctaacacaaagaaaccctagctacagtgcggtggcgggtcctggtctgccaccgagcgagaagggtcctggtggcaagatccttcacagaaagaccaaacgggtcaaactccatggaacaagagttgtcagtagtgaactgacgtacggaaagaagattttgaatgatgtggggggcaacaaggacgttggttaa

SEQ ID NO: 27541 - DNA, 2172 bp, Zea mays
  Peptide Sequence Number=SeqID_70916
atgattcagcttgattcgtggcatgttacatctgtcgagatgttatatatcagggggccaaactctcaaagaactgctgcatcacaacaaagggaattggaggcaaatcaatctggtcaaacttcactggagagccctctgttggaacaggagatgtcaactgatccatcaaaacaagtgaagcttggttcattgagtggccttgttccaaaggaaaaggcaatggctttcgaacggatcttattccgtgccacaaggggtaacattttccttaggcaggagcctgttgatgagcctgtcactgacccagtttctggggagaaggtaacgaagaatgcatttgttatattctactctggagagagggcaaaaaccaaaattctgaagatatgtgatgccttcaatgcgaaccgttacccattcccagaagatgttagcaaacaacttcatgctgttcaggaggtatctggaaagatctcagagttgaaggcaacaattgacatgggtttagctcatcgtgacagtatactaaaaaatattgcttctgattttgaacagtggaaccatctggtgaagaaggaaaaagcaatttatcacaccttgaacatgctgagcgttgatgttacgaagaaatgcctagttgctgagggctggagtccagtttttgcaagcattcagattcaagatgctcttcagcgtgctactgttaatagcaaatcccaagttggttcaatatttgaagttctcaacacaaaagaatctccaccaacatatttccagacaaataaatttacttcagcgttccaggaaattgttgatgcatatggtgtagccaaatatcaagaagcaaatcctggagtattcaccatcgtgactttcccttttctatttgccgtcatgtttggtgattggggccatgggatttgcttgttacttgcaacactttatctgataatacgggagaagaaactagcttcacagaaacttggagacataatggagatgatgtttggtgggcgttatgtaattatgatgatggcagttttttcaatctacacaggattaatatacaatgaatttttctctgttccatttgggctttttggtaaatctgcctatgcatgccgtgattcttcttgtagaactgcacatttatctggctcattaatttccccacttgttcatagtgatgctactactgaaggactaattaaggtaagagatgcatacccttttggtgtggaccctgtttggcatggtagccgcagcgagctgccgtttctcaattcactgaagatgaagatgtccattcttcttggagttgcacaaatgaaccttgggattgtgatcagctacttcaatgcaaaattttttaggaacagtcttaatgtgtggtaccagttcattccccagctgatcttcttgaacagcttatttggttacctgtccttgcttattattattaagtggtgcacggggtcaaaagcagatctataccatgttatgatctacatgttccttagcccaacagatgagattggtgaaaaccagttgtttagtggccagaagacagtgcagcttgttctacttctgcttgctctggtgtctgtgccttggatgttgattccaaaacctcttctattgaagaagcaacatcagcaattcacttttacactgactgtttttccatttcttttcaatcagaggcatcaaggtcaccagtacgcaatgcttcagggcgttgatgaatcagtgggagcagagctgggggaacatcatgaggaagcacatgaccatgaggagtttgagttcagcgaagtttttgttcaccagctgattcacacgatcgaatttgttcttggtgcagtctcaaacacagcttcgtaccttcgcctttgggctctgagtcttgcacactccgagttgtccactgtattctacgataaagtactactcatggcatgggggtttaacaatgtcatcatccttattattggcatcatcgtcttcatatttgccacggttggtgtcctgcttgttatggagaccctgagtgcattccttcacgcactgaggcttcactgggtggagttccagaacaagttctatgaaggtgatggttacaagttcgccccattctcctttgcgctgattcgtgaggaagaagattga

SEQ ID NO: 27542 - DNA, 141 bp, Zea mays
  Peptide Sequence Number=SeqID_70917
atggccatgatgggttcaacattggaaaagatgtacctctgccaggtgaagaagcagcaaacttttgttgcttctgttccaaggtggtgcccaaagaagaaaatcaagactgaagccgtaggaggaagtgtcatcctttaa

SEQ ID NO: 27543 - DNA, 213 bp, Zea mays
  Peptide Sequence Number=SeqID_70918
atggttttgccggagcaggagccgtcgacgacctccgccgcctgcgctcgtggccagagcagctccagccaccgccgatgccgacccgcacaccgacgtgaccgccgtgacctccccgacgtcactgaccaccccaccggagctctactgccgccggaaaatgaagaaaagggattgaaaatggaaaccagagggcaaccatatttttcctag

SEQ ID NO: 27544 - DNA, 156 bp, Zea mays
  Peptide Sequence Number=SeqID_70919
atggggaagcctgtcccatcactcctcatgctcctcctcagccgagtgaccgcacttgtacccaccataaccagaatgggagaccacgtctcaggtcgcgtgaggagggcaatctgtgggcaggttcactcaggtgggtttgaactacaacagtga

SEQ ID NO: 27545 - DNA, 258 bp, Zea mays
  Peptide Sequence Number=SeqID_70920
atggggaaattcacctcgagtgaggcgcaatcggtggcagaacatcgtctgatggcggcggaccacgaatctaagttggcttctcgatatatgttaggtcttcttgaacttcgagatcctcggttggcaattgctcttctgatacacatgaattattattatttttttgcgaatgatgaaggtgtgtccttcaaaaccttcgtccgagaatcattatatccgaaaggagatgatgttttgaaggacgaaggtccttaa

SEQ ID NO: 27546 - DNA, 366 bp, Zea mays
  Peptide Sequence Number=SeqID_70921
atggcgggcagcctttgccggagctcctacagaaggatggggtctcgtgaaccttttgaaggcaatgtccggttgtctgctatgtccatgattaagaatgctctagctggattcaacacctcccttgtctgttatggccagattggcaccgagaagacatacaccatgttgggccctcttggcaccatggttgacagtggctctaaccatgctgactgcggcgtcgttcctcgggttgtccagaaacgattctctcggatccaacgagaacgagaagatgagttagactttgtcgaagccctcttcgctagtggaggtatcaaccatcactcgtcactgtaccccgatggtgatcggcgatcgtga

SEQ ID NO: 27547 - DNA, 687 bp, Zea mays
  Peptide Sequence Number=SeqID_70922
atgaggagcaggagtaccgacgccaagagcgggagtagtaggactcttccccctcgcctcaacaggaggtggagtctagaaggacacccagctgctggaggagaccctaaaggagacgacgatgtcggtggtagttctagccacaactcggtgcttttggaggagcagaagccagaagggtggatcgcccgacccattactcatgacgtcgctcatagttttcatttacacgacgctctcaacaccttgctgcgtcgggccttcgaccaacacacgtggtctatcgagtaccgttgtgtagactaccagcacagtcgcaggttatacctagaccagtgggaggctacctgcttggtgtgtcgtccggactatgatctccagggtgcagaggcctactcagagcattattctatcactgagtgggacactgccgagggcaatccaagatcgagtagcatagtcaacctggtcatcgtgctcaacaccgagctagaccacacctttgacgagttgggcaaggctcgggcggagattgcgaaactgcgtgctgagcgtgcggagcgccgccatcaggaggatggttcccccacccctattgggactcatcacccttactactcaccgccccatggtcatcatgcttatggcaaccctgactgtaggatcaagatagtcttggagccctag

SEQ ID NO: 27548 - DNA, 237 bp, Zea mays
  Peptide Sequence Number=SeqID_70923
atggcgagggtaagcctcgagcacagcgaccacttcgcttccgttgaccaaccccacgtggccacgtcggcgatggaattccccggcagagcaattggagttctatcggtcgatggggagaggaggaagggtgtttccacaactcgcatatatatccacacgctggtaaaaaaggggaaaaatctcaacaaccgtaccgagagcggtggcatcggattcggcgttcgggaattataa

SEQ ID NO: 27549 - DNA, 213 bp, Zea mays
  Peptide Sequence Number=SeqID_70924
atggccatgatgggttcaacatcagagaagatgtacctctgccaggtaccaaactttgggtttgaaatcgtaaagctgagaccaggcgggcgtgagtgccatggccggagtagtgactccacgtgggcgaaggagggcacggggcggttgcggttggccaggggatctcggtacgacggcgtggtaccagtgtcgatgatcaccagcggctaa

SEQ ID NO: 27550 - DNA, 930 bp, Zea mays
  Peptide Sequence Number=SeqID_70925
atgagggttgtccgcattgtaaccactgctcaggagaaggcgaagccgtggaaggagacttccaggagttccaagattacgatgaattctagatggctcgtcttagacacactgcacgaggtggagaccgtgaggccccgttcctctgttgcccagctggaggcgcccctggtaccaccgcgagacgtcccggctgttggaggagctactggaggagatcccgacgacgacgactcagaccacagcacggagtcctctgagccgcaggaggcggaaggatgggtcgcccgacccatcacccatgacgccgctcgcggttgtcagttccacgacgcactcgacaccttgctgcgccaggctttcgaccggcacacctggtcgatcgagtatcgttgtgtagtctaccagcacagtcgcgggaggtacccggaccgctgggaggctacctgcctagttcgccgtccggaggatgacctccggggtgcggaggccgtttcggagcactattccatctccgagagggacactgcagaggcggctatgcaggatgcagcacgacgtgcactctcccagtactgttctctgttcggtggcgtggccgatggtcttaaccttcggtactacccccgccgtcctactggcagcacagagagtgtggttgtctcacccgttggtgaggctaaccctaggttgagcagcacagtcaacctagtcgcagtgcttaacactgagctggatcactctctggacgagctaagcagggctcgaacggagattgcggagttgcatgctgagctggcagagcgtcatcaccaggagggtggttcccccgctcctgttgagactcagcacccataccgctcaccgccacgtggtcaccacacttatggttcccctgtctgtaagaccaggatagatctggatccttag

SEQ ID NO: 27551 - DNA, 2043 bp, Zea mays
  Peptide Sequence Number=SeqID_70926
atggaggtagttgagttggttccttgcgcccgcaataaatggggcaactggcatgagttttggttctacgttgcggagggcacagtcgaagaccatccggggctccccgtggccgagatgtgctcgcattattactcagcatacccgcagtttgaagtggcggaggaggatgcaaacgaaggggcccttcggtgcgcggccggcctgagcagcgggcgcgatttggttgaggagtttgtggcgtatggggtgtggcctttggcgcatggttgggcgctgggcgaagtatgccctcgccagatgccttcccgtggtgggatgctggtgcaaagtcccgccttcgcactggatctgcatagccgcgatccggccgcctttgtgcgtgaagcggaggatggggcggtgcggattgttggtcggtacgtgccgaagacagagggccagcgtagctgggatatacgcgggtctaatgaccgcttgaacagggtcttcgagttgaaccgtctgccgtatggcggttatcccgggcaagccgatgtggatcgtcgcgggaagaagccggcggcagagactggagacgaccccacgccggcggtcgccccatcctctaagaagaggaagctaggtattgctacgggaggactgggggtttccgatggttttgctagggaattgatgaggacatgcgcggccccagggggaaggatgtcttcgcccgagctccgggagtcttcggcgcggatgctgaggaagcgccaggcggtcgtcaggctgcatgaggccaggccgaagaggtcgcgagggactgcgaaggctgctgcccccggcggaagccagccgatgctggcggcgaagtcggccgcccctgggtccagcagggtgccggaggctgtgaaggcggtcgccgtcggcggtaccaagtctgtcccggccggagccgtgaaggcccgagagttgcctccgccgggcaagcgcattgccgacttcgccaccgatattagcgtggatgattatcttgttgggtcgggcgaaggccaacttgttgttgttccgcccgccgtggcaaccgcggcggctgccgtggtgcctagggcgaagggtagtgctcttagtgccggtggtgagattccggcactcactgccgtcagggacgaggcaggcgctgtgtcccgccggctgaaggaggcattaagtcaggcggctgacttcgcagaccgcgcggcgtcgggggcccttacagcagttgtgtctgccgaagtcgagagacttcaggcgcaacatgctgacgtcgtccgggaaaagtcggccgccgacagcaagtgccgcaagttggcggataaggtggccgcgttggagggtgagaggactgacctccggcgccaactggcggaggagaggaaggaggctaatgaggccctcgccaaggcgcagtctgcgcaggcggaggccaatttggcgcgggcggagggcagtcttgctagacagcgcgccgaggaattggaggagcggttcaacgctctgcagacccgtgtggagagggccgaggcttcgacgcgctcggaggctgagcggacacgcaaacagcttatggactcataccacgagctgggcgcgcggaccgctgacttcgaagtgccagaccgagagcccggtcttcgctgcctcgagtggctacaggaggagttgctggctctccccgccatcgtggaggggtttatgtcctatgcctccctggtcacctgcgaaggggcgatgaacacgctgtcccgcgaagggtgccggcactatgaggtcttcgaccaagctgatgaggatttcgagcgcgatatttacaaggttgaggaccctgtggtgaaggaatccgcgggagccctcttcgaccggatgtggggccctcacggtcgggaggtggtcagggagcggtccgagacggcggcgcgtaacgagaaggtggaggacttcggggcgttgaacagcgcgcagcctgattcggagttgaaccggtggcggctgtgtccgaggccgccccggcgccgcccctag

SEQ ID NO: 27552 - DNA, 1131 bp, Zea mays
  Peptide Sequence Number=SeqID_70927
actgcccccgctcctacccgcacgcgcatgccccgcatgcaacggccgcacgccccgcacgccccgccgtccgccgcgctcccacgcgtccccagacgccgccgcgaaaccgtcgcacgcccgcgccagcgaatcccgcacgcccgcaacggtcgtatccgccgcacgacccaccgtccgccgcttcccccaatcccgcaaaggccgcccgcaacggccgcatccgccgcactacccgccgtccgtcgcacgaccactcgccccagacggctctgcgaaatcaccgctctcgctcgccttcgcttccaccatcgcctcgctcgtcttcgtttctgcacaaacaacatcgacgcatccgcccacgcgcgacgcacgcgccccgcctccaatgcccacctccgcaatcgacactcggacggcgaagacgcggcggcacaggatgacaagttggttggcgacttagcaggcccgcccgcctcgctcgccttcgcttccaccatcgcctcgctcgccttcgtctctgcccaaacaacatcgatgcatccgccccacgcgcgacgcacgcgccccgcctccgatgcccacctccgcaaccaacgctcggacgacgaggacgcggcggcacaggatgacgagttggttgtcgacttagcagatctggcgcctgcgcccatggcgacgcgcaagcgaatgctcctcaaatttgtcatcgtcggcaatagcatagtgcggcaggttaccattggtggtgtaaccatagatgggcttcttgcagcaacaactcgattctcgattaggcttgcatttgtgctgataggatttttcaccactcaatgtgctcctgatacaaattcatttggccttgcaaatgacaacgagattcacgtagttacaaggcttgagtgcggagctgtggctggaaccattggccagactgttgcataccctcttgatgtcatcagtagaagaatgcatatggttggttggagccatgctgactctattgttattggacaagtcaaagaagcactccagtacaatggcatgatcgatgcattcaagaagaccgttcgccatggagttggtgctctatacaagggtcttgtgccgaactcagtcaaggcagggtag

SEQ ID NO: 27553 - DNA, 588 bp, Zea mays
  Peptide Sequence Number=SeqID_70928
atggggaagcctgtcccatcactcctcatgctcctcctcagccgaggcggggtcccactcgacagtccaacccggtggcaagatggacgaccaagtcactccagcaaccatgtcctccaaagaacctgtaaaaattatgccacaagcaaggctgagtatactaatactcagctagacttacccggtcagcatggatcaagcagtctcattagctgcgagaagcagacgattcgaatcgggtttttatccttgcaagtgaccgcacttgtacccaccataaccggaatgggagacctcgtctcaggtcgagtgaggggatatgtctactgccaggttcactcaggtttaaacagtacccgcggaaatgaaaaggacggcgcggcttaccggcggcgagagaggtccggcgaggggcggggttggctccgggaggtactggcggtcacaacgatgtacggctcgacggcggaggtggccggaatcgtccggtccacgtgcgcaggcgggtgctctcgtcggcggcgggtgttccagctaaaccacggcgatctagttcaatccaatggcacgatgagcttcacggggtga

SEQ ID NO: 27554 - DNA, 1074 bp, Zea mays
  Peptide Sequence Number=SeqID_70929
atggcccccagccccttagacaagggcaaaggggttgcaagcagtgcctctgccccaggtagctctggggggtcggaggaggagaggcaacgcaggttgcaagcagtgcctctaccccagaagcgccagaaggctgcagatgggaccgaggaggccagctcccaggcccacaacgtgcagaggcgcgtcagtcccccgatctcgccgccaccaccaccatccggggcaagtgcggcaacagtagcaggagcgtcgatcacctcgcttctaggggcttcttccttcactgctcccaaggccacacctcctccgccagacactaggcccaccgacgagtctggctctcagcagcaggaatccgctgagggtggtgccggcggtccgctcccagctgctgccaggacagcgccactggcctcccatgccccagctggggatccggcggcagtggcgccagcgtcaggcggcgtcgcagcggcggagaaggtcccagctaggggatctgcgcctgctccggaggagatggaggtggtatttgggcggcgactccggtcgggtgccgagcgagaagcggcgccagtccccctcccctgcatgctgtcccgctcccaccaggttcttagtgaaactgaggcagcaatcttgcgggagtgggaggcacttgaagctgagcaccagcgcctcagtgactggcgcacccaactggaggagcgcaccaagacgacatcccgacagttcacctccgtgcggtcccaactcgagtgggactgcaaggagtacaagaaagacctccagagggtgtgtgctagggagctggaggcgacccagagggagaagaaagtgtccaggagggaggaagccgtgacccaaagggaggccctcacgacggagtaccagaccaagctgagtgctctggacaagaatctggaagcctatcatgacaccgccatatccttggcgtcggtgatcgatggtccggtagccgccacagaagatgccgcccgggagagtgtacaagatgtagtggagatggtggccgcgcgctttcagcgtgatcctgccgatgccgaatag

SEQ ID NO: 27555 - DNA, 144 bp, Zea mays
  Peptide Sequence Number=SeqID_70930
atgggttcaacgtcggacaagatgtacctcggccagggttttcgaacccatgttgttgtaagtgaggaaacagtgttcaaaggtggtatccaaggacgagccccaacagtgaagtcacgggaggatgttggcctcccactttaa

SEQ ID NO: 27556 - DNA, 1212 bp, Zea mays
  Peptide Sequence Number=SeqID_70931
atgggcgggaccgaggaagggccttcgcaggatgctaccccggccgctaagaggaggaaattagggccgagcgagggacaaatggttgttgtcccgcctttggtggcgaccacttcgccatcggcggtggtaagggtgaagggaaccgcgcaggacccatgggccgccttctgcgcaagcggtgagattctgacagccgctgccgctaaggacgtggtgggcaccatgtcccagcggctgagggatgcatcgcagcggctgtcgcagcagctgagtcaagcggctgacttcgccgaccgtgttgcgtccggtgtcctgactgcggacgtggctgccgaagtcgagagacttcgggcgcagcacgcggataccgtccgggagaagtcggctgcggagagcaaaaaccgcaggctagcggagaaagtggccaccttggaggccgagaagacggacctctggcgccagctggtggaggaaaggaaggagacgaaccaggccatcgctgaggcgcaggcggaggccaaagtggcgcgggcggagggaagtctcgccagccagcgcgccgaggagtgggaggcgaggttcaacgccctatgcggccgtgtggacaaggccgaagcctctacacgctcggaggttgagcggacgctcgcacagttcgtggactcgtaccgtgagctaggtgcgcgtactgctgacttcgaggtgcccgaccgggaggcgggcctttgcttcctcgaatggttacaggaggagttgctggtactcccgaccatcatcgagggtttcatgtcctttgcctccctcgtcacctgcgagggggccatgaatgcgttgttccgcgagggctgcagacactacgaggtcttcgaccaatcagacgatagctttgaacgcgagatcgtcaaggccgaagaccctgttgtgaagcagtcagcgggggcactttttgataggatgtggggggcgcatggtcgggaggctgtcagggagcgatccgaccgggcgagagagcagatggagcgtgccgaggacgtcgaggaccttggaggtctggtcggcgcgccgcccaaggctgcggagggcaatctggtgctgccctcggatgccggtgaaggcccctcggccgtgcccgtgcctgctatggcccggcgacgaccctgtgttggcccctgcgccgacggtcgaaggtgccccagaggtggtggctga

SEQ ID NO: 27557 - DNA, 546 bp, Zea mays
  Peptide Sequence Number=SeqID_70932
atgacaaaggaggccagttttagaggccatagcatagctcgtagtcttcaggacagcagcaaagctccttcaggccaccagctccaacgggccgaggcggcaagggcttcggaggtagatatggggatcagcctagaaaaatctattgcttattctgtggtgaagacaagggccacacgacaagaacatgtcaggtcaccattcaaaagcaaaaagagatcgccgaagcagaagcccagcagaatcagccgaagcaggtcctacatactgcttcgtgccactctccctacataccagaatatatgggcaaccaacctacagcttttgttgcttcggcaagccattcacaagcttcctggcctcagctctcaccgccaccaccattgcaacctacttacacccgaagccagcagccagaagggcgccaacacccacaacagcaacatgactttagggaggagtccgaagctcatttacgaagttcaaaagtcgttcctaagggaatgcagagccaaaattgatgaagctacaaaaagtcgttcctaa

SEQ ID NO: 27558 - DNA, 219 bp, Zea mays
  Peptide Sequence Number=SeqID_70933
atgtcagttctgccccctctgcgcttgctgtggaccggcgcgtgcgcactcgcgcacgttgccagatttctcggccacgacacccgcccacatcgaatggctcggaccaaggataatgcttcgcgcatgcgtgccctgacgcgctggcccgcctgtcaacgcccaagtcctctggcgctgggcccgctcggtcagtgcgccctccccctctgccgctga

SEQ ID NO: 27559 - DNA, 390 bp, Zea mays
  Peptide Sequence Number=SeqID_70934
atgggggtgacgaggggggcacgtcaagctctatcccaccgcccactccggaggagacggaggtggtttttgggcggcggctccgatccggcgccgagccagaagcggcgccagttcccctcccccgggtgctgtctcgtgcccattaggcccttcaagagaccgagcgactggcgcacccagctggaggagcgcactaaggcggcgtcccaccagtttgcctttgagcggtccgaactggcgcgggaccgcaaagactacaagaaggacctccagaaggtgtacgccagagagctggaggcgagtcggaaggagaagaggttggccaagaaggaggaggctaaaagggaatgtgcccttgggccatttctagtatattttggtgattaa

SEQ ID NO: 27560 - DNA, 822 bp, Zea mays
  Peptide Sequence Number=SeqID_70935
atgaacaaaagaccgacacacaaggtgccattacaaacggaaccccagttccacctccacaggtacgaacaaccccacacgattggggggcctgcggagcaacagaagaccgacgaacggctcaccgtcgcccgctccagcagcggcgatgacgacgacttctactccggggggccgaacagcagcagcgatgacctcagggtggatgctgctgccatgaggccctcgcccatgccctcactcgagaggcaaagacgggcagaaggccgtagagttggaggtcctccccctacgacacgggggctgggccccacgcgtcatgcaagctggtccagggcagaaggagccaaaccgccgcgcgcagggcatgcaactgcccagcggttacaatcattcctccactttcgcccagaccagcgggtgaaagggtggacggccatgcaaacggcatgcaaccgcgccgagtgggcgcgccccttcgactccaacgcgcccagcatggaggcccaggcccacacgtcatgcaaccggcgtgccggttgctacgtgcgagcaactgcaccgcccctcgcgccactaccgcgcctcctcgactatggaaccagtgccgcgactcgaggcagccctgcgtgtgacccaacagtgccagccaggcacatcggtcacgggccggtcagccgcgggagaaggcgcaacagtcgatgcggccaaaaatgggccggcagtaatggcggtggcaggcgggcaggagcagcggtcacgtcgtcagccaagcttacgtcccatccagtggcagcgagagaaccctctctcacggcgtga

SEQ ID NO: 27561 - DNA, 477 bp, Zea mays
  Peptide Sequence Number=SeqID_70936
atggcgcctcctgttgacgtggtcggtccgtgccctaggttgggcgaggtggaggctccttcgaggtcgaggtcgagtctgtcttccaaggtcaaggtcgagtccgagcccccgggcgaagcggagttcatcgtcttccggggccgagcccgagtccgagccctggggtcgggcggagcggagttcgtcgtcttctggggccgagcccgagtccgagccctggggtcgggcgaagcagagtttcctatgacgcctaaggccggacttggctgctgtcagcctcactctgtcgagtggctcagcagtcggagcggcgcaggcggcgctgtcctcttgtcagaccggtcagtggagcggcgaagtgactgcggtcacttcggctttgtcgactggagggcgtgcgtcaggataaagactgggcctcaggcgagccgaaggtgtgtccgttgctggagggggtcctcgggcgagacgtag

SEQ ID NO: 27562 - DNA, 351 bp, Zea mays
  Peptide Sequence Number=SeqID_70937
atgaagcagagggaggaggtcgtcacaaagctccaggccaagctgagtgccttcaacgaaatcctggaggagcagcgggtccagcagaccgcggctgtggagagcttgcaaaagctgcagcgagagctcgagggcaaggcccacgacgccgccctcgccgaggagaagcttaaagtgaaaggagagtccttggataggcgggagacggacctcgctaggtgggagaaggatctcgccttcaaggaggaaatgcttgaaaggcgggagaagctgctggccgagcatgagctcgaggcggaggagaaggagcggacgctggaggagtgggtccgccggttccaggcgacgtag

SEQ ID NO: 27563 - DNA, 726 bp, Zea mays
  Peptide Sequence Number=SeqID_70938
atggcgtcggctcctgcgttctacgtcgcgctgctgctgctgctggcttccgtcgctgccgtccatgcggtgccgccccaggccggcacgtcgtccacctgcagcactgacctcctccgcctcctcccctgcctgcccttcatcgagggcaccgccaccgtgccggcggacacctgctgcgccaaccttggcagcatggtgcacgacgagccgcagtgcctctgccaggctctcagcaaccccagcacggcccccgtcgccgtcaacatgacgcgcgtgatggccatgcctcggctctgccgcctcgacctcccgcccgccaccggcgcctgcgcaggtaatactcgtacgcacgcgatctccattacgtgcacggatatttcgcctccccttctcgtgccagggatttggcactcactgaagttgtgtttgatgatgagccctcttgcagttgccggtcttcttccccatggaccatcaccgccgctgccaccgccgccgccgccgcctgcggcggcggtcactccacacgcaagcgccaactccagtgctccagcgaccctcaccacgccagcgacgccaacgccgacgacaccacgtatgataccgtcaccgtcggtgagcagccagacgccgccgcgatacagccgggggtccaagatgatagctcacggcttctctgtcactcttggtttcgtggcattggtgtcagtcctagctttctga

SEQ ID NO: 27564 - DNA, 973 bp, Zea mays
  Peptide Sequence Number=SeqID_70939
atgcccattgttggattggctgcagatggattagggttttatttgtctcatttcgctaaacctttgaccaaaaaaccaaaaagggtttttatcggactggttaaggtgattgaggggttagtctcggctgaagatcttgagagagatttcggtttccatttcccttggaataagatgtggaaagctactaagtgccattcggggtttctgatgcagtttccctcccaagaacgtcttgatgaaatgataagcttccctgagcttaaaatgaagatgtctggtgccaagattgccgttgtgccttggagttctagggccaaacctaaatctagactccatactgtgtgggttattgctgagaatgtccctgaggaattacaaaactatcagtcgatttgtgaaatcggctctatgattggggcggttgaggaagttgacctcatgtccttggattcagatgatattgtgaggtttaaaattcacattaaaagtgtggctatgattcctcctgttgtggaagtggcagtcaagccctttctatatgatatcttctttagaattgaatctatttgtgatgaagggtggaatgatgattcagtgaatctgggaaagagagcttctgttcaaatccatgggtccaatgacccattatttgataaatctgggaaaaaacccaagaatgttgatgaagttacccttgaagatgatcctaatcctagcctaaaaattggggagtcttcttctcaaggcaaagagtttgccaaactttctgaacctaaccttgtgtcttctaaaatcatttctgatgaggagcagaaacttgataacctttctgatgagaaacctctggacatgcccactaacactgtagatggcgtcagaaaaagctctaggttggagaagaatgatgatgtgaaggtggctgataaagcgatatccagagctgaagccaaagatgccttcctcaataaag

SEQ ID NO: 27565 - DNA, 195 bp, Zea mays
  Peptide Sequence Number=SeqID_70940
atgggtaagcttagcctcggctggaccaataccagaaaggccagcccgcaatgggagtggagagatggcgagagtatcgtgtatccacctggcaagaggctggatgatccccagctgggtattaatcgattcggatcgccgaacttctcggatatgaagactggatcttcgaccctcatcgtagataacaagtga

SEQ ID NO: 27566 - DNA, 111 bp, Zea mays
  Peptide Sequence Number=SeqID_70941
atgggatacacgacttgtgggtccagggtacaacctctgcagggtgtaaaactggtcaagaacatgtaccacaggatgaggcgcatggaggatgatgcgatgtgttcgtga

SEQ ID NO: 27567 - DNA, 276 bp, Zea mays
  Peptide Sequence Number=SeqID_70942
atgacaacggcctcaacagccacagccggggtggccggctcgctagcggatgcgttggaggagtggtcgacgctgagcggggtgaatgggaggtcgaatgatggggagggcgatgaccctagaaggtgggtgggctacagtagcttgtcgaagagtcgattgacacgggcatctgcctcatcgaaccttctgttgatctcgtcgaggaggaacttgagtgcagcgagatccattggagctagaccgagaatcgactcctttgataccaattgttag

SEQ ID NO: 27568 - DNA, 1437 bp, Zea mays
  Peptide Sequence Number=SeqID_70943
atgggtgaccggatggaaatttcttactggaaggaaaatcacagtcactggggttcgtatgactggaatactggtctgacaagtcttagatccattggtgataacaagtttgtgatgagatttccagaccctaagatgattggtgacttagggtacttcagacctttggggatgagaaccgcaaaagcccaaatcactattgatccttggacccatgcggttaatgctaaaggtagcttacaaaaagggtggttcaggattagtggcatacctatggagcagagatctctagttactattgcgaaagttggtggtctagtgggcaaggtggtcgaagttgatgagaaaactaggctcagaaatgaatatgtcagagctagaatagcctatagagatgtcactgcagttctaggggttgtggaaagtgcccttggaatgttcttgtatgatttctttattgaaagagaaattcttacggaggatgaagaaggaaatgctgaaatagaggttaaagtggatgaatcataccagaaagatgctaagagatttaaatatgaaggtaaaatgccgaagggtaaaagacaggatatgggtttgttcgatgaagggaatatgaaagttgataaaggcaagggtaaaggaaaagagaatgaggggagtactcttaaagctggcaaaaattatttcaattgcgctgatgatgaaaaagataaagttcacattactgatagtgaagaagatgatgtcagtgatcttcttggagatgatcttctgactgtgaagactggtgttggctctagtagtcattctgcttggaatacccaactgaagtgtatgaacacaatgaatacaaatgttgggcaacgtagcaagaacgcgcaatgttctatcattattgaagaactagacccaaatgataaaaaagaaggaaattctgatgagatgatatttgataatactcagggaagtgtgattctgaatacttctcaagaggatgaatctattccaaagaatagtggatcaaggctgatgacatgggccaaaatgatgtccaacagaagaaaattccttccccaattcctgaaaggaggaggtatcaggaaaaaaggggttgccccctttatcaggaaccttattgggcttcataaatttaagttcattggtttgcaagagaccatggttgttgaagtgctggatttggtggtaagggatcccaaggggatccatgggggaggaatccccttgttattcaaaattgaattgcaagtaaatttctaccacatggatcccgatggtggaagaatgactgtgatcccgcaatcaggggtgaacccctcctctcggcgaggctactgggagactgtacttgtcatatgggtacttcgtctgccagacattcgtgccagacatctgaagcgagtgacgcgcactaggtaa

SEQ ID NO: 27569 - DNA, 411 bp, Zea mays
  Peptide Sequence Number=SeqID_70944
atggcttccttgggagagaggtgtgggagttcgaccccgccgcaggcacgccggaggagcgcgccgaggtcgataggctgcgccaggagtacacccgcaaccgcttcacgcgacggcaatgcagtgaccttctcatgcgcatgcaggaaagtacagtcccggcctggacataataaggcactgaactatatatcccctccattttttcgcccaaatctatatgcaaaacagaaccttcataatacaaaccttccggctatcaagattgaccaggattcagacgtcacagaagaaactatactaattacattgaggcgtgctcttaatcaatattcttctttgcaaggacctgctgggcattggcctggggattacggcgggatttcgttcattttaccactcatggtatga

SEQ ID NO: 27570 - DNA, 246 bp, Zea mays
  Peptide Sequence Number=SeqID_70945
atgtggccggagaagatgatatactccaagggaaagtgccggacccctgtatatacagactgggccttcggggtcccgggattctgggacagagaatgcccaggccttaatcaaggccaggcgagggtccggagccgacacgtgtccggaccttatcgtttacgcttctgctccccgcccaggcggagccccgatgctgccacgtggcatggtgcacgtgacgcggtgtaccgcctccgcatttaa

SEQ ID NO: 27571 - DNA, 459 bp, Zea mays
  Peptide Sequence Number=SeqID_70946
atgtggcccttcctcaacgccgtccacttcggcgccgccgtcacttccggctcgctcgccgcgctccacgagtttaataggagagatggacagagcgagagagttctaagatctgaagtcgtagagggtttcaggcgacaaccgcatcccacagagcctttcagcaccgcatgtaccgacgtgcgcctgtgtcgtctcctctccctctcgggctatcggccttaccaaagcaaaagcaagacacagagaagccaatggcgctgtcccacatccagcctcgccttcctcaccaaatcttgtggtggcagtgagctcacggaggtggaagtcgatgcgtgtccttggcagcgctacggaggagaactgggaaccagtgagcgaaaccatggggccacagtgaagctcaagggaggcacatacaaggatgctgagccccaacatgtgggcccaggaacataa

SEQ ID NO: 27572 - DNA, 231 bp, Zea mays
  Peptide Sequence Number=SeqID_70947
atgtccaaaccggacaaaactttccccctccttatcctcctggtgctccccagccttcttaaccctggggttggaccgcacgagttcggattgagtgactgcccacacagtctcgagtggttgtacgataaaggagtacagaatgtatatgttaatgcggaccctttctcactcacaatgcaatattcccccataattcctggcctaggcagtggtagagagaacaagtaa

SEQ ID NO: 27573 - DNA, 285 bp, Zea mays
  Peptide Sequence Number=SeqID_70948
atggacatggcaaactgcattcgagtaatgcagtccatcgctattcgctggacctctttcttatgccagagcccaattcacatgagccctacgtatcctccctactctttaccaggtgccccattcactattggtgttggggccctaggggaggatggccaaggcagggctactttcggcctcatcattgatgccactattgcaactgatgatggggtcctccgtgtcggtgtggtgggtagggaagggggggggtcgacgccgtcggcggcgccgaggtattga

SEQ ID NO: 27574 - DNA, 693 bp, Zea mays
  Peptide Sequence Number=SeqID_70949
atggtccagatcgtcgagcactatgactttgttcccgaggacttcccaacggagaaagaggctgcgtcttccacgccacgggcctccggccgccctgcgccgggtgttgctgctgtgtgctctgcgcggcagcacactccagcgcagacatccagagcgtcaagggctgcgtctggagccttgtctgcagccacagagttgctacgccaccctcctagctccacggcctcgcctggggccatgaagcagtggcgtgacgacgtcgaccgtcttctcggcatggcgcattctggctcagctaggcctaggcctaggcctcggtcatcccagcgtcagcacgaggcgtcggcgtcagtgcgctcaccctcggtgagggccgcaccgactaaggatctgcgagcggagctcaaccgcaggcgtgcaggcgaggacgctccagtctctctggagaggcctgatgacctgcgggcagaactcaaccgcaggcgtgcgggcaaggatgctcgcgtctctctggagagggcgcatgagcgccggctaaacttcgagggtcgcaacctcgacctagacttcttcgcggttgcgccgcaaactccaaggggtgcccgaattcaggcgggtgtcccgttggctggcgtgggctgcgccgcactggcggatcatctctgcgcggtgacttggccatccaagtaa

SEQ ID NO: 27575 - DNA, 300 bp, Zea mays
  Peptide Sequence Number=SeqID_70950
atggaggctgaggggcgctcgatggcctatagggcgatgacgtatgccttcacctgtctcaagagcaagaacaaagacctcgccttggatcccttctttgaggggcccaaggaggagacagaggtagaggccaagagagtcgtccatgacaccatggagcatgtggtgaaaggctttgttgggagaccgcaaccgactctagtgatgacgaggacaacgttatgtcggactaggggcagaccggagcctggacccccaactcttgtatatttttcctttctctattggagtagcctatag

SEQ ID NO: 27576 - DNA, 363 bp, Zea mays
  Peptide Sequence Number=SeqID_70951
atgtcacacccagttttggaaggcaaaccgaatgcgaaccatgtccttacgaagaggtactcagaaaaatggcctgagtcccctaaagagtatgttgacagtggcagtccacatggagtcaacactgcacaggcgatgctagctttactctacgctgggcaggtcgaacaagacccagcgccactataccgtgctgcaaaagaattaattaacatgcagatggagaacggagaatttccccaacaagaaattgttggcaacttcaactcctcacttttcttcaattacccgaactaccgaaacttatttcccatctgggctttaggagaatttcgccgccgacttgttgcaaaaaaaggttaa

SEQ ID NO: 27577 - DNA, 648 bp, Zea mays
  Peptide Sequence Number=SeqID_70952
atgccggggaaggcgaactattgctgcccagctaggatgcaacattccgtcctctgtcctcgctttcgtggcgaggatgggagtgaggacctgccggtgcgctttggggcggccgacgctcgctggtgcggtgttggtgggcaggtggtcaccgccgtcggtgctgaggtggtggtggctggagaaagcttctccgccgttgagaccgtcagtgccacctacgggccaacctccggctctttggctttaatgtctggttcgcgccccttgagtggggacgcgaacgagagccttccggcagcagcgttcgtcctgggaccatcgctgctgctgcagaggtcgccagcgagtcaccaagagtttgtcgtcccgcaggctctccgatgtggaggttgttcatacccgcgggggcggaaccggagttccgttcgtaatggcaccttgagtgccggtgtctgttcattatggctgtcggggcctgaacatccggagccagaggcagcagtgtcagcatggacagaggcagagttggctcgaaaagaggacttcgtcggccggagcctggccgggccgtccactggcgggaccaacgccggagtcgagttgccgaggccacgagccgggctggtgtcctcgggggacagctag

SEQ ID NO: 27578 - DNA, 716 bp, Zea mays
  Peptide Sequence Number=SeqID_70953
atgggcgcgagctccaccttccctgttttggacgccacgcagaagctcctccatggcaggcgcccaggcgagcttccccccatggcgctcggctccctgttccctggtgccctgtggttgcccccttcttcacctggacgcgcgcacccctcctccggctcgcctcccttcaggcaggaccagctgcagctctgcgctccacctcccatggcgcccctgcgacttccatggccgccagccctccctgcgagctcagctcctccccattcatggcgccccctgctcttccctgcccagccaggaaacgcccaggccaggagtgccttgagctcgcccctgctcctctctctctaccaagcgcccccctgcaatcttccccaagctgtcttcctcctctccccaacggcgccctcctcttttcctctctgttccagaccggcatcagggcagtgcgcgcaaactctcccagccaaggacagcaccatcccctcccctgctgctgctcgccccctacctccttttcccctattcgaccgtctacgcgtctcacttcgccggatctgcgcagccccaacatcgacgtcgttcaccccggcgaggaaccccatgttttgcgtggagaagaaggcaagacgtcaacgctcgtcggatgtttggagcgatgcacaaatcggaatcaccgtcattcttgcaaacaccgtgtgggtttgtttatg

SEQ ID NO: 27579 - DNA, 456 bp, Zea mays
  Peptide Sequence Number=SeqID_70954
atggagtcctccttggggaagccgaggtggtcgtcaatgttgttagccgtcctcctcaccctcgccgcgcgttgtttcttgcatcatcaagagttgaatattggaagacatgttctaacatatggcgaaaggtatgacaatatgtgtggtggaggctatggaggcggcgctcagggaggtgaaagccgtggtgcaaagggccgagctgggacaactacgggcaaagatctcatcgttagattgacgctactccggcgagctctagaccttagggctgcgacttcgtggtggctggataaaacaagctttaagggctcctttggtaaccagggtcagagaaccccacgggagccatcacccgggagagcaaagtcctgccatgtagattccctggatgggattgccctgtggggttgccctgccctgtggccctttagagccactgccatgaattag

SEQ ID NO: 27580 - DNA, 366 bp, Zea mays
  Peptide Sequence Number=SeqID_70955
atgtatcttgtcttctggttgttgcatctgtctgaaagcctttgcaaagatgatgtccgctgcactgcctgtgtcaaccaggacattgtggacccgaaatcccttgatgacacaagatataaccatggcatcattgtgaggatagtctttaagctgaagatcttcctgggagaagctggttctgagtttgaaccacctgtgattgggagcaccagcttcgtaaccgaaggtgctacagcttggttgttgtacgaagccatcgtcacaacagtggaagtgagttcaccggaggtgggcgccaatgttggtcacttgttctcaaaagctataaatcaagaacaaggcaacacaaatgttaatggttaa

SEQ ID NO: 27581 - DNA, 351 bp, Zea mays
  Peptide Sequence Number=SeqID_70956
atggctcatcggagtcactccagcccgtccgaggctttctcaccgccgttctcccctctctgcccgtggattcatggcctcttccccgccattgagttcgccgtggcgccctctccctctctgcccaactccggcgaccccggagccaccctaactcgcgccagcctcaactccggctacctcaccaccgcggagaggagcggcgccgcccgcagccgtctgtttcccctagacaacgagcagtccgaggttcctgagtgtgttgttggagacctccctaagcaacaacctggaggtgatgctggtaacatggatgacttcgaggagttccaggaatatgacgagttctag

SEQ ID NO: 27582 - DNA, 162 bp, Zea mays
  Peptide Sequence Number=SeqID_70957
atggcgggtacaagtgcagtcaatgcacgacggcagtcggtttcagtgaggcattgttctctagaggacatggttgctggagtgacttggccgtccatcttgccaccgggttggacagtcgagtgggaccctacctcagcagaggaggagcatgaggagtga

SEQ ID NO: 27583 - DNA, 681 bp, Zea mays
  Peptide Sequence Number=SeqID_70958
atgccccctgcactaccacagggcatcccggctactggaggagacactgatggagatggagacgacgacgacgctggtggcagttcgagccacggcacagagctctcggaggagctggagccggagggatggatcgccagacccatcactctctaccagcatcatcgcgggctatacccggaccagtgggaggctacttgtttggtgcgccgtccggacgatgatctccagggtgtagaagccttctcagagcactattctattactaagaaggatgctgcagaggcagccatgcaagatgcagcacgacgggcactttctcagtattgctcgttgtttagcggggtagctgatggccttgacctgaagtactaccctcgccgttcgaccggcagtgctggaggtgtgattgcctcaccagttggtgagggcaatcctaggctaaacagcatggtcaacttggctgctgtgctcaacacagagttggaccacgcccttgatgagttgggcaaggttcgggcggaggttgcggaattgcgtgctgagtgcgcagcacgccactatctggatagtggttctctcgcacctgtcgggattcagcacccttaccgttcaccgccccgtggtcgctttgactatggtaccccagactgcaggacccggatagatttggatccctag

SEQ ID NO: 27584 - DNA, 219 bp, Zea mays
  Peptide Sequence Number=SeqID_70959
atggccctccggcaaagccaactgttggggaccttcggcatccgaaggtcctcaaaaacaggatttaacagtatttctggagtacaatgtgtgaacaggtatcctcggactcaaatcggcatcgcagtccttacggagaggtactcaggaaaaaggcctgagccccctaaggtatcacaagatcatccacataatcaggataacagtatcgtatcataa

SEQ ID NO: 27585 - DNA, 651 bp, Zea mays
  Peptide Sequence Number=SeqID_70960
atgcaactgttcgagaagcaccgggtgccccgctgtagggtgaggatgaccctagagcctcatcccttacagctaggatggtgttcgttggactccgagtctttcggataccgggctgaggatactatcgagaccattgctctccatgggctgaccaccttctgtgatgaacacctccacgtgttcgacgcgttctgcgcgcgccagagcacgcccgcgcccgacctcgcgtgccccgtgtcgcgccaaagcccagccggcgccgttgctcgcgcccgcgcctataaagcccccaggtacttcggccgtacccctccgcgcacgctcgacctcaccggagcccgaaaccaccggcgtttgccccgtgcacggcgtgcccgcggccacccgagcccctgccaccgtagactggccaaccgagcccttcccaaccccgtccaaccctcggagaagactgtgcacacctcggtgaagctccccgagcgaggaatcggagtttgcttcgccggagaagccagtccacggtcgccggacttcacccgaccgccggtgaatgtagaccgggtaattctctgctccattcttcgattccttgtgcacatagcctctacgtcaccccgtgaagctcatcgtgccattggattgaactag

SEQ ID NO: 27586 - DNA, 408 bp, Zea mays
  Peptide Sequence Number=SeqID_70961
atggccaaccagattcaggagtttgaggagctagtgggagccagggagaacaccattgaggttctcgaggatcggctgatcaacactcaacaacaattcgaggaggctaaccagcatttggatatgcaccatcaggagattcaggacatggaggccaacaaggatgttgacatcaagggaggagtagagccggagcccgcatctagcttggacactgctggctcagggatacccccttcccccgagtcaagcgttgcctccgtcagccgccaccttagcattatggtggtggtgatcaccatcagtgtcccccagcagctgccacttatcaggagttcctcagcactcagccgtcgttgttcactcgggcagaggatccgcttgatgctgatgtttggcttagggtag

SEQ ID NO: 27587 - DNA, 309 bp, Zea mays
  Peptide Sequence Number=SeqID_70962
atggcctcggccccctcccccggcgcgccctgctcccccacggcacggcctcggcgcccaggtggcccggcgcccccgcgcccgcactcctgcgcgtctgtgcctcggcgccccggcggcctcgtgccccacgaccccgcgccctcgtgccccggcatggcctcgcgtgccccgacgtggcctcgcgtgcccccggcgcgcgcgacgtgtggtgacgaggatgatgattttgattatacttatggtactggtgaagatgaagccgtggaggaggacttccaggagtttcaagagtatgatgagttctag

SEQ ID NO: 27588 - DNA, 222 bp, Zea mays
  Peptide Sequence Number=SeqID_70963
atggccaccggcagcaacaactcatcgacatcagtggccatgggacatgaggtacagacgattggtattgcttggcttccaaatgaattgtcatttatgaagcttatcctctctaaagcaaggcttcttcgcacgttgtatgttgatagaaacccagatgattttgataatcaggcttctacaatacataattttcttccttttccttttattggtaattga

SEQ ID NO: 27589 - DNA, 150 bp, Zea mays
  Peptide Sequence Number=SeqID_70964
atgactcctttgaccatgctgttgagcttgatggcccttctgccctatgatggccgtgtgatgcttggagatgatgaacctgttctgttaactcacttattttgtgcggctgatttgggaactgatgctctcaaccccttgtctgcttag

SEQ ID NO: 27590 - DNA, 699 bp, Zea mays
  Peptide Sequence Number=SeqID_70965
gattacaaaagttctttgctgctattcaataaatgcctcttgcttaacgttgaggcagttaggaagtacaattcattctctgagatgctgaaaggagagaaaatctcaaatgttcttcctggtatttcatcaattgtagaaggtgtgaaagtatataggaaattctatgcagaggaaaaggagaactcttatggagttttagcgatatcagtttcaaagccaacatctcaaccttacataaccatgaataatatccttgctggattggggtatgatggactgggtagactccttggtatggcgaaaacaactggaactgttccagatggactacctcctccaagatctgcactgctgtcatcttgtatgggactggttcaaccaaatgtgaaaggctgttctttaactgatggtgcgagggcattggccaaacatgttcacaggagtaggaaaggatggtggggcagctttaatgggagtgattcaagcaagaaccaagctgcatctgaaaccattgagtctttgctgcgtgtgtgttgttggatgaatgttcatctgactcaaccctatggtcctgtttttgaaatccgcgtgcatgaaggttatggtgccagatggtctcaagatggttcaaagatggaggatggcgttctcgagctgttcgggatgacgtcgaaacgaaactcgggacacggttga

SEQ ID NO: 27591 - DNA, 1014 bp, Zea mays
  Peptide Sequence Number=SeqID_70966
atgaaggtgtcttccaggaggaagcagccgccgccgccgccgcagcagcagcagcgggaagaggccgaggccatggacgccgatgctggcgtccaggaggtggaggaggaggaggcggcggggtgctcggggaaggcgcccgaggcggagggcaggacagtggtggtcggcgtgcgcgcggacgccgagagccgggcgctgctcacctgggtgctcgtcaatgtagccgcgcccttggaccgcgtcgtcgccgtccacgtcgcgctgccgtccgccgcggaggcgcccgacttcgacgccatgctcgccgtctaccagggcttctgcaacctcaagcagatcaatctgaagctgaagatttgcaaggactcgtcggtgcgcaaggcgctagttcgtgaggccagcctgttgggggctgccaaggttgtcctcggcgtcgccaagaagaggcgtgcgatctcgtcctcgcattcagttgcaaagtactgcgcaaagaagctgcccgcaaagtgcgcggtcctcgccgtgagcaatggcaagatcgagttccggagggagtcgagtgcccattcaggcaaggtctcagcagaggttcttccgtgtgctgacgatgagatgtattgtgcagtgcggttccaagcccatgaacctaaggatggtggtgagggtggcaccacgcatgatgttggcaccaagggaagtgaattggaggacaccatcaaacacgaacagcttgtctcaagcgtggtcctccctgcggatttggcaacggatcaggtcaagatcgacgcagatctttctagcagcaaggctgtagaatcaactgtcaaacagagagatgagactgccgagcttccagtacatgagtttgttacggagatcgagaccgtgagcagcctgcagcacgagaacatcgttgcgctgaggggattcagcttcgagaactacaaccttgtgctggcatacgattacatgccccaagggagcctggacagagctcttcacgctgtgtga

SEQ ID NO: 27592 - DNA, 924 bp, Zea mays
  Peptide Sequence Number=SeqID_70967
atggaccagctgcgcggtaacgtcgctaaggccaagaaggtgctgggcagcaagggcaaagggaaggggtttgccaggttggtgcggagctccatggtgggtgacccgctcatcaaaagcacgccgtcgttggtgagggttaagtcggagcatggatacccggtgtccaagaagtgcagctatgttagggagctgttggagagggatggggctcatcgagtcgtcctcatagtcggtctctctggtatcgggaagtcatgcctcgcacgacaaattgcttctgatccgccacttagtttcgtggatggtgcgattgagattggttttgggaggtggtgcagcacggcagcatgtaatgggagcagaaacgaataccataagcgccttgctaggaagatctgcacgttccttgtgcagatcggctccataactctcaaggaggatactggaatagatcttgatgatgtctgttgcttgctccagacggcattggtcggaagaagcatgctgatcctacttgatgatgtttgggagcaagacattgttgatcgcttcacaagactttatgataatgattaccggtatctcgtgacaacatgggatgaagctatctacgagatagcagaagctgaaaaggtagaaatatgtaaagacgacatcaaggagatcagcacggaaattcttctctatcacagccttctcagtgctggagagcttctgtcattaggtggttacgacaccgaagacaaggcagcgagggcttacgatctggctgctctgaaataccggggtccagctactcacgtcaatttcccccctctccaatggacgaggctgcaggtgctcgaggacttcgtgtccgacctcgacgcgctaacgcagcagtcgaggcagcgacacgcgcacaagttgcacggctcgtag

SEQ ID NO: 27593 - DNA, 1383 bp, Zea mays
  Peptide Sequence Number=SeqID_70968
atggaagccgacatcgctttcaggtatgagatcccccggaccgcccagttcctccgcgacggcgcctacaccagggtcgcgctccagttccccgacgagatgctgaaggatgctgctgcggtggcgagggcgttgcggcgggagcttgcctccggcggcgccgacagtggggttagggtgttcgtgatggccgacacggcgtacaactcctgctgcgtggacgaggtgggcgcgtcccacatcgatgcgcagtgcgtcgtccactacggccacgcctgcatgagcccaacatcaaatttgccagctttctttgtatttgggaaggcaccgttggatgtccacgcatgtgccggcacattgctggagtgctcaaggaaaagcaataagcgcattctggttttatatggactagagtacgcatatgcattggatgaccttagacagactttcatggagtcatgtaaatcaaattctggcaatcatgaagtccagtatgcagaagttctatgttcagttatgagtccatcatcaagtactacagaagaaaacaaaattcctcagtcgagtggcccctcttgtaatggggatatctccagaaacagcgagtcggcaacattcctgaataatcgtaatggcatggaatgttccagttccacacaaaagtacagccttgctggcatgacatggaatatttcagttgaggagaaaatggaggactatttcatattttggattggacaagatagctcagcatttgccaacatagtgcttaccttcaataaatgtgaaatagttagatatgatgcaatagaaaatcaactcacagcggacgtctctcatctgatgaaaattcttaggcgaagatattacctcgtggagaaggcgaaggatgcaaatattattggcattttggtgggaactctgggtgtagctggttatcttcatataatcgaacaaatgaaagatctgatcaaggccgctggaaagaaatcctatacattggtcatgggtaggcctaattctgccaagcttgcgaattttccagagagaaacaagaagctgcgagcacaacaggagaaagcacgcttttcttttatcaaaggtgtctatgtggaagataattgccctcaagaaaatgaggaacaatcggaaacgtcgctcgctctggctgaggtaactgaaaaggcactgagcatccaaaaccagcacaacgacgctgtcctttaccaaggaagagcaatgtcctcaatcgactacctcaaggcacgttcctaccgtggtctaactggagaatacgaaggcccagttcctgattcagtcttggtaggcagaatgggcagggcagctggttacagtgacgagaaaactgagagcgcacagtga

SEQ ID NO: 27594 - DNA, 588 bp, Zea mays
  Peptide Sequence Number=SeqID_70969
atgggaggaggcaggggagaggttccagctatgctcaccgcgcagccgccacctgaggtagcgggtgaggatgacagcagtttccaccatgtcttcgtggagtttatgaccaaagccgctcagttcgaggagctcgctgaatctggggagcgattgcttgggagattccgtgaggagcttgtaagctcatccgaagctggacttaaagatcatataaagaaagctaagactttgctcgaagaacttgaatgtctagtcgagaatgtctatggcatcacattaacatccagtttaagtgctctggaagtttcagacagtcattgcctcgacaacatgccaagcaccgattgctatgccatggaggaggataaacgagcagatcatttggacatggacgtatcgctcgttacggtgatggccatggttcgcaacatgctgaagcttgactacacgatgcaggagaagattgtcactgcattgtccttgaaaacaccagcatcggagctcgagggatactgcctcatgtgggatctacgcccgtacatcgatgacgacgtgatgcgtcttgcgtggaacatgtgtccttga

SEQ ID NO: 27595 - DNA, 192 bp, Zea mays
  Peptide Sequence Number=SeqID_70970
atgagggtgacaattatgttgctcatgcctacttgtagccctactactcgctgggcatcagttgcccttggagctggtgtggggataggggctgcatacactgaatgctcatacttattcaatggtgctccaaagtgttcacccaaagtctcaactattacctctgcacactctgatgggggagataagtaa

SEQ ID NO: 27596 - DNA, 852 bp, Zea mays
  Peptide Sequence Number=SeqID_70971
atgtcgtctctagatgcccagaccttcgtcgtgtccttcttcgacaacgaacaggctaggggattgaagaagcacttgaagaggctcaatgcgcccaagcattggatgctcgacaagcttggcggagcttttgctcccaagccatcttctggacctcacaagtccagggagtgccttcctctgatcctcatcatcaggaacaggctcaagtatgctctgaactaccgtgaggtcatttctatcctgatgcaacgccatgtacttgttgatggcaaggtcaggactgacaagacctaccctgctgggttcatggatgtcatttccatccccaagacaatggagaactacaggctgctttatgacaccaagggccgcttccgtcttcacccaatcagggatgaggatgccaaggattttcaagctctgcaaggtgaggtctgttcagtttggccagaagggcatcccctacctgacacctacgacggccgcaccatccgctaccccgacccgctcatcaaggccaacgacaccatcaagatcgatctggagaccaacaagatcatggacttcatcaagtttgacgtcggcaacgtggtcatggtgaccggcgggaggaacaccgggcgtgtaggtgtgatcaagaacagggagaagcacaagggcggcttcgataccatccacgtcgaggactccatgggccaccagttcgccacccgcatgggcaacgtgttcaccatcggcaagggcaacaagccgtgggtgagcctgcccaagggcaagggtatcaagctcagcatcatcgaggagcagaggaggcgcgactttgctgcccaggctgctgccaaggcataa

SEQ ID NO: 27597 - DNA, 465 bp, Zea mays
  Peptide Sequence Number=SeqID_70972
atgcggcagatctacatgagcgacatgaaggatgagccaatgcacatgaatccggtgccggaacggaaagcaatcgaaacaaaagaaatagggattccaggaagaggaacggacgacggcgacggagtcgacgagaaggagcgcgtgcagtcagggggaaaaggaagacaacacagcagagggcctcatataagggattgggagaaatcagcggcatgggcgctgcagtggaaggacaggacacagaatcacatggcggtatgggcagcgcaccagaccgcaacggggagaaccgaggagaggggtactgaccggacaaacagcgacgcgccgtacgccacggacgcgctggccgccaccgacgcgctcggcccggtccgagccgtagcaaggacgcccaggcggaggcccccagtgccactggtgactggttggtccttcactagcgggtatcacagcatatag

SEQ ID NO: 27598 - DNA, 507 bp, Zea mays
  Peptide Sequence Number=SeqID_70973
atgttcggcgccctccgagggcaacatggcgctttccccctcctccttgcggaaaggcaacgaaggggcgaaaacagcgcggcctaccccgctctgactgatgtgccacccgctagggtgaggctgacaacagctaagtcccgcctcatgcgccacaggaagctccgcctcgctcgaccttgggcctcggcctcgggagaagtctctgcctcgcccgaccccagggctcggcctcggaagatggactccgcctcgcccgaccctagggcttggcccccgcctcggcctcggaagatggactcctcgcctgaccccagggctcggcctcgacctcgaaaggtggtctccgcatcgcccgaccccagggcccggcctcaacctcgacctcgggcggaatcgcgtcctcgcccaaccccggcctcggccttaggaggagtctccgcctcgcccgaccttgggctcggaccgaccatgccacaggggggatcatcattaccctacccctag

SEQ ID NO: 27599 - DNA, 579 bp, Zea mays
  Peptide Sequence Number=SeqID_70974
atgaactacctccacactagcaagggccacgggataacaagccccgagcggctcaccaatagaggcaaccacaccagcaccgatggcgacgaccgcctctgcaccaacgactcgacagcagcggcaatcatcccagcatgtgcgtcactgcgggtaggttctcgcccctgtcctcctacagggggtgacaacgaggccactaaagccaaggagtcggggactcaacggcagatggctctgatgccctcaccagcggaggcaactgcccctgcaagaggcagcctcaccagcgacggcgaccacccctgcaccggagtgaggacaagaccatccaagaacgctgctgccactgtcgcggcgtacgacgtgttgtacggtcccccggtgcgcccggccggccgaggaagccatgaatgtggcaaacccacgcacggcgcgactgtcgcccgtgcggtgggtgggcaaccacaccccgaccagacagcaggaggcagcgtcaggggcgacaccagagccatccagccccaaagggccagacacgctgcagctgatagcctgcagtcgtccggccccgtatag

SEQ ID NO: 27600 - DNA, 1422 bp, Zea mays
  Peptide Sequence Number=SeqID_70975
atggcgcaggaaagggacgcgttggattcacctgccttgtcgattgacaaaaggctgcggtcggatgctgtcgaatcacccctggtggatgatgcaacgcaacccaaggagggggcggacggttaccctgtcaaggttcggaagccttacacgatcacgaagcagcgagagaagtggacagaggaagagcatgggaagttcctggaggcactgaagctctatggtcggtcttggcgccagatacaagaacacattggcacaaagactgctgtccagattcggagccatgctcagaagtttttctccaaggtcgtgcgtgaacctggggccagtaattcaattgagatcccaccccctaggccaaagagaaaaccactgcacccataccctcgcaagtgtgccgactccaccgtgacaaatgctccaatgggcgaaccgaagaatgctcctgtttcatcaccatctggttctgaccaagagaatggttcgcctgtctcggtgttatctgcaatgcagtcggatgcttttggttcatcaatatcaaacccatcaactgggggcacgtctcctgcgtcatcagatgatgggaataatgtccctgagatagtgaatggggaggaaaatttgctcactcagcaaatagaagaccgatcccatcaggaatcaaagcaggacaacagtgatggtgagctgtctgaagaagattcatcacgagtccaagaaaccagtttgaagctttttgggaagacagttatcatcccagacccaaagaaagtctgttcctcggatgggggagctggagatgatacacaagaagtgatgcaaacatcctgggttggaggaggggtggcagcataccctgcccataacggatggtttcttccgttccattctttccctgctcatatgtatgagtcaggggatgctaggatttcccctcttcatatgtggtggccttactacggttttccggccggccatccaagagggtttggcacagggctgcttaacgaaggcgccattgagagtgatgccgacaatagcccatcggttgaaactaattctgatcgcacgggcaatgttcatgttcagacgacgacccctaccattcacaacaatgctgtcaaggagtcagttgggccagttgagatgccagagtcgggtccgagcattgagctgaaacccagcgcgaactcggcctttgtaagagtgaagccgagcagcagcgtcagcggagaccaatcactgtgtagggactcgagtggcacacatcccttgttccagtgtgcctgccattttttgcctgcaaaattggctgctggtgtatgtgtaatattgtcgttttactgcctgcagcggaatgttacagtgtatcctgtaagaccaattcttttggtccttgaacaatggaatgcagactag

SEQ ID NO: 27601 - DNA, 3729 bp, Zea mays
  Peptide Sequence Number=SeqID_70976
atggaggcggcattttacgcctatttccgccccgcagatgaggaccgcgacggccggatcagcggccaggaggccgtcgccttcttcaagggctccggcctgccccagcccgtcctcgcgcaggtggtcctcagatctcctctctctcctccccagcgccgcgccgctcttaccacggcgatctgtgcagtccagccaccccccgtgcggttcgaatcgcagggtgcctggtcgatttggacgtatgctgataaaaaccggtctggttttcttgggcgtgaagacttcttcaatgcactcaaacttgtcacagtagctcagagcggccgagaattgacacctgatattgttagatcagcattattcggcccagctgctgcgaaaatccctgctcctcggataaatgtttctacagctgctcctcaggcaagtagcgtagctaacctcccgaatgccactcaagcaccaggtcctgttcagcagactcctgtcgtaagagggacacaagggcttcctggtatatcgtcaaatccacaagtcaggccaccacaacctccaaatgcaaacactgcgccccctgctcatggtcagggagttgcctcaaggccacccgtaggaagtggtcccactgggataaaccatactagctcaaccacaccaagtctagcaactgattggttcagtggtaagagaagtgcaagtccgttgggtgcaacttcacaaactccaacaagaggtatttctccacaggccaaccttagcagtgcgggaatctcagtgcagaattcagctcctgtaccaggctacaattctcatacaccaggtgtcaatgcaatttcaacaaatttgaacgtgatgtcttcccaaccatcagtcaatgactccaaggcgttggtgccattgggtaatggattgtcgtcaaactcaacttttggtgctgaccctttctctgcaactccacgaccagaacagggttcaccttttccccccaacgttccaaacaatctgctcagctctacccctcctgcctcagctgctggacatcatcaccctcctaagccaatgcaggctggtcctgtgcagagtatatcctcgctttctcctcatactagccagttgccacacaatcagccacctccgaggcaacaacaatttaatgctacaccaagtgctccaggaccagtgagttcaaatattcccactggacaaattccttcaagcccaagccagcctcaggcaccatggccgaaaatcactcaagtagatgtcagaaaatacatgattgtatttatcaaggtagacagggatcgtgatgggaaaatcactggtgaagaggcaaggaatctatttttaagttggaggcttccaagagatgtcttaaggaaggtgtgggatttgtccgaccaggataaggatgggatgctatctttcaaggaattttgtattgctgtgtacttaatggagagacatcgagagcaccgtcctcttcctgacacagtaacagatgctatttgggctgagggcaccgcactaccctctactggacagtttgcagaaaatcctagtgcccccgctcctcaagcaagtgccggatatacaagtagaacaatgcaaggaccacatcatgggatgcttccctcatccatgaagccaccatctcggaggcctcttcctttagatgctgacgatactattaagccagagcaacaaaagccaaaggtccctgtcttggaggaacatctagttggccaactaagcaaggaggaacaagatacactggatgcaaagtttaatgaagcttcagtcgctgataagaaagtccaagagttggagaaggagatccttgattctagagagaagaccgagttttatcgcacgaagatgcaggagcttattctttacaaaagtaggtgcgacaataggtttaatgaagtctcagaaagtatgtctgctgataaacgtgaggtccaatctctttctgcaaaatatgatgagagatgcaagaaggttggagatgtggcatcaaagctaacaatggatgaggctactttccgtgagatccaggagaagaagttggaaatttataacgccatagttaagctgcaaaaaggggatgatagcgatgagaagtttcaggagcgggctaataagatacagtcagatcttgaggagcttgtgaaatcattgaatgagcaatgcaagagatatgggttgagagctaagccaactactttagtggagcttccttttggttggcaacctggaattcaagagacagcttatgcatgggatgaagaatgggataattttggagatgaaggattctctataataaaggaactaacagttgaagtggagcctcccgttgtagcaaagagtcagcctactgaggatgttaaagcatcttcaaatggggcatcaacagaaaaagaagacaacaagggtgataaatctgctgctgctgtggagcaggttgtcaaacctgaaacagcaccttcgaatatcaaaccagagtcagcaaaaagtcctccagttagtcctgtcaagaacaaagaggatggtcccgatgaacatgataaaaagcaatctggaacaaatgatgtctcaccacgtgagagtatcagcaaccgtggagcaatggattcccctactcatggagataaaacccatgatggacactcatggggcatggataatgactccctatggaactttgatcataaggagggtgagaatggtgattcagatctcttctttgggccacaaggccttcccccgataagaactggaggttcctcatctggtaattcagttgtcaaggaacagaagccgttctttgattctgttcctggtaccccagtggagaaatccgtctttgattccatcccaggcacgccatttcagaaatccgtctttgattctatcccaggcacgccagttcagaaatccgtgtttgattactctgtccctagcacaccgatgcagaactcagtctttgattattctgtcccaagcacgccgatgcagaagtcactctttgattctgtccctggtacaccggtgcagagatcagttttcgattctgttccgagcacaccaatgcagagatcagtttttgactctgttccgagcacgccgacgcagaaaccattcttcgactcctttccaagcacaccaatgcagagatcactgttcgattctgggccaagcagagcagaatctcctaccgccagcagcatgtatggcaaagagcagaagggattcttcgattcttcagtcccgagtactccaatgtacaactcaagcttcacgccaaggtatagcgaagcaggagacgattcattcgacaccatgtcccaatacagctcatttggcatgcacgagagcaattcctttggacagcgcgacagcttatcgagattcgattctttcagcagcaatgctgacaacggtgggaatgacacttttgcgaggtttgattctttccgcagcacttcagatcagggtgggggcaacagcttcatgaggtacgattccatgaacagcagcagcgaccatgacgggatcggcacgtttgcgaggtttgattcgatgaagagcagtaactacaacagccggggctactcgttcgacgacgaggacccctttgggacagggccgtttaaatcgacagagaccacgagccacagcccgacaaaacatgggacggacacatggagcgcgttttga

SEQ ID NO: 27602 - DNA, 1245 bp, Zea mays
  Peptide Sequence Number=SeqID_70977
atggagccgccgccggatctgaacacccacctgccgccgcggaagcgcctgctcgccgggctcaggacggcagccaccgccgccgagccgctaccgccgccgcccgcccacgccgacctcgccgcccgcctccgcgagatggcgctcgccgccaacgcgtcggcgtcctcgcccgaggagacgatcgaggcggcgagggcggccgcgcaggccgccgcggacgccgccgttgctgcgcgcgccgtggccgccgagaaggccgccgtcgccgcgaaggctagggcggccgcgcgcgccgccatggagttcatcgactccttctctaccagggccggcgcgtccaggaacgggagcggcctccagttcaagatcaggtctaggaagaagcatgtccaggtcaagatgctgtacaggcccaatggaaccctagggccagcggaggctcccaagcctaggagacgcaagcagtcggatgaagaggtcccgcacaatttgcaccgcctcatgaatagctcgccgaggatctctcacgctggactgcccaagaggcctcgcacgaccgctgctggggatgccaaaaatggagctgtagcacccggtggaggtaacggcgctggtgtttgtaacggttcttcagttcaggtgccgacggaggctggcggttggttgggtaatggatgctctgaggcgaaatctcatgagagaaccgttccattgctcaaccacgaggtctctggtgaagactcatccaggcacgccgcgaagagtagcggcggcattgctgacaacggagtcggggttgggaactcgagtgctggtcagaaagtgaaggtcaagaggaaggagctgctcctgaatcaaaataccggtaaagaaagagaagaaccagaagaggccacacaaacagagccctttgtacgttctatcacgctcgatgaatcgaaaccaaactcaaaaggaaaaggaaggtcaaacccaaatgggaatggaacagaaaggcttgcaggccctgcagatacgaagggccgtggcgaaggcgtgacgccaccgaagataacttccgtatggaagatcaagaagctgaagacatctcactgctcttccgacagcaaggtgctgcacaagatatctgttaaattatcaggggattatgacaacaggaaagttgggagcagcatgggtactgttgctggtatggcaagcatgagtgatggtggtggacctggtggccacaggtgcacctag

SEQ ID NO: 27603 - DNA, 861 bp, Zea mays
  Peptide Sequence Number=SeqID_70978
atggaaggcccctgggttattaggacatcctactgctcagaggaggaaggctttcctcaccttctacgaagttgcacgctacgcatggggatccgcaagaagcccgaatatgtctggaaggaataccgcgaaaatggagtagaaaagtgctctatggcagtctacctgggagaaagccgaaactacccaaatcaccctcccttccaagtcaccttcatcgggcaccgcttcccagacacttgccagagtgttgcccgaaaagcccttaaacagctgtgccaaaactacagccgagagatctctgagaccccccttcgatattttccacccagcaacaaaaatacccccacctggaggaaaagactccaggctctgtcaggaggagaccccacagaagatgaccccaccatcgtctacatggccggatacctccacaccctcgacaaccactacgatgatctctcctcccactgcacccacctaaactctcgggtggaaagcctagagcagcaagtcaaagagcttaagcaagagaaggcatctctccaagagtgtctcgacatagcagaaggcgaggaggccaacacccgtgaggcctatcgaaccttaaagatggactatgacaagaagctaaagaagcttgctcccaagaagaaaatccagaagaagaccaccaaccaaggtgactctcttccctggcagatggcttcggataaaaccacgcctaccgcctttgggattggagcagggtttcccctgagagctgaaggggaagccgatagagaggaaagtgaaacccacctccccgcacctccgcaactacccttagatctagcccaagttctagccaatcaaacctga

SEQ ID NO: 27604 - DNA, 513 bp, Zea mays
  Peptide Sequence Number=SeqID_70979
atgggcctccacctccaccgcaacgccttctctagcgcgctccccaccgccctcgtggggctgaccgcgctccaggtgctcgacctctccttcaacgccttcaacggtgtcgtccccggcgcgctcgccaacctcacctgcctcgtcgcgctcgacctctccaacaactcgttgtccggctgcgtgcgtgtgagcatgatgtgttgtgctgtgacgacgacgctcaacaacctaccgcctcttgtctccattctcaacgactacctttccaaacttctgcttattggtgattctggtgttgggaactcatgcttacttctcagatttgcagatgattcttatttggacagctatatcagcacaattggggttgatttcaaaattcgcacagtggagcaagatgggaagaccataaaacttcaaattgtgaactataaagtaaaaggtaactttattcatgctacagcagcgactttgagcgaacatgagaccactgagctctggagtgaatga

SEQ ID NO: 27605 - DNA, 357 bp, Zea mays
  Peptide Sequence Number=SeqID_70980
atgggcaagagcaagaaaggcggaagctcctcgcaccattctggcgacaagcggaagcgcgagccgactcctccctcggaggacttcggctatttcgagtactcggaggaggagttctccttcgagtccgaggggtcgccggtgtggacatacatccgggccgtcgagcgcgctgggctcgagggctcggatgagtctacggtctcctcggacgaggggaactcctcttactcatccgaggaggggagcgacaatgacgatggcggcgagggcgacggagacgacgggggcggcagcggtgatggcgacggcgacgacagcaagggcggcaacggcagcgacaaggccagtggctag

SEQ ID NO: 27606 - DNA, 456 bp, Zea mays
  Peptide Sequence Number=SeqID_70981
atgcaggcggcatgcaaccgcaccaagggggcgcgccccttcgactttgacgcgtccagcatggaggcccaggcccacacatcatgtaaccggcgtgccggttactacgtgcaagaaacagcaccgccacttgcgccagtaccgcgcctcctcgactgtggaaccaatgccgcgactcgaggcgaccctacgcatggcccaacagtgccaaccgagcacatcggtcatggggaccgggaaaggggatactccgaaagggatccttctccgcgaaggaagcaggccccgagcccccctactgatcagaggttcgaaggctggcccctcggaagagttcaacagccgcctcagagcgctcgggctccgcgcccactactgatcagaggttcgaaggctgacccctcggaagggttcaatgaccgcctcaggccactcaggctccgcgcccactactaa

SEQ ID NO: 27607 - DNA, 198 bp, Zea mays
  Peptide Sequence Number=SeqID_70982
atggagggaggaggcatcggctggagagtgaggctgacagcagccaagtccggcttcgagcgccataggaagctccgcctcgcccgaccccagggctcggcccccgtcttggcctcggacgacgaactccgcctcgcccgaccccagggctcggactcggcctcggctccggaagacgacgaactccgcctcgcctga

SEQ ID NO: 27608 - DNA, 270 bp, Zea mays
  Peptide Sequence Number=SeqID_70983
atgctgctaggcgaactatgtggtctctcagccacacctaccggcaacagctgcacaatacaaagtcttaacaccgacctggataatgctaccctggacctctctagggtacacttggagctagaggatgcacatgcaaggatcgtagccctggaagctcatcttgatggaaggaatccccctgaagttcaagtccccgctatggcgttatcccctccccgcaagaggatccgctataaagaaccaggatccatcaccaggctgctctag

SEQ ID NO: 27609 - DNA, 279 bp, Zea mays
  Peptide Sequence Number=SeqID_70984
atggggtctcgatttgatgccaattgctggccggagcaatttgtttctatcgggctgccctgtgccgggggcagagaacttcgctgttcaattggaggtaatgtgtcgcatactatatttgtcgactccccagaatatgatttagagcttcgaagatttaatctgattagtgcttggtcaccagcttatgctttagagatcagcatttcgtctttaggggttgaagattcattgggtgcaccggaggtgcacccaatgggtgtagcccccgagctttga

SEQ ID NO: 27610 - DNA, 627 bp, Zea mays
  Peptide Sequence Number=SeqID_70985
atgggtgtagccaagggacggcttgacaatttgaatggcttattgaacatttgcgactgttcagtgaccgtggtaggagatgagcggttgcctcccgcctctataaatagcctgcctgcttcactggtgtcttcacacatctcccagccgttttttgcttattctccacttttctcttctcttccaatcaactatgggcaagaacaagaagggaggaagttcatcgcaccactccggcgacaagcggaagcgcgagccaagtccccctcggaggacttcggtgactccgagtactcggaggaggagttctcctccgagtccgaggggtcgccggtctacgcctctcccccggtatcgtctgatgactcaaatgattcccaggggatcgctgccgaggtgtggacatacatccgggccgtcgagcgctccgagctcgagggctcggatgagtcggagatctcctcggacgaggagaactcctccgactcatccgaggaggggagcggtggtgatggaaacgacgaaggcgacggcagcgctggaggcgacagcggcaagggtgacagcggcaacagcaagggtgacagcggcaacagcaaggccagtggcaaagcgccactggtttaa

SEQ ID NO: 27611 - DNA, 393 bp, Zea mays
  Peptide Sequence Number=SeqID_70986
atggatcctggcccacatatgctatgcattcggttttgcccccagaaccagatggtccgtaccattcaaaccactcggatcaacaccaacttcatccctccaccacgactagttcctgtctacccagtggtagtagaggaaattcctgtggatctccctcgcattcgggtggagaacagagtcattctggaggacaactcagaggagtttctgcatacacccacctcgttggcggaatcactagccttcgcagctggatcgtcagcttcagcaccgccagcaccagcagtccaagcccctgctcccggaggagacgacccagacgactctggtgacgatgaggaagaagaagaagatgaggaaaacctcaacgaggaagccaacgaagaatag

SEQ ID NO: 27612 - DNA, 561 bp, Zea mays
  Peptide Sequence Number=SeqID_70987
atggctgacactcttgtcgatatacagatgcacaaaggtgtttcagatccccttgatgttgtagcagctgagatttcatatgaggccatcatattatgtcttgatgagtttatggtaactgatattgctgatgctatgattctgaatcgtctgttcagacaattgttcagcaaaggcgttattcttgttttgacttctaactgtgctccagataagctttatgaaggtggcttacaacgagaccttttcttgccatttattgacaccttgaaagtcccagggcttgggctccaattggatgcttcagaactgaacctgctttaccgggatagatacaacaccgaggtaccagattcgtatgaacatcttctactggatgtgctagatggagatagtcatttattcatgcgcagcgacgagctggttgccgcatggaacgtgctgactccgataatccatgagatcgatcagaacggagtagttcctgagctctatgaggctggggacagagggtctatcaatgcttaccatctcgctgctaaacatggggttaggggttag

SEQ ID NO: 27613 - DNA, 222 bp, Zea mays
  Peptide Sequence Number=SeqID_70988
atggtggccaacgctagctccacgctccggtacggacttcacagcagtgacaccatccgcaccccccttcgtcctggagcactgcccttgcacttagccttgcctactccagagaagtccctgtcgcaaagaacgtgggaggaataccaagtgcctggtacagggaatcagcaaccacgggagggcggtcatcctgctcaccagagttggggaacaagatag

SEQ ID NO: 27614 - DNA, 321 bp, Zea mays
  Peptide Sequence Number=SeqID_70989
atggagagtcatgatctccgggcagaatgggaatcacggcttgtgggtggttatgagatcgatggttctggttatgactatggtgctggtaagtggtattctttccgtttggaaagggttgtcagcattgcaaccactactcaggcgaagatgaagctgtggaaggagacttccaggagttccaagactatgacgagttctaggcgtgggttagcggcaacccccagtcggctgcctgtgaaggccgcgtttatctacgtttcttttccgcactttgatttactgcaagaactatatggacgtctcagacgtatgatgtaa

SEQ ID NO: 27615 - DNA, 792 bp, Zea mays
  Peptide Sequence Number=SeqID_70990
atggggtccggccccgagacctccaggtgggcaacctggtgcttcggctgcggcaagacgcccgagggaggcacaagctcacgccccccctgggaggggccattcgtcatcgccaatgttctgaagcccggaacgtacaagctgaccaacagtcaaggcgagccaaggctgaccgagccgagggactcctacgcctccgggatacggatacctcactcatcaccttctgcgataagtaactcatgtttggataaagtgattccgcggaccgaacaagtcttcacgtttggaagctcttctgccgaagcgatccttcgagccttctcgactgagtcggtgacagggccccatggacgggtgaaagtgcgcgtaagcggcaaggccgaccgaggcgagggactcccacacctccgggatacggatacctcactcatcaccttccacgagaagcaactctcgctcgcacaaacatccctaaggcacacgctacaagacactctaatcctgcaggctcgggccttgacgctggaagggggcagcagcaccctcggcatcgacgacaacttcggcaaggttcgacctagcctcggacggcgacgcggtccgaagacctccactccgaaggacgacgtcatcaccacgcccgggccatcgccgccagggtcttctccgggaatccggcccgagcaggcggcttggccggtcacctctggggcctcggccaaccatcttccaagggcgccagcccgacccgaggcctcggctgatcaactccggcgtcggtcccgctaa

SEQ ID NO: 27616 - DNA, 492 bp, Zea mays
  Peptide Sequence Number=SeqID_70991
atgtcttctcgctcccttatgcatcgcgtctttccaccttccaagcccccagatgggggatacccgccgtcttttcacctcatcgttggaggaacgcaactccgtgggagttgcttcaaggatgttcatcatcctcgctggggtgggggccgggctgagccggcgctctacctcccgcgcgggttcgtgggtcaccctctcccgcggcattcgagggagagggcgctcactggccctgcgggcggcccggacttcgacaacgcggggctggtcgacggcgggcgtcgtcacctccagcgtgtcgggctcgtcggcttggctcccggcagcccctcctgccggagggtggctgtcgcgccgtgtgcacgggaggaccaccccagatgccacgcgctgctagggcggcgttcgtgttctagggtggtcctgcctttgcaccggcatggcatcttcacgcggaggccggtgccccactcgtccgggaggatttga

SEQ ID NO: 27617 - DNA, 139 bp, Zea mays
  Peptide Sequence Number=SeqID_70992
atgacgactgacaggccacttgagctacttcacatggacctattcggcccgatagcttacataagcatcggcgtgagaaaaatcacaaacacaagagaccttaaagggattcttgagatgggctcaaaaaacaatcggc

SEQ ID NO: 27618 - DNA, 502 bp, Zea mays
  Peptide Sequence Number=SeqID_70993
cgagccagcacctgcacctctgacctcccacactccacccaggaggcccggggactaccgtcactgcaggacaccgcgcacccgcttttcttcctcccggcctcccctcgctctcgtcgtcggcgagcgagatctatcgccttcatggaaactccccctggcgtctatccgtgacatgtgtcacctccgcgtctcgctcctctataaggcgtcggcgcccctccacctcacgccctccgaggcgaccacgctcggccgctccgtgctccgtctctccaacaccgacttggaggtatgtgacacatccgacgagctactgcaccaagtggatgcctggttcaagggtaggtcgcgcgttgcgtcgcggaggtcgccgagctggtgctgctgcaatagggcaacgcggaagcggctcctcgagggcgtggcgatgaaggtggcggagatggtcaaggaggtgaagaagtccaggaaggggaggagcaatatgggaggttgctaa

SEQ ID NO: 27619 - DNA, 3213 bp, Zea mays
  Peptide Sequence Number=SeqID_70994
atgtcaacgaatcctgatgaacctaagagtcgtgcccggacagactttttgctcaacaatgaactagaggtccagaagttttgggatgagaacaaggtttttcaggctgatcctggcaatgactctccaagccctggggaaaaattctttgggaactttccatacccttacatgaatggcttgctgcatctgggtcatgccttctcattgtccaagcttgagtttggtgctgcataccacaggcttcgtggctccaatgttcttttgccctttgctttccactgcactggaatgcccatcaaggcctccgctgataagctagctagggaaatccaacaatatggatatcctccggtgtttcctgtggcagagggttctagtgctgcagtagccgatgctacccaggctgaccaggttgatgttgttgccccagataagtttaaggggaagaagtccaaggctactgcaaaggctggtgcacaaaagtaccagtgggagatcatgaagagctttggtctagatgatgaagaaattgccagatttcaagatccttatcattggttgactcacttccctccgctggcaaaggaggttctcaagaaatttggcttgggttgtgactggaggagatcattcataactactgacatgaatccatactatgatgcttttgttaagtggcagatgaggaagctgaagaaattgggcaaagttgttaaagacatgaggtacacaatctactctccgttggatggccaaccttgtgctgatcatgatagggcaacaggtgaaggtgtgcagccacaagaatacgtcttgattaaaatggaggtgatatcaccttttcctcccaagctgaagtcattggaagggaggaaggtatacttggcagctgctacactaagacccgagacaatgtatggacagacaaattgctgggtccttcctgatggaatgtatggtgcttttgagattaatgacactgatgtcttcatccttacagcaaggtctgcttttaatcttgcataccaacacctatccagggtccctgaaaaaccaacctgcttatgtgagctatctggcagtgatttgattggtttgccactgaaatctcctcttgccttcaatgaaacaatatatgctcttccaatgctcactgtcttgactgacaaaggtactggcattgtgactagtgtccctagtgattcacctgatgatttcatggcactgcaagatttagtcacaaagccagcattgagagcaaagtatggagtgaaagatgagtgggttcttccttatgagattataccaataatccacattcctgaatttggagacaagtcagcagagaaggtttgccatgatcttaagattaaaagccagaacgacaaggagaagcttgctgaagcaaaaagaatgacatatctgaagggatttactgatggaacaatgattgtaggtgagttcagtggtagaaaggttcaggaagcgaaaccgctgattaaaagtaagcttttggaagaaggcacagctgtgttgtatagtgagccggagaagaaggtcatgtctagatctggtgatgaatgtgttgttgccctcactgatcagtggtatataacttatggcgaggctgaatggaagcagaaggcagtcaaatgtttggaccacatgaatacattctcaactgaaacccgcaatggttttgaacatacgctgggctggctgaaccagtgggcttgttcacgttcatttggactcggtactcgaattccatgggatgagcagttccttgtagaatctctttctgattctaccctatacatggcttattatacagttgcacaccttttgcaaaatggtaatatgtatgggaaagaaatatcttcagtaaggccagaagaaatgacagatgaagtctgggatttcgtgttttgtgatggcccggcaccaaaaagcgagatccctgccgctctgttgaacaagatgaaacatgaatttaagtattggtatccatttgatatccgtgtgtctggtaaagaccttattcaaaaccatttgacattctgcatatacaatcatacagcacttcttcctgagcaccactggcctattggtttccgctgcaatggacatctaatgcttaactctgagaaaatgtccaagtccacagggaatttcctaactctggaagatgccataaaaaagtactcttctgatgccactagatttgcccttgctgatgctggcgatggtatggatgatgcaaattttgtcactgaaactgcaaattctgctgttatgaggcttacaaaagaaatttcatggatggaggaggttacagctgctgaatcaaaattaagaactgggccgcccactacatatgctgaccgtgtgttttcaaacgagatgaacattgcaatcaaagaaactgagaagagctacaatgctttcatgttcagagacgccctgaagtctgggttctatgacctccaattggctagagatgagtacaggctctcttgtggtgcagcaggcatgaaccgtgatctgttgtggcgatttatggatgtccagaccaggcttatcacccccatttgcccacactatgctgagcacgtgtggcagaagatcatgaagaaagaaggctttgcaataaaagctggctggccagccgcggacaccccggatcccacactgagaattgcaaataaatacctgcaggattccatagttttgatgaggaaactgcttcagaagcaagagtctggttctaagaagcctaagaagggagctgcaccggcacctccgtccgaggaaaagaagatgagcattggcctcatatatgtgaacgagcactactctggatggaaagagcagtgcttgaaggtgctgcagtccaagttcgacagccaaagccgctccttctcacccgatcaggaaatcgcagaagctctgaaggagtgccccatcgggcaggaaatgaacctgaagcaggttcagaagctgtgcatgcccttcatcaagctgaagaaaggacgaggcaagggagacttggagctgatcaagaggcagctgggccttgagcaagtcgaggtgctctccgcgtcggacgaagctgctcgcgctaaggctggtgaacatgcttcgctgctggagaagaacccaccatcacccggcgaccccatcgccatcttcctcagcaaacagagctga

SEQ ID NO: 27620 - DNA, 858 bp, Zea mays
  Peptide Sequence Number=SeqID_70995
atgcagcccggctgcacccctccaccggcggtcacccaagatggtgacctccagcttgatggtggggaaagcgagccgggctgcggcctctccccctccctcagcctcaaggattttgatcaccaaggcaggggaggggactgcagcgtgcccggctttcgcacgcgagtggcttcggagccactcgcggcgccggcgtctgccacggcagctggaagaggttcttccgccggcgcgatagccaaggcaggccacggaccgacctccaactctacggccttctgcccgtccttgccttacgagttttggcatgggcgggggcctcctggcagcagcatccgccccgaggtcagtgctgccgctgttcggccccccggagcagaagtcgtcgtcgtcgtcgccgctgctggagcaggtgacggcgcgccgttcgtcggtcttccgttgctccgcaggccttcccccatggagtggggttactcgcctgttgattatctgaaccgcttcaccaagcatgagtcgccccgtgtcaaggtgacgagtgagcacgaacaaaggcggagttggctcgaaaatgaaaacctggttggccggagcctaaccgggttgtccgtcagcggggctgatgccggagttgatcagctgaggcctcggatcgggctggcgcccttagaagatggttggccgaggccccagggggatgtttgtgcgagtgagagctgcttctcgcggaaggtgacgagtgagaaggtgatgagtgaggtatccgtatctcggaggcgtaggagtccctcggctcgatcagccttggctgcttacgtgtactccgtcgttttcaggatccgcttttcgaagtag

SEQ ID NO: 27621 - DNA, 1263 bp, Zea mays
  Peptide Sequence Number=SeqID_70996
atggcgtcatccgccgccgccgcctcctcggcttccgcgctcttccgcctcccggggtcgggccacctgcgtgcaccgccacgaagcgggtggcgagaccacaggcggtcccgtcgcgcgaccgtgcggtgctcgttcgcgccggtggagacggcccggataaaggtggtgggcgttggcggaggcggcaacaacgccgtcaaccgcatgatcggcagcggcctccagggcatcgaattttatgctataaacaccgattcccaagcccttattaattcacaagcgcaatatcctctgcaaattggagagcagttgacccgcggcttaggtgccggtggaaatccgaatttgggagagcaggctgctgaggaatcaagagaaaccatagccactgccctgagggattcagatcttgtcttcataacagctgggatgggagggggtactggatctggtgctgctccagttgttgcccagatatcaaaggaagctggttatcttactgttggtgttgtcacctatccattcagtttcgagggcccttcagccgagagccacttcttcctagaagaccttcggcgacgaagcatattcccaacagtggcattggaagcactagagaagctggaaaagagtgtagacacacttattgtgattccaaatgataagttattagatgttgcggatgaaaacatgcccttgcaagatgcatttctccttgcagatgatgtccttcgtcagggtgttcaaggaatatcagacatcatcacaataccgggacttgtcaatgttgattttgctgatgtaaaagctgtcatgaaaaactctggaactgccatgctcggtgttggtgtttcttccagcaaaaatcgggcccaagaagctgctgaacaggcaacacttgctcctttgattggatcatccatcgaggcagctactggcgttgtgtataatattactggtgggaaggacatcactttgcaagaagtgaacaaggtgtcccagattgtgacaagcctagctgacccatctgcgaacataattttcggtgccgttgttgatgaccgttacactggtgagatacatgtgacaatcattgcgacaggatttccacagtccttccagaaatcccttttggcggatccaaagggagcacggatagtggaatccaaagagaaagcagcaaccctcgcccataaagcagcagctgctgcagttcaaccggtccctgcttctgcttggtctcgaagactcttctcctga

SEQ ID NO: 27622 - DNA, 462 bp, Zea mays
  Peptide Sequence Number=SeqID_70997
atggaagaagggtcggcgaccgttggggaagggagtgcccgcgaggccacggcggctgctggccgggtagggaggccgattgccgacgagcgggacgccatcgggaaaggcccttgccggatccactgccgcagggggaggggtggcggcggatggccgcgccatggtgaggcagacgacgacaaagggagctggggaagagagagggcgcgagggagggagagccgacggccctggctgctgggggaagtacaggcggggctcgccggcgagcggggagaaagcgccgcgccgctgctggtggcaggcgcgcgggccatggggccgcgccgacatggggagcggcgacgtcgcgagcttggtggccacgagcgggtcagcggccaaacgaagagagagccgatgccccgacggctaggaggagctccggttgggctcgtcggcgggtgcaccgtcgtgtga

SEQ ID NO: 27623 - DNA, 1878 bp, Zea mays
  Peptide Sequence Number=SeqID_70998
atggcgaggctcccgctggccgcctgcgccgtcgccgccgccttctacctgtgcctccaccttgcgtcgtcgtcctcttccgctcctcgtcttgcgcctgccccgagcgacggcggccgccgtgcaggcaggaccgcctaccacttccagccggccaagaactggcagaatgggccgatgtactacaacggcatgtaccatctcttctaccagtacaacccgcacggcgcgctctggggcgttggcaacctctcctggggccactccgtttccggcgacctcgtgaactgggccgccctggacacggcgctggacccgacgtcgcccttcgacgccaacggctgctggtgcagaacgtggcgttccccagggacccggcggacccgctccttcgccggtgggacaagcccgggctacaaccccgtcatcccgctccccgtccgacgtcccgggcggacaagttccgggacccttcgacggcgtggcttgggccgcgacgggctgtggcgcgtcgcggtgtccgccgaggtccgcggcgtggcgtccacgctcgtgtaccggagcgcggacttcctccgctgggagcgcgcccccgccgccgcgccgctgcacgcctcgcgcgccgcgggtatggtggagtgcccggacctgttcccggtgaaggaggagggtgacgacggcgacggccaagggctcgacgcgtcggcgagcggcgccgggctgcggcacgtgctgaagctcagcgtgatggacacgctccaggactactacatggtggggcggtacgacgacgcggcggacgcgttcgtgccggcggagcccgagcgcggggacgacgtgcgcggctggcggcggctggactacggccacgtgtacgcgtccaagaccttcttcgacgcgcgcgggagccggcgcgtgctgtgggcgtgggccaacgagtccgacagccaggccgacgacgtcgccaagtatagatgcccaaacggcccggcccgaccggcccgcgtgccgcagccacggcccaagcacggcacgccggcctggtccccgccggcgcgcatgatttctttcttgctctcctcggcggtccgacccacacccactcattcctcactggcttggctggcttgtgtgacgcagacgttcccgcggaagctgtggctggacgaggacgggaagcagctgcggcagtggccggtggaggagatcgaaacgctgcggaggaagcgcgtcgtcctgcgccgcggcacggcgctggccaccggaggcatgaacgagatcgtcggcgtcgcgggctcgcaggcggacgtggaggtcgcgttcaaggtctcgagcctagcgggggccgaggcactggaccccaactggctgctggacccgcagaagctgtgcggggagaagggcgcctcggtgcccggcggcgtcgggccgttcgggctcatcgtgatggcctccagcgacctgcgcgagcacaccgctgtcttcttccgcgcgttcaggtaccatggcaggtacaagcttctcatgtgcactgacctgacaaggtcgtccacgagggcaggcgtgtacaagccgccatacggaggattcgtggacgtcgacgttgaggagcacgagaccatcaatttgagaaccctgattgatcactcggtggtggagagcttcggagctgacgggcggatgtgcatcacggctagagtgtaccctgagcacgcggagacgagcaacaaccacatgttcgtgttcaacaatggcacaggcacggtggaggtgtacaagctcgaggcatgggagctcgcggcggcgaccgtaaattccgttgggggcaacgacagcttggttatttctaaatctaatgaccaaagtgaatcctattaa

SEQ ID NO: 27624 - DNA, 618 bp, Zea mays
  Peptide Sequence Number=SeqID_70999
atggaggcgctgctcccgaggtccggcggcgtcatctcgccaaagatcagcacgatcctgcagtcgcacgtgtacccgcggttcggccgcgtgctgcgcgcgctcgcccgggtcaagtcggcgctcctcgacgccctcggcaagaccaagtggggcgcgcggcggcggaagcagcacgcgccctccatcgcccgcggccgccgctcgaagaagaggaagagcagcaagggcgaattttcgaagaagccgccgcacctcacctggtccggcggcctgtcgccgcttcgaggcgcggccgtggatgcgctggacgtggactaccacgtgtacccgtcctgtgactatgagtcggtgtggaacgcggtcgtcgtgcccgcggcgaccggtgagtactgtgggtacctgcgctggctcgaggaggagatgccggacgaggtgggggtcgtggaggaggaggaggaggaggaggtggaggaagacgacggcgtcgcctctggcggcgggaacgagatcgaccggctagcggagcagttcatcgcgaggtgtcgtgccaacttcttgctggagaagcaggagtcgtacgaccggcgtcaggagatgatcgccaggagcctctga

SEQ ID NO: 27625 - DNA, 441 bp, Zea mays
  Peptide Sequence Number=SeqID_71000
atggacggaggagagccagatggcaacgggtacgcccgctgggtagtggttattaggctgagtccagtgcaccgtctccctctcgcccctgccacgtcagctctcgcctccactctcgcccctgctgctccagtgcacaggctgcagcaggctacagcctcaggctatagccacgaggggcgtatggaggtatctggaaagaagcttgacttccgtccgcagcaggtggaggaggggcatacggacgtaccgggaatgaggcttgaattccggcttgggaagttggaggttgaccatatgaagacggtggatattgatacaaatgatagggataagggtatggtggtggacgcgcagccggaaatagtgcacgggggagtgaggctgaaacatcggagcgacgatgtagtgaagaagactcatctaacggaagggttgtag

SEQ ID NO: 27626 - DNA, 783 bp, Zea mays
  Peptide Sequence Number=SeqID_71001
atggctaccacccagggggtcgcccccttttttaaaggcgactctcctcactcgcgtcctcaggcatcacggactaagtcttcaccaacgcgctccaaggtccccccctacgacaccggggctgggtcccacacgacatgcaagctggcctgggacagaagcagccagaccgccgcgcgcggagtatgtaactgcccggcggttacaagcacccctccactttcgcccaaaccaacgggtgaaagggcggacccagcatgcaggcggcatgcaaccgcaccacgaggatgcaccccttcgacttcgacgcgtccagcatggagtcccagggccacacgtcatgtaactggcgcgccggttactacgtgcgaaaaactgcaccgccccttgcatcagtaccgcgccttctcgactacggagccgatgccgcgactcgaggcaaccctgcgcatggcccaactgtgccaaaccgagctcatcggtcatgggtcagtcagccgcgggagaaggggcgacagacgatatggccaaaagtgggccgacagtaatggcggcggctggcgagcggaagcggcggtcaaaccgtctgcaggctcacgtcccctcctgggtcagcaggagagccctctcccacttcgtgaagacgacgtgcccgtgttccgttcctcgaacggctcacgcaacagctgccccgcgaaccacacgtcccgtcgcattaactccgcgacagggcaggcgacacctttggcaggcgaagcgggcgatgcttcacctccgccataa

SEQ ID NO: 27627 - DNA, 1356 bp, Zea mays
  Peptide Sequence Number=SeqID_71002
atggggagcgcccgcgttgtcttcgtctcgttgtgggaggagcgcaacctcgtggaggttggtacctttcagccatcgctcggcttcaaggattttcatcaggcagcctggctgcatcccctcaccaatgcttcaaggatcttcatcatccttgctgaggaggagggtgaggtgagccggggcctgccttcgcgtgggctgacgtcccgcttcttcctccagcttctgggggtggaaaccatcctccagctctacggaggaggcgccctccagccgtgccggggaaggcgaactgttgctgctcagccagggtgcaacattccgtcctttgtccgggcgacggtggccagccgcaccgggggggtctcacaacacgtcgtacgccgcgagggcggtactcgtgttccgggatggtcccattctcgttttcgtggcgaggacgggagtgaggacttgccggtgcgctttggggcgcccggcgcccgctggtgcggtgttggtgggcagctggagaaagctttctccgccgtcgagaccgtcagcgccacccgcgggccgacctccgactctttggctttaatgtctggttctcgtccctcgagtggggacacgaatgagagccttccagcggtagcgtccgccctgggaccatcgctgctgctgcagaggtcgccggcgagtcacccggagtttgtcgtcccacaggctctccgatgtggaggttgttcatacccgcgggagtggaaccagagttccgtttgtaatggcaccttgagtgccggtgtctgttcattgtggctgtcggggcctgaacatctgggtattttgggcgagtccctcggctcggtcggccttgccactcaaggcttctcttgctcagttaaagagaaccctcggccgctctgcgatgagccggagccggaggctgcggtgcgcagtgttgacatcttccttcgaggtggagatccttcgaccgtgttgctgtccgaggccgggtcggattccgccgaaggtggagttgatgccgagggtgcagctgctcctcctactgatgacttgtttatcgatagcagaatcgctcatccgagcgagagttacttattgcggaagttgatgagtgaggattctgttatcgatatagtcgagaaggcacgaaaaatcgtttcggcagaaaagttttcgagcgttaagacttgttcggtcagcagaatcgcttatccgagcgtgagttacttatcgcagaaggtgatgagtgaggatcccactattgaagtagtcgaaaagcgcgaaagacgttctgacagaaagactttttccgaggaaaattttgacgcagagggggttccccccttctag

SEQ ID NO: 27628 - DNA, 2220 bp, Zea mays
  Peptide Sequence Number=SeqID_71003
atggtcgagagcttcctattgcggcgccttcccatcgcctcctacgcccagccgcaaccgcagccggcggcagcgcccggcttcgacttcctcagtgaggtctacggcgccgcctcgttcgccgggcccaatgctggtgactatggcggcgagatggggttccttgacatcgtcgagcccaaggcagcatcagcgacactggtggacggcgccacgggcctcggtgcctgcaaggtggagcccggcctggcgaagagcggcggcgcgttcggcactggcgctggtgccgcgccgccggcggccctggcgtccaagaagaagagggtcgaggggatgttgtccaagaacctgatggtcgagcatcgccgccgcaagcgcctcaacgaccgcctccatgctacggagatgaagggcaagatcggcgccatctcgtcgcgcggcgtgctacggttccggccggggggccacgccggggccgggcgagcgccggcagccgagccggacgaggcgtcgcgggagggctgctgggcgcagttgcctttcgagcttctgcgtatggtgctggtcagggtcgaggaccaggagccacggtggccggcccgcagcgccatcgtggcgtgcgcctgcgtctgccgctgctggagggccgccgtcaagatcgtgcgcgtgccggaggcttctgggaaactcaccttccccatctctcaagcaggacctgccggagaggatcaagctgctgcaggaagagatcgggcagtagcaggaggaggcgccgggcatgctcagcgttttccgggacctcaaccccgacgagatggtggccaggaacaccccaagtccgacgtggtgaaggagggcggcgacacccgggtggagatctactatgccgcgtgcacttcaacggtgatggctcgtgggatatctggaggagcactgttctcccccacgctgcttcgcggcgacgtctctggtcgcgcgctccagaagaaatcaccggctccgcttcgcggcagttgcaacgaccagggccagcagcgagcaggcgccgtccgcctcggagcggcgcggcgtgcggtcagcagggctgtccgggctagcagcagcaggcatctgggccccgtgtgggcgctcgtctccgaggaggccgcctccggcgagcgggcggcggagggcgagggagaggacgtcgagctctattctcctgcgcgctctctgtcggctcgaagtcgacgctctggagctgcctttgtcctgggccgtctttacgatcaaactccttctcccccccccttgcgactccgactccttccccggatgggtggccgacgcggatctcgcgaccccgacgtctcttcaccgaccgctcccggccaccgccgcgggctgcctctgtcgttgtccgtcggcgagctccccgtgctcctcggcaagtcgccgctccaggcctacgaggccttcttccgcagcttcgatgacttcggcaagccctacgggctgctctccgtcgcgctccccttctctctcacgccagatgaaggggactactgttgcctccgctacgcgctcttgtcgccgaagccaacgtccgcgccagacggcggaaagttccaggtcgacttctcttcctctagacggctcttggcaacgggggcgagaaggggcgacgcgacggcggatctggcggcgcaaggccgattccgagccggtggaggtcggcgccgacgacgaccacgtcctgttgctgacgaggctcgcttagatccagagttcatcggttcgaatcttgttgttgcggcccggatcttgagctcatcagcacatttgatcatggcatcctcgaaagaagataacatgaaggctttgctgaaagtccttgtggactgtgccgaggatgccacaaaaacattgggtggtttagttgatcatgctttagatcacatgcatgatgaagagatattagctagaaccttgtatgccatcaaagataagctagaattgctgcaacaagatgccttagaggcaaaagtgcaagcatttccagaaattgttaagtacgatggcgatgacataagtgttgagcctacatctccatcgacccctccaacagttactgaaccatctgttgatgaagaggagttctactgccctgatgtgtctgatgaatggtacttcagcgactcagataggtcgactcgtaacagctactggaatatatattag

SEQ ID NO: 27629 - DNA, 540 bp, Zea mays
  Peptide Sequence Number=SeqID_71004
atgggagggaagggggtggtgcccgacgcaattgccctcctgcgcatatcacttcctcccagtcgccttcttccctcgctcttccctccaccattctgcagcttgccgctggagcccagcccgcccatagccttgtgcccctctccgcctccggtcgctggagcccagccaggtcacggcctcgtgccccactccgcctccgatagggaccacaacggcaggaagacgaagaccccaacgcctccgcctgcaaacccatctgatttcgattcgattcgcctgtggtgcttacaacggagggaatggcgaacggcgacggtgcggcggcgacggggacctgtcgaagcacatcggctgcggcgccacaaccgggcgattctggtcaaggccgaccaatccgcggcacgtaggctccgcgagaaggcggcggaggcggagcgcgaggcgcgacacgggccgagctggaggagcggctggcaggggcagggaggcgagcgactagggcaagagggaaaagggcgaggagccaaggagggatag

SEQ ID NO: 27630 - DNA, 471 bp, Zea mays
  Peptide Sequence Number=SeqID_71005
atgggcaagagtaagaaaggtggtagttcttcgcatcactctggcgacaaacgcaagcgcgagctgactcctccctcggaggacttcggcgactcggagtactcggaggaggagttctcctccgagtccgagggctttccggctcctgcctctcccccggcgtcgtctgatgattcagatgactcccagggaatcgccgcgaaggtatggacctacatttgggccgtcgagtgcgccgggctcaagggttcggatgagtcggagtactcctcggacgaggagaactccttggacacgtccgaggagggcggcggcgacggcgatggcagtgacggcgacggaggcgacggtgacggcagcggtgacggcggcgaaggcgacggtgacggcggcggcaagggtggcagcggcgacggcggcgacgacagcaagggcagcagcagcaagggcagcagcaaggccagtggctag

SEQ ID NO: 27631 - DNA, 231 bp, Zea mays
  Peptide Sequence Number=SeqID_71006
atggcgaactgctactgcctgccacccgaggcaggggttgttgtcgcgctgctggtgcagtggtcgctggcgagccgcttggagcttgttatcttgcaacccctccggtgtggagggtttgagacggctcttaacgagtccgttaagaactgcaaggcgcttgccgaggcggctgggcagaaggaggccgactgcgtggccatgtccgaggctatctcggctttctgctag

SEQ ID NO: 27632 - DNA, 237 bp, Zea mays
  Peptide Sequence Number=SeqID_71007
atggccaatagatcatgcatatggctgtgcaaaacactgttttgcattgtagactgcactgtttacaaagtggagtttgaaatgacagataaggatgaggaaactgccaacgcagagaaggtaaaagaggcgcacaagagggttatggtcgccaaccatccagatgctggtggaagtcattaccttgcgtcaaagattaatgaggcgaaggatgtgttgtcaggaaaacaaaaggag

SEQ ID NO: 27633 - DNA, 632 bp, Zea mays
  Peptide Sequence Number=SeqID_71008
atgcccggcgaggaggcccagaacgctccacgccgcaagcacagaaaatacctggacgtccaggcgaccgagacggcaactgccaggaccaagagatttatgggggcgcgcagggcggtagcgccggaaatctggttctccgttttggtcggcgcccacgtcccggaaatacgcgtacgcgtatacgtagcggcccagccgtcagggacagtgaaagccgcctcaggccactcgggctccgcacccactactgatcaggggttcgaaggctggccccccaaatggttcgacagccgcctcagaacacgcagagcgagggatgactctgggtacgtccgatacatggccgaggctcgggctacgctcccgagaggctcgggggctgctctcgcaaacccggctccggccaaaccgttgacagcgtcaacatatcagcccgagaactcggaagctgaccatgcacccggggtgaggctgacagcagccaagtccagcctcaggcgccataggaagctccgcctcgcccgaccccagggctcggactccaccttcgacttcgaaagacgcctcgacctcggaggagtcaccgcctcgcccgacctcgggctcggatcgaccacgccgcagggggg

SEQ ID NO: 27634 - DNA, 795 bp, Zea mays
  Peptide Sequence Number=SeqID_71009
atggagagggattactcgtccacggacggcgggggctgcgagatgcccgggaagaaggcgaggaagccctacaccatcaccaagccccgcgagcggtggagcaccgaggagcacgcccgcttcgtcgacgcgctgctcatgtttggacgcgactggaagaagatcgaggagcatgtcggcaccaagacgacagtccagatacggagccacgcgcagaagtacttcctcaaggtccagaagcttgggctggccgccgggctgccgccgatgtacccgaggcgccacttcgccatacagcagcagagctcggtggccggtggtagcagcgcggccgccatgccgctgctgcacggccggcaacctacttgcgcgccggtcggcatgccaggtggcaaccgcttcatcggggcgccgagcttgagcggcaccagcatagactgggctggcggcggtggcggcggcggcggcagcgcaagtgaagcgtcggcgatgggcgtcgtggaggaccaacagcagatcgagctcccgttgtcacccgaggacatgccgtttgcgcatgtgtacaggttcgtcggcgacatgttcgacgcggacgcgccggtcccggtggaagcccacctgcagaagctgaaggagatggacgacatcacagccaagacagtcctgctggtgctgctgaacctcgagaacaacctgttggcgccccagttcgagcctgtggtaaaattcgtgttgtctgttcagatggaacctacgagattatccgatacaagcaaggatccacgtctgaactga

SEQ ID NO: 27635 - DNA, 387 bp, Zea mays
  Peptide Sequence Number=SeqID_71010
atgtctgaaatagtcgacttgaagaagctctttgctccatcaaccattgcagtggtacactggtttgatgacttgttagctctatttcaatatcatgattattttttgcgctgcaacctgataatagttgatgcagagcttgcagtacataatgcgctcgaccacattaatgttgtcgttaagagtcgaacgatgggtttgtgttcacaactgaaaccattggattttggttttgaaatcctcaaggaggaattaaccgagagcttgctgccgcaaagaaggagaatagctgatctgttgatgtgcttggccttaagactgcttttgcaaccttcatgggtaaggcaaattcccatcaacaagaaaaacaagaaagatagctactaa

SEQ ID NO: 27636 - DNA, 450 bp, Zea mays
  Peptide Sequence Number=SeqID_71011
atggccgcccatcccgccgtgcccgccccctacccccaccaaccgccggagcctacctcgcctagccgctcaagcggggaatccacctgtcggcgccgagagcgaggagcgtggatccaggagcgggcaggccgagtgggcgggaggggcgaggacctgcacctctgcatcgacgacagccaggcgaggtggcacgcgccgcccgagcatgctcaccctgcagttcccgtggggtccccgctgctcgcacgcctgtcggtgcgtgggctcaacctcagggccgtcaacaacgccatggttgccatgctcgaggtcatccacctccactccgtcttcctcaccgacgcctcgctgcgccggatggtcaccgtctgcccctgcctccggaaccttgacctccgctactgctgtcgcctggccacgtcaacttcactaatgtcgggggcgtga

SEQ ID NO: 27637 - DNA, 285 bp, Zea mays
  Peptide Sequence Number=SeqID_71012
atggaacccacccgcgccgtgtccgcgatggaacccacccgtggatctcgcccacgatgcacgcctccaccgagtcgccgatggaaggtgccgcggatcccggcacacccgctcgcccggatctcgccgtgtccgcgcatggatcccgcccgctcgcccggtctccgcacgctctcgtggtggaggcgcccgctcggccggatgctcatgaatactgtccaagctcgcgaggcctccgcccgcctcccccaccgcgacagcatatgcgttaacgaaacaccttaa

SEQ ID NO: 27638 - DNA, 441 bp, Zea mays
  Peptide Sequence Number=SeqID_71013
atggctagaattcgtgttcggacaccaagtatcgcggcatgccgagggcaggctcgccacgacttcgatcaccgaaaatctgtgacggaacctcccaagtcattaggcccacctacaattgtccttgtccaatggacctcagataaccctgcaggtgcacctggccacttgacaagttcgatatctgtattctttaccttgcccaagagtgtttcacccgtcatgcagatattacaacacatcggaggcaccaccttggaacaaaagcaacaaaaatttgctgcttcttcacctaaaacaacatgggacaacgccctcagtacgaagtgtactttcgcaagtcttacccgtcaaaagaaaaagactctcaaggatatgctggctttttgggagacaaggaattctctaagtccagaagaaaaagaaaaagagaaactatga

SEQ ID NO: 27639 - DNA, 486 bp, Zea mays
  Peptide Sequence Number=SeqID_71014
atgatgatcagcccaaggtattcgaagataaatgttttcagttatttgaaatggtcatataacacaattgatgtgaattatacatatctttatgaagcagtggttgatattttgatgtgcaaacaagctgctgcttcaataatgcggaaggttgatcgacccccaaccaatctgaagcgtttaatcattgagtcaagtcaagaatgtttcagtgttgacattccgcgctcggctgacatgggcgaccctacaaatgtggatgcagccgatgctaaaaagattcctatgcctaatgtggatggtgatgatgactttgagccaccaaaaaagaagtgcaatatcttaatggatgccccaaacaagacgcagaagctagaccccagagacatgactcttcgtattggtccagacaaagaactcaaaatcaccaaacagactatccatcagatatggtcttccaaatttgggtggtggaaagccccttaa

SEQ ID NO: 27640 - DNA, 453 bp, Zea mays
  Peptide Sequence Number=SeqID_71015
atggatgaactattggagatgcttgggcgtttagagccagatataggatgtgaagatgctggtggtgcaagtactggagagggcaaccatggcgaagaggatgctgttggaaacgctgaaggtgaacatgtatcgcaatgtgataacgaggagcatgtggtaggacattcacgacaacagccacttctatgcggtgccaccgctgcaccacctctgtccctgtgcagcagcagccatgctgcctctgccctccgcagcagcagggattataataatccgtatcttccaatcaattattctgccatggatgatacattacagcctgctgttggagctgacgaaaggaaaggggaggctcaaggcaatgttcttcttgcatcaattgagaatatgcaatatgctgttactgtagatgttcttcatactgtaagtcaaattgtgaagacgatttaa

SEQ ID NO: 27641 - DNA, 981 bp, Zea mays
  Peptide Sequence Number=SeqID_71016
atggaggaggggctccctccagggttccggttccacccgacggacgaggagctcatcacctactacctcacccgcaaggtgtccgacttcaccttctccacgcgcgccatcgccgacgtcgacctcaacaagtgcgagccatgggacctcccaggcaaggctagcatgggcgagaaagagtggtacttcttcagcatgcgcgacaggaagtacccgacggggatccggacgaaccgcgccaccgactcgggctactggaagacgacgggcaaggacaaggagatcttccacggcggcgcgctcgtggggatgaagaagacgctggtcttctaccggggccgggcgcccaagggccagaagacgagctgggtcatgcacgagtacaggctgcagaccaagttcccctacaagcccagcaaggacgagtgggtggtgtgcagggtgttcaagaagtgccaggtcgtcaaggtgaggccgccgatgcaggacgacgacgcatccctatccccgtgccacgaccacgacgcatccctgtccctaagtgagctcgacgtctcctccatcctcggaggcctggcctccgccgccgcggcgcacgcatcgtccgcctcgccgcaccaccagggatccgccgccgagagcttcgccgccgcccataggatggacatgagcgcgtacatgagctggatggcggccgccaacccgggcgccgcggccgccatgcttccctgggccacggcgccgccgccgggattgtcgtcgttcggcaatgtcttcgcgccgcccagccagatgttgcagaggccgcttccgttcgccgggtgcagccagccgcgggacctcggtggcgtcgtcgcaagcggtgagcatgccatgttcgggacctccgtgatgaaggctgggacgatggagtatgatcagcagcaggcgccgccggagcagcagctgggagtggacgaatccacatggagagcattctga

SEQ ID NO: 27642 - DNA, 753 bp, Zea mays
  Peptide Sequence Number=SeqID_71017
atggacagaatcacagctctgttagcgttgttttatcaagttcttctagcagttgaagtagtgttttcttggcagatgttcgcctttaggacattgctgcgaggggaatcggatatgccacaggctgcatgttgttggagtttctatgtatccccatatcaaatttgtttttccctaatcagggaactcaattgttgtactgctcatctctttcgagaagatcacactgtcgcatttctaatgtttggatctttttgcatagtgcgagtaatagcaggagctcttccgaaaggccttcacatgttaatcctatcgaagaataacatatcaattattgaacgcctcagagaattgacacgattgcgcttgttggatatcaactataataggatatctagaattggccatgatcatctgttaggattggcctcatgttcctctttgaaggagttgtatctggtcggtaacaagatcagtgaggtagatggtcttcaccgacttctgaagctcaaggttctggacttgtgccacattcagtcttctgtagccactatacttggggttggtgcagaggatgctaggaaaatactcaataattatggtacatgtccaattctaagtatggttatgagtgcattggttaatgaaatgtatgacattaaacggtggctgcgtggtgttccatcgtttcgccttgagccattatttaggcgaagagttccacaattgcatactgcacttgaacatatatag

SEQ ID NO: 27643 - DNA, 355 bp, Zea mays
  Peptide Sequence Number=SeqID_71018
atgacgacgacagttctcggccccttacggaagcaaggagacgcaggatctggccacctttcgccggcaacagttgggcgccgcataggtaaccgcctacccccgaggcaaggcagtaccccgtcgcccagctctctgaagaagctgagcctccggtcgctcaagcggtccctggacctcttcgccccggcgcacgccctcctcttcacgcccgacgccgagagcaagcggattcgtactgggtgcaaggtgagtgcggagtacggtgcggtgaaggacctcacgccggagcaggggcgcggtgggcagggcaagggtcctgcgccgccatcttcaacagctttggcattgccag

SEQ ID NO: 27644 - DNA, 741 bp, Zea mays
  Peptide Sequence Number=SeqID_71019
atggcggctctcggcccccttacggaagcaagaggacgtcagcaaggactcaacagccccgatagctgtccttccgccaggctccagcgctcctccgatagccacgatatcacaccaactgggtgccaaaacctctccggctgccacgacagcctggtaacccccatcagcacaaagctgcaaaggcctgatgggcgcaattcagttcaaggctccgtccactcaagggacacgatctcgcctcgcccgagcccagcctcgggcaaagacagccgacccaggaggattcacgtctcgcccgagggttccctcaagcaacaggcacaccttcgactcgcccgaggcccagctcgggcaggcttcgcggagaagcaaccttggccagatcgcctcgccagccgaccggatcgcaggagcattcaatgcaaggatcgcctgacaccttatcctgacgcacgctcctcagtcgacaaggccgaagaagctccgcctcacccgaccccagggctcggactcaacctcgacaccggaagacggactccacctcgcccgaccccagggctcggactccacctcgacctcggaagacggactccgcctcgcccgaccccagggctcggactcagcctcgacctcggacgacggtctccgcctcgcccgaccccagggctcggactcagcctcgacctcggaagaatcaccgcctcgcccgaccttgggctcggaccgaccacgctatag

SEQ ID NO: 27645 - DNA, 99 bp, Zea mays
  Peptide Sequence Number=SeqID_71020
atggctgatctccctactggttgcaagcatgtgggctacaagtggatgtttaagaggaagaggagacctgatgatactattaaaaagtacaagggatag

SEQ ID NO: 27646 - DNA, 543 bp, Zea mays
  Peptide Sequence Number=SeqID_71021
atggaggcccaggcccacgcgtcatgcaaccggcgcgtcggatgcttcgtgcaagcaactgcaccgccaattgcgccactaccgcgcctcctcgactgcggaaccgataccgcgactcgaggcgacccagcgcacgacccagcagcgccagcctggcgcgacggtcaatgcggccaaaaatggaccggcggcgcctctggcaggagaagcgagcgacgcttcgccttcgccataatgaccgcgtcaaaaaagggaccgggaaagggggataccccaaaaaggatccttccccgtgaaggaactaggctccgagcctccctactgattagaggttcgaaggctggcccctcggaagggttcaacagccgccttagagcacgtgggctccacacccactactggtcagaggttcgaaggccggcccctcggaagggttcaacggccgcctcaggctactcgggctccgcgcccactactgatcaggggttcgaaggctggcccccgaagggttcacaaccgcctcagacacggagcgagggatga

SEQ ID NO: 27647 - DNA, 270 bp, Zea mays
  Peptide Sequence Number=SeqID_71022
atggcgtccctctccccagcaacatcttccccgtggacgccccctgccccgagctcctcccatggcgtcctgctccatgtcgttgaagacaagcagccgcattgtcagtctgcgcagccaccgtccagctcctccaggacgcaggaccttacctccacgctgctggccacagccttaatcaatctcgctcctggcatcgcttcacaatttcagccatcgaccaaaagaagcaaacgtccaaacagtccaagtggaaaagattttctgtag

SEQ ID NO: 27648 - DNA, 156 bp, Zea mays
  Peptide Sequence Number=SeqID_71023
atggggaagcctgtcccatcactcctcatgatcctcctcagccgagtgaccgcacttgtacccaccaaaatcggaatgggagaccacgtctcaggtcgcgtgaggagggcaatctgctgccaggttcactcagaaaaagacctactggatatttag

SEQ ID NO: 27649 - DNA, 270 bp, Zea mays
  Peptide Sequence Number=SeqID_71024
atggcgtccctctccccagcaacatcttccccgtggacgccccctgctccgagctcctcccatggcgccctgctccatgtcgttgaagacaagcagccgcattgtcagtctgcgcaaccaccgtccagctcctccaggacgcaggaccttacctccacgctgctggccacagccttaatcaatctcgctcctggcatcgcttcacaatttcagccatcgaccaaaaaaagcagacgtccaaacagtccaagtgaaaaagattttctgtag

SEQ ID NO: 27650 - DNA, 1209 bp, Zea mays
  Peptide Sequence Number=SeqID_71025
atggagacggttgatggagctggttacgcgacgcctccccagtacgcggtgcagctgtttgagaagcaccgagtgccccgctgtagggacactatcgaggtgattgctcttcacgggctgaccaccttctgtggttttcaccccttagagctgtctactcatcccattggcttgttccctgctaaaaaggagaacgacccaatgtggaaagacagagtggagcatgccaaggatatctgggctctttacccagggcagactgcgcacttgacggttcgatgcatggatgctctatatcgtctgcaggtgaggcgaggagaggcaatgtctcatctgatggcattattcgaggctaccaagattaccttggacaacagagaggaacttgtggtagacctgtccactgagatggtggaaaaggatctacaagtggaacaaatgtctaacgagattcaggagctggaggagctaatgggaaccggggagaataccattgaggttctcgaggatcagctcatcaacactcagcagcaactcacggaagctaaccaacatttggatatgcaccaccaggagatccaggacatggaggccaacgagggtgtcgacatcgagggaggagaggagccggaacctgcctccagtttggacactgctggctcagggagacccccttcccccgagtcgagtgttgcctcgaagatatttgttttaccctttcgaatctttcgccacatggcaggaagagcgtgtcatggacagaatgaacgcattcctccgccactgcctcctactctgcaagagctgatggctcagcagaatgagatcttgcgacagttggctcagcgtcagccaccacctcagcattatggtggtggtgatcatcagcgtcacccagcagcagccacttatcaggagtttctcggcacgctgcgacctttgttcactcgggcagaggatccacttgatgcggatgccttcaatgacctatgccagtatgccggatatcatgcagacaccgatgagaagaagagggacaggttcaggaggaggctcagcactaagctccgtgaccgtctcaacactgtcagggccaacagttacaatgagttagttaacatggccatatctcaggaggactgcatcacagcccgtcaggcagaaaagaagaggaaggcccctgtggcaggaccttcagctcagccatag

SEQ ID NO: 27651 - DNA, 378 bp, Zea mays
  Peptide Sequence Number=SeqID_71026
atgtccggtgcaccagaggactccaactcaaactcgtcgtcttcgggaaattccagaggcaactccgctataattcaccggactgtccggtatacaccggacagtgtccggtactccaaggaagagcggcctcaggaactcgccagcttcgggaatctgcttcagctgctccgctataattcaccggactgtccggtgtatctgcggggcaacggctatttcggcgccaacggctacctgcagcgcatttattgcgcgccagcgtgcgcagaggtcaggcacgcccatactggcgcaccggacagtctacattacatgtccggtgcgccaccggacatccaggcgggcccagaagaactttgtgttccaagtgattga

SEQ ID NO: 27652 - DNA, 285 bp, Zea mays
  Peptide Sequence Number=SeqID_71027
atggggaagcctgtcccatcactcctcatgctcctcctcagccgagtcatacatggtatcaaacatttagcaatcaacgacttttgccaagtcatcacatttccacttgttactcaatgtagcagcatggatcaagcagtctcattagctgcgagaagcagacgattcgaatcgagtttcaaccttgcaagtgaccgcacttgtacccaccataatcggaatgggagaccacgtctcaggtcgcgtgaggagggcaatctgctgccaggttcactcaggtactag

SEQ ID NO: 27653 - DNA, 339 bp, Zea mays
  Peptide Sequence Number=SeqID_71028
atggctcaccggagttgctccggcccgcccgaggcttcctcaccgtcgttctcccctctttgcctgtggattcatggccccttccccgccattgagttcgccgtggcgccctctttctctctacccacctccggcgaccctggagccaccctagctcgcgccagcctcaactccagcgacctcacagccacggagaggagcggcgccgcctgcagccgtctgtttccccctgacaacgagcagtctgaggttcctgagtgtgttgttggagacctccctgagcaaccacttggtgaaggcaagtgtcctctgacccattatatcctacatactctataa

SEQ ID NO: 27654 - DNA, 314 bp, Zea mays
  Peptide Sequence Number=SeqID_71029
ccagggctcccagagacagcaacagcctgagggtcagacccaagagcggccttgccagagtcagtttcctctgcatcagcagcagtaccatcagatcacccatcatggaggatttcaataccagcgtgggagcaaccaggcagcctgtcttcctgccccagcaaccaacaagagcaatcaagcagcgccagctcaaggaggaagtcatgcatgtttccactgtggggaacaaggccattgggcaaatcattgcccaaagaaagcagctcagcagcagccagctcctaatgccccagtcagacagaatgctgtag

SEQ ID NO: 27655 - DNA, 465 bp, Zea mays
  Peptide Sequence Number=SeqID_71030
atgcatgacttcctccttgagctggcgctgcttgattgctcttgttggttgctggggcaggaagacaggctgcctggttgctctgacgctggtattgatttcctccttgctggttgttctgatggtactgctgctgctgctgaggaaactgcctctggtactgctgctattggttctgacgctgatgctggtgctggttctggtggggaaggtgtggttcatcagttgatagtggaggggatcaaccaatcctctcaagaagcgggcgagaaactcctccttcctcactatcatcagtccctcgggcacatggtagcgacgaaagttatccctgaactcctcccaagtgatagcttcagggttggcatgggtggcgaggtacttgttgacaatgacgatgaggaaaccaaggaagacgaggctactaaagaagtggagtccaaagaggaggtttctgaagagtag

SEQ ID NO: 27656 - DNA, 153 bp, Zea mays
  Peptide Sequence Number=SeqID_71031
atgcccccgcatcgtctgactgtctcctacctgctcgcgctcgaatccgcggagcttggagtgcctgcgccgatcacggaggtgccaaaggggcggaccgtccggaccaggggcgcggaccgtccgcggtcggcagaaaggagcaacggctag

SEQ ID NO: 27657 - DNA, 372 bp, Zea mays
  Peptide Sequence Number=SeqID_71032
atgacggtggcaggcgggcgggagcagcagtcacgtcgtcagccaggctcacgtcccgtccagggacaagagagcctcctcccacggcgtgaagacggcggcgcttccggcaggagaagcggacgacgcttcgccttcgccgtaataaccgcgccaaaaaaggttcgaaggctggccctccgaagggttcaacagtcgcctcagatcgcgtgggcccgacacccactactggtcaggggttcgaaggccggccccccgaagggctccatggccgcctcaggctactcgggctccgcgcccattactgatcaggggttcgaaggctggcccccgaagggttcacagtcgcctcagacgccgagcgagggatga

SEQ ID NO: 27658 - DNA, 573 bp, Zea mays
  Peptide Sequence Number=SeqID_71033
atggaagaaacacacctccacgtgttcgacgcttcctgcccgcgccagagcacgctcgcgcgcgcccccgcatgcccagcgccgcacccgagccaagccagcgccgtagcccgcgcccgcgcctataaagccctcccaggcttcgactgcactcttccgtgcaccctcaaacctcaccggagtttagttcgccgccgtttgcccgtgcgcagcgtgtccgcggccgcccaatccccctgtcaccgtagaccggccaatagagccattcccaaccccgtccagccctcggagaagactgtgcacacctccgtgaagctccccgagcgaggaatcggagtttgcttcaccggagaggccagtccacgctcgccggagctctcaaccccgccggattcgccgtggtttggccggtacactcgccgccgacgagaacacccgcctgcgcgcgtggaccgggcgattccggccatccccgacgtcaagccgtacctcgacgtgaccgccagagtctccccgagccaaccccacccttcgccgaacctccctcgtcgccgaaactttgaaaatccataa

SEQ ID NO: 27659 - DNA, 372 bp, Zea mays
  Peptide Sequence Number=SeqID_71034
atggctgctcctaccgatgaggctgccggctcagggacgccgggatctaccgattcgttcctcgccgactggagggaacggatcattctgccggccgtcgcggctggtgtgcttggagccgcgttcgggctgctgtcgcggcaccgggcgcgccttggcgccgcccgcgccgctgtcacctacgccgcgaacctcgccatcgttgctggatgctacggaggcttgctggctgctggacgtatttctgggtactatggcatagctagatttgtgaaagttaaattggttggtgttcgtttactcaaaatgaccaaagaagtcatgcaattgctggtgacttgtttttcaggcatagctagatctatgaggtag

SEQ ID NO: 27660 - DNA, 1059 bp, Zea mays
  Peptide Sequence Number=SeqID_71035
atgaaggggcgcataaccgcggggcagttgcacgctccttgtgcagtggttcgccttcttcgtgcttcggaggagcgcaaccccatgggggttggcactcttccgccatcactcggcttcaaggattttcatcatgcagcccggctgcaatctcccaccagtgcttcaaggatgttcatcatccgcgctggggaggagggtgagccgagttggggtcccgccttccgcatgggctggcggcccgcttcttcctccagcattcgggggagaagggcgttcaccagcattgcagaggaggcgaactttgggtacgcggtaccggcctactgcaggcgccgccagccgccgcatgcccggttcctcgacttgggtggcttcggcgccgcctccgacgctgcctcctgccgtttggtcggggcgtggctgtccgtccaccgcacgggcgatggtcgcgtcgtgcgtaggtccgccacatccacggcttctcccgcgtcgccggccgcaccggggggggggtcatacaagacgtcgtacgcgtgcgggggtggcggccacgttcttggatggtcttgtcctcactcccgctggaggacgggagcgaggacctcttcgcgcgtgttgaggcagtcgctgcctaccggtgcagaggtggccgctatcgtcagtgctgaggtggtcgccgccgctgaggtggccgccactgtcggtgctgaggtggtcgcctccgctggcgagccgctcggagctagctatcacgcggccctactggtgtggagggtggcggagcatgcaggcccacggtacgagaccaggctgagcggctacacgggctccggaccaccccaggagactaatgcccattctctagctccggacccgaggctccgaaccaccccatggaacggggtccgttctctagagccagctcctaggctgtcggacctcccaacttttgtatcgagggccctaaactgcaagcctggctgctcaattcggatgtcgtcataccaacaggccgggtttatggggacggaccccacagggttggcgtacatgtaa

SEQ ID NO: 27661 - DNA, 286 bp, Zea mays
  Peptide Sequence Number=SeqID_71036
tcgggacgttcatcgtcccgtttctgcagttggaccatctacagctggacagagctccttgcgatcgacgcgggatacgtttgcagacatggacgacgacgacgatgacgatgatgacgacgctggcgccacaggtcaggacgtgattggaccatcacagctgcaggacgctcccacaactcagccgtcacagctcacaccacatagacagcgtccacgtgacccttacactccaggcaccgacgctcttggggccaagggcaagggtcagactaggagaaaatga

SEQ ID NO: 27662 - DNA, 892 bp, Zea mays
  Peptide Sequence Number=SeqID_71037
aggcagaggcaaagaaaaagaaaaaaatgagtgggcggaagagttgaagtttgatccagtactctgcaaatatggtattgaagctaagtatggattagttccttttgagcttggtgttggctatttttgtggacatatggtagattacgatgaggagacgaggaaatacggttgggagagttatgacaacaaaggagaggtgatatgcacaataaagtccaagagactaatgggacagaagatgcgttgtggatctcagctcgtcgattcgaacattaacaatcacatacaggacatgcgtaggtacgcgaaatcggtgagttttgacagcccaatgcgtgcacaacagaggagattgaaggcggaaaatgagaagagagcacatgatgcgagggaatgggaggcggctagagccgagaaacagatgttggataatcttgctgatcgtctcaagggaaagattggatgtgccgtaaactatatcgtagatgaggcacatgcaagatacgttcaagaaaaaatggcgacggtggagctgatggaggaggacgacgacgacacatctaggttgaaggaggacgatacatcaaggttgagtgagctcatcacactagctgaggcaggattacatgctcaggaggaggaggacgagtttatgtttcaggctgccgaagaggtagaggcggcttattacaagcagaagtgtgatgaggttgaggctgaggatcagctattctcccaagctgcagatgaagcagaagccaattattacaagagaactactgaaaagtgtgatgcaggacaatgcaacaagtggaacgaggttgtcgttgaggattgcgcgatggatgactccgaagatgagttacttatagattgtgatcctgattga

SEQ ID NO: 27663 - DNA, 413 bp, Zea mays
  Peptide Sequence Number=SeqID_71038
atgaggaacaagctcaaggtgatgaaaatgaagatcaagaagatgagccacctcaagaggaggacaatgatcaagggggagatgaagataatgaagacaaggaagatgatcaagaaatatagggtcaaaggcctccacaccctagagtccaccaagcaattcaacgagatcaccccgtcaactccatacttggtgacattcataagggggatagaggatgcactaagagatccgaattgggtgctggcaatgcaagaggaactcaacaacttcataaggaatgatgatggcaaactcatcaagacacccatgggaaccaatgggcatctcgacctcgacatgggaggtaaatccgtagatcaaaaggcagatcctaaggaagttcaccttagggccgtaaagaaaatcatgag

SEQ ID NO: 27664 - DNA, 4902 bp, Zea mays
  Peptide Sequence Number=SeqID_71039
atggagtggacgacggtgcagcacctggatctccgccactccggcggccgccgcggtgcctcggcccgccctatgcagccgcacgccgctgccttccgctcctcccaggccatcgtcgctgtggccatcggcacccacgtcgtcgagttcgatgctctgtcgggaagcaagatagcttctattgaccttggtgcccgtgttgttcgtatggcatatagccctacaactagtcatgttgtcattgctattcttgaggatgctacaatcagatcctgtgatttcgccacggagcagacacttgtgctgcattcgcctgagaaaaaaacagatcatgtttcaatagatactgaagtccatcttgcattgacacctcttgagcctattgtattttttggtttccacaaaagaatgagtgtaacaggttactctcttagcttggcagttgctgttgacagtacaattaagctaattggagctggtgcttttgggtttcacccgaccctagagtggatatttgttggtgatagaggtggtactctcctggcatgggatgtatcaactgagaggccaagtatgattggcattacacaggctggttcccatcctatcacatctgtatcctggcttcctacactgcggctgcttgttactatttcaaaggatggagcactccaagtgtggaagacacgagttataataaaccctaacagacaaccaatggaaactcatttctttgagcgtgcagctgttgaaacaatggatatcacaaaaatactaactcttcaaggtggagaagcagtgtacccattaccccgaattaaaaatttggcagtgcatcccaaattcaatttggctgcagtaatttttgcggatatgtctgggacagaagctgcaaagaacaaagctgcatacacaagagaagggaggagacaactttttgctcttcttcagggagctaggggatcaactgctgctgttttaaaggagaaactattagccttgggatcatctggaatattagcagagcatcaacttcaggcacaactacaagagcagcacttgaagggccagagccagctgactatttcagatgttgcaaggaaggcattccttcacagtcatttcatggaagggcatgctcaaagcggtccaatccctcgcctacctcttgttacaatttcagattctagcaaccttttgcgagatgttcctgtttgtcagttgattttgcaactccagccattccatctagagctgaatttcttcaacaaggaaacccgtgttgttcagtatccagttagagctttctatttggatggatttaacctgatggcccataacttatcatctggggctgacaatctctataagaagctttactcaacgattccttcgaatgtggaatgccatcccacgaatatgtcatacagcccaaaacagcatttatttcttgtcgtgtttgaattaagtggtacaaatggagtggtacatgaagttgttctttactgggagcagactgatctacagacagtgaacagcaaaggaagttccataagaggtcgagatgctgcttttttgggcccagatgataatcaatatgctattctggaggaagatagaactggtctgaatctctttagtctcaaagctgtagctacaaaggaagctcttgaaaataatgctgctgtgcttgaagaaaacacttttgctgataatgctgctagtgctacctcaacggaacgtcaaggtcctctacagtttacttttgaatcagaggttgatcgcatattttcttctcctctagaatcaaccttgttgtatgttatttctggaaagcatattggacttgcgaagcttctgcagggatataggctgtctgcagacaacgggctatccattacaacaaaaactgatgggaagaagtttattaagttgaaaccaaatgagactgttcttcaggcccactggcaaacaaccctaagaggtcctgtggtaggaatattgacaaatcagagggtgctaattgcttctgctgatcttgatatactatcaagcagctcaacaaagtttgatcgtgcacttatcttctcaagcgcaactgcaataagtatgcttgggtgggacaacaaagtccgatcaatcctctccactagcttccctcgctcagtattacttggtgcattgaatgaccgcctactgcttgtaaatccgacggatataaacccaagacagaaaaagggagtggaaataagggcctgtttagttgggcttcttgaacctcttctcattggatttgctaccatgcagcaacacttcgagcaaaaacttgatctttcagaagtcctgtaccaaataacctcgaggtttgatagtttacggatcactccaaggtcattggacatattaactaaaggacctcctgtttgtggagaccttgctgtatcattatctcaagcaggacctcagtttacccaaatcatgcgctgcaattatgcaatcaaagctctccggttctctactgcgctgtcaattttgaaagatgagttcctgcgctccagagattatcctcaatgccctcccacttctcatctgttccagcgtttccgagaattgggatatgcatgtataaaaccttccattcatggaataaaaacagtttttttggatgagtttgactgtttgagtgttggaggcttgccggtgctagacatcttgaggctttgggtcctggtgctgcaatttttaggtcaagggttcttttgggtgattagtgaagagcagttgtatggtcagtttgacagtgcaaaagaaacttttgaggttattacagatcacgagagcatgctggatctatttatttgtcacctgaacccaagtgcattgcgacgccttgcacaaaagttagaggaatctgctacagattctgagctgaggcgataccttgagagaatattaagagttcgttcgactggatggacacagggtgtattcgccaattttgctgctgaaagtatggttcctaaaggccctgaatgggcaggaggaaactgggagatcaaaacacctaccaacattaagaatatacctcagtgggagcttgcaggagaagtcatgccttatatgaagacaactgatgctggtatcccatctgttgttgcagatcatattggtgtgtacctgggtgtgatgaaaggaaggggtaatgttgtggaagtaagtgaaaagagtttggttaaagctatagctgcagctagcagtgagaacacacagccggtgtcttctgcatcagcagagaaaagtaaggcaattcctcgtggtgattcggttggtgatactttggcaaggcaactgggagtccagattgcatcttctgatgaacaggcaaaagctgccgaggacttcaagaagactttatatggtgttgttgatgatggaagtagtgatgaagacgagtcaacctcaaagactaaaaagatacatataaggatacgtgataaaccggctgcacctactgtagatgtcaacaaattgaaagaagccactaaacagctaggcttgggtcctccgctgagtaggacaaggtcattatcagggacacctcaagacttcaatcaggctcctacacaaccaggaggtccagccgcagctgtttccccagcaatgccaaattctgcgattgatttatttggaacaaatactttagtgcagccgcaagcaccctctagttccacaggtcctgttattgcaggcatgggagtgacggctgggccgatccctgaggacttcttccagaacactattccatcgcatcaacttgcggctcaactacctcctcctggaatagtcctgtcacggatggctcaacccgctcctggcattgaacaaggccgaccagtacctaatcaaatgatggctaatgttggtcttccagatgatggggtgccaccacaagcaccaccgcagcagtcccagtttcctccgcagcagtcccagtttcctcagcaaccaggcattcctatggattctattggcctgcctgatggtggtgtccccccacagagtcagccacttccttcacaaggccagtttcttccttcacaggcacagggctttcaacttggtattcctgctccatcacaaccaattgatctcagcgctctcgagggtcctggagcggcgaagcaagctgctcgccctccagcacctactgctgtgcggcctggccaggtaccacgcggggcccctgctgcagaatgctacaagatggctcttgctcatcttgagcagaatcagcttaccgatgcactatcttgtttggacgaagcattcttagcccttgcaaaggaccagtcacgtgaagccgacatcaaagcgcaggccaccatttgtgctcagtacaagatcgcagttgctctgctgcaggaaattgctcgtctgcaaagggttcaaggagctggtgctctcagtgcgaaggaggaaatggccaggctatctcggcaccttgcttccctgcccatccaggccaagcacaggatcaactgcatcaggaccgccatcaagcggaacatggaggtccagaactacgcctacgccaagcagatgctggacctcctctactccaaggcgcccccgacgaagcaggacgagctcaagagcctgatcgacatgtgcgtccagaggggcctgacgaacaaatccatcgacccgttcgaggacccctcgcagttctgctccgtgaccctcagccggctgtcgaccatcggccacgacgtgtgcgacctctgcggcgccaagttctcggcgctctccgcacccggttgcgtcatctgtggcatggggagcatcaagagatccgacgccctcgctggtgggcctggacccgtgccgtcacctttcggctga

SEQ ID NO: 27665 - DNA, 174 bp, Zea mays
  Peptide Sequence Number=SeqID_71040
atgtgggcaaccatcctgcagtctctgctgcttcggcaagtcagccttcagcttcctggcaacagcctccgcctccacctccgttgcaacaaggtttgtgataataaaaaggaccttcggactaccgaaaatccttcgaagcaacaaaaagtcgttctaaggaacgcagagtaa

SEQ ID NO: 27666 - DNA, 532 bp, Zea mays
  Peptide Sequence Number=SeqID_71041
atggcgtctgcatgtggagcgctgtgcaagtcgacatccctggcgtcgaagggtttgggtggtgcggaggcagtggtggtagaacctgcacctcttgatggttatgacaatcccttattggacgcgtgcagtcttcgccatgaaacaagcaatacaatcatcacggctgctgggtccgtcctctgccccttcctcttgcgctgttgctgcggccttgagggggtattcctgatggcgtgtgggctctccggctgggtgctgattggctatgagggtccttgggcttcctctgagattcaactttgcgctgatggagctcctcaggcctggcatacttctcaaatagttggtagagctcctaggacttcgctcgtcaagatagttgattccgtggaaggcgatagctggggggatgaaggggccgcgttggctcgcaactttagctggtcttcggccaagatgcctatgacttctccaacctatatggtgtcttcgccctctgggggagcgaagcctggtggtggtgcttgcg

SEQ ID NO: 27667 - DNA, 100 bp, Zea mays
  Peptide Sequence Number=SeqID_71042
atggacgagggttgcactcaacccctttcaagtgatccagtgatcaacattgcacacctcagctctagcacacacaaaagactggcctacggggaccatg

SEQ ID NO: 27668 - DNA, 261 bp, Zea mays
  Peptide Sequence Number=SeqID_71043
atgtccggtgagctagcggagcaacagtcactgcgcgtcaacggtcgactgcaaaaagtgaagagtgatgaacagtgcgcggcagaagtcagagaagcaaagtcagagattctgcatatggatccatgttggcaagcggagcggaggcccgtcaccgagaggcttgagccggtgcgtagcgacgccaactggcccatcggccagcagtcctgcacgtcaggggatgtgcagtcagctggagggcttgtctacaacccataa

SEQ ID NO: 27669 - DNA, 297 bp, Zea mays
  Peptide Sequence Number=SeqID_71044
atggggaccctccctggcgggctctttgccgagtgtccacttggcaaagaaggcggctttgccgagtgctgccaggaggacactcggcaaagatatcttcgttgccgagtgtcaccgttgacactcggcaaagccgccgtctccgtcaaccggcgccgcttcgccgagtgcttccggcactcggcgaagctattgattccggtagtgaaggtgcagtggggtccttcaatctggagttctggacgccatgggagggtcattcgagcctccacgcggtcccgcaaggccatcgcctag

SEQ ID NO: 27670 - DNA, 177 bp, Zea mays
  Peptide Sequence Number=SeqID_71045
atggcgccgatccaccgtgtgcacaagacgggtctgcctcgagcttcgcgctggcctccgtggatacatgtttgttttgctaccgacaactacttttgtatcgtgttcacctacttgttgggtgttgtttttcgattcatgatcaagacacccttttgggtcgccctgcacctgtag

SEQ ID NO: 27671 - DNA, 411 bp, Zea mays
  Peptide Sequence Number=SeqID_71046
atgcctcttgcctcctccgaccctcatgaggacatctccgtcgatgtcctcggtcctcagattgatggctccatcaaggtttgccaaagcctcctgtaccctgaatatagagtttcaaacggtcctctacgctcttcagcagcgtcctccaaatgcgaaaaactgactgaagaggtccactttgagtcagagaaacttgccacatctgagatgcggccacctcagctccagggtccaagcttcgacggagaagcgctcatgcaccgctactcgctgtcccgctgtagtttaaatgcgcccatcgatggaggcggaggcggaggcggagctacggtgtgggaaggagacgagaattgtggtatgggaggggaagctgcagtgtgggaggcggaggtgcgtgtgcgggtgtag

SEQ ID NO: 27672 - DNA, 689 bp, Zea mays
  Peptide Sequence Number=SeqID_71047
gggcaggcagccctggtggagatggtggccggggcccaggcgcatgcgtccttggtggggacgacagccgggatggagtcgggggcctgggtgcacgaggcccagggaaggagggcggcccaggcgcagtggctcctccaggcgcagtggctcctgatggagacggcgggcggccttcgagcggggcagacatcccagcagatgagcgagcaacctgctggaacggccagttggaggcgctgagcggtggagcatccgaggaagacacaagtggtggaacggggagcaagtttatgggcggcagtggtggagatgttgggataacacttgcagccgaagacgcgaagatggtcataggacgggggacgaccataaagcgcaagatggggggtggagtagtggagggtgctggtagggtggaggttgagaaggtatgtggcggtgtgaagtgcctcaacccaatagggaggaggaagatgggcttgaaaaagcagagagcgaatgatgttgttgaccgtgcgcaaaatacgttcggcacgaccattctgctgggaggtgtagggacaggacatccgaaggcggacaccgtgggagagaaagaaagctcgtgcgtgggagttatcgaactcacgaccattgtcgcattgcaagcttttaatggtggtgccaaactgagtgagaacaaatga

SEQ ID NO: 27673 - DNA, 1797 bp, Zea mays
  Peptide Sequence Number=SeqID_71048
atgccgacctcttcttcttctgctgccgctacgccgccggccaacgcgtcgtctgaggagacgctgagtactgtggcggcggaggagttgcgcgccggcgatacggtggatttcggtgtgtcgcagatgtcctcggtccgcgtgcaggatatgcagcagcttggttactttggcggcggagtcgctcgtgtcctggggacggaggaggtccccgagccggaaggcgagttggttctgactccgaatgccgtggtggctctgtcgaagtatgtctgggcgacgacttcgtacggcagacaaccatcagtcgaagtcttcgcgaagtactattgcctgcactggcagaagaggatgatcggaaatgaagttgcccagtttgggtccttcgaagaacacccggggttccccgtgtccgagatgtgctcgcattattactcggcatacccgccgtttgaagtggcagaggaggatgcggacgaagggtcccttcggtgcgccgccggcctgggcagcgggcgcgatttggttgaggagtttgtggcgtacggggtatggcctttggcgcatggctgggcgttgggcgaagtatgccctcgccagatgccttcccatggtgggaagctggtgcgaagtcctgccttcgcgttggatctgcatagccgcgatccggccgcctttttgcgtgaggcggaggatggggcggtgcggatcgtcggtcgggttttcgagttgaaccgtctgccttatggcggttatcccggccaagacgatgtggatcgtcgcgggaagaagctggtggtagagactggagacgaccccgcgccggcggccgcccctttctctaagaagaggaaactaggtattgctatgggaggactgggggtttctgatggttttgctagggaattgatgaggacatgcgcggccccggggggagggatgtcttcgcccgagctccgggagtcttcggcgcggatgctgagggttaccggggtgatggacaaggatcgtcagggagctgcgcagaagcgccaggcggtcgtcaggcttcatgaggccaggccgaagaggccgcgggggactgcgaaggctgctgcccccggcggaagccagctgccgctggcggcgaagtcggccgcccctgtgtccagcagggcgccagaggcgacgaaggcagctgccgccggcggtaccaagtctgcgaaggccgcccctgggtccagcaaggcgccggaggctgcgaaggcgtcccgagagttgccgccgccgggcaagcgcgttgccgacttcgccaccgacattagtgtggatgattatcttgttgggtcggacgaaggccaacttgtagttgttccgcctgccgtggcgaccgcggcggctgccgtggtgcccagggcgaagggcagtgctcttagtgccggcggcgagataccggcactcactgtcgtcagggacgaggcgggtgctgtgtcccgtcggctgaaggagatgaaggaggcactaagtcaggcggctgacttcgcagaccgcgcggcgtcgggggccctgacggcagttgtgtctgccgaagtcgagagacttcggacgcaacatgccgacgccgtccgggaaaagtcggccgccgacagcaagtgccgcaagctggcggataaggcggaggccaatttggcgcgggcggagggaagtcttcccaggcagcgcgccgagcagttggaggagcggctcagcgctctgcagacccgtgtggatagggccgaggcctcgacgcgctcggaggctgagcggacacgcaaatag

SEQ ID NO: 27674 - DNA, 294 bp, Zea mays
  Peptide Sequence Number=SeqID_71049
atggcccgcgcccgcgcctataaagcccccagggaccttgaccgtacccctccgcacgcgctcgacctcaccggagcccaaacccaccggcgtttgcccgtgcacggcgtgtctgcggccgcccgatccccctgccaccgtagatcggccaacagaacccttcccaacctcgtccgaccctcggagaagactgagcacacctcggtgaagctccccagcgaggaattggagtttgcttcgccggagaggccagtccacggttgccggattccacccgaccgcctgcgagcgtag

SEQ ID NO: 27675 - DNA, 2505 bp, Zea mays
  Peptide Sequence Number=SeqID_71050
atggaggtggagaggccgatgtgggagctcaaggaggaggaggaggagccgccgcagctgctcatggaggccgaggaggatgactatgaggaggaggaagacacctccgccctcctatacactagggagagagagagcatgaggaagaagatgacgacaacgatggcggacctggacctggagatggagtcctccgactccgactccaacgcagcagcatcagcagcagtagaggaggaggcggcggcggcggcccagcagagcatcttcttggatccaacacaaggtctatggaagtgccggcactgcgattggacgcaccaacgcttgagtggtccatgcacagctgaaataatcctccacagtcagcagggacactgcaaaattgccagcaacgtcgattcgttagttcagcaccaaccattatatagttcaccacacaaagcctctgaccatgctactgggctgggtgctgaaaaccaagttgagaaacaggacaatgtcagcgctcaacaaactaaccacagttcgagtaatggcaacttggaaaatggttcacactctaatggtgtgcatgagatctccagcagcagtgaaaccgtgacgaccattgcggacggactcaaactgatcacaaccatccgcgagggcaggcagcacatcttgccaagttggagtggctctcttgaccacgtttctggtggcagcacgagcacatctcaggttcatgaaattgaagttgagaaggaagtcagtaagggcgacgtcaaagttgaagagtatgatcttgagaagattctggacgagcaagaaacccatgacctctattgccccaactgcaaatcgtgcataactcgaagggtcatccttaaaaagagaaagagaacagtaaggcaagaaacaggcaaggaaccaccaaaaagaccacagcttgtagagcctcccgccaatgctccaagccaaacaatcaatcaagactcgccggaagtatttagatgcttgtcgtgcttcactttcttcatcccaacaggttgcgggtttaatatattccgcatatttgaaaggagggatgtagaccaacaagttcaatctcagcattcttctgcgtctgttgaaaattgtggaagttggcttctttcttgtttccggacaatagatagtccaaagccattacataatgcagattcattggaggaacctctagtaagtgattcgcagaggactgacaatataacttcagttgaagagaacacaccattgcatagtgataacacaataggtaaagcagaacaatcaaacaaaccatcaccaactggatcccaaaccacagctgcgacgtatgaagtaaaggagtccttcagtcaattccatgcatcatctaaagacgtgacaggatccacgcaaaaagaggcaggacatgtggtaactgtgcagcgaaacggagcacgccaagagcaaattcctctctcacggcctgctgttgatactaaaactgataccagtcatctaggccacaaagaagaattcacgcaaacagaagcaggacatgtggtaactgtgcagcgaaatggagcacgccaagagcaaattcctctctcgcagccttctggtgatactgcgaatgattcaatgcaccttggccacaaacaagatattctggaagatataatggcgccctctgataacagcacatttttcagcccatcgtttgttaaaccagtacttacaatcccaataaaagttttgcctggggaggacaaccagacggttgagaaaccaacttcagttattcgtcagccagctgagccagaagctccacctcatagagtattggcagtccctgaggccgaggcactagttcctgcaccatcagctgagagggatgaatgggatatcctgaaagccgtagtgtatggtggccttgttgaatcaatcacgagcctctcagttgtatcagcagctgcagcaagtggtgccaagactttggatatattcatcctgggcatagcaaaccttattggtggtcttcctgtactttaccacaatattgctgatctacgaaacacaggagatatagctgaaagcagtgagcaagtggggcattactggctagagctgggaaggcgatccaagtaccagttgcacatggtgatagccatactgtcatacatcctcttcgggctgctgccaccagtcatctacggactgtcattcaggacgagcgacaacagagagaacaaagtgctggtggtcgctgctgcatctctcctgtgcattgcgctgctcgcaatcgggaaggcacatgttaagaggcataggacatacctcacaaccctcctctactacctgtccattggattcagcagctccggactgtcgtacgtcgcaggcgtcctcctcgcgaaggtcctagcacacttcggtatcattgatcagggtggtgcatcagctcctgctcctccaggtctctcattccctgaagcagccgcctgggcttcctactga

SEQ ID NO: 27676 - DNA, 1422 bp, Zea mays
  Peptide Sequence Number=SeqID_71051
atgagggactccccgtgtccgagatgtgctctcattacgccctttgaggtggcagaggaggatgcggacgaaggggcccttcacggcgccgccggtcagagcagtgggcgtgatttagttgaagagttcatggcgtacggggtgtggcccttggcgcatggctgggcgttgggcgaagtgtgccctcgccagatgccttttcacagaggaagggtggtgcgaagtccggccttcgcactgaatctgcgaaagcgcgacccggccgcctttgtgcgcgatgcggaggatggggcggtgcggctcgtgggacgttacgtgccgaggacggaaggccagcgcagctttgatatccgcgggtcaaatgaccgtttgaacagggttttcgaattaaatcaattgccgtacgacggctatcctggtcaagacaaagcggaccgccgtggaaagaagccggtggtggagactggagacgaccctgcgccggcggccgccccttcctcaaaaaagagaaaattagggtcggacgagggccagcttgctatagttgcgcctgccgcggcgatcgcgacggctgccatagtgctgaaggcgaggggcgaggctcctggcgccagaggcgaggtgtcggccctcgcggttgtcagggacgaggcgggcgcagcgacccgccggctgaaggaggtgatggaggcgctgagtcaggtggctgacttcgccagccgtactgcgtcgggggccctcacggcagctgtgtctgccgaagtcgagagacttcggacgcaacatgctgacgctgtccgtgagaaatcagcctctgacagcaagtgttgtaaactgacggacaaggtggccgcactggagagggagaaggctgacctccggcgccaactggcggcggagaggagggaggccaacgaggccatcgccaaggagcaggctgcgcaggcggaggccaaactggcgcgggcggagggcaatcttgccaaggagctcgccgaacatctgcaggagcggctcaccgccctggagagccgcgcgaagggggccgaggccgcgatgcgtgcggaggccgaacggacgcgcacgcagcttatggatacatatcgtgagctgggtgcgcggaccggtgacttcgaggaatccgccgaggccctctatgactggatgtggggtccgcacggtcgtgaggtggtcagggagcgggccgagactgcgagggctcaggcggcgcgtggcgagcgggtggacgacttcggggcgttgaacagcgcgctgcctgacccggagccgacccctgcggaggccgtgtctggggtcgccctggagccaaccccggagacccgcggcgatcgcgacggctgcccccacatctgctgcggccggcgaagacctgcccccaaaggtggccgaaggcgccgttga

SEQ ID NO: 27677 - DNA, 165 bp, Zea mays
  Peptide Sequence Number=SeqID_71052
atggccgtgatgggttcaacatcggaaaagatgtacctctgtcagaataagataacacgcaatgggagtggagagatggcgagagtagcgtgtaccctctgtggcaagaggctggacggtggtgtatctgtgctctctgaaagtcgcctagaggggggtggatag

SEQ ID NO: 27678 - DNA, 291 bp, Zea mays
  Peptide Sequence Number=SeqID_71053
atggtctggcgcaccggactgtccggtgtgccaccggacaatgtccggtgcaccaggggactccaagcccaactttcgcaccttcgggaattttcagaggcgcttcgctataattcaccggacatgtccggtgctctagaggagagcgactctgaactcgccagtttcggggatccgctccgctataattcatcggacatgtccgatgcacaccggactgtccggcattgtatgttccaaaagaaaaataaaacagtcactgtcagtgttgcaattgtgcaatgtaaatga

SEQ ID NO: 27679 - DNA, 1122 bp, Zea mays
  Peptide Sequence Number=SeqID_71054
gccaggcgattcttcgttctctgatgccatcccggcgacgccccggctcccagcgactctaaccctagcctctcgagctcctccccaacgccatcgctcgtccgccatcgccacgagctcctccgccgttgtcgtcgctcgtccccatgagctccccatccccacggctcccaacgactctccatctagcaaagcagtacataaaggtaacagccacctgatcctccatccccacgagctcgtctgtcgtctccacctaatccacatcgagctctccgacgtcgtccccttccactcgacaaggaaggcagggttcatgagtggcggcacgcctgcagcaagcagtagcctgcggacatcactctcatactacgtgaggcaagtccgcgcctatgactaccaccactacctctgccttctccacctggccccggccgtgcgcaaggccgcgttcaccttccgcaccttcaacatcgagacagcaagggccatggatgtggtgttcgacccccgagccggcctcatgcgcctcctctggtggaaggagggggtcgacaagatctttggcaacaagctagtcgagcacccagttgcccaggcgctctcttcgatcatcgcagaccacaaggttagcaagcactggctgaagcggtccgtggaggcgaggatcaacgacgccaaccgtgaggaaggcaccattcctaggacgagcgcgaagttggagaggtatgtggaggacacccagtccaccatcctttacatgaccttgcaggctggcggaatacagtccaccgtggctgaccacgccgcctctcacatcggcaaggccagcgggcttctgttactgctcaaggcgctgccgcaccatgtaaataatcaagggacggtacattatatcccagctagtgtggccgaggaatgcggcctgctcatcacacgggagggcggcaggtcggaggtcagggcaggcgagaggctgctagacgtagttttcaaggtcgcatctgttgcggaggctcacctgcataaggcgcgagagttggcaccgtccgtgcccaaagaggcgatccctatgctcctcccagccttgccggcccaggtcctcctggataccctgcgaag

SEQ ID NO: 27680 - DNA, 1512 bp, Zea mays
  Peptide Sequence Number=SeqID_71055
atgaccctactacgcaatgctcagtttgaagaactctccgcacaagatctgctcttgacatatgccctaaataacgattacctgctcacgctgcccatttatgtcgactggaagaaggctgctcaatctaatgcaataatattcaggcgtggatacgcgactgagaggcagaaaggcctcctgttggttgagaaacttgattacttgcaatcaaaactcttgcagaatgtctttttcagcctctccaaacccttgaaaaagccagggaaatggcttaatgaggctttgaaaagatcaacagataaccagggatttcagatctggatagacaaactgagactatggcttaaagagcaaacttatgcagataattcactgctgttgatagaaagctcttcatgggacaagcttagttctgatcagttacctgatgcagatgttcctatttggatcgctgcacaaagggcagtctctcgttatgaaggaattttgtcacctgttggtcctcgtggaagactgttaagaagattgcttaaatggactggactaataccttctctgccagaagcaacgataaaatccaacaatgaaactaaacatcttgaaggacatgtgaggccaaactttctaccaagaattacccttgctaatatatgggaacctgcaagcagagaatcttgcaataacaatatctgggagatggtgaaagcttcttttcgtattctgtttgggaggtctactcttcaggaaccagcattccaggagttaatactactttacactgatgaagttgttccaagtgaaacgaaggacgagatggttccgctgcaactgaaaatttatgagaggattccgatcccagatttgccagtagttttcccccacaagaaattgtccttccgcatcctagatacagtaaggctagatattgctactgtaataggtctattggcatatgtggtgaactacaaatttgagagtttagcctcatctccgtcagcttttcttcttgatatagttgctggtactgcactcgtcatacttgttttccgtgtagcactgggctacaaacagacccgggataggtaccagcttctggtgaataaaaccctctatgagaagacattggcaagtgggttcggctcggtttacttccttctcgatgcttctgagcaacagcagtacaaagaagcacttttggcatatgccatgttgctctgcagaaagaagtatgaggtctcatctcgtgcaagcataagagatgcatgcgagcagtttatgcacgagaaattcgaggcaaaggtgaaagatgacggatacattattgtttccgttctcatgattgagatgccgatcgacaaggcaatggagacactgctgcggttggggctggtgattgagcttcccactgatggtgggtcgagcgtgattggtctcccatgctcggaggcatacaggatcctgaaaagccgttgggacggcttgctggaacaagatacagaacaaggctga

SEQ ID NO: 27681 - DNA, 684 bp, Zea mays
  Peptide Sequence Number=SeqID_71056
atggcttttcgcagagttgatcctgcgccattcctcccccatggctttgtggcgcagcaggtcgattatcgtgaaatcatggtacgtactgtgactcgtcctcaaccttctgcgcatgaagattggggcattgtgcttgttcaacctttgccggagcatgaggtcaatttccacatttttgatgatatcatccgtgagtatcttgtggaggtccggcgtgttcaagttaggagcattcagtgctcccattttggggacaggctctggaagtgccacagttcatcgtgttctcggtggctgaaggtttccaaggagtttcatggactgtccaatgtgacatcgtgcaacaatttatgcttggtgctcaacctcaagatgaggatcccgtgccaccctacccacatgatgggcaccaacttccagttgagtttttttggaaagggtcaaccagtagccaattttcagatcgatctcaacattcctcccatggaagggaacaatgttgaggaagatgttgccatcaatgatgatgaaggttgggacccttggccagttcagcaggcacaaccccctgagccagtggccaacacaaacaatgcaaacgttgtgatcaatgcagaagagcagttcagttatcagttatcgggtcttgaagaccttccttctgacgatttggtgggataa

SEQ ID NO: 27682 - DNA, 441 bp, Zea mays
  Peptide Sequence Number=SeqID_71057
atggcggccgcctcagttccagggcaccctcgaggcctcacgcctccagtttggatcatatcgtccagccctgaggacccagtgctagtgccagatctagtgccagacactcaggctgaggatgcgatgttccaccagttcgagacccagggcacagctgtccctaatgatgacgatgatgatgatgattttgggatcccgccaccgcttcctgtgcctccacgctcacatgatcatgaggcagggagttctagtgctgcccctgctgcccgtcctaccattgaccctgctctggctgcaatactccagtcccttactcatcagcaggctcatctggcagctgagcaggctcgacagacaacggtccagcagcagatgtctgagtggatgctctctatgtttcagacgattcaggacggtcaggacactctgcagcagtag

SEQ ID NO: 27683 - DNA, 447 bp, Zea mays
  Peptide Sequence Number=SeqID_71058
atgggcaagaacaacaagcgcaagcgtgagccgactcctccatcggaggagtttggtgactcggaatactcggaggaggagttctcctccgagcccgaggggtctccggctcccgtctctcccccggcgtcgtccgatgactcggacgactcccaggggatagccgcggaggtctggacgtacatccgggccgtcgagcgcgccgggctcgaaggctcggatgagtcggagtactcctcggatgaggaggactcggacggcggcgacgatggtgaagatgacgacgacgacgacgacgacgacgacgacgacggcgacggcagtggcaggggcggcggcgacggcagtggcaggggcggcggcgacggcagcagggacagcaccaagggcagcagcaggggcagcaccaagggcggcggcggcggcaggggcagggccagtggctag

SEQ ID NO: 27684 - DNA, 390 bp, Zea mays
  Peptide Sequence Number=SeqID_71059
atggataacggcaaggaggtaagaaatatcgcatcgtggatgaactccgaccactattctactccggccgccgtacccgcttgtgtcacggccgctttggataggctcgccagagttagccacttcgcgaccttgtgccatgtgccttggtgctttaaccatgtcgcgatgatgcttcaagtgggatgggatgttttcaaaataaaacttgatggtggatccatcatggccgtgatgggttcaacatcagaaaagatgtacttctatcagaataagctaacacgcaatgggagtggagagatggcgagagtagcgtgtaccctccatggcaagaggctagacggtggtgtatctatgctctcggttggcgtgaacctgatctggtcttaa

SEQ ID NO: 27685 - DNA, 576 bp, Zea mays
  Peptide Sequence Number=SeqID_71060
atgaatcacgtgagcaggagcacagtccacagcgtagggcggcatgcggtggttcccccactccggcaagggattgccgatgcccaggtctccatcctccccatgccatcaccgcaaatacaacccagaacccaaagcgagccgcaccggccatacgcccgaccctggcgagggtgcctccaggattcacccgcggcggcggcaactctccctttctctcggtgtgcggcgaagctaggcgatggcgcgctcggctatggcttgggtaccgaggaaaggcataggtcttataggaggcgggtctggggttggttgcgctcggtctgcggaagtcgcgcgcgtgcggagttctcggccacggccgattcggtcagcgggatccgattctcgcggggaagaaggttacccaactgggcggccccaccattagtgagccagcaacgcgagggcaacaatgcgagcaccagacgacccggttcttatggccccatggtcaagcacccgagcggaatcaggaagatggcgtggagatttgtatatcctaaatttgaatttccaatccaagataaagcttag

SEQ ID NO: 27686 - DNA, 1353 bp, Zea mays
  Peptide Sequence Number=SeqID_71061
atgtcttgtctccgcatccttctcctggtaccgctgttcctctcgtcgggaatgtccggctgcttggcgtcctcatcgtcagcttcatcaggatgtagctgcggcgacagcacggcccacgatttatcttccttcaccagtgactctgctgctgagctggtgctcctcaaggacgccgggatcagcaatggcgtcctccatctcacggcagacagctcgaggaaccgcaacaggtccggtgccgcgctcatgccaggtccggtgacgctgtggtgccaagaccccgacgacgacgcggaggcgaagcaagacgcgtcctttgaagcctccttcaccatgggcatcgtcagcaatccatcaccggacgaggaaggtgccgtgcagaggaaaggagatgccggcggcggcggcggcggcctcgcgctcgtcatggttgcctccctcaacagcccagcgctcggcatcctcggcctcagcaacaacccttccgatcaggtgtcctcttcctccgccagcagcggctttgtcaccttcacgttcaacacggtgaagctgaagcaatccaatggtgaccccgacgacagcaacggcaccgtcatcaacctagacgttgttgtctccgtctccggtgccgtttttgcgcgctcaccacctctgactatcaccaccgccaccgcgacgaataatcaggtcgctatgaagaactgtaccgtgtggattgactacaataatggtcgcgtatcgatatatgtggacgtccaagggcggccgaagccggacaaagccgccattgatggtgtggccctcaacctcagtgaccacctcccgcagagagccttcgtcggattactggcgtcaacagacacgagcaccgagctccactccgtcctcagctggaacctgcaagtcagtctccccggcgatggcccgagcatggactggaaggtgatactgccggcggttttgggcgggatcaccttcacgggaatcatgaaccttctcgttgccgtgttctacttcaactccaagtacaataagctcaagatggagctggtcttgtctgagactctccggcggctgcccggcatgccgagggagttcaagcacgccacgatgaggaaggccaccgacaacttccacgaggcgaggaggctgggcaagggcgggttcggcgcggtgtacaggggcacgctgcgatccgcagggaagaacgacggcgtgacgacgtgcgtggaggtcgccgtgaagaagttcacccgggacgagaaccggtgctacgacgacttcctcgccgaggtcgacatcatcaaccgactccgtcatcggaacatcgtcccgctcgttgataagtag

SEQ ID NO: 27687 - DNA, 612 bp, Zea mays
  Peptide Sequence Number=SeqID_71062
atgaatcacgtgagcaggagcacagtccacagcgtagggcggcatgcggtggttcccccactccggcaagggattgccgatgcccaggattcacccgcggcggcggcaactctccctttctctcggtgtgcggcgaagctaggcgatggcgcgctcggctatggcttgggtaccgaggaaaggcataggtcttataggaggcgggtctggggttggttgcgctcggtctgcggaagtcgcgcgcgtgcggagttctcggccacggccgattcggtcagcgggatccgattctcgcggggaagaaggttacccaacggggcggccccaccaccagtgagccagcaacgcgagggcaacgatgcgagcaccagacgacccggttcttatggccccatggtcaagcacccgagcggaatcaggaagatggcgtggaggttagttgagctcgctgcgcgaatcacggagaacaggggagaagaagtagctgaccggagggccccacggttcagtgcgacgtccgagcgtgcgagagcgcgtaggccacggctgatgcgggggaaacgtgggctgaccacagggacccgatcatcagtggccgccgtgcgcgcgtga

SEQ ID NO: 27688 - DNA, 414 bp, Zea mays
  Peptide Sequence Number=SeqID_71063
atgggtcttcgaaaagctcaaagtttcttctgtccaggacacaagaagtccctctctgatctactgcgcgagcacaacctccctccaggcctcttccctcgtaacatcatctgctatgagtacgacgaatcgacatcgaagctgatggtgcacctgtcgaagccctgcgaggtgagcttcaaggattcctccgcgatacggtatgctcctcgcgtcaaggcgactctgtcccgaggcaagctttctggggttgaaggcatgaagaccaaggtggtggtgtgggtgaaggtggctagcgttagcatcgacagctacaagtccgacaagatatgcttcctcgccggtgtgaagaagctgaggcagaaggatgcttatgaggtccctcgtgaagccgtctctgttgatgagttctga

SEQ ID NO: 27689 - DNA, 3027 bp, Zea mays
  Peptide Sequence Number=SeqID_71064
atgcgttcagtgaaaagttgcggttttgcaggaaatttctttagaatacgcagtgcttttgcgtatggggcgaaaaggctcggaaagttacttgaatgtccaaaagaagctttaattcctgaattaaaccagttcttcacaaatacatggataagacatgggagtggaagtcgtcctgatgtgcctatcccaagtctggttgatgtgcggcctatgaaggttgtttcttctgtagtgtcaagcagccagagaagtttagcggcattcaagaaaaaagttgaaaatcctaaacttcatgttaatcaggataatcttcgtccgaatcaagataatctcactggagttggtgacatacattaccgtaatctaccaagaacagttaatccttcagtttctcatgttcagcaccaaaaaagttatacaccacaaggcaatgctaaggtctctgaacagcttgaaagaaataactcagacggattgatgcaaagtgcaagggataagagagtgccaaatggtctctttgtcaatgacagaaatgggcagaacaggtccagatttgcaaggacccgatcaagtcctgaactcacagactcgtctactgaaggatttcgtggtaggcggactaatgcagttggtatggaaaaatcttttggtgttgattacagcagaagaaacatcttgattccagaagtgtctagcaaccacagcactaagtcttcacaagatgaatcagtgtcttccatgaatggttcatctcaccctagtgcattggcagcttctgactcaaatagcgtttcaagcagctttcgtgatgataatggttttgtgatgaatgaagaactcccttctgtttctgaatcatcggatatgcaccacgatgaacaagttctggctaatttaatggaatccatgaagttgcatggattcaacggacagattcaattgccaatgcaaataccttctcatttgtctgtagcgcatccccctttactggctccaacaacttattcacaaaagcatttggctggggttccaccagctaacttaattgggacaccatggttgcccaatatgcagttcctgcatggatttgttccacctatggcccattacatacacaatccaaattttgcaccaaacatcgaggatggtactgagactgaaaaacctaatacatcagatgtgaatcatgatgctggcaaaacttggcaagagtatggtgttgggttttctagacattttgatcctgaagcaagagatcctcacttctatggtattgatggcaaggagcattcctctttgcctaatggtgtaccaggtgctcccttggaaaggcagatgaaattcacagttgagaataatgttgtaggtgatgaaacttatactggcatgttccaaattcatacaggtagagaacctgctgtagattattctaagaggagtggttatgggaatgttccgtcttcacatgccagttcatccaaaggcaaaactctggattcgagttcatgggatgaaatgactgtaaatacaacaataccaccaagagaaaattggggaaaaagacctgcctttgtggcacctgccacgactacacatggcaatactgggtggcagatgggaaatatcactgagcatctcgcagctgaagttaatgatggccccagaaatgggacagtggtaccaatcatcactgaagcttctgagatagtaacagggtctgattctttttcatcaaaatcaagaactagtcaagtacccaatgagcttgatccatcacaagttggcatgcctaatccagtgtttacaccttttcttattggatcaccacagcataggcaagctgatagctctggacttacttttgttccaacaggtccaccagttccttttgttgtgctcccgtttgttccagggaataatgatggttctggcccccagtttgagagaagcgaaggaattgatcagcttcctgccaatactgtaggtcaattttttggttcacttaatgatgttcaccaacaagattccagtgctatctcaacagtatcgtccagtactatgactgagccatctggtgaacacaagcctgatatcttgcatagtgattttgtcagccattggcacaatttacagtatgggcgactctgtcagaatcctcgtcccatgggtcctgttctataccctgttccagtgccaccgatgtatttacagggccatgttccatgggatgggcctggaagaccagctgcaccaaatgttaactggacacaaatggtgggcggtcaacgagtatttcctgtgatgcctgtacaaccggctacagaaagaactggtgtttttcagcactacggtgaagatgcacccagataccgtggaggcacaggaacctacttgccaaatcctaaggttcattttagggaccgacactcaaattcaagaaactacagaggaggttataatggtgacaggggtgactataatgataaggagggaagctggataaactcaaaacaacgaaatccaaaccgcggctatggacgtagccagtcagagaggtccggcatgaggtctgatagacaggtcactgatgagagccggtctgataggcaacgacgaacttatagaaatgactcgtaccggcatgaggcaagctctcagtatcttgtgcagggccaaccttttggatccacaagctctatgcgcaaaccaggaaacacagtgcatggggtttatacaccaccatctacgtattcaaatggtaccagtgctttatctggccctccaggaccaccattttttatggtgtactcttatgaacaaggctcaaatcatgctgcttcctcatctgaaccaattgaatttggatctcttgggccacttcctgcagcagatggtgatgacataccaaggtcgacacgccaagtaatgcctaatgggttttatgggcaaagacgtggtcgatataggggtggttcctctcattcatctcctgatcaaccatcctcgcctcagcctcgtcggtaa

SEQ ID NO: 27690 - DNA, 975 bp, Zea mays
  Peptide Sequence Number=SeqID_71065
atgacgcgacggctcgaccccgagcgctgggcggtcgcggaggaccgcacggcggagttgatcgcgtgcatccaacccaacgtgtactccgaggggcggaggctggccgtgtaccactacgtgcagcggctcatcatgaactgcctctcctgccaggtttttacctttgggtcagtccctctcaagacttacttacccgatggtgacattgatgtcactgcttttagtaatagtgaagaattaaaggagatttgggcaaatcttgtccgggatgcattggagcgtgaagagaaggatgaaaacgctgaatttcatgtaaaagaagtccagtatattcaggcagaggtcaagattataaagtgtcttgtggaaaacattgttgttgacatctcatttaatcaagtcggtggactatgcacactatgttttcttgaagagattgacaacttgatcagccaaaaccatttattcaagaggagtatcatattgataaaggcatggtgtttctacgagagccgtattcttggagctcatcatggtcttatatctacttatgcattggagacacttgttctgtacatatttcatatattcaacaactctttcactggacctcttgaggtgttgtaccgtttcttagaatttttcagcaactttgattgggagaaattttgtttgagcttgtggggcccagttcctattagttcacttccggatatgactgcgatccccccacggatggacagtggtgagttgttgctgaacaagtccttcctcgatacttgtagttctgcatatggagttgtgcctcacacccaggagaaccagggtcaaccatttgtttcaaaacattttaatgttattgatcctttacgtacaaacaacaatcttggaagaagtgtcagtaaagtttttttgcttttgtttggggattttttgtggcagtattcttttgctgtcacagtagctgtttga

SEQ ID NO: 27691 - DNA, 1299 bp, Zea mays
  Peptide Sequence Number=SeqID_71066
acactctatgagttcgatgatctcgagagcatcattgataggacactaaagcgcgattttgacaccgaggaagcactctggttgcttaagataggtcttgtgtgcatcccggatagccctaagatcaagccctccatgtcaatggttgctaagatactgcaaggtccatttggaggtccaggatgtcaaaatcaagaacatgagaagcactttgagcattttacacctaatatgagcaaaacacgaaatgaatctgcatttcctcaggatgaaattgactcacatagagagcatatttataatgaactgacctcagattcaattgcttcaaagaagccaaaaataaggaagagagaaaataacaattctgtttcaagttctgctcccaacattcctaatactcaagattttatcactaccttctgtgaggtggtggaggatttctgtggaaaaaccgaaattcctgaagatggaaattgcggtgactggttgtcaatcccacttggtgatgttaaggttctcgtgaatgaaattacatctgttcgatccaaaaggatattgcatgaggttcctatggatacagttacaaggttattggatgtgattgatcgtcagattcgatattctcaagtcagcatgaacaaggtcgaggcattgtacaggttgttcaagaagattggcaacaccttcattgatgatgggctgattaacaaggctctttcaaatggcaagcccactgttgttgagttttatgcaaactgggaactagactctgagaaccctgttgctgatgtggagagcattgtagccaagggcataagagatggtgcaataaatgccaccatagatcaagcaaatggctggatggtgtactgtgtgctggcgttgaccagaagacacgtggtatgggagttgggcgcaagctcaagagccaccgcaggaaccagaggtgggctgacaaagcatacaaaaagccacttgggcaatgagtggaaaaaaccttttgctggatcatctcacgctaagggcatcattctggagaaaatgtatgccaaatatgggaatgatctgtgcttttgttatgttgtacttcttgttcttgggctaaggttcaaggttgttaaggtttctggtgtgtcgctgcttgcactcttcaaggagaagaagccaaggtcagtttggaagaaacattctcctttattcacaaactatgttgattttctgaccaagtgtccttccatacagatccatagaaaatatagtacaggtggcagcacggagaagacgtttgaaagataa

SEQ ID NO: 27692 - DNA, 204 bp, Zea mays
  Peptide Sequence Number=SeqID_71067
atgaccgttggtggaggctgtctgtcgtatggtgcaccggacagtccggtgtacaccggacatgtccgcatgggcgtgcctgacgcctgcgcgctctggcgcgcattaattgctgttgcaggcgaccgttggcgcgaagtagccgttgccccgctgttgcaccggacagtccggtgtacaccggacatgtctggtgatttatag

SEQ ID NO: 27693 - DNA, 1071 bp, Zea mays
  Peptide Sequence Number=SeqID_71068
atgggcgacagcgacaggagaaccaggttcaaaagagggccgtgggcctgcggcgccggatccttcacgacaggtttcctcaccatacgcttcaccgccgccgcatgggtttcctcaccatacgcttcgccgacggcggccttgcatggcaccggagagggcggcccctgcgcggacgtggcccccggcctcagccctgatggcagcgcgctgccccaccggccccccggcgcgagcgggcgcggcgcggcccccacccgacggcgcgggcgaggcacgcgggcctcccggcggggcggacgcggcccctggccacagcggcggcgggcggacccctggccccggcgtcggcgggcgcgctctcctctccaaatctcgccgtctgcgcgcgtccaaattgaggaatccgcctccgaaggagatcgcctccgctgcgccccgactctcggtcgacatcatcgtccgcgtccgatgcgccctggctctcggtccttcgcgcgcgcgcccttcatcgacctctctgccttctcccacctcgaggcccacacccacgtcggcagcgacgcccacggacacgcccaccaggaaacgccctatgcgctatgccccaagaaacatgcttccctggacgacgaccgagaagacccggcgagccccgcttggcaccttcatcttcgtgatgatgttgtccttcaggctgaagtgccacacagtgagaggcattttgggagggacatcatcatgcccaacttgaagtcgtccgtgaccacaacagcgagcgcggtggagtacagggatgaagtattgaaggcgctgccgccagctaaagctaaagaggccggtgtagatgggatcattgttcagggacgtgaggcagggggtcatgtaattggtcaggtggctttctctgtatttgctggtgttggagaacgtacccgtgaaggtaatgatctgtacaaggaaattattgaaagtgttgtcactaagctaggtgacaagcagagtgaaagaaagtgtgatcttgtttatgggcagatgaatgtgcccccgggcgtgctcgtgttggattga

SEQ ID NO: 27694 - DNA, 717 bp, Zea mays
  Peptide Sequence Number=SeqID_71069
atgagggctgtcgttgtggactggttggtggtgttggctgaagaattcgagcttcacgcagaaactctccacctcgcggtttcctacgtggaccgcttcctcacaatgaatgtcgttgctcgggacaagctgcaactactggctgtcactgcattgctcgttgctgccaagtatgaagaaattgagtctgctgagatgaaggtgaacatatacattaatagcatggataacacttacaccaagcagcaagtggtgaagatggaggctgacttactgaaatctcttaactttcagattgggggtcccactgtaacaacatttttacggcaattcatagcttcatgtcgtggaggcaatagtacaagcagagaaaaacttgagttcgtgtgcagctaccttgcggatttgagcttgctggattatgactgcataagctacctaccctcagtagttgctgctgcctgcttgtttgtagctagattcacaatccacccaaagactcgtccttggaacttgacacttgaacaaaacacggggtataaagtctttgatctgcagaaatccatttatgtcatacatgaactgcagttgacaataaggtgcccagatcaggaagccaccaggaagaagtacaaggaccccaagtttgggtgcgtgtcgacaatggtttcaccacgagaaatccctacatctttccctgaagattgccataagtga

SEQ ID NO: 27695 - DNA, 924 bp, Zea mays
  Peptide Sequence Number=SeqID_71070
atggccggctccgagcagcgcgtcgtcgccgtcatcatggtcggcggccccaccaaagggacgcggttccggccgctgtcgctgaacgtgcccaagccgctcttccctatcgccggccagcccatggtgcaccaccccatctccgcctgcagccgggcttttggatcccagatcccccacctggcacagatatacctcatcgggttctatgaggagcgggagttcgcgctctatgtctcgtctatctcccacgagctcaggatccctgtcaggtacctacgagaggataagcctcacgggtcagctggagggctctacagctttagagattacatcatggaagacagtccgtcacacatagttctgctgaattgcgacgtctgttctagcttccctcttccagacatgctagaggcccataaaaagtatggaggaatgggtactttactagtcaacaaggtatcagcagagtcagcaaaccagttcggcgagttggtagctgatcctgaaacaaatgaactgctgcactatacggaaaagccggagacttttgtgagtgatctcataaattgcggagtatatatatttactcccgatatccttagcgccattgaggatgtcttaaaacagaaaaaagacagagcctcaggagatggcaaaagaactgccactattgttggcgatgtctatatccatccatctgccaaggtgcatcctacttcaaagattggcccaaatgtctctatatcagcaaatgcacgcgttggagctggtgccaggcttatcaattgcataattctggatgatgttgaaattatgggcgaaggtgatcacaatgccaaacttggcattactattcttggtgaagccgttgatgttgaagatgaagtagttgtagttaacagcatcgtgctccccaaataa

SEQ ID NO: 27696 - DNA, 174 bp, Zea mays
  Peptide Sequence Number=SeqID_71071
atgcagcactggcattgcaattgcagagtagcagcaacacaggcaagcagcaacagcaaggttgacgggaggaacaactccaactgggttatatctcagctggcggttttggactcgagaatgagttcgctgcaagatcaaactgaaccgcaaaaaattctgaatgagaaataa

SEQ ID NO: 27697 - DNA, 525 bp, Zea mays
  Peptide Sequence Number=SeqID_71072
atgacccggatctactctcggttgaagatgaaaagggatactgagggcctgttgggagccccccttcaatccccttctcctaaacaaagccctaaattgaatagtaaaaatccccttctcccaagccctgaaatgtcggcgttccccgtgtcaagcgagcttcggcatgtatttggccattcctcttacagttcacagactgaatatagccgaggaaccgttactccggttacatcggcgatcaattgggatggcggcttcagtccccagcgactgcattggatagttcaaagcaagccctgtacttgtcgaacaattagtggtgatgatgagttgcagggagctctgctagatacagctccagagtctgctgattgtaatggcattgagtttacaagatcgtcaagtgatggatgtgagacatcaggaggcgacgacactgactgcattccttccagaatcgtgcactgcacgggtcatcgaattgggccagtgcaactctacattccggtcagggtagcctag

SEQ ID NO: 27698 - DNA, 1407 bp, Zea mays
  Peptide Sequence Number=SeqID_71073
atgcaagccatgctccagaaggttgagcaagggctgctgcaaatcaaggtatcagtgcaacatgagcagcaccagctggcgttgtccgcacggctccagacgtcggcgactgtgggcatacaagctgctgctcgtggcttccttgcacgacggggagtgcgggagatgcgccgacagatgctcgaggcagccttggtgacggttgacctcggcacacgggggcgcgacctcgccctgtcggacggccatcagcagcggctccgggccgctatctccaagtgtgagcatgtaattgataatgcaagagaaactaatgatcaaataataccttggagaacttcctcaaatcctgttacaccttgggaaatgaaatttagctacacaccggttcttttttctgtttcacagaagcagccggagatccatctatttagtgctcgctttaaggagcttaatggggatatttctggagcacgtgcagaatatcagcatctttactcagatttatgtcctggctttctagaggccatcgtgaagcattctaatatggaacaccgactgggagataaagaattatcttgttcagtttatgaaaaggccatcgctgctgagaagggaaaggaacagagccagctcttgccgacgttgcttattcagtactcccgtttcttatttttggccatccgagatttggagaaggcaagagaaatattaactgtgctgcatgagcagttaaatgtaacaaaaacagtgcttgaggctgtcattcatctagagtcaatttttccatgcgaaaagcgtattgattttttagactcacttgtggagaagtttgttacacctgaatcatctcagggagaggtggcaagtctagttgacaaagaggaaatatcttccatatttttagagtttttggatctctttggggatgcaaagtcaatcaagaaggctttaactcggcatacaactcttttttcatgtaagagaagcattctgccatcaaagaaacggaaagcagatgacactgttgtctcagacagggacaaatttgctaaaactgtggttactcagtcagccacgggaactgatccaaatgcttccaatcctcctgtttggcctgcaacttctgaagcatctgggcaacaatggggagcttcttatgcacagcaggctgcatatcctgcatatggaacttacgactacagccatcaaatgccccagcctgctcctcaagcagctgcctatggtgcttatcctccaacatactctgcacaggcctatacacaacaaagctacccacagcctgcagtaattccagcagcaccagtaccagcacctacagcgccgtcagcttatcctcaacaacctgcggcagctcaaccttattatggcacaacctactactga

SEQ ID NO: 27699 - DNA, 1254 bp, Zea mays
  Peptide Sequence Number=SeqID_71074
atggagcaagatcaaagcccagccgtcgacagcgcggattctggcgccgcggcttttgattttgcgactggcaatgcacctagctcggctgtgaccagcggaagcgccgtggcccctgacggtggggctcaggcagctgatacttctgcctaccaggccgagcacacggagttgaatgggacgactggcgatatgtctaattaccaatctgcaggagctgcagagaatggcacagccgtcaccgagataggcgagccggttcctgagccatcctacgaggaagctgtgctttcagcagaagaggctagattgtggagtgttgttactgcaaattgcttagatttcaatgcctggaccacacttattgaggagacggagaaaaatgctgagaacgatattttgaagatacggaaagtgtacgattcatttcttacggaattccctctttgctttgggtactggaagaaatatgctgatcatgaagcgagacttgatggtgtcaataaagttattgaggtgtatgagcgagcagttcttgcagttacttattcagtggacatttggtataactattgtcaattcgcaatttcaacatatgatgacccagatatcgtccgaagactgtttgaacgtggcttggcatacgttggaactgattatcgctccaatattttgtgggatgagtatattaagtatgaagagtcactggaggcatggagtcacctcgctgttatatatacaagagtattggaacatcccatccagcagcttgatcgctattttaattgcctcaaggaattggcttcaaagcacagtttttcagaaatacttactgcggaagaagcctcggtgtatgttgtcacgtctgagaccagtgctcaagcgcctgatggtgacacacatcctgatgatatcgataaggctggtcaaccagaactttcatctttggcagatgcagaaaaccttgcaaagtatgtctccatgagggaagagatgtacaagaaggctaaagagtacgaatctgagatcattggttttgagctagctattagaaggccatattttcatgtcaagcctcttgacaatccagagcttgaaaattggcatagctaccttgactttatcgagaaggaagaagacattaataaggttatcaaattgtatgaaagaaaaggcaaactgtcagggcctaaggaggcccatggaggggctgcggtagcagcagccatggtccctccaagggggattagataa

SEQ ID NO: 27700 - DNA, 1974 bp, Zea mays
  Peptide Sequence Number=SeqID_71075
atggcgtcgagcgacctcgccgagagcctcctccccggcggcgggggcggagcctccgcctcacatgacgaatacgaggagcgcgcgtacgactccgaggacaagatctccatcgccgtgtcggattccgacggcgaagacgacggcacgccggcgtcgcgcccgcccttctcgtggcggaagctctggcgcttcacgggcccgggttttctcatgtgcatcgcgttcctggacccgggcaatctggagggggacctacaggcgggcgccgcggcggggtaccagctgctgtggctgctcttgtgggcaacgatcatgggcgcgctgatgcagctgctctccgcccggctaggcgtggccacggggaagcacctcgccgagctctgccgccaggagtaccctccctgggccactcgcgcgctctgggccatgacggagctcgcgctcgtcggcgcagacatacaggaggtgattggcagcgcgattgccatcaagatcctctcggggggtgccataccgctctggggtggcgtcgtcatcaccgcgctcgattgcagaactgatacatttgactcatggtatttccctgatgccagcttcatctttctcttcctggagaattatggcgtgaggaaactcgaggcatttttcgctgtactgattgcaactatggctgtttcatttgcggttatgtttggtgaaacaaagcctagtggcaaggaacttctgatcggtttggtggttccaaaattgagttcaaagacaattaagcaagcggttggaattgtgggctgcatcatcatgcctcacaatgttttcttgcattcagcactagtgcagtccaggaagattgacacaaacaagaaatctcgtgttctagaagcagtttactactataacatcgagtcaattcttgcactcatcgtgtccttcttcattaacatctgtgtcacaactgtttttgccaaaggattttatgggtctaaacaggctgacagtataggtcttgagaatgctgggcagtacttacaagaaaaatatggaactgcattctttcccatcctctatatctgggctgttggtttgttagcatctgggcagagtagcacaattactggcacatatgcaggacagtttgttatgggaggtttccttaatcttcgattgaagaagtggctacgggcaatgattactcgaagttttgccattattccaactatgattgtggctttatttttcgatactgaagatcctactatggacattctgaatgaagcactcaatgttcttcagtccatacagattccgtttgctctaattcctctcatcaccctcgtttcaaaggagcaaatcatggggtcgttcgtaattggtcccatcaccaaagtgattagctggattgttacggtatttctgatgcttatcaacgggtatcttatactatctttctacattactgatgtccggggtgcattgcttcgctcaagcttgtgtgttgtgttggttgtttaccttgcattcatcgtctatcttattgtgcgaaatacttcgctgtattctcgcctttgctcatcaacgtcaaagagctcgagctcaatgcatattctgctgaagcttgaatggaatgtcgtacacggctggacagggtcgcctcgccgaatccccaaaaacgccgccagcgtcagcgccgaggcctccgtgattccccatagcaagcgcccatggaggagctgttggaggagtggggagaacacgccgccggaggacaagggcgaggtcgtcaccgctcgcccgcgggaccaggtgagctgcccacgcgcgagatctatgtgcgcgcttctgcggcggcgagtcctagacagctaccgacggaggagactcggcaagctgcacaacggtgttgaatggccagtgggtgagcagcgccgcacccgctgcgcacggtgtgacgagccgccgaccaccgaccagtga

SEQ ID NO: 27701 - DNA, 276 bp, Zea mays
  Peptide Sequence Number=SeqID_71076
atggcgacaagaccccgtctccatacccttgttgggtggctgagtggctcctataagttcctgacgccctcccaccacgcaagcgcctactgttgcctgaactccgcgctaacgttcgagaccgaggccacaacggcggtgaggatggaggtcgggacgacgaagaaggggagggtaaagagtgtgttccatgttaacccttcgtgttggaggctagatccgaagaccaaaatgtttgatcgaataatggcaaccatcggaaaacgtgaattataa

SEQ ID NO: 27702 - DNA, 2382 bp, Zea mays
  Peptide Sequence Number=SeqID_71077
atggaccatggtggaccggacacgagacagaatttgtgcccagctcggtcgaactcgccggaacatgcacgcgacagcgtcagaaggagcggcaggcgtcatcgcaccccggcgagccgcgagggcgggcgtgccgatgaggcaaagcgaccgcatcgggcccgcggtctccacgcccaaagcgcctcgtgggcattttccctggattgcaacggcagcgggcagcacgcgtcgtttgccacggcgcctcgtctttgccggctccgcgaggaagatcagatcgccatcttaagcaaggagctcgcgacgtgcaagctgcagctggaagtcagagagaaccagcagaagcaggccaccatgcagatcgaagccctccagaaggccgtgcaggagctctcggaccagtacgagaaagactgcatggacgcgcacctccgcatagcccagctggaggcggagaacaccggcatcatgagccggcaggcggaggcggacggcgagcgcgaggccctgaggggcgagctggccgccgtgagggccgacctcgacgccgccagggcgtcggtcgccttcgtgctgcgggaggtggaggccgtggagacgagggccatcctggagcgggagggcaccaaggacgccctggcccggatactgcagctcaacgaggcggtcctgtcgtccgccgtcgcggcgatcagggcggaggaggagaggtcggtcttctttcaggaggccatgctccggttctttgactctgacggcagtaatctcgaggtggtcaggaggcagatggagatggtggagcgcatggaggccgagctgctggcgaagaccgtggaagttgagtacctgcgggcggagctgaagcaggccagcgagatttacgtggcgccgcaaggagattctgatgcaacggtcacggtggtcgctgctgacggttgcgatggtcatgatcaggttcaggttcagagacgtgaaacagcagtggaagatacaggaacggagccggaattcacgtttcagcactcaccaggattatcctttgtctctgatgagatcttcagagtggattgtgacgccgttccatctggtggtagcaagatggaagctgatacatccgaggatttagctgagaatgagagtaaacaaggagcggcagtaatggttggggagacgacagtggctgaagggaactccgatgctcaagagacaagatgtcttgttgctaaaacctctggagaagatcgaagcatcgaagctaacactaacagcaatcaagaaccagatgagtcggacggcgcagttccagacttcgcggcgtgccaagggaatgatgtccttgtgaaagatcacgaggagacgaaggcagacgccagctttgtccttgcaagctccagggacgatttccagaacgcgcactctgatgatgccaaggacgtcatcagcatcgccgagcctgacaaccaagaaccacgagcagagccggccgcagctccgatctccacgccgcgagagggcaggtcggatgcttgcgtcgtcgtcgccacagagatcttctccaaagacgagcacgagttctacaccaaggagctcgagcccgacccggggcagggggccaagctggacgggtacgtgctcgtgtcgaagggcgccgacgtcgcggtcaagaacaaccagctggacgaggcgcgcgccgagatcagcgacctgcggttcagcctagaggaggccgtgcggcgggcggagctggccgaggaggcgaaggcggcgctggagcgggagctgcgggaggagatcaggaggaagcacaccccgtcgcggcggcgcgcgacgtcggactcggaggacggctggcgcccggcgcgcgaaggggcgcggccgacgccgtctcatgcgtccgcgtccgggacgccgtctagggcgatgagaagtgccaggccaggaggggaggacatgccgacgccgcgctgcttgacgcttggcaaggtgctcaacatgaagtacaaggctaaaaaatattgcgcgctgcacggaggcattcatccgtcctgcgattttcgtttcctccgtgtctccgttcttcatcctgcgttagagaacaagacgaggtcgaggacccagacgcagacgcacacgcagcgcgccttctccaccgcgaagtcatcgttccgcgctgccgccgccgccctagcaagatgcaattctgcgcggcctctaggtttaaaggcacggtgctgtggaagtggtgttggattctgtgttgcggcttcggagtgtcattgctacccttctcctgacaacatggtttctttcgagatgaatgacctcaagatatgtgggctggacaaaaagatcgttgagttagctcagtggctcgtttga

SEQ ID NO: 27703 - DNA, 231 bp, Zea mays
  Peptide Sequence Number=SeqID_71078
atgacacaagcgtttatcctggttcgggcttctcgaggccctacttctatcagagggtatgaggcttatattactcgcactatggtgcctgtagtaggggtttacaagcacaacgggagatgggaagtccccaagtccctagagatggtgcataaaggttcaacacaaaccaataaaagattgaagttagagatcaaattcaaaggagcaaagaaaccgagtgtgctctag

SEQ ID NO: 27704 - DNA, 417 bp, Zea mays
  Peptide Sequence Number=SeqID_71079
atggtccaaacaccgacatatggtgagcttggaccgaacgaagagagagggaagaggagaaaccaaggcgggttcccagtgcatcgtgctcaggcggaactcactgtggcaaaggcgacaacaggggctcagcaacgacgacagaatgaccttcacgacggcggaggcgttgctgcgtgctggggtgttacagagcacaagttgttgctatcctcttcaaggttgcatcttaaatcaaatacaaagacaaagatacacttccttctgcctgtaggtgttggttctaaagaagtttcctcgcaatatccatttctagcagagaagcaccttacacaggaggcaagaggtcatggtgcactgatgctcaacatcgacgacgtcatccccgccgatggcgtcttcggccacgcgttgtag

SEQ ID NO: 27705 - DNA, 225 bp, Zea mays
  Peptide Sequence Number=SeqID_71080
atggagttgattctggtaaatgaaaacagaggagcagttgatgtacgtgttggagtcataggaacaaggtttagttttgtgatagacatcacgagtgtgccttccttgcaagtgttggagcttgttatagaggttgatgtcatcaagagctgtgatgatcccatagtggtgtcggtgtcgacacgcccgatatttagctccatcgaatggtctcatacaagttga

SEQ ID NO: 27706 - DNA, 429 bp, Zea mays
  Peptide Sequence Number=SeqID_71081
atgggcaagaacaacaagcgcaaacgtgagccgactcctccatcggaggagtttggtgactcggaatactcagaggaggaattctcctctgagttcgaggggtctccggctcccatccccctgcgtgagtcgtctgatgactcagacgactcccaggggcttgcggcggaggtctggacgtacatccgggccgtcgagcgctccgggctcgagggctcggatgagtctgagttctcctcgaacgaggaggactcggacggcggcgaggacgaagatgacgacgacgacgacggcgacgacgacgacgatggagacggcgacggtgacggcggcaacggcggcggaggcagcggcggcaagggcagcaccggcaagggcagcaccagaggcggcagcagcacgggcagcagcggcaaggccagtggctaa

SEQ ID NO: 27707 - DNA, 240 bp, Zea mays
  Peptide Sequence Number=SeqID_71082
atggaggaggaactcaaacgcacggccacaccctcatcgcttatgtcatctctgctcaggccatccttgacaagccatccacgcacctcaaatgcacctgcgtcgcgcctcatcggagacaacatcggcaccggtctcgtcacctctcgcaaagatcaagctaccggcttctcaggtcttgaaggaatgagaggctgtgtggttggtgatactggtggctacggctctctgcaaacataa

SEQ ID NO: 27708 - DNA, 357 bp, Zea mays
  Peptide Sequence Number=SeqID_71083
atgccgcgactcgaggcgactcagcgcacgacccagcagcgccagcctggcgtgacggtcaatgcgaccaaaaatgggccggcagtaatgacggtggcaggcgggcaggagcagcggtcacgtcgtcagccaagctcacgtcccatccggtggcagcaagagaaccctctctcacggcgtgaagacaacgcgcccgtgctccgttcctcgaacggctcgcgcacgcgcaacggccgccccgccaaccactcgcgtctctggcaggagaagcgggcgacgcttcgccttcgccataatgaccgcgtcaaaaaagggaccgggaaagggagataccccgaaaaggatccttccccgtga

SEQ ID NO: 27709 - DNA, 174 bp, Zea mays
  Peptide Sequence Number=SeqID_71084
atggagagtcatgatctccgggcagaatgggaatcacggcttgtgggtggttatgagattgatgattctggttatgactatgatgctggttgtcagcattgcaaccactgctcaggcgaagatgaagctgtggaaggagacttccaggagttccaagactacgacgagttctag

SEQ ID NO: 27710 - DNA, 402 bp, Zea mays
  Peptide Sequence Number=SeqID_71085
atgggcacccggtcccaaacgggcgtccccttggccggcgtgggctgcgctgctctcgcggatcatctccgcgcggcatcatggccacccaagttccggtcgcacctgccggaaaagtacgacggaacatcgaacccgtcggagttcctgcaggtagccgccgagggccgtgcatggcactcggccccacaaatcggagctactcagtcaggaggctcgggagtcgtcccccgggacggaaagaagaaaaagaagaaggaccgcgactaccagaagccacggtccaccgctctagtggtcgcagccgtgaccgtgggccagggcgacccgcaacaaaacgcccatgcccacagaggggtaacagcggctcatgcccctgtgcaccccaacgggtcgccatag

SEQ ID NO: 27711 - DNA, 777 bp, Zea mays
  Peptide Sequence Number=SeqID_71086
atggcgatcacctcagcacgtgcgccattgcgaaaaggtcctcgcccccgtcttcctacggggggcaacaacgaggccattaaagccaaagagtcggaggcccggcggcaggtggcactgatggtctcatcagcagaggcaaccacctctgcagtggggagcctcaccagcggcggcgaccacctcagcgccgacgacagcggccacctgcgcaccagtgccgtaccggcgaatggcggccgccctagcgcgcgaagaggtcctcgctcctgtcctcactgcgggagtgaggacaagaccatccaagaacgcggccgccgcccccgcgacgtacgacgtcttgtaccgcccccggtgcggccgccggcgcgggagaagcagtggatgtggcaaacctgtgcacgacgcgaccgtcgcccgtgcggtggacggatagccacgcccccaacaaggcggcagaaggcagcgtcggaggcggcgccgaggccatccaagccggggaaccgggcacgcagtggccgacggcacccgcagttggccggtcctgcgtacccgaagttcgcctccttcgcaaggctggtgaacgcccttctcccccaaatgctggaggaagaagcgggccaccagtccacgcggaaggcgggaccccaacttggctcgccctcctccccagcgcggatgatgaacatccttgaagctgaggacagggggaggccgcagcccggctcacttctctccaccacaaggctggtggtcatccctctagatgaccactag

SEQ ID NO: 27712 - DNA, 1656 bp, Zea mays
  Peptide Sequence Number=SeqID_71087
atggactcgacgacgacgacagcgccgctgctgcagccggccgccgccgcctcgagcaaggaggagccggcaccggcgtccccgcacggcgcgggcagctgggagctggaggcggtcctggccgacgcgtcgtcgccggtcttgcggcgggcctgggaaggcgcccgcctggagctgccgctgctgctgcgtgtggcgctgccggcggtgggcgtctacgtgatcaacttcgtcatgtccatgtccacgcagatcttctgcgggcagctcggcaacctggagctcgccgccgcgtcgctcggcaacaccggcatccagtccctcgcctacggcctcatgtggtcacagctcgccagccagtcacgtggccctcgcatttggcaaacgccaagcgcgcagtactcctacagtacagcacagtatcacctcacgtacgtaaaaacacaagtcagctttttttggtccatctcatcatctctcatggtcggccgccgcccgccggatggtgtgcagctggggatgggcagcgcggtggagacgctgtgcgggcaggcgtacggcgcgcacaagcacggcatgctgggggtgtacctgcagcggtcgacggtgctgctgatggccaccgccgtgcctctgaccgtggtgtacgccttctcggcgcgcatcctggtgctcctgggcgagtcggagcgcatctccagggccgccgccgtgttcgtgtacgggctcatcccgcagatcttcgcgtacgcggccaacttccccatccagaagttcctgcaggcgcagagcatcgtggcgcccagcgcctacatctccgtggccacgctggggctccacctgggcctcagctggctcgccgtctaccggctgggcctgggcctgctgggcggctcgctcgtgctcagcttcagctggttcgtcatcgtcgcggcccagttcgcgtacatcgtcaccagcccccggtgcagggacacgtggaccgggttcacaatgcaggccttctccggcctcggcaccttcttcaagctctccgccgcgtccgccgtcatgctgtgcctcgagacatggtactaccagatcatcgtgctcatcgccggcctgctcaagaacccggagatctcgctcgactccctctccatatgcgtgcgggtcgggaacgagctcggcgcgggcaacccgagggcggcgtcgttctcggtgctggtggtgacgtcgctgtcgttcgccgtgtcggcggtgtgcgccgtcgccgtgctctgcctccgcgaccagctgagctacctgttcacgggcggcgaggccgtggctcgcgccgtgtccgacctctgcccgctcctcgccctcacgctcgtcctcaacggcgtgcagccagtgctctcaggcgtcgccgtgggctgcgggtggcaggccttcgtggcgtacgtgaacgtcggctgctactacgtcgtcggcgtgccgctcggcgtcttcctcggcttctacctcgacctcggcgccaagggcatttggagcggcatggtcatcgggggaaccatgatgcagacgctcatcctgctctgggtcaccttcagaacagactggaccaaggaggtggagaacgccagggcgaggctggacaagtgggacgacaagaagcagcccctcctagcctag

SEQ ID NO: 27713 - DNA, 1428 bp, Zea mays
  Peptide Sequence Number=SeqID_71088
atgggtcggacgggtgacggccgccgccgcgacgtcgacggccggctggaggcgctgctctctggcgccggcggcgaggagccgtggctccggcgcgtggcgctcgcgacggctctggagctgcggctgctggcgcccctggccgcgccggccgtggtggtctacatgctcatcatcgtcatgtcgtcgaccacgcagatcgtgtgcggccagctcggcaacgtccagctcgccgccgcctccctcggcaacaacggcatccaggtcttcgcctacggcatcatgctgggtatgggcagcgcggtggagacgctgtgcgggcaggcgtacggcgccgagaagtacgagatgctgggcgtgtacctgcagcgctcgacggtgctgctcacggccaccggggtgccgctcgccgccgtgtacgcgctgtcggagccgctgctgctgctgctggggcagtcgccggagatcgccggcgccgccgccgagttcgcctacggcctcgtcccgcagatcttcgcgtacgccgccaacttccccatccagaagttcctgcaggcgcagagcatcgtggcgcccagcgcctacatcctggcggccagcttcgcgctccacgtgccgctcagctggctcgccgtctacgggctgggcctcggcctgctcggggcctcgctcacgctcagcctcacgtggtgggtgctggtcctgggccagttcgcgtacatcgtgtggagcccgcgctgccgggccacctggaccgggttcacgtgggctgccttcgccgacctgcccgggttcgccggcctgtccgccgcgtcggctgtcatgctggcgctcgaggtctggtacttccaggtgctcatcctcctcgccggcatgctgccggacccgcagatcgccctggactcgctaacggtctgcacgtcgatccagtcatgggtgttcatgatctctgtgggcttcaatgcagctgccagcgtgagggttgggaatgagctgggcgccggcaaccccaggtccgccgcgttctctgcgtgggtggtcaccgccctgtcggcgttcgtctcagggatagctggcctcgtcactttcctgctcagggacaagctcagctacatcttcaccggtggcgaggccgtctcgcgcgccgtcgccgacttgtgcccgctgctcgttgggaccattgtgctctgcgggatccagcccgtgctgtcagggacacatgcctctgagcttctgaagacgaccttcagcggttcagcacgcttggccgttgcatctttccatggcctaataaccggcaagaaacgacgcgctgctgaaacggtgcccagcatgtcgttctgcctctgcaacgccctccgcctggatggtcaccgctcgtcgctgccgatgctggtcctcgtcatcttccagagcccgtgttgctag

SEQ ID NO: 27714 - DNA, 672 bp, Zea mays
  Peptide Sequence Number=SeqID_71089
atgaagcacaacgagttcactactagaacagagctcaaatcactaacaaagtcaatcaagtgcgcagagacggagtgtggaagacttagaatgctcaaaatatgcttgggtggctcctccatgcgcctagaggtcccttttatagccccaaggcagataggagtcgttggaggcattcttggaaggctaatcttgccttctgtcgggtggcacaccggacagccactgttcatgtccgtcttctgcgacggccccgaggaaacgcggtattggcgcgagcagcggtgcgacttctctgcacccagaaaccggtgcgccgggtgcatgacatgtgggcctatgcccccatgccagaggttggactgctggttgcggcgaagccgagggggcgcacaaccgcggggcggttgcacgctccttgtgcggcggttcaccttcttgaccgttggttgcggcgaagatgaaggggcgcactaccgcggggcggtggcatgctccttgtgcgacgattcgcctttttctcgcttcgggccagcttgtatgacatgtgaggcctggcccccgtttcataggatgggaaccctggtgcgcatcgggggagaccttgcccgtgacgcttcggggtgcgagcggggaaatctgcctttaaaaaggggttcatccctcaagtag

SEQ ID NO: 27715 - DNA, 339 bp, Zea mays
  Peptide Sequence Number=SeqID_71090
atggcgaactacccgagaaagggaaaggtgagcaagcagctggtatgctcgtggtcgagcaacacaacacttcactgcgctgcagctgctgcagtgcgcagaggaagagggaggagaaaggcaacagcgagacagaacgggggctccaccacggcaccaccgaacgagctcacatcagtcgcccttgctttgcattcaagtctgcagcgtgcaacttttgataccgtctgccgtttgactcgtgtcgacgtcgacgacgagccagccactggcggagcggctcttgaatcaaaacatgcccttcaactgactgttagtcctcaaggatttgatatttag

SEQ ID NO: 27716 - DNA, 372 bp, Zea mays
  Peptide Sequence Number=SeqID_71091
atggctcctaagaaaggaacttcgaaggctatgacctccatcgacgacccagcaaaagtggtccttctcgctgagaagaagtcaacagcaagcgacactgccaaaagaacccgcctacgctatagggcagcgttcgcacatgcaactctgagggactacctcgggcccctctaccaggcttcacccccagaggatgacgatatcattgaagacagccaagtcctaggcatctcagccgaggaccagctcaagttgtgtgcactttgcatcaagaacaatcacctacagaagcaaaaggaaatacttgcaaccaagcgccagctcatcaccatgcaggccaaggtcaagcagatgatactagatgagaaatag

SEQ ID NO: 27717 - DNA, 1146 bp, Zea mays
  Peptide Sequence Number=SeqID_71092
atggaggaggctatgagggagcaacaagaaaggtttcgtgaagagttgcaacagcagcaaatggcattcgtccaacaacaatgggaagcaggcacaacaacaaccattcgtttgccctcaatttcagtcgctgatgactcagtggtgattacatgctccgacacctctacctcagaggttatgggccacaacatgccaccaccggttatacaagcaccaggaggagcttttggaatggagggagctactacagaagatactccaaaccaaacagacgacttcgccaacaacttctttgcttctggagcgccacgggagcacgagacacggctaaccacaccgagggcagcctcacttactgccgccgccgtcgtcgccgctcgccgcgcacgctccgacgaggcggacgagcgaatggactggtacgcgtggctctgcagggcggggctgcacccggacgtggcgttcgagtacgcgctgctcttcgcgcgcaacgagctcggcgccacagacgtgcgccacctggaccacgacttcctcctcagcatgggcgttgccgtcgccaagcaccgcctcgagatcctcaagctcgcaaggaaggagacgtcctcccacggcagggccgccgccatcaccgtcctgccgtggcgtgccaccaggctgctcgccgcggccgtgcaccggtccgcaagctcggcgctcggccgcctccgcgcctcggtgtcacgcggccaggaccgggaccgggaccgggccagggcggcggcggccgtcctcgccacgccgcgcctgcctctgctgcggcaccgtggcgggagggtcgcgcacagctggagcaagatcgcgtcgcccgtggcgatccgtggcgggaagccgcgagcgctgccgatgttgacgcgcatcagcaagcccgtcgtgctcaccaacagctgcgccgataagtggaggggcgacggcgcggcggtcaagacgctgcccgcgcccgctgggtccatagccgcctgcctcgagagcacggacgtctgcagctgcgacgaatacgaggatggggaagtaagcgacgaggaggaggtggttgtgaagcacagcggcgacggcgaggagatgcggtgggagtccatgttccaggatctcaagcccaactag

SEQ ID NO: 27718 - DNA, 1686 bp, Zea mays
  Peptide Sequence Number=SeqID_71093
atgcgtgggccggcgtcggtgaaggcggggagccggccgccgtggctgggactgggggcggccgcatgggtgcaggtcgcgggcggcgccggctccacgttcgcgctctactcgcacgcgctcaaggtcgccctcggcgccgaccagagccggcttgcgctgctcggggtcgcctgtgacgtcggcgagaacctcggcctgctcccgggggtgctctgcaaccgcctccaccccgcgctgctcctcatcatcggcgctggcgcgtgcctgctcgggtacggcaccgcgtggctcctcgtctctggcgtcgcgcccgcgctgccttactggctgatatggtttgggttatgtcttgctaccaatggtggcgcgtggttggcgactgctgttctagtgacaaacatgaggaacttcccagtcagcagaggtgctgttgctggcattctgaaagggtactcgggtttaagtgctgctgtttacaccgaaatatacactggagtgctccgtgattcacccatcaaccttttgctctttcttactctcggaattcctgctgtgtgccttctggcaatgtactttgttcagccttgtgaaccctctctggtggagacgaatgcagagcaagtccattttatgtttgcgcaagtggcaagtgtttttcttggggtttatctggttggggctacgatattggatcacatcgtgactctcaatgacattatgaactattctctgcttgtcatcatggttcttctcatttttgctcccctggcaataccattgaagatgacgttattcctgaagaaaaaaagtcgatcagattcacactccccaacaactgataatggtcacacagaaccacttttgccttcttcctccgaatcaaaccttggtaatcttgaagatgataccacagacatcgatattctcttagctgagggtgaaggggctataaagccaaagagaagaagaccaagaaggggagaagatttccggtttcgtgaagcaatactgaaggccgatttctggcttctctttgcaatatgctttgttgggtttggatctggaatcactgttcttaataatctagcacaaataggaattgctgcaggtgctgtcgacacaaccatctcactctctgtcttcagtttctgcaatttctttggccggctgggaggtggtgttgtttctgagtatcttgtcaggtcaaggacactcccacgaagtgttctgatcatagggacccaagcggtgatgataattacttacctgctctttgcattgggccggctcgccacactttacgtctctgtcgccttactcgggatatgttttggtatctcgctctccgtgataatctcaacctcctcagagctcttcggactaaagcactttggaaagatattcaacttcatcgcattggcgaatccggtaggcgcgttcctgtttaacaccctcgcgggatatgtctacgatctcgaagtggaaaagcagcacgccacaacatcagggtcggacgttgcatgtcatggccctaattgcttcagactaacattctgtgtcctctccggcgtggcatgcttgggcacactgctgagcacggttctcacggtgagggtccggccagtgtatcagatgctctatgcaggcgggtccttcagccagcccaggaaccccgcacattga

SEQ ID NO: 27719 - DNA, 507 bp, Zea mays
  Peptide Sequence Number=SeqID_71094
atgggggtggcggccgcattcttggatggtcttgtcctcacccccgtaggaggacgggggcgaggacctcttcgcacgcgttgtggtggccgccatcgccggcaagccaccagtgcaaaggctaagcagccacacaggctccggaccaccccatggaacgagctcccgttctttagaattggcccccaggctgtcgggccctcctgctttcgcagagaagtcctaaactaccaacaggccaggcttatgagggcggacctcactgggttggcgtacacgtatgcggtacctagttacaaaagggagaaaaattcaaccctcaaatttgctcctatggatagaacttacagagatgctccagtggtcaggaagaggtactccttcagtcatagcaagatagtcacctccgggtcggcgtatccccgtcaccttgaagggtccttcccagcagggggagatgaaagggaaatgtgcccttgggccatttctaaggattttggtgactaa

SEQ ID NO: 27720 - DNA, 2601 bp, Zea mays
  Peptide Sequence Number=SeqID_71095
atgaagggcgtcgacgatgggttcctcggcgctggcgacaagccagggctggatatttggtgcatctttgggagcagtgtggtcccagttgcaaaatctcagcacggaaagttctacaccggcagcacctacatcatactaaacacaactcagctgaaatccggggttcgcagacacgatgtgcattactgggttggggaggaggctaaagaggaagattgtttcatggcctcggacaaggctgttgagttggacgcagcactgggctccagcacggtccagtacagggaaacacagggtgaagaatctgacaagttcttgtcatacttcaaaccgtgtgtcatcccaatacaaggccgcttcttttcacacctgaaaggatctggtgatagatccagcgcgaccacgatgtttaggtgccaaggagagcacgttgctcgtgtcacacaagttccgttttcacggtcctctctggatcacaaatcggtttttatagtggacacgccgtcaaagcttttccttttcagtggctgtaattctcgtatgcaaacaagggctaaagcgttggatgttgttaagcatctgaaggagaatcgacacttgggaagatgtgagatcgcgacaatagaggatggaaagcttgttggtgattctgatgctggagagttctggaacttgtttggaggctatgcgcctattcctcgtgatctacctgacgcaatcaaggaagagccactaactgcaccatctaagaaacttttttggatcaataagaaaaaccttgttccactcgaggcacacccgttggatagagaaatgctgaactcagacagaagttacatgctggactgcagcactgaaatattcttatggatggggatgacaacactggtttcagagaggaagtcatctgttgctgtcttggaagattatgtgcactcccaaggcaggtcattcaacgttcacacatttataatgacagaaggccatgaaactgttgactttaagctgcactttcaacactggtccaggaatgttgagctaaagttatatgaggctggccgagagaaagtggcagctattttcaagcatcagggctatgatgtcacagaaattcctgaggataaacctcagcagttcatcaattgtaatggcagtctgaaggtttggttggtggaccatggttgtacaaaccttcttagtactgaggaccaggaaaaattgtacactggagactgttatatcatacggtatagctattttgaaaatggaaaaaattaccatctgttctttgcatggtctggtaagaatagtgtaaaggatgatagaatggcggcaacatcgttaatgtctagcatggttgattcagtcaaagggcatccagttgtggcacaagtttttgagggcggagaaccagaattatttctctcggtgttcaagtcactaatcatattcaaggggggcaggagtgctgcatataagagttctgttctacagaaaagtccgagaaatggatgtcatgagagtgaaggagtcgccctattccgtgttcaagggcttaaacattattgtgtgcaggccattcaagttgatctggtgagtttggtaaagttgcaagttcacttaattcctcgcactgttatattttgcaagacaacgccaatggaacagtccttgctagtcagagaaggctctgaaccagatcacttctggaaagctttgggaggacgatcggagtactcgaaagaaaagcgtgtgaaaggttggcctgcagatccacatctgtatgcttgtagatttgaacaaggtttactcaaggtcaaggaggtattcagcttctgtaaggatgacctggcaactgaagagacgttgattctggactgcaatgaagaaatctacgtctgggttggcctacactcagatattacatccaaggagcaagctctcaatgttggcaagatgttccttaaggatgctgttcacggtggaaggtcaatggaaacgacagtgtatgctgtcacagaaggggacgagcctggatttttcaccagcttcttcgactgggacaattcgaagcaatcatatatggttggcaactcatttgagaggaagctcgccgtcctgaaaggggtctccccaaaactagagacaccggacagaagcctgcgcaggccgtctaggaggcccggggtatcgtcggagccgaccacgccggagcaccagcaaccgaccgcgagaagggccttcggctccacgtctgccgggcggtttgccagggagcgctctccggctgttgcaccgccaacgttgtcgccatctcccaaaagccgctcgtcgtcgtcgacgcccaccacggtggcacgacggctctttcctgcctcggtgcacgcatcggaggctgtgcacgtggtctccacggcgacagctcgacgacgtccaaataggctctcggtcagaaacgtgaagccctcgccgtccacacctcgactaactatagcgctggaggtgaccagagacttcgcacgacagcgacttcgtcgacatcggtcattggcttgtggagacgaaggtgtgggagtcctcgaccatcttaaggagtag

SEQ ID NO: 27721 - DNA, 105 bp, Zea mays
  Peptide Sequence Number=SeqID_71096
atggtggtggatgggttgagactacgcctgattggtttactgcgtccgcacacccagtcccacgcgagcctgaccgaccagccaccattcctcgcgtacagttaa

SEQ ID NO: 27722 - DNA, 750 bp, Zea mays
  Peptide Sequence Number=SeqID_71097
atgaatttcccattgccatccctactaacggcagctcccgtggaatatgctgatccaccgcaggctgcagcagggaatgggatccgagggcgcgcgattcgtggcccgagcccgatagggcgggcgctcctgaccgagcccgtgtggtgtcgcgagatcctggacgcccgcagcccacaaaggccatcgttccctcaccgcgagtatgaccccgtgccgccgtcgttgtcgttcccaccgccgggcgacatggtcatgcgcaccttcaccttcggcccgggccacgtcgccgcgatcaagaagagcatctcggcgcagcgtggcagcggcggcggcaaggccacgaccttcaagacgctcgcggcgttcgtctggcgcgcccgcacggtcgcgctggagatccccgcggacgaggacgcgcgcctggtcatcgccgccagcgtcaggggcgtgcgcgacctggggctccccacgggctactacaggatagatcctcaacttagcgacctggagctcggccttcttggccgcgagctcggcctccaggaacgagacgatggcgacagtctccttgacggcgcgcgggcggcggggcgcacctgtgccgaagagcgcgggaagtacgcgtcgaaggaccgcgcgagcgccgacgccttggacggtgccgacccggcggtggacacggaccccgacgtaggcgcccgagatggagacgccgcctccggcacctgcgacttggggctgcgctag

SEQ ID NO: 27723 - DNA, 678 bp, Zea mays
  Peptide Sequence Number=SeqID_71098
atgaagaagacgagatggtggtcgcgtctgaaggccaagctcaagtcgttccggccgcacggccacccccagcgcatcgccgacgcgtcgcggtcgccggagccgccgggcgcaccatgcgccgagcaggcgccgggcagctacaactatgcgcgccacgcgccccaacctacgctggccttcgtggcgccgccgccgtcgcccgccacgtccgtgctcacctcggagtcgccgtcgcccgtggtgctcctcaacgccaacgccagcagctacagctcgcccacggcctccatcttcgccatcggcccatacgccagggagccgcagcagctggtgtcgccgccggccttttccgcgtccgcgggcctcaccgagccgtccaccgcgccactcacgcccccgccggagtccagcctccaactgctggccaccacgccgtcgtcgccggaggtccccttcgcccagttcctatggtcttccgctgcggcagaccagcaggcgcactgctttggcggcggcaccggcaccggcaccggcacggccagcgacggtttcctccacgcctaccagctgcagccgggcagccccgtcctcaaatcgccgggatcgacctgcctcgtcgccgccaccatggaacatggagcagcagcactgggtgccaaggcacagtgctggtga

SEQ ID NO: 27724 - DNA, 456 bp, Zea mays
  Peptide Sequence Number=SeqID_71099
atggtgcggacgaagaatgtttcagcatcaaggggaggagacgacgaggaccctcttcgcccattcaggcaggtcaaggggaagacggtttaccttgagcagcaggagggcaggaagaagcgtcgtatggacagagccgctcatgcagcacttgcagcggtagcagcagtagagcaggctgagcagggaggacagctgcagatcccttctgatcagatagcctatagagttcgtcgcctcgcatctcgacctcgctccattactccctccacaccttccaccactatttctactccacctcccacttcacctactcatgttgctcctgagccatcctctactttcgctatacccaccacctccaccactccagcttccactattccccctcccgctcccatttccgctccgcccatttcaccacctcgctttagggagcgtgtgaaagggaattag

SEQ ID NO: 27725 - DNA, 264 bp, Zea mays
  Peptide Sequence Number=SeqID_71100
atggggttattggtagcggagagggcctatgttcgatccgtcgagcgagcagggctcgaggggtcggacgactcggaggaggaagactccttggaggactatgaggaggaagactccgaggaggaaggcggcagtggcagcgatgggaacggctacgaggcgatgacgagggtggcagcgacagcaatgagagcggcaagggcagcatcggcgcaagcggcaacgacgatagtggctatgatgcgacgacaagggcgacaatag

SEQ ID NO: 27726 - DNA, 1380 bp, Zea mays
  Peptide Sequence Number=SeqID_71101
atggccgtgactgaggaaggcccttcgcaggaggccacctcagccacgaagaagagaaaaatagccctcgggggaaggatgtcttcgcccgagctccgggagtcttcggcacggatgctggaggttaccgggggtcgatggcccaagaatgttccgatcccccgcgcggctagcgaagacttctttacgtctcgcatggctcgtgacttgaaggtttttccttacggacggaatattgctgctgttgtatcggcagtgatggagagggaccgtcaagacgctgcgcagaaacgatgggcggtcgtcaggatcgcggatcctatgcgagaggcgaagaaggcgcgggggagcgcgaaggctgctgcctctggcagtagcaagccggtgccggctgcgaaaccggcctcccccgggcatagcaaggcactggcgagtgtgaaggttgccgcctctggcgggagcaagccgcccccgggcgggcccgtgaaaggacgaaggctgccttcccgacgcgacgtgttgccgacttcagcacggacatcagtgtcgatgattattttgttgtatcatggtgcagggtcgggtgaggggcaactggctattgtcccacctccggtggcaaccacttcgccaacagcggtggctggggcgaagggtgccgcgcgggacccgtgggccactttctgcacgagcggcgagattctgtcggccgatgccgctaaggacgtggcgggctccatgtctcagcgactgagggaagcgtcacggcagttgtcacagcagctgaagcgagcggccgactttgccgaccacgtcgcgtcgggtgccttgactgcggacgttgctgctgaggtcgagagtctccaggcacagcatgcggatgttgtgcgggagaagtcggctacggaaagaaaaaaccacaggctgtcggagaaggtggccgccatggaggccgagaagacggatctccggcgccagctagcggaggagaggagggaggcgaacaaggccatcgctgatgcgcaggctgtgcaggccgaggccaaagtggcgcgggcggagggcagtctagcccgccaacgcgccgaggagctggaggcgaggttcaacgccctgcgcagccacgtggacaaggccaaggccttacgcgcgcggaggtcgagcgaacgcacgcgcaattcatggatgcgtaccgggagctgggaggagctgttgttgctcccgaccattgtgatgggtttcatgtccttcgcctcccttgtcacatgcgagggggccgtgaatgctttgtcccgcgaggggtgtaggcattacgaggtcttcgaccaagcggacgaaactttgaacgtgaaatcttcaaggtcgaagaccctgtgctga

SEQ ID NO: 27727 - DNA, 354 bp, Zea mays
  Peptide Sequence Number=SeqID_71102
atggctgcaacagagggcatcggccataggaactgctccctgcgcctgcacctagggaggagcagagaggggcaccgagcacaggggggcataagtccgaccatgcctgctggccgagcagaggcgtcggccatagggactgctccctgcacctgcaccaaggaaggggtagtagggaggaggatgaacaagcgctggctgggagatgcggcgccctggaggagaggaggagctgctgctcgcctacacgaatggagtcgaggagaggaagggaggccggcatgggaggagctctacgtacgcacaggaaacagagagaacaagaagctgctggtggcggctaggaaaaaatag

SEQ ID NO: 27728 - DNA, 504 bp, Zea mays
  Peptide Sequence Number=SeqID_71103
atggcccgtgcccacgcctataaagcccccagggacttcgaccgtacccctccacacgcgctcgacctcaccggagcccaaacccaccggcgtttgcccgtgcacggcgtgtccgcggccgcccgatccccctgccaccgtagaccggccaacagaacccttcccaaccccgtccgaccctcggagaagaccgagcacacctcggtgaagctccccgagcaaggaatcggagtttgcttcgccggagaggccagttcacggtcgccggactccacccgaccgccggcgagcgtagaccgggaggtagccccggatccagcaccagagcctgcaccagaggatctgcctgccactgctttggaaggcaagccccggaatcctattgagatgaatactcgttctttggaggacatggttgctggagtgacttggccgtccatcttgccaccgggttggactgtcgagtgggaccccgcctcggctgaggaggagcatgaggagtga

SEQ ID NO: 27729 - DNA, 486 bp, Zea mays
  Peptide Sequence Number=SeqID_71104
atggggccattaggattcgagttagggatcaaggtgaacatccctgatctttggctcaagcaaccatcgcgcttgcacctgacgcattgcatcgatgtcgagtggaccctagtggtcaggccgcgtcttcctcgggttgttgcgcctgaagccgttttcctcgccgcggaagccgcttgggagctcgccgtggccgttggtggactcgagccttgccctggagccaagagtataagttggagcgtggtggatgctcgtgtgggtggtctaggcgtccgagaatttccccaccggagcacttcaaccactgtggagccgcgagatgccatgggcgatggtctgcagactgcggcgcaggaactgggccgagttgacctcatgactcatgcgatagatcccaccgcgggggaaggccctgctgcgtcatgtgttggcctaagggaagaagaatgtgctgccaccgtcgatctattcgcggacggctag

SEQ ID NO: 27730 - DNA, 507 bp, Zea mays
  Peptide Sequence Number=SeqID_71105
gcgactttcagcgtgaagagactgaggtgcgactactggctgctgatccgcgtctcctcgaccttcagctttctactgcaacccgagtacaccgattcagacacccaccggtgccaattcagagggtcatcttacctatctgccaggactgctttcactattgaccacgagtggcagggcaccctcgaggcctctctccttcagctcagttcctatcttccaacacctgaggacccagtcccagtgccagattcagtgtcagatatctgggctgaggatgagacctttagacagttcgagacccagggtgccgttgctaacacatcttcagataatgatgagggcctggggatcccgccaccggctcctgtgcctcctcgttcacatgatcatgaggcgggtagttccagtgctgctcctgctctattgaccctgctctggccgctattcttcagtcacttatgcaacatcaggctcatctggcaacagagtaggctcaacaggtag

SEQ ID NO: 27731 - DNA, 1818 bp, Zea mays
  Peptide Sequence Number=SeqID_71106
atggcggcgcccacacgtgatggtgccgagtcagtgatccacccacgcgctccgacatcgacccgcccatgcggtccgctggttccccgaactccgaccaaacgcaccagcgacaaaccgaaggtcaccggcgagctcgatcctttctctctcttggtttcgttctggtgggacggtggtgtggatgcgaggacttggcaccatggagcggagataggggtgctcggtatatatggccagggtacggtcaacgttgggcaggtgcgccatgcacggaggccgttggagggtttaccggggcgagctggcagcggcgagctagatctccgtggagaggatagatctgtcggcaaggacccacgcgtcagtgcgcgcgacgggagacagacacgcgggcccagcgtaccagagagttcccccagcgcgcgcggtatcccgttggctgacaaaccggccccagaggtcagtgaagggatcgaggggcagcgcgggaaggctgtgcggtcgcgcggtgaggtagcgggccggcgcatgtcgggtcaaacgtgggcgggaggcaacaggcacgcgcgcacacagcaggccaggccaggaccaggaagccgcgtggagatcccgtcgatgactcgattccactggcacaccagtccccggtcgagccgccagggtaggaaggcgggcagacagaacccggcgtcgcgtcgtccactcttccccgaccccgcggccaagtccctatttatgtacgccggtccagttcgtgcaatccacgcagaagcaaaagtctttcccttctatccttcctcccccctgatccatcccattcggccaccagcgacagcgatgggctcacgctacgaggtggaggtcaccgtgggctccgcccgggacctcaagaacgtcaactggcgcaacggcgaactcaagccgtacgccgtcgtctggatcgactccggtgccaagtgctccacccgcgtcgacctcgacaacggcgagaacccgacgtgggacgagaagctcctcgtcccgctcccgcccacctcccgcctcgacgacgccgtcctctacatcgacgtcgtccacgccaacgccgccgagggcgtcaagcctctcgtcggctccgcacgccttccgctccgcgacgtcctcgacgacgccgggatagggggcaaggcctcgcgcaatctccgcctcaagcgcccctcgggccgcccccacggccacctcgacgtccgcgtagccgtcaaggagccgtccaggtactatgaccccaatccctacccggcccccgcgggctacgccaacgcgggcactcgtgacccctacggctcatccgcggctgctggcggctactacggctccggaggaggctatggcagcggcggcggttacggcggcagtggcagctacggcgccgcgcagccctacaccgcggcgcctcctgccgggtacccttccacctatggctccgcgccgcctcctcagccgggatacggcgctcctcctgtcgccgctgcttacggcgctcctcctgtcgccgctgcttacggcgctcctcccgtcgatgctgctaccgctgcgtacggaaccagcgccgttggtgccgacggcaagaagaaaaacaagatggggatgggaacggggctggcagtcggcgcggcggccggcgtgctcggaggactggcgctggccggtggggcgagctacctggaggacaagttcgaggagcgcgtgtcggagagggtggaggagaacctggagagggaagattcgtacgggggcggctacgacaactatggcggcgacgacgactactga

SEQ ID NO: 27732 - DNA, 669 bp, Zea mays
  Peptide Sequence Number=SeqID_71107
atgacatcgatatttttaccgaggtatccgaaaccacgcaaggtcccaactaatcctcgttggtgccccaacgcaaagggtatcccatgcgagggccaagcacctcgatcgagtaactccgtagagagtcgcgattcttctccacatgcaagtggtgctccgcttctagctcctctcggacgctcccatccgtctccactatcgagcttccgaccgaaaacgccgcgggcttcgttccctcagtggtttggtggtctgaagaagaagtttgcagggcgttttttgtctaagcatcgtcgtgccgacgacatagattataaccttgccaccgattcagaggcccaatcattagctgagggcagtgtctctttggatactgaagatgcacctcacactcatccggattatcctattgacgtcacaggatggacgtatccaaagggaactctcatgaacaccaagttccataagcatcaggccaaaaccatatttgaggggcagtgtgagactgctcacactccatttagaccgttcaaaaatgagattgattttctcactaggcatctcaccccttttcctgatgatgagggagttcctgcagatgacttcgccgctcagcctgaggcacatccagctcagcagatgccacctcctcatgagcaaggatag

SEQ ID NO: 27733 - DNA, 186 bp, Zea mays
  Peptide Sequence Number=SeqID_71108
atgggtcacagcgcaagcgggtcgggacggaacgcctgcctgcggtctttgctgatacgacacccactaaaatactcatttctagctttcgagggtaaaacgagcgatgaaatgccattttcgccgtgtaatgatggtaccaggatcgaatacagatattatcgagttgtgttggataagatttaa

SEQ ID NO: 27734 - DNA, 768 bp, Zea mays
  Peptide Sequence Number=SeqID_71109
atgcgcaagcccgcctccacccccgccaccgtgctctcctcgcatccgctgaccctgcgccttctagcccgcctgctcgcgctccttgctcctcgactgatacgcccctcccacccggcgctctcgtccctcccgctccaccccacctcgcccgcagccgacccgagccaggaggacctggaccacacagatgcggtggcggggtgccccgttgacacgcgcacggtcaacgtgctcatcaggggctacgggcagtctctgcatctcaacgatgtgctacgcctgttgcaccagatgcggccactgtacgggtgcgagccagatgcattcacgtacagatacctcgtgcacgggctgagcgcgcagggccgcaccaggaatgcgcgggagctgttcgatgaaatgcgcgggagtggtctcctgggaagccataccagctcacagtgcatcaccatgatggaggcagtgaatgatggaggtgaccttcacatctctgtgaccatgccttccattgagggcacatgtctaaacctgctcggtgtcaggggcccgaaccgtgactcacctggggcaaatgctagggacgttggggtggtgcacatcctcgggaacacggtcatcggggcccgcagagatttagggttcatcaaaaagattgctatcaattacttgtatgctttccttaggaagatctacagggagaacaacaccatcttcaatgatccccatgagagcctactgaatgttgggcaagtgttctatgtataa

SEQ ID NO: 27735 - DNA, 540 bp, Zea mays
  Peptide Sequence Number=SeqID_71110
atgtactgtttgatgtccggtgcaccggtatgggcaagtctgacgtctgcgcgcgcattaaatgcaccgcagggagccgttggcgccaaagagagccgttgctccgctggcaagggtttgacacggcgtcaccatcgcgtgggacccacactctcccaacagcctctcccatggctgggcggcttggccggccctcccggttgcccatggcgtgctccctccaccgcgccctacttcctctccttcacctgtgtgtcatcgtcgtcgcagtcgccggatttggaggcaatctcccggttccaggagcacctccgtatcgatacggtgcagccggcgccagactacgccgtggccttcccccgaaggcagtcctccatggctgggtgcgtggcacgcacgctttggctggtcgctgggtaccccgtctcatcgcggggagatacgcccgtggccgagtcggggaggagaatggaggcgagaaaagtgcgtgatgccgcggaagatccctgctgggcctgccggtctggcctcggcagctag

SEQ ID NO: 27736 - DNA, 321 bp, Zea mays
  Peptide Sequence Number=SeqID_71111
atgtccgacggggatggacctcctcccgtttttgatggtgacgattttccatattggaatattcgtatggaagcttacttagaggctatagacattggtatctacaaagccgccactcaagggttcctcgaaccaagagatcccacaaatcttgtaggagaagagtatgatgcggacatcaacaccaacacgagcacatctacaccagcagcaccttctccagcccaggcgccaccccttccacctgggccagtgactcgggcccgtgcaagagaattgaactacatcatgttgttaaagaacgaaggcccggaagaatag

SEQ ID NO: 27737 - DNA, 390 bp, Zea mays
  Peptide Sequence Number=SeqID_71112
atgtgcaacgaaattttgggaaattacactaaaaaagaagatcagctgatgactgcagccttcggcacccggccgaagcgaaggcaagctgctagaatggtaaaagaagatgaagaaattctgaagaggagaaaatcgagccctgagccgaagaagaagggggagccctcggcagtgaagaagtctgttgggccaaaaaggcagagaattattactgttattgaagccattgaagaaacaccaccgccggcctcggcgtcaaaaacaccagctgccgaaaacgatgctgctaccgaagctgccccgccgaagctgcaactgccgaagctaaagcggtcgaagatacaaatttggaggacactttttgtgatattgataaaacgcttttga

SEQ ID NO: 27738 - DNA, 423 bp, Zea mays
  Peptide Sequence Number=SeqID_71113
atgggggcggcatctctcaatctcactccgtggcggcactggataggaaagtcaagggagcaagggaaggagaagggggtccgtgcattaaatcggagggagcgcggattggagggggaagccggtaggcgcgggttgacttcaaccgcccaagatccccggagtgcgttccgcggcgacgttgaagaacatcccgacaagtgggttccacatggcagtgggacaccaatggccaagccggtcaagcgggcacggtgggagttcgctgctgggtggctggcttgtggccccccgcacgccagaactgttgcgcgcacgggagaacactctgacgggaggggcccggctgtcggcgcaagggacacggcgggctgtgcaaaaggatattctggtgggccgagtaagggaaatcagcccagataa

SEQ ID NO: 27739 - DNA, 453 bp, Zea mays
  Peptide Sequence Number=SeqID_71114
atggaaatgacactattgaacatctcaggagcagacttgagtgatttagccgtggagcactccttatgtccatccaaagaaaatggtgacaactccaagttcctgcttgccagggagaacctacttggagtcctacattcaaatgagttctatgggcactttctgaggaatctcattgatgcagctaatatcgctgcattggcagctttatctactttctggagacctgaatgcacggttggtggggacgatggtcagcaagttacagtgcatgatcctgaggttagagatccacttcctcttacgatacaccatatgcccatagctataacatttgcatattttggtgaaggtaacatcgtggttcttgatcccacatacaaggaagaagcagtaatgggatggaggatgactgctatagttaactcaaatggggatgtttgtgccatttag

SEQ ID NO: 27740 - DNA, 570 bp, Zea mays
  Peptide Sequence Number=SeqID_71115
atgggcgcggcaggccacctggcggagagggaggtcggatgtgtctgcctggccaacggcggtgcggaagccagaggcacgagggcggcgagcggggaggcgcacccgagcctcgagcgcggcgagcgcgttgctctgcagctggatcaggccgccaggacgcgcgccttgggctccggcgctggcattgccgccaccgcggcggtgagccccgcgcgggcgggagggaggctaggcctacgtctcagccgcggccgcgacgtggacggggagcgaagcgcgactagaagacggagcgctcggttgccgcgggagacggggtggagcgggctcgccatgcgagagtgggaggaacgagaggaggggagtgagatagtctttggcgatgcagcctgccttgtgctgagcacggtggaggagcggtgggtctggcggtggcacggcggccgcggttgggcgcggttgggcgcgacggacgcggttgggcacgggtctggtggcggctcggtgggcgcggttgggcgcggtggcggcagcgcgcgaggtggaggagcggtggtggaagcgtag

SEQ ID NO: 27741 - DNA, 198 bp, Zea mays
  Peptide Sequence Number=SeqID_71116
atggcggcgtccgagctcttccccctcccctgcgcagctgcagccccatggccatggatttccaacggggctcgagcggtttctcgagtgcctctccatgatgatgaggatggttatgatcatgcttatggtaatggtaaagaaggcgtcgaggcagatctccaggagttccaggacgtcgacgagttcgaggattag

SEQ ID NO: 27742 - DNA, 612 bp, Zea mays
  Peptide Sequence Number=SeqID_71117
atgttcaatattattgagcctacgaagctgggtatccctaaaaaaagaggagagactctagggctgaggcatcatgctgctattataaataagattgcattggtcactattcttcccaagagtggggataaaagcaagatcaaagataagttcttgaacattattgatcatgtgatgaagggagaggttatgaatgtggttctattcaagatgaggcagcttaacgaccttaagatggacaagaatcagaatctggtctatgctccatatataatggctctgattaaggctaaaaccatatttgaggggcgatattttgatccttacttccagcagatgcagcacaggctccagactcatatggatggaaggtttcagggcatgatgatgcatgtggatggcagatttgatgccatgcaaactcactttgatggccagtactctgccctgaacactaggttcaatgccgttgataatcatctggatgggatgcactctcagtttgattatcttcgctctcgtattcaggatactgttcatgatcccatcatgagcaaaatgaacaacatgcaacagagctttcaggacaatatgggtgctttgtccaattag

SEQ ID NO: 27743 - DNA, 1125 bp, Zea mays
  Peptide Sequence Number=SeqID_71118
atggctgaaaggtaccaactcccacggagttgcgttcctccaacgacaaggcgaaaggactgcgggcatcccccatccgggggcttggaaggtggaaagacacgatgcataagggagcgcgaagacatggtcgcctttcaagggggtcacccaccttttaaaggcgactctccctacttgcgtcccaagccgtcgtgggctgagtcttctccaacacgctccaaggtcctccccctacggcgcgggggctgggtctcacgcgtcatgcaagctggcccagagcggaagaagccaaactgccgcgcgcggtgcatgcaaccgcccagcggttacaagcggctctccacttttgcccagaccagcgggcgaaaggacgggcagccatgcaggcggcatgcaaccgcgccaagtgggcgcacttctccgacttccaacacacccagcatgggggcccaggcccacgcgtcattcaaccggcgcgccggatgctgcgtgcgagcaactgcaccgccacccgcgccactgccacgcctcctcgactgcggaaccaataacgcgactcgaggcgacccagcgcacgacccagcagcgccagcctggcgcgacggtcaatgcggccaaaaatgggccggcagtaatggcggtggcaggcgtcaggagcagcggtcacgtcggcagccaagcttacgtcccatccgggggcagcgagagaaccctctctcacggcgtgaagacgacgcacccgtgttccgttcctcgaacggctcgcgcacgcgcaacggccgccccgcgaaccgcacgcccagtcgcattaactccgcggcgggaaaggcggggccggaaaagggggataccccaaaaaggatccttccccgtgaaggaaccaggctccgagcgtccctactgatcagaggttcgaaggctggcccctcggaagggttcaacagccgcctcagagcgcgtgggctccacacccactactggtcagaggttcgaaggccggcccctcggaagggttcaacgaccgcctcaggctactcgggctccgcgcccactactgatcaggggttcgaaggctggccctcgaagggttcacagccgcctcagacacagagcgagggatga

SEQ ID NO: 27744 - DNA, 225 bp, Zea mays
  Peptide Sequence Number=SeqID_71119
atggacagggttcagtacagtgacttgatgcccctttcattcgcgtccgagcctgcgagcgacaactcaaaaagagaagctctatcttcgatccaagttgcggcgctgctggatcagcatgtctctgcttctacgtttacaagatggtacaggtggacacaaaatgaattgactattcctctcactctaaggcacacaaagaacaataatatggacatgtactag

SEQ ID NO: 27745 - DNA, 291 bp, Zea mays
  Peptide Sequence Number=SeqID_71120
atggcgcctcctgtcggcgtggtcggtccacgccctaggttgggcgatgtggaggctcctccgaggtcgaggtcgagtctgtctttcgcggccgtggtcgagcccgagcccctgggtcgggcgaagcggagaccgtcggctaaggccagggctgagtccgagccctggggtcgggcgaagcggtccggtgcggcgcaggcggcgctgtccttgtgtcaggtcggtcagtggagcggcgaagtgactgcggtcacttcggctctgtcgactgaagggcgcgcgtcaggataa

SEQ ID NO: 27746 - DNA, 261 bp, Zea mays
  Peptide Sequence Number=SeqID_71121
gtgtgcactcgcatagagaacgatccggttgaagagcccgaggaactcgcaggagaagcccctgagcaggagtcggttggtggaggcaagatccggggtgtagttcgcttcgccgtcgtgccgtcaatggggctcggtgtatgtggctcgctctgccaaggtggttatgagatcgatggttttggttacgactatggtgctggagaatttgaagccgtggaaggagacttccaggagtttcaagactacgacgagttctag

SEQ ID NO: 27747 - DNA, 288 bp, Zea mays
  Peptide Sequence Number=SeqID_71122
atgccctgcttccaccctgagctggtgctgcttgactgttctgctgggtcgcaggggcaggaagacgaggtgcctgctgattctgcctctagaactggcctcctcctgactgattgctctagcgattctgatgctgatgctgaggacattgcctttgaaactgctgctgctgagataaatgcggccttcacaggcagccgactgggggatgccgctaacccacgcctagaacacgtcgtagtgttaaaactcctggaagtctccttccacggcttcatcttctcctga

SEQ ID NO: 27748 - DNA, 489 bp, Zea mays
  Peptide Sequence Number=SeqID_71123
atgggggcggcatctctcaatctcactccgtggcggcactggataggaaagtcaagggagcaagggaaggagaagggggtccatgcattaaatcggagggagcgcggattggagggggaagccggtaggcgcgggttgacttcaaccgcccaagatccccggagtgcgttccgcggcgacgttgaagaacatcccgacaagtgggttccacatggcagtgggacaccaatggccaagccggtcaagcgggcacggtgggagttcgctgctgggtggctggcttgtggccccccgcacgccagaactgttgcgcgcacgggagaacactctgacgggaggggcccggctgtcggcgcaagggacacggcgggctgtgcaaaaggatattctggtgggccgagacgccacccgaagcagcttgcaatgaaccagcagggaccaactcggtaccatcaacagagcccaaaacttggtcagcgggaacgctag

SEQ ID NO: 27749 - DNA, 447 bp, Zea mays
  Peptide Sequence Number=SeqID_71124
atggccgcgccctcggccgtgtgccccggccgtgcccacggctgtgccctcgcacgcccctacccgagcccatgccccggtggcaatgagattgatggtttttgcattggtattgactctggtaatgcatttgagaacaagtccccaacattggcgcccacctccggtgaactcacttccactcttgagctgatggcttcgttcagcagccacgctgaagcatcttcggctatgaagctggtgcttccgataacaggcggctcagccgagttcgcgatccgcccatatcttgctaggtggtgtaatttacttgctctgcgactgattggacatttgatggacgttctctggctagtcttcacgtcgcttctgtcggtcagattttgtacttcaccggctatatttggctttcctctgatccttactgatatctcatttttgtcttga

SEQ ID NO: 27750 - DNA, 444 bp, Zea mays
  Peptide Sequence Number=SeqID_71125
atggcccgcgcccacgcctataaaacgcccagggaccttgaccgtacccctccgcacgcgctcaacctcgctggagctcaaacccaccggcgtttgcccgtggacagcgtgtccgcggccgcccgatccccctgccaccgtagaccgggccaacaggacccttcccagccccgtccagccctcggaggagactgtgcacacctcggagaagctcctagagcgaggaatcgaagtttgcttcgccggagagccaagtccacggtcgccggactccacccgaccgccggcgagcgtagaccggactgtaacctcgctgacggagagtacgtcctcgtgccggagcaaggagctgctcaggaggtagccccggatccagcaccagagcctgcaccagaggatctacctgccactgctttggaaggcaagccccggttttatgcataa

SEQ ID NO: 27751 - DNA, 159 bp, Zea mays
  Peptide Sequence Number=SeqID_71126
atggctacgaccctgtttggaggtcgaggaccaccgcacggtagcagcgaagcaacggaacctagttttatagtctggactccgaatcctacccaacgcgagaagatctcaaccccccgccgattccgccaggtttcaattatcaaaaagtctacatga

SEQ ID NO: 27752 - DNA, 942 bp, Zea mays
  Peptide Sequence Number=SeqID_71127
atgcgcgcgcacggcaggccggtctcccacccgcagctcaccctcctcgttcgcctccacaccgccgcgcgccgccccctccgcgctctccacgcgcttagccgcttccgccacgagttcgacgtcgaagtgtacaagtcacacccctcccacctccccgagaggtcggcgctgcagacgggggacagacagtggttcttcttcagccggatggaccgcaagtaccccaacggctcgctcgccagccgcaccactggcgacggctactggaaggccacggggaaggactgcttcatctgcggcggcgtgcgggcggttggcaacaggaagacgctggtgtaccaccatggccgcgcaaggttggagttctggtgttttcccttggttggagttccaagccaaaacaccgaagccatatcatacatgatcacctatggcttcgccgctgtcattagcacaagggtgtccaacgagcttggagcccggaacatcgccaacgccaagaaggcgctcaccgtgtccctggcgctgtccctgatgctgggggtggcgttcctgctgctcctgggcctcggccacgacctcttggtgcgcctcttcaccaccagcgaggtcgtggtcagcgccttcgcctccatgacgccgctgctcatcggctccgtcgtgctggactccacgcagggggtgctctgcggtgtcgccaggggctgcgggtggcagcacctggtggcgtggaccaacctagtggccttctatgtcatcggcttgccgcttgccatcctcttcggattcacgcttggcttccaaaccaaggggctgtggatggggcagatatgcggcctcctctgccagaactgcgtcctctttttcatcaccctgcgaaccaactggcaggagttagacctgaccatgttcaacaaggacaacgattttgtctgctag

SEQ ID NO: 27753 - DNA, 342 bp, Zea mays
  Peptide Sequence Number=SeqID_71128
atggcgcagtggcttacccggtctacgttcgccggcggtcggagggattctggcgaccgtggactggcctctccggcgaagcagacttcgattcctcgctcggggagcttcaccgaggtgtgctcagtcgtctccgagggtcggacggggttgggaaaggctgggctggccggtctacggcggcagtggctcgggtggccgcggacacgccgtgcacggccaaacgacgctcgcccaagtcgcaaacgtgcgaatcttggcaaaaatccggcgcgagtcttttcctggcacctagggctgtctctcatccgtgagtcgccatggcagatatgccctaggtag

SEQ ID NO: 27754 - DNA, 837 bp, Zea mays
  Peptide Sequence Number=SeqID_71129
atgacttcccacggatcctcagatgacggtaatgcactgtcccacactgacgagcttgcacgagagggctttccctgcattttgtgggaggtacttcagggggccggatacacgatgcctcctcagtacgcggtgcaacagttcgagaagcatcgagtgccccgctgtaggccaggctggcgttcactagactctgagtcctttggataccgggctgaggacacgatcgaggcgattgctctgcatgggttgaccactttctgcggattccatcccttggagctgtctacccaccccattggcttgttccccgcggaaagggaggacgacccaatgtggaaggaccgggtggagcatgccaaggacatctgggctatctacccaggtcagactgcgcacttgaccgtacggtgcatgaatgctctgtaccgtctgcaagtgatgcgtggtgaggcaatgtctcatctgatggcactattggaggcaacaaagatcaccttggacaacagagaggagcttgtggttgatttgtccactgagatggtggaaaaggacttgcaggtggagcagctatccaatgagatccaagagctggaggaattagtgggtaccagggagaacaccatcgaggttctcgaggatcagctcattaacacccagcagcagcttgccgaggctaatgagcacctggatatgcatcaccaggagatccaggacatggaggccaacgaggatgtcgacattgagggaggagaggagcctgcctccagcgtggacactgctggctccgggagaccaccttcccccgagtcgagtgttgcttcgttcgctcactag

SEQ ID NO: 27755 - DNA, 249 bp, Zea mays
  Peptide Sequence Number=SeqID_71130
atggcgcagtggcttacccggtctacgttcgccggcggtcggagggattccggtgaccgtggactggcctctccggcgaagcagacttcgattcctcgctcggggagcttcaccgaggtgtgctcagtcgtcttcgagggtcggacggggttgggaaaggctgggctggccagtctacggcggcaggggctcgggtggccgcggacacgccgtgcacgggcaaatgacggtgagtttgagctccggtga

SEQ ID NO: 27756 - DNA, 225 bp, Zea mays
  Peptide Sequence Number=SeqID_71131
atggccatgatgggttcaacattggaaaagatgtacctctgtcaggtgaagaagcagcaaacttttgttgcttctgttccaaggtggtaccaaaagaagagaatcaagactaaactgcgggaggaaagctttggcagagactgcttcagcttcgacagcaacatttttgctttggcttcattctttcaactgcttgtcgtgcctatagagattttgaaaagttag

SEQ ID NO: 27757 - DNA, 294 bp, Zea mays
  Peptide Sequence Number=SeqID_71132
atgggcgcaaggaattggagaatggctcaccggatagctcggcctacgcgtggtggcgggcggccgaagtccagcgacggtgatcttgctgttccgatgaggcagggcttcgatccttgcttgaagaagcttcacggctcctcggggaagctgtccaagggctctgttgaggctgagggtctctggaaatggctggccgcggtgaccggcgctcgggtggcacaggcgggtggcgcagagctcgccggagctaaggaaagtgtctggtcagcgaaggcttatgggttttgctga

SEQ ID NO: 27758 - DNA, 237 bp, Zea mays
  Peptide Sequence Number=SeqID_71133
atgacacatgactttgccatgactgctaagttgccaccatacgaggatatgatggatgagttcaaggttgctgatctcctcatcaagctcctcttctcggggtggtgggctagtgaccttcttcttctatttccatgcttctctaatgagagcttcgttcccttgattaggatcaagggcaaggccgccgccatccaagccacagtagtccactgccggctaagctcacagccatag

SEQ ID NO: 27759 - DNA, 255 bp, Zea mays
  Peptide Sequence Number=SeqID_71134
atggccctggactatggacacaattaccagaatccacagggtttaccatataaaagtctggacggcgggttgtttttaaacaaggacatggtctctttagcaaagtttctcggccgaaggggtacgcttcgactaggaccgtccgatctatcacccacactccagattaaaagttcaatattccgaatcgatggcatcaagattcgtgcccttgacatgtcaaatctgggatttcctctcggagttcagcagtga

SEQ ID NO: 27760 - DNA, 1299 bp, Zea mays
  Peptide Sequence Number=SeqID_71135
actgcccccgcccccgataaccccacgcccgcctccgcccgcacgccggaaacctcgctgcaggaaaccgccggcattaccacccgcccgccctaccgcccgcccgcaaatccttccgcgaaccgccctaacacccgccgcaatcccgcctcgttttcctgctacagctctagcctccgcgaaaggacatcggggacaacgtcaggcgccggtggcaggccgggctcgcgggcgcacggggcgccgccaggcggcctggtgctggtatccaaggatctggacaacatccgcgagatcgcgctgcgtgagtacaccgagctggtgatcgacgagacgaaggtgtcggaggccgcgcttgtgcggaacgtgctgtacgcgtgccagggcgtgtccgatcgtgagccatggcggaatccatcgtgtccggcgccgccgccccgccgccgggcgcgccctttgttctcctacctggtcgtgttctccaactgcccgctcgtcgccgcggttccattcgcgctgtccatctatgtcctcgccacctggcatgcaaagctcaacttgttgccaaatcaacaagcaaccaatgaggtgtggggcttcatttctgacaacataagccgctcgccctcagatgctgccattgaggtgggcactgttacccaggcattctgctcggcgctccaggaggagctatctgattattacaagctgctggctgttctggaatcgtactcattgaatccaattcccacacctggatctaattcagcccgatatttgctgatattgtacctgagaggtcaaggacaagcatctatgcattggaccgttctttttgagtcagttctagcttcattcgctccaccagttgttgggtttctagtcgagcatgtctatggagagcctgtccataggcaggtcattgataatggccttcttccaatacttgtgaagataatgaagaaaaagaaaagaaggttaataactcatgcaaatgcgaagagcaagagtgaaaagttccctccgctacatcaggatggcgcacttggatttcccttgggctgttcgaaccacatggaaccttcatttgaacccccagacccttcttccttcagcactgtatttccttacgaaaaaagcaccgtgccaacctggtccggaccattggcggactctgcagctggcaaccagaagcgaaaacacaagtctggccgctcctcaaaacaaccagcaaccgcccgtgctagaaaaagtggtcatcgcagactatttggaactatttggaatgtcagattttaa

SEQ ID NO: 27761 - DNA, 345 bp, Zea mays
  Peptide Sequence Number=SeqID_71136
atgacgcgtggacccggagccgctgtatatcgcctctatagctctctgcccaaccacctcgcctcggcctatataggagggcgagtgccgccaacccctcttccccatacatccgtgcccgagttccatgtgatcgagtctagaagccgcaccgcccccgaggacaggatttggaacctcgctgtgtacaaggggtcaagcagtctcattagctgcgagaagcagacgattcgaatcgagtttttaaaccttgcaagactcgagagcttgttcctgatcttcctcgtggacagctccttgctcgagaatgagcacgtactctccgtcagcgaggttgcaatctaa

SEQ ID NO: 27762 - DNA, 345 bp, Zea mays
  Peptide Sequence Number=SeqID_71137
atgaagaatcctgtattctcttttcttatgctgaagggttgtaagatcaatgctgatactcaagcagtgcaggccattgggcagactctggcagccatgcagcaggctcaacagcaaccccaaccccaattgcaagtgcagatgccccagatgccacgagataagcgtgggagagttctgtatggtccccgtcagctaagggagcagcccagtcctggtggggagtcctacctcgccacccatgctgaccccgaagcatcactgggagattcagcgaagagtttcgcagataccatgtgccagaggactgatgatcgtgagaaggaggagtttctacctctctga

SEQ ID NO: 27763 - DNA, 175 bp, Zea mays
  Peptide Sequence Number=SeqID_71138
ccgtgctcacggttatgagcggccaagggagctccagagattagtgatacttgatcagagatattttggtacaggtggcaatgagattgatggttctggttatgattatggtattggagaagatgaagctgtggaaggagacttccaggagttccaagactacgacgagttctag

SEQ ID NO: 27764 - DNA, 393 bp, Zea mays
  Peptide Sequence Number=SeqID_71139
atggctttcttctaccttgacctcgtgctcgtgtgcagggagctcgacggacagggaggttcgacggcggcaggggggttcggccgagcagggagcgggacatggggtctcggcatcgggcggggctccggcgtggcggctcgacgagcagggcgcggctccggcggttatggcgaggcgcgcaggaactttgatgagcagagcgcgagcgcgggcagagggagagaggagagggagagcttgagcgaatctggcagggagggagcagatcttggccggtctacttatagagaggggaggggagagagagacgccaggggagttgatggttttaaggtgttacaaacctaccccctaaaaagaatctcgtcctcaagattaaggaacttctga

SEQ ID NO: 27765 - DNA, 174 bp, Zea mays
  Peptide Sequence Number=SeqID_71140
atggccttgctctccacagtggaaacatgccctgtttccaacctgagctggtgctgcctgactgttctgctgatttgctggggcagtgatggcgtcggggttggcatgggtggcgaggtttatcttggtcttgcaggcgggattgccataagactggtgtccacgctgaggtga

SEQ ID NO: 27766 - DNA, 624 bp, Zea mays
  Peptide Sequence Number=SeqID_71141
atgggctacctgtcggggaccgtaattaggggtacccccaagactcctaaactcggctggtcaaagctccgcccactcaagggacacgatctcgcctcgcccgagcccagcctcgggcaagaacagcagacccaggaaaacagcgctgcctgccctgctccaactactgtgccacccgccagggtgaggctgacagcagccaagtctagcctcaggcgccataggaagctccgcctcgcccgaccccagggctcggactcaaccacgaccccggaagacggtctccgcctcgcccgaccccagggctcggactcaacctcgaccccggaagacggtctccgcctcgcccgacccaggggctcggactcaacctcgacctcggaagacggtctccgcctcgcccgaccccagggctcggactcaacctcgacctcggaagacggtctccacctcgcccgaccccagggctcggactcaacctcgaccccggaagacggtctctgcctcgcccgaccccagggctcggactcagcctcgaccttagaggagtcaccgcctcgcccgacatcgggctcggaccgaccacgttacaggggggtacatcattaccctacccctagctag

SEQ ID NO: 27767 - DNA, 321 bp, Zea mays
  Peptide Sequence Number=SeqID_71142
atgcaggtggcatgcaactgcaccacagagatgcaccctttcgacttcgacgcatccagcgtggaggcccaggcccacacgtcatgtaactggcgcactggttgctacgtgcgaaaaactgcaccgccacttacgccaatgtcgcgcctcctcgactacggaaccgatgctgcgactcgaagcaaccctgcgcatggcccaatagtgccaaccaagcacatcggtcacagggaccgggaaaggggatactccgaaagggatccttctccgcgaaggaagcgggccccgagcccccctactgatcagaggttcgaaggctag

SEQ ID NO: 27768 - DNA, 300 bp, Zea mays
  Peptide Sequence Number=SeqID_71143
atgcctcgcgtggccgccatcgccggagacgaccgcgcctcgcgtggccgccagagcgacctgcgtctcttgtggcaaccacaaccgctgccaaagcctatcgcgcaaccgccgtcgccaccgggcctagggtgcgccgccgtcgctcgtttgcttcgggagtgccgtcgtcgcttacctacccgcctcgggagcatcgccgtcgctcgatctaccgctggtcgcccgcctcggggcggcactgcagttggccctcgggatcgccgctcgcacgcccaagagaaccaccaccaccgctaa

SEQ ID NO: 27769 - DNA, 504 bp, Zea mays
  Peptide Sequence Number=SeqID_71144
atgcccgcgctctcccctttcaccgccgtgtgggcccgcctcgtcagccagcgcacttctctcttctccccccgttgcaacctccgcggtgatctcgggcacctgggggatttccgcgacttcacctgccggcaggatcgggtctccgaaatccgcgctcccctggctataaagctgtgccccgtgaccccctttccatcggtgctcgctcgcgccgctgccaccgagatccaccgcacccttaactcgccggcgctgcccttctgcacaaatggggtggctctggggcatcgcaagcgtgcaaggaatcctctctgggttggcgcgcagctcggggtggtcggtggcctgggcaattgctcaccggagcacagcccagccgctcacccgcccttcgccgtggccaggcaccatctcggtacaattgccggtaagtatacctccatcgtgttcgctttacgctcctctaggcatagcatcggggaatttggccatggggcctag

SEQ ID NO: 27770 - DNA, 333 bp, Zea mays
  Peptide Sequence Number=SeqID_71145
atggaccagctgctggcaatggagtactgcatagactgcaacccatcctgggctgggcttgaaggcagcagtggttgcggtaaagagaacaacgatactgctgagccacaggcgccaatggattgtcctagtgtctctgtgccgcatcttctggtagctcctgccactaggttggaaggggacgatcttctggtagcaaggtctgcgcaccctagttcgatagctgctgctgccggaatggggatggtgaacactagcatacttgggcagtcctctcatggggcttctacatctacaattgaagcagaagagctcccaagctccgctttctga

SEQ ID NO: 27771 - DNA, 207 bp, Zea mays
  Peptide Sequence Number=SeqID_71146
atggagctcaaagaaacaaacatttgttgccctatccaccgccaaggccaagtatgttgccgcagtgaggcaatggggtttaaggccactaggttctccgttttggtgcttaatgccaaagggggagaaattaaggccaaagcaactggatcaaccgccacttgtgattttaaaaagcctttttgtgttttgaacgtgtctatttga

SEQ ID NO: 27772 - DNA, 315 bp, Zea mays
  Peptide Sequence Number=SeqID_71147
atggctactcaggatgatgaaaaccgtgtaagaaaattgttaagtgccattggaaaagtctggacagctgaagagaaatattttgatgctgtaactggtctgagcatgccctggctttggggaattaaccgcggcacaactgcagctgggaaactatctttgcctatctttgggctggcaccttacaaattacgtgcctccatttggacatctgacaaaacccaagaatgggaccgcgtcacctctctgatgcaggaggctgacagctggctccgcacaatacaagtacaacgtggagatgacccgtggctgtaa

SEQ ID NO: 27773 - DNA, 1125 bp, Zea mays
  Peptide Sequence Number=SeqID_71148
atgacggtggcaggcgggcgggagcagcggtcacgtcgtcggccagactcacgtcccgtcaaggggcagcaagagaaccccctctcacagcgtgaagacagggcgcctgtggagaagcggacgacgcttcgccttcgccgtaataaccgcgccaaaaaaggctgtccctccgaggggttcaacagtcgcctcagatcgcgtgggccctacacccactactggtcagaggctggcccccgaagggttcacagtcgcctcagacgccgagcgagggatgaccaggggtacgttcgatacataaccaaggctcgggttgcgctcccgagggctcggactcaggctaagccccggaagacggcgaactccgctccgcccgccccggggctcggactcgggctaagccccggaagacggcgaactccgctccgcccgacccagggctcggactcgggctcagccccagaagacgacgaactccacttcgcccgacctagggctcggactccgcccgggcctctgccgaacaacctccgcctcgctcgacccaggggctcgggctcggcctcggccatggaagacagactcgacctcagcttcggaggagcctccacgtcgcccgacccagggcacaggccagccacgtcaacaggaagcgccatcatcaccctaccccaagccgactcgggccgcagagaacaagaccgctcccttacggaagcagggggacgtcagcaaggactcaaccgctccgacagctgtccctccgccaggctccgttgctcctccgacagccacgacatcacaacagcagggtgccaagatctctccggctgccacattggcatggccttcttagagaaggttggccgcgcggggacgaggacgggacaggcgctctcctggggccgctcgcttccctcacccgcgtggacgcttgtaaccccctactgcaagcgcacccgacctgggcgcgggacgaacacgaaggccgcgggatttccacctctctcacgcccgtctccggccacctcgcttccccccttcgcgctcgcccacgcgctcgacccatctgggctggggcacgcggcacattcactcgtcggcttagggaccccccggtcttga

SEQ ID NO: 27774 - DNA, 1605 bp, Zea mays
  Peptide Sequence Number=SeqID_71149
atggaggccaccgccgccgagacggggctcgcccagagaccggttgtgctgtacccgtcaccagggatgggccacctggtctccatgatcgagctcggcaagctcctcggcgcgcgggggctgcccgtcacaatcgtcgtcgtcgagccgcccttcaacacgggcgccacggcgcctttcctcgccggcgtctccgccgccaacccgtccatctccttccaccgcctgcccaaggtggagcgcctccctctcgtcagtaccaagcaccaggaggcgctcaccttcgaggtcatccgcgtctccaacccgcacctccgcgagttcctggccgccgcgaccccggccgtgctcgtcgtcgacttcttctgcagcatcgcgctggacgtggcggaggagctccgcgtgccggcctacttcttcttcacctcgggcgccgaggtcctggccttcttcctgcacctcccggcgctccacgagcgggccacggcgagcttccaggacatgggggaggagcccgtgcaggtgcccggcatcccgccgttcccggcgacgcacgccatcctgcccgtcatggagcgcgacgacgcggcttacgacggcttcgtcaagggttgcgccgacctctgccgctcccagggcgtcctcgtcaacacgttccgcctgctggagcagcgcgccgtcgagaccgtggccgcgggccactgcacgccccccggcctcccgaccccgcccatctactgcatcgggccgctcatcaaatcggaggaggtgctgggcaagggcggcgaggagtgcctggcgtggctggacgcgcagcccagggccagcgtggtgctcctctgcttcggcagcatcggccggttcagcgccgagcagataagggaggtggcggccggcctggaagccagccggcagcgcttcctgtgggtggtccgggcgccgcccagcgacgatccggccaagaagttcgagaagccgccggagccggacctggacgcgctcctcccggagggtttcttggccaggaccaaggacaggggcctcgtcgtcaagtcgtgggcaccgcagcgggacgtgctagcgcacgcgtccgttggcggcttcgtcacgcactgcggctggaactcggtcctggaggcgatcatggcgggcgtgccgatggtggcgtggccgctctacgcggagcagcggctcaatcgggtgttcctggagaaggagatgcagctggccgtggccgtggcagggtacgacagcgacaagggcctcgtgccggccgaggaggttgctgcgaaggtgcgttggatcatggactccgaaggcgggaggatgctccgggagcgcacgctggcggccatgcggcaggccaaggacgcgctgcgcgagggcggtgaatcggaggccacactggccgggctggtggacgactggaaacacctgcccgacgacgaatggtcggcgctcgggtctgacgcccgggtccccatccctaaggtctctatcaagtacttcatcggcggggaccgcaccttcggccccgacccctcctcccaatcgtgccttttctcgctgctcccctcctccgttgcccgaatcaccaacgcctag

SEQ ID NO: 27775 - DNA, 255 bp, Zea mays
  Peptide Sequence Number=SeqID_71150
atggggtccaggcacagtgcttgctctgccgaggctgggtgtcgaggttctttcgttttgcttttgttagtcaccctcctgcgggaagagagatacttgatcagagatgtatggtttacaggtggtgatgaggaggatggttatgattatgactatgataatggttgcctttggtgcaacctatgctcaggtaaagaagaaggtgtcgaggcggatctccaggagttccaggacttcggcgagttcgaggattag

SEQ ID NO: 27776 - DNA, 1059 bp, Zea mays
  Peptide Sequence Number=SeqID_71151
atgcgcctaggggtcccttttatagccccaaggcagctaggagccgttgagtgcattccaggaagacaattcttgccttctgtcgcttggcgcaccggacagtccggtgcaccaccggacactgtccggttttacctgagggggcactggattggccgcgcgtggtccgacgaggccacgctgtcgcgtctggttggcgcgctcatcgcgttcaagccgctctactcggtattgaaactcgcctcccgcgaggtcatcatcaggacggcggagaagtcgaacatcccgtggagggagatgacgaaggaggtgctggagtcggatgtaaacgacatcctggacattggctgctctgttggagtaagcaccagatacctcgccgagaagttcccatcagctcaagctgttcatgttgtatttgaagagcaatttggcagtgggagattgttggcttgcatttatgctcgtcatgggtactacatccttgagggtaaagagctcgagttctacatgaagaagctccagaggaccggggacgccgaggaccagggagacgacgaggtttcggggctgcgtgtggcggccgaggcgtgggcgacatttcggaggcagcgaggcttgcgtgagggggcgagggggagggaggcagaatcacggtgcacagatgatgatattccgaacgtcatcctcgccaatactgcaaacgcatcttcttcctcattttggcataatgacgcctatgagcacttcgatcgttatctagtgcggaggttcttcctgacgtcaagcggcgtcccctacgacgtgctcaccagcccgaaggcgatggccaggcgatcgctgtggtacatgagcgcgcgggccttggcctcctcgtcgatgtcgtggagcacatggcacgccacgtaccctatcgcgtggatctgcgcatggagctcccgcaccttcgtgtacgcctctcaccgcttggcctggaccgccgtgtcatcttcccccgccgaacgccgcagtccgctcctcgaggacccgccgcttgtcgccgcgagcgccgagcttgag

SEQ ID NO: 27777 - DNA, 531 bp, Zea mays
  Peptide Sequence Number=SeqID_71152
atggtgatgctggcgaccctgggttgcactctcctcctcatgtgctgcgcacgatccaggtggagaaacgacctccatcgtgcaaggcccatcctctgggggtgtcttcatcgctcggcgctgaggaccggcataagaagcaagccgtgtatgcccatagttggaatggcagtagacggtttagggttttactcatctcactttgcaaaacctctgtccaaaaagcctaaaagaagctttatcggcctggtgaaggttgtagagggattggtctctactgaagagcttgaaaaggacttcgagttccattttccttggggggaaacttggaaggtgtcggtgtttgggacccgaccgcgcacccggggttacccctcgaggtgcttttgtgtaggaatttcaaatacttgtgctcggccagttctctcgggactcccggcatatacgcaggctgccatgcgaatacgtcttggttatcttgtaggaactaaacgagcacaccttcctatttgtcgtccaggctggagctga

SEQ ID NO: 27778 - DNA, 657 bp, Zea mays
  Peptide Sequence Number=SeqID_71153
atgggcccaaagcctttcgcgaggccttctagccttctagtgtacccgggggatatctgtcccccacagaaggccactaaatgtcattctctattggatgatatgatagatttccctaaactgaaaatgaagttgtctagatctaaaattgttgtgactcctgggagttcacaggctaaaccaaagtcaaaattacatgatgtttggtttgtggcagaaaatgttctagaggaactacaaaattatcaagccatttgcgaacttggttccaaagttggtgctgttgaagaagtggacctgttatccttagatactaaggatattgtgaggttcaaggtgcattttaaaagtgtggctatgattccaccaattattgaggtgggggtccaacccttcctttatgacatatttctcaaaattgattctataattgaagaaggatggaatgatgattctattaaccttggtaagagagcctctgttgagaggcatggttttgatgaccatgcttttgaaaaatatggaaaagccaaaaacgaggaagatttctttgaagatgttgatattcctgctgttgatgataaaattcatgataaaattttgggaaatgatgatgaggacttcaatgagagtgaagatgacctaatgagctcttaa

SEQ ID NO: 27779 - DNA, 318 bp, Zea mays
  Peptide Sequence Number=SeqID_71154
atgctcccatctccgacggcgagcccaccgaatcaagggaggagcccccacggcttgaggcgcgtcaacgttggagcaggcgctgaaacattcgacgtcatcacgaggccagagagtaggatcccactcaacccatatctcgagacaaggaatccgaagcagaagaaactcctaacgacagggatctttgcgaacgtcaaaactctcgacgtcgtgatcaccttcacgcctaggagctcaagcgggaatgagcggagcatgatgccaaacatcggtgcgacaatgcgctccttccctggaacctgctacccgacttag

SEQ ID NO: 27780 - DNA, 186 bp, Zea mays
  Peptide Sequence Number=SeqID_71155
atggatgtgttccttgtcttcgccgtggtcgagcacgtctgtaccccgtccgataccctggtgctgtgccgatgccgcgcgagccacaccgcctctctacatgttcccagccgggcatgcaagccatcacccacgcgcgtcgccagccccctccacttcaccgtgcgcaggagtgacacaacctga

SEQ ID NO: 27781 - DNA, 735 bp, Zea mays
  Peptide Sequence Number=SeqID_71156
atggccgagcgtgatgaagtgggcgtacttggagaagtagtcgaccatggacctaacccagtcctggaccaatgcttgatggcccgggatgtagaattccgagcgaaggcggtaaagcgtcttatgaatgcccttgtgacccaccgagtgggccaaacgcagcacctggtggcgcaagtcgttgtgtcccagcacaaaatccgaggtgcgtacagcgacaacccgttctacaggcgccacgggctaggcagcatgccctcctgtaggtggcgggtaagcagttgtgcgtccagggcctccttggtggtggtgcggatgtcgtcgatatgggcgaacaaaggggccagagagagcgcgggcagttgcctcatcgccttcccctgctcgagcgatactccacgtgaagtcgtacccaaagagatcactgatccactgatgttgtggcaccgtggagaggcgctggtccagcaagtacttgaggctgtagtgatcggtgcagacgatggcgaggagtgtcacactgcttgcactaggccgatcaactcccactcgtatgctgcaagtttgagatgtcgagcagcgaacgaccgactgacaaaagcgaggggctcaacaccttggtgcagtaccgcgtcgatccccatgcctaacacatcgcagtcgaccatgaacggcttgtcgaagtatgacatctacagaacggggtcggtggtcagtgcaccctttagcgcgtag

SEQ ID NO: 27782 - DNA, 1599 bp, Zea mays
  Peptide Sequence Number=SeqID_71157
atgaacgtcatcccaccgacgagcactgctggatcgacgcactgcctgcgtattggagctgttccccttgaccactgcatgtgtcgctccacatccgagcacacccttggcctccctgttgctgactggcctgttccactaatcagcaggggcattgtgctatcaatttggaagatggcagatgaggagcaggccccaagctctaggaaaagggttgcaggtactcaaatcaacaaggataatccggaacctgatgatgaaggaacagaacaagagatgggtacatttaagaaagctactgaagaagttatggcaacacggaggattgtaaaggttcggcgccagcagacgtcatcagcttcttctaaccctttctctgcaatcagatttgcccccactgattctagtgctcaaacaagtgctcctgtcccagaggtccaaccttcagatgtcaaagttgacgagggaagcaatggtagcgggaaagatactttgtctctgcccgacaagactgctggctctggggtaaatacggactctagtgcctcaactgaagcaccacctcagcctgttgaaaccagtgacaaggcagaagacacaaaggacgaatctagtggagacaaagtggtagttggagaacccaatgaaggcagttgcatgccatctgaagttgagggcaaaacaaaagagggagatgctgaagaaaaggaaaggacagatgaagctggaaatatcgataaaattagcaaggatgacactgggaagaaagatggagatgacactgagaagaaagatggaggtgatgatactggaggtgaatcagagcagaaagggcaaacaccatcagcaacaccccttttctcgtttaagaatctgtcaagtggtcaaaatgctttcacaggtctgaccggaactggattttcaagcacatcattctcgtttggctcagcctctaaagatggctcaagtgctggtcccctatttgggctgaaagctgatggttcttcgttcccttcttttaatcttggtgctgccaccaatgggggttctgccacagctcttgctacttcagcagaggcacccaagatgtttgctatgacagagggccctgtcgaaaccggtgaagaaaatgagaaggctgtattcagcgctgattctgctttgtacgagtacttagatgggggctggaaagaaagaggaaaaggtgaactgaagctgaacgtccccgtatctgggggcgagcgagcccggctcgtcatgaggacaaaaggcaactaccggctggtcctgaatgcaagcctctacaacgacatgtcgctcaaggacatggacaagaagggcgtgacatttgcctgtatgaacagcattggggagtcgccgagcagcctcgctacatttgctctgaagttcaaggacacggccaccagggaggaattcaaggatgcggtggagtctcacaagacaagcaaggcacaggaactgccgctgaagacgcccgagaactctccgaaggcagcagaagctcgtgctgatggaccaaaagcggtgaaggacgagcgttgggtcttggctaatgtaccggagcagctgagtgactag

SEQ ID NO: 27783 - DNA, 213 bp, Zea mays
  Peptide Sequence Number=SeqID_71158
atgtgggtgcagtctaaattttgtgaggtgaaccctatagcctgggcagttcctacaaaacatgagggcgatgccagtgaagaagcttctctcgccgatgagacacttgcatcagaagtagtgctaacccggaagaggaaaataggaagctctttgtcagtagagccaaaccatctctctgatgaacttgaaccaaagttggaggatgcataa

SEQ ID NO: 27784 - DNA, 168 bp, Zea mays
  Peptide Sequence Number=SeqID_71159
atgacaattgacaaacctctatatgaagcgccccagatcctctgggactcaaatgtgatacaattactagtcctaggagatctgcttaaacgagacaaacctataaaggtggcgatcaactttaagagttggtccacaactcgagacatatcatcggagtggggctga

SEQ ID NO: 27785 - DNA, 1890 bp, Zea mays
  Peptide Sequence Number=SeqID_71160
atggggaacagtagccagcattttttgaccctccccattggcatgcctggctcagttgaattgctggaaggcaacgatgagaattgggaggaggacgagaaagagcaggctcgtgacggtgaccgtgaggccccaaagaaagctccgatgggacggctagccagcctaaacaagccagaggtaccgatacttgtgttagggtcgctagccgctggagtccatggagtgctcttcccgttgtttggcctgatgatctccaacgccatcaagacgttctacgagccgccgcaccagctgaaaaaggacgcgagcttctggggcttgatgtgtgttgtgcttggcatcgtgtcgatactgtcaataccggtggagtatttcttgtttggggtagccggcgggaagcttatcgagcgcatccgtgccctgtcgtttcggagcatcgtgcaccaagaggttgcctggttcgatgatcccaaaaattccagtggagcacttggcgcaaggctgtcggttgatgctctgaatgtgcgacgtctagtgggtgataacttggccttggcagttcaggtcacctcgacgctgatcgcgggattcgtcattgcttttgtggcagattggaagctcacgttgattatcctgtgtgtgatgccactgtcgggtgtgcaaggttatgcacaagtgaagttcttgaagggtttcagccaagacgccaagatactgtacgaagacgcaagccaagtggccaccgacgcagtcagcagtatcaggaccgtagcttctttctgtgctgagaaaagagtgacgacgatttacgatgacaaatgtgaagcctcgaagaaacaaggggtcagaacagggatggttggaggcctcggtttcggcttctcgttcttgatgctgtaccttacatatggactttgtttctatgttggagcgcagttcgttcgtcacaacaagtctacttttggggacgttttcaaggtgttttttgcactgatgctggcgacaattggggtgtctcagacaagcgcgttggcttctgattctacgaaggccaaggattcagccgtctccatatttgcgttgctggacaggaagtcccagatcgactcgagcatcgacgaaggctcgacgctagacgaggtcaggggcgacatcgatttccggcacgtcggcttcaagtatccgagtcgcccagatatccagatattcagcgatttcaccttgcacatcccctccggcaagactgttgcactcgtgggagagagtggcagtggcaagtcaacggtgatctctttgctggaacggttctacaaccctgactctggcaccatctcactggatggggtcgagatcaagagcctgaaagtcaattggttgagggaccagatgggtctggtggggcaagagccaatcctcttcaacgacacgatccgtgccaacatagcctacgggaagcatggggaggtaaccgaggaggagcttgtcaaggtcgcaagggcggccaacgcgcacgagttcatatcgagccttccccaggggtacgacaccactgtcggagagagaggggtccagctatccggtggccagaagcagcgggtggccatagcgagagccatactgaaggaccctaggattctactccttgacgaggcaacgagcgccctggacgccgaatctgagcgcatagtgcaggatgccctggacaatgtgatggtcggcaggacgacggtcatcgtggcgcaccgcctctccactatcaagagcgctgatatcatcgccgttctcaaggatggcgtcatagtggagaaaggaaggcacgaggcgctgatgaatatcaaggatgggttctatgcctctctagttgaacttcgttcagcctcatcgtag

SEQ ID NO: 27786 - DNA, 1314 bp, Zea mays
  Peptide Sequence Number=SeqID_71161
atggggagcgcccgcgtcgctttcgtcttgtcgtcgttggaggaacgcaacttcgcggaagttggtacctttcagccatcgctcggcttcaaggattttcatcaggcagcccggctgcatcccctcgtcagtgcttcaaggatcttcatcatccttgctggggcggagggcgggctaagccggagctctacctcccgcacgggttcgtgggtcaccctctccttcagcattcaggggagagggcgctcaccggccaagcgggaggggcagactccgacaacgcggggctggtcgaccgcgagcgtcgtcagcttcagtgcgttgggctcgctggctcagctggctctggctcggctcccggtgccccctcccgccgtacgagcggtcgttgcggcgcgcgcaccggagggccacccaagacgtcgtgcgctgctagggcggcgttcatgttcttgggttgtcctgcctttgctccagtacgacgcctctgcgcggaggtcggtgctcgcctatccgggaggatccgagtggggatctgccggtgggcagatggctgctgtcgtcgacgctgaggtggtggcggctgaagaagtcctcgtcgccgacgagatcgccgccaccatccgcgctctgggcctctggctctttggctttgatagcttgtcctcgccccttgagtggggacgtgggcaaggggctcgtcgcagcagcgtccgccctgaggtcattgatgctgctgtttggccacccggagcggaggagtccctcggctcggtcggccttgccgcccgaggcttctcttgcttagttaaaggaaccctcggccgctctgcgatgagccgaagccagaggcagcggtgccagcacggacagaggcagagttggctcgaaaagaggcttcgttggctggagcctggtcgggccgtccactggcgggaccgacgccgtagtcgggttgccgaggccatgagccgggctgatgtcctcgggggacagctggctgaggctatggagcggccggttgagccgtctgctcggaccgggcgtggtgccgacatgttccttcgaggtggagatcctccgaccgtgttgccgtccgaggccgggtcggattccgccgaaggtggagtcgacaccgagggtgctgttgctcccccactgatgtttgatcctgcaggaacagtttatctgtatggaatcgcttatccgagcgtgagttacttatcgcagaaggtgatgagtgagagggggtgcccccttttagcccccgagggagggtcgggctttgccgaggcaaggctgacccttccttga

SEQ ID NO: 27787 - DNA, 771 bp, Zea mays
  Peptide Sequence Number=SeqID_71162
atgcaggcggcatgcaaccgcaccaagggggcacacccattcggcttcgacgcgtccagcatggaggcccaggcccacacgtcatccgcgggagaaggtgcgacggtcgatatggccagaagtgggccgacagtgatggcggcgacaggcgggcggaagcagcagtcaagtcgtctgcaagctcacatcccctcctgggacagcgagagaaccctctcccacggcgtgaagacgacgcgcccgtgttccgttcctcgaacggctcgcgcacgcacaacggctgccccgcgaaccactcgtcccgtcgcattaactctgcggcaggacaggcggcacctttggcaggcgaagcaggcgacgcttcacctccgccataatgaccgcgtcaaaaaagggaccgggaaaggggatactccgaaagggatccttctccgcgaagaaagcgggccccgagcccccctactgatcagaggttcgaaggctggcccctcggaagggttcgacagccgcctcagagcactcgggctccaagccctcctactggtcagaggttcgaaggctggcccctcggaagggttcgacagccgcctcaggcccctcgggctccgcgcccaccactggtcagaggctggccccgaagggttcgacagccgcctcagagcaagcagagcgagagatgactctgggtacgtccgatacatggccgaggctcgggctacgctcccgaggtaccctaggacatttctgagaccagcaggagcgattctataa

SEQ ID NO: 27788 - DNA, 444 bp, Zea mays
  Peptide Sequence Number=SeqID_71163
atgttcggcgccctccgagggcaacatggcgctttcccccgtcctccttgcggaaaggcgacgcaggggcgtatgaaaaaagccgagtctgtccttgaccgtcctctcgctctgtgcggaggctcgggggctgctctcgcaaacccggctccggccaaaccgttgacagcgtcaacataccagcccgagaacttggaacctgactatgcacccgggctacggccagttcgcgtcaaggctccgtccactcaagggacacgatcccgcctcgcccgagcccagcctcgggcaaaggcagccgacccaggaggattcacgtctcgcccgagggaaaacagcgccgcctgtgctgctccgactgctgtgccgcccgtcagggtgaggctgacagccgccaagaccggcctcaggcgccataggaagctccgcctcgcccgaccctag

SEQ ID NO: 27789 - DNA, 423 bp, Zea mays
  Peptide Sequence Number=SeqID_71164
atgggcaagaacaacaaacgcaagcgtgagccgactcctccatcggaggacttcggtgattcggagtactcagaggaggagttctcctctgagtccgaggggtctccggctcccatccctcggtgtgagtcgtctgacgattcagacgactcccaggggcttgcggtggaggtctggacttacatccgggccgtcgagcgctccgggctcgagggctcggatgagtcggagtactcctcggacgaggaggactcgtccgagggcggtggcagcgatggcgacgacgacgaaggcggtggcggcaatgacggtgacggcggcggcaggggcggcagctgcggcagcaaggatggcaacggcggcagcagtaggggcagcaacaggggcggcagcggtagaggcagcaacagggccagtggctag

SEQ ID NO: 27790 - DNA, 723 bp, Zea mays
  Peptide Sequence Number=SeqID_71165
gagcagcaagactcttccccctcgcctcagcgggaggtggagtctgagaggctgccttcccctgcacctcagccagagatgccccctgcaccaccacagggcatcccagctgctgttggataccctgacggaggcagagacaacgacgacgccggtggcagttcgagccatgacatggagcgctcggaggagccggagccggagggatggatcagtagacccatcactcgtgacgctgctcgcgggtgtcacttccacgacgctctcgataccctattgcgtcgggccttcgaccgacacacttggtccatcaaggaaactgccgaggaagccatgcaagatgcagcacgactggcactttctcagtattgctcgttgttcagtggggtagctgacggccttgacctgaagtactaccctcgtcgttcgaccggtagtgctggaggtgtgattgtctcgccagttggtgagggcaatcccaggctgaacaacatggtcaacctggccaccgtgctcaacatagagttggaccacacccttgacgagttgggcaaggttcgggcggaggttgcagaattgcgtgctgagtgcgcagcacgccactatctggatggtggttctcccgtccctgtcgggattcagcacccttaccgctcaccgctccgtggtcgcttcgactatggtaccccagaatgcaggacccagatagatttggatccatag

SEQ ID NO: 27791 - DNA, 204 bp, Zea mays
  Peptide Sequence Number=SeqID_71166
atggagcctggcggagggacagctgtcggatcggttgagtccttgctgacgtcctcttgcttccgtaagggggctgagagccgccgccgtcacagggttgggcgatgtggaagctcctccgaggccgaggtcgagtctgtcttccgtggtcgaggtcgagtccgagcccctgggtcgggcgaggcggagttcgtcgtcttctag

SEQ ID NO: 27792 - DNA, 1164 bp, Zea mays
  Peptide Sequence Number=SeqID_71167
atgcaggcggcatgcaaccgcgccaagtgggtgcgcttctccgactcccaacacgcccagcatggaggcccaggcccacgcgtcatgcaaccggcgcgccggatgcttcgtgcatgcaactgcaccgccacttgcgccaccaccgcgtctcctcgactgcggaaccaataccgcgactcgaggcgacccagcgcacgacccagcagcgccagcctagcgcggcggtcagcgcgggccaaaaatgggctggcagcaatgacggtggcaggcgggcaggagcagcagtcacgtcgtcagctaagctcacgtcccatccgggggcagcgagagaaccctctctcacggcgtgaagacaacgcgcccgtgttccgttcctcgaatggctcgcgcacgcgcaacggccgccccgccaaccacacgccccgtcgcattaactccgtggcggaacaggcggcgcctctggcaggagaagcaagcgacgcttcgccttcgccgctccgagccaccctactgatcagaggttcgaaggctggccccccggaagggttcgacagccgcctcagatcgcgtgggccctacacccactactggtcagagaggctcgggggctgctctcgcaaacctggctccggccaaactgttgacagcgtcaacataccagcccgagaacttgggacccgaccgtacacccgggctacggccaactcgcatgagggaacaaccagaccagccgaagcattacgcaaggcattaagacctcgaaggagtgaaaccactcctccgaggcctcgggggctacacccggcgggtgcgctcgcgcgcacccactggaacaaaatgcaaccgagaaaggctggtccccttgcaaaaaagtgcgacgacagcctccaagcaagtgctaacactcccttcgaggctcgggggctactgtcggggaccataattaggggtaccctcaaggctcctaattctcagctgggctcggactcgggcaaagtcccggaagacggcgaactccgctccgcccaaaccagggctcggactcgggctaagtcccggaagacggcgaactccgctccgcccaaaccagggctcggactcgggctaagtcccggaagacggcgaactccgccccgcccgacccagggctcagactcgggctaa

SEQ ID NO: 27793 - DNA, 531 bp, Zea mays
  Peptide Sequence Number=SeqID_71168
atgtcgtcgtcttcttcatcgtcgtcatcatcaggcgtctccggcgatggctcccttaggagcccctccctctcctgccgacgacgaagcctttccaaggcgtcccaaacccgcgtccgctcgcgggcccgagccttcttcgcgtccttcttctccttcctcttctccgcggcgaccctccgcgcagcccggtccaccgcgtcgtccgggaccggtggcagggaaggcttgtggtgccctacctcctggagacagacgaaaagtctcagctgtgagaaccaagggcaatccgacgcaagaaggaagaaggagcggatactcaccagagacacacacccgcgatcgggacgcatcaagggctgggaaaaggtgtcggcctctaacttcgctaccgtgccggccacccgcctgtggaggtcgtcggtggggagggggtccgaggacatctgcaaaccctttaggtcgacccccggcgtcatctcccaaagcggcagccgccgctccgttaaggggagcaccctccggcgatga

SEQ ID NO: 27794 - DNA, 498 bp, Zea mays
  Peptide Sequence Number=SeqID_71169
atgggccggatcacacgcgggcctccactccagacgaggtcgcgggatgagacgacctcgtcgtgggttttcgtccggcggcgtatgagacgaaggcgagtacggcgaaggcctcgagcgaagggtggcgtcttcgccttcgccccaacagttgtctcactctcaagtctcactcgcctcctcctgcagctctccctcaccggcctcctctacagccggccactaagcgctcggagctggacttcgtgtccaccagcgaggtcccagttccggccaaccgctggcacctgcaccgctgaagaggcgggaccggaaatccgggccccgtcatcaaccaccatttctgcgggctccggaccgccgtgcccaccgtgtcctcccggatggacaaggcgtccctcctcgccgacgcctacatcggcgagctgcgcgactgtggagcagctcgaggccgatgccaagcggcaggccgcgacgacctccgccgctgccacctga

SEQ ID NO: 27795 - DNA, 141 bp, Zea mays
  Peptide Sequence Number=SeqID_71170
atggctccacggccagccgccaaccaccaggccacggccgagcaggccgccaagcacctaggccggccgagcgcaactgaccagcaggcggccagtgagggaaagctcccggagcaggaggcaaggaggctactgccatga

SEQ ID NO: 27796 - DNA, 160 bp, Zea mays
  Peptide Sequence Number=SeqID_71171
atactttgagaaacagagtctgaaagctgcatttgcttctgcactagctgatccaacagtagacctaaatatgcaaatacaagatattgctaaaggaggtgttcgcatggaggaggacctcaatgtggtgggcatactttgcaggttgaatcgtttctaa

SEQ ID NO: 27797 - DNA, 1430 bp, Zea mays
  Peptide Sequence Number=SeqID_71172
atggtgtcgggtttcgggccaaacggacggtccgtaccgtttggacatatataccctccagctccagcgcagcatgcggtggcgtgcgtgcaccgcctgctggccctgcttgcatgtcttggctcctccggctccgagtgcaaagtggtgtcgcggtcagacaatcccgcccgagatcgccgcgcacccgagacaatcccgcccaagatcgccgcccagatctcgtatggacgccgcatggtcgtatcgccctgcgatgcccccacccacccagccgcccttgcccccggtgagacaccagcacgagttggccttcttctccggctccagcgacgctgccggcccccgccaccccatccccaacctcatctttctaaagcccctggcagaggcgttgcagattccgctccgccatgcgccctcaccgcacgctcgtccacgctgctccaggaggcctcgcgtgcctcgttcgcgcgtggcccacatgctccgccctgcgtcccccccgccattctcgcgttggtgcgccactcaccctccctggcccagatttccccaatagaggtcgagcacgcctcatggaggacaccgggcagggagctcttcgcgcgcgtcgccaagggccgcctcatggaggacaccgcgcgcaggtacttccagcaactcaaggtctccgacttcggcctctcggtggtcgccgaccagttccaccccgacggcctcctccacaccttctgtggcacaccgtcctacgtcgctccggaggtgctcgcgcgccgcggcaccaaacgtatacgcctcctccgcgatgccctcagacagcccgtcctcgcccaacggctccttgccgcatatgcccgcagcggctccctcgcatcccgtcgcagatctcgtgccctcaccatcccaagcccacccccttcctcggatctaacccctcctcatgtctccgcggctagagctgatatcctcgttcatggcgggcggcgcgggtgggttcatcacgcagaggcctttgaggccctgcccaaggagcgcgctgccaaccgcgcggcgacgacgaccagcagctgcaatctgtcaagcccaactagaggggtgagtggtgctgctcctgatgagatcgttggaggcttaatggagattcctgccatctatgaggcacttggtgatctcgatgtggcccaaaagctttatcagagggaacttaggttgctcgagggctcatcgagggagtggagcattgtttgccggtgttgtggcacaaatgggtgttctgtactacatggtggggagctgttcaagatagacgaggttgcacatttgtttgaggaggcaagggaggttctggagcaggagtgtggcgcttctcatcctaatactcttggtgtgtacaacaaccttgctgcaatctatgatgccatgggaag

SEQ ID NO: 27798 - DNA, 319 bp, Zea mays
  Peptide Sequence Number=SeqID_71173
atgtcggacgaccttgttgttcctgtccactttgaagttggccaagaattttgctttcgcctcctggatcatccgctccttgtgctcctcaaactggagctgctcgtcagccagcaagcggagtcgccaaaaagggccagacggtccgtggcctggtgcgaggcgcggtggtgctctctgcgcaagggcggactgtccgcggcctggggccggacggtccgcggcctgggacggcggaagatcgccgacggcgcctggatctcgctctcgggagggaccccgtcggggagtagagatcttaggtggtgtctaggctcag

SEQ ID NO: 27799 - DNA, 237 bp, Zea mays
  Peptide Sequence Number=SeqID_71174
atgtcatgggttcttgtggtggtctccaagtgggcggtggtggaccttctcgtcgacctcaacgttgaccaaggggctctcaggcatgggacgcaacctggtcaaattacatttatgtccttgataattgattacaatcatgatacaaattatcatggactgatcggtcttttcctctttaagtcggtgcagcccttcgtctcaaggcgtgtcactatgccgaagctccttggatag

SEQ ID NO: 27800 - DNA, 180 bp, Zea mays
  Peptide Sequence Number=SeqID_71175
atggcgccttactcttcacatgaactcccacctttgatggtcaataccaggaagggaggcggaattgatctacctatcaacccacacaaccagagggtgcttagacaacaacaagcagaaatgaaccctctgaatcctccaccggctgggatagatccagtggttgcaactcagatgtag

SEQ ID NO: 27801 - DNA, 189 bp, Zea mays
  Peptide Sequence Number=SeqID_71176
atgggcgtgtcgccgtgtgctgtctggccgccgctctgctggccggggaagatgagtgggatggggatgagactggtgccgttgagtggcggatgtgtggctatgattagacagggagcacacctcttcggtcacttaatccgggccactagatctttggccaatggccgagattggatctccgggtga

SEQ ID NO: 27802 - DNA, 189 bp, Zea mays
  Peptide Sequence Number=SeqID_71177
atgggcttgtcgccgtgtgctgtctggccgccgctctgctggccggggaagatgagtgggatggggatgagactggtgccgttgagtggcggatgtgtggctgtgattagacagggagcacacctcttcggtcacttaatccgggccactagatctttggccaatggccgagattggatctccgggtga

SEQ ID NO: 27803 - DNA, 174 bp, Zea mays
  Peptide Sequence Number=SeqID_71178
atggagagtcatgatctccgggcagaaagggaatcacggcttgtgggtggcaatgagactgatggttttggttatgactatggtactggttgtcagcattgcaaccactgctcaggagaagatgaagccgtggaaggagacttccaggagttccaagactacgacgagttctag

SEQ ID NO: 27804 - DNA, 2088 bp, Zea mays
  Peptide Sequence Number=SeqID_71179
atgtcctccctgcgcgtcgtcacccgcggtgcgaacccaccttccttgggcaccgtgagcctgaaaacgaaggcgccgaagatggcggggatgccgatcatgtccctcgcgaaccaggacgccagcacccctgtcactgtcaccgccacccacgcctcagtgctatctttcactgcatccacgcgctaccagatgcagggccccaccgagcatgtctgcccctacgagcttgagcaccagggaagtctcatcaggcccagcgagggcaagctgtggtgcactgagatcatggaggatagtgggaacggcaacctggatggtgtgggtaaaagcagcaacgaagatctggttctcccaggactgcttggaggtatgacccttcccatgtttgatgaaatgtctcctaacagcggtgaggaagaaattgccctattctctgaaggctttgattatccggtgtttgatgatatgccacttgagaaggtggtttgggatgaggaacctggatatgatgatttgttgaatcaactagcacagggtgcagatcatttggttgatgccacgatgcaaccaactatacatccgatcgctgtggacaagcagttacaacttggggtcaatcaaggttgtttcgagatgcttgtcaacactgatgataccgaagatctattccaaaactatgatgttgctgcctcagatgtccaggttattgatgaagatgaagtcgtactcattgaaggcaaatacactgtggattggaagatactacaggctagagaaaccagtgaagaagaggtggaagattaccttgctgaatctaaagaaggggctatggatgaggtgctgcaggttgagctgatcgatgatgaagttcaatgggatgaggagtcacctaaccagagtgtgcataaaggcttactgccacacacagtgaggaaaatggtatatctgaaggggttcagtcagggaggaggaatatcaaccatgacacaagtccagaggtgccatcctttagctccattatctactgctaaaatttcagttgctatagcaattgtaagggctgctggatgtgagtttgcagtcaagtattatccttcatttaatgaagctatacagagaatagatgtgaatgacatagctctagttatggtggatcattcgtgctctggctattgcagcgaagctgatgctcactattgcagaactggcaactctccgttatgttgcagaactgacagtgatagtttaatggagaatggttatgctcgtcctgtggaaggaatcagcgtggctgctctctatgctggttttgctgacacggttcttcttaagactaaacacaggcaatgcacttctggccttcaggacgttgcagatgttgctgttgcgattaaagcaggaccctatgacattggtattgttgctggtttacagtccaagacagtgaacaaagttagtcttgttgagcaaatgaattccaaagtcgagctattttctcaagcacatggttgtttttttccaaatggtctcacatatgagaatattgcacactgctttggcactacacgactgcaaccagatcaagctgatgttgagtcacaccctggtaaatccaaagagggtttggttatctattctgttgcttatgttggtgatagttgtgaacatagattcataacacataggccgagttttgttgggatggttattctgtatggagacccaaatgaactacattaccgccaaaatgcatttgatgctggagaagaggggcttgaaatcaaagtgcattctcgtgagaagggatgtgaatgcttggacaacttgctcgtttccaagaccagacatgagtacctgaacttgataagaaatgatgcattgctacttatgccagcagaactccaagtgcttccatctgttcgcgtgcttcttctttggatgattagaccttggaatccaggtgtattttcatccccaaagactgcccccttgacagaggctcagaatgaggcggtcgcgaccaaggtggagtcctttgcccttcgtgacaagttgaaggagaaaaaaggaagcagtcgagtctga

SEQ ID NO: 27805 - DNA, 114 bp, Zea mays
  Peptide Sequence Number=SeqID_71180
atgtcgaaggtggatgctctgccgaaggttgtggaaacgatggtcatgaaggacataccttcatcatttccgcacataaatataaatgcaaataagaaagtaaaggaacattaa

SEQ ID NO: 27806 - DNA, 1020 bp, Zea mays
  Peptide Sequence Number=SeqID_71181
atggcggcagcaggcgggcggaagcagcggtcaagtcgtctgcaagcacacatcacctcttggagcaacaggagaaccctctcccacgacgtaaagacgacgcacccgtgttctgttcctcgaacggctcgcgcacgcacaacggctgccccgcaaaccactcgtcccgtcgcattaactctgcggcagggcaggcggcacctttggcaggcgaagcatgcgacgcttcacctccgccatgatgaccgcgtaaaaaaagggaccgggaaaggggatactccgaaagggatccttctccgcgaaggaagcgggccccgagccctcctactgatcagaggttcgaaggctggccccttggaagggttcgacggccgcctcagagcactcgggctccgtgcccactactggtcagaggttcgaaggctggcccctcgaaagggttcgacagccgcctcaggccactcgggctccgcgcccactactgatcaggggttcataggctggcccccgaagggttcgacagccgcctcagagcacacagggcgagggatgactctgggtacgtccgatacatggccgaggctcgggctacgctctcgaggtaccctaggacatttccaagaccagcaggagcgattctgtaacggaatcccatcagagggaggcattgagccctcagaccctatcaaacgggaccgggtccggcaaatcacctgcaggtacgttaggagcgcgcctctggggccactagccgacccttatcgaatggggcacgacgtccactcggatcacccattagcaactcactggagacaccatattcggcgccctccgagggcaacatggcgctttcccccctcctccttgcggaaaggcgacgcaggggcgtatgaaaaaagccgagtcagtcctggaccatccactcgctctgtgcggaggctcgggggctgctctcgcaaacccggctccggccaaaccgttgacagcgtcaacataccagcccgagaacttggaacctga

SEQ ID NO: 27807 - DNA, 396 bp, Zea mays
  Peptide Sequence Number=SeqID_71182
atggaaagctccgcctcgcccgaccccagggctcggactcgacctcggaagacagtctccgcctcgcccgacccccggggctcggactctacctcgacctcggacgacggtctccgcctcgcccgacccctgggctcgaactctacctcgacctcggacgacggtctccgcctcgcccgacccctaggctcggactcaacctcgaccttggatgacgatctccgcctcgcccgacccccgaggctcggactctacctcgacctcggacgacggtctccgcctcgcccgacccccaggcccggactcagcctcgacctcggaggagcctccgcctcgcccgacctcgggctcggaccgaccacgtcacagggggggccatcattaccctacccctag

SEQ ID NO: 27808 - DNA, 426 bp, Zea mays
  Peptide Sequence Number=SeqID_71183
atgatgactggggataagcaaaggcaaaagctcaagcaaaagccatcaagcaaaatctccaacacctacataaaaaaggtggacaaaaaggctgctacaccatatttgatcaagaagaaaaagaatggaaaggttcctctttggaggcttgagcaaagcaatgctgatatccttttgatcaaggaagaaaacccattggatgatgttttatgtgttacacatttagctttccagagctcgtcaggctccagtggttttgacgattggttcggttctgagtcgtcaatagatggggaagacctaggcgtttctacggagatggatcatgagtcgtctagggaagatttagactttttcatcgcaatggacatcgtgacctcgaagacctctagtgctattaggggcccttctgttggggtagactag

SEQ ID NO: 27809 - DNA, 378 bp, Zea mays
  Peptide Sequence Number=SeqID_71184
atgaagaagagcaagagagatttggagatgaagcacaaaaaccgcagctctcaagctcactcaaagatttctctccaaagatttgaaatgggagaggcaagagatgtgagagagagagtgggaggtgtttctcaagttggaaatggagttcaaatcgtgctctactgctttggggagagagactgcagatcagaggtcagaggggtcagagaccagctgaactgcccctcaggaccagttcaaccggtcttgaccagtgagtttaggagagaaaaccccagctcaactgcccggaggcaagttcagctggtgtatggtcaaagaggttcacagctgaagttgagttcagctgaagttgagaaagctcaactcagctga

SEQ ID NO: 27810 - DNA, 1416 bp, Zea mays
  Peptide Sequence Number=SeqID_71185
atgtatgtatctgcgcatttgccatttctggttacgctttcctctccggcctttccatcatcgccaccatttcgcacctcctccacaccggcaaacaacttcacgtcgcatgatctcgcgggagcgctcgaggatatgcaagtggcggccgctgcggcgtcaatgcgcggcaccgagacggttggcgcgaagtctgctgcgcggcggttgagccgcgtgctggtcgggcgccgccgccgggccgccgtgctgctcctcgcgctggcttacgcggctgcgatgctcatgctcaccattggcggcagcgaggggtctggatccagcggcgtggtggcgggtgtgctaaggcggggcgcgcaatcggcgccccccgggtcggtgtaccgcagccacctcgtgttcgaacggctgctcccggaaatgcgcgccttcgcctcccgcccgaacccgttagtgacatctcaatacaaaaagtttggaaagcaatgggaaccttgtatcagcaaggggttgatacactcagagctaccgccttcaaatggtttcctcatagttgaggcaaatggtggcttgaatcaacaacgcatttcaatttgtgatgctattgccgtggccaaaattcttaatgcaactcttgtgacaccagcatttcatttgaatagcgtttggcgtgattctagcaaatttggtgatatctttgacgaagatcacttcattgagtcacttagaaaatatgtaagggttgtaaaagatcttcctgaagatgtttttctgcgattcaaccataatatcagcataataccaaacatgagaaccaaagctttctcacccccaagttactacttacaacatgtgcttccaaagctgttggagctaggggctgtgcgtattgcccctttctcaaatagactggctcattcagttcctatgaatatccaggcattgagatgtttgacaaactataaggcattaagattttctgaaccaataagaattcttgcagataatatggttgaccgaatgatcaagaggagttttttaagtggcgggaatttatacaaggtcggaatgatgctgcgaggaatgggatttgacaacactacttccctttatgttgcatccggtaaaatatataacgctgaaaagtacatgactcctcttcgacggttgtttccatttctacaaacaaaacacgctctagttacacctgaggagcttgcacagttcaagccatctgtctgtccagaagagtgtttgctcaacgttcccaacaatgacgtccactgcaatgttgaagagggcctgagcattgcgagggacttgagttgggaggcctgcccaaaggctactaggaacagttttctcagccacaaccagcaaatccgcaacgctcagccaagcagatacagattatga

SEQ ID NO: 27811 - DNA, 1032 bp, Zea mays
  Peptide Sequence Number=SeqID_71186
atggacgtcgccgcccaccgcctgggcgcatgcctgcccctcgtcccggttgcatgggccgacatggctccgctcccatcgcagacacacagaaaggacaacggagccgcggaggggccgaggagtgggtactggtgcttggtggaagcacgcaaggtgttcgatgaaatgctagtgaagaatgtagtttcgtggaatgtgatgatcactggctttgctggatgggatgaggttgagaatgttgtctcatggactgggctgattgatggatatacacgtgcttgtctttatgcagaggctcttactcttctccaccacatgatggcaggaggcattaacccgagtgagataattgttttagcagttattcctgcgatatctaatcttggagggatcgttatgggtgagatgctgaatggctattgtgagaagaagggtatcatgtcagatgttcgggttgggaattcactcatagacttgtatgctaagattggctctgtgcaaaactcgctaaaggtgtttgatgaaatgctggatagaagaaatttggtgtcatggacatcaataatttctggttttgcaatgcatgggctgtcagttgaggcacttgagctatttgcagagatgagaagagtagggattaagcccaacagaatcaccttcttgagtgtcatcaatgcctgcagtcatgggggtctggtacagcaagggttagcatttttcaaaagcatggtttatgagtacaatatagatccagagatcaagcattttgggtgcatcatagacatgctaggtagggctggacgtttgtgtgaggctgagcaaataatagaagggttgcctatggaggttaatgtaactgtatggaggatactgttgggttgttgcagtaagtatggagaagttgagatgggggagagggcaataaagatgatatcagacttagaaagagaatctggaggtgattttctgcaggtgctccgtacagctgtggggcatatattagcaagagttcagggctttttggtttaa

SEQ ID NO: 27812 - DNA, 1440 bp, Zea mays
  Peptide Sequence Number=SeqID_71187
atggcttgtattagatgcactgcacgtaagttagtgatcccctttttgccctctcgccttgcggagcgcctattgcgctgcacggtgaaaggtcagtctagccacctggagagactacatcgtcgcctacacgaggagaaggagcgccgatgtctggagcaggagcagcaggactcttccccctcgcctcagcaggaggtggagtctaggaggcagccttcccctgcacctcagccagagatgccccctgcaccaccacagggcatcccgactgctggaggagaccctgacggagacggagatggagacgatggtggcagttcgagcgacaacacgaagctctcagaggagcaggagcaggaggcatggatcgctagacccatcactcgtgacgccactcgtgggtgtcacttccatgatgctctcgacaccttgctgcatcgggccttcgaccaacacacatggtccattgagtatcgttgtgtagtttaccaacatcgtcgcgggttatacccggaccagtgggaggctacttgcttggtgcgccgtccagacgatgatctccggggtgcagaggccttcttagagcactattctatcactgagagggatactgctgaggcagccattggggtagctgatggcctcgacctaaagtactacccccgccgttcgaccggcagtgctggaggtgtggttgtctcgcccattggtgagggcaaccccaggctaaacatcatggttaacctagccaccgtgctcaacaccgagctggaccatgcccttgatgagttgggcaaggctccggtgaagattgtggaactgcgtgctgagcgcgcagaagcattcaccattaaaacagtagaattctcagccgtgagagcaagttgggccgtggatctcgatccgacggtggggaacccactagttcccccccttaaccctagccgcccctctattcccattcggttgcagccgccccctgccctcttcctttgtgggccgctgcccccatctctccctcattctcaagttcttgcagcagccatcccctacaaccctggccgccacccccccatcttctcttctccaagtgtcgtccttcctcgtttggatcttcttcgtgttggtgcaagtttcaagtggagaattggtgggaagaaggaaggaggaaaagttgaaactcaaggtgatcttgaggttatctatgtttttgcgctgaaattcaattggttatatgtttacctatgcaaatcagtagaggtgatgtccagaatttttgtgggtgggcgaacaacagcaattctagtagtttctggggatttttcatgggtaactattggtaatcagtgggagaatcatgtagagctttgtcataccattccaagagtacttatgcgctcgattcggagttatattttaggagatatcactgtttga

SEQ ID NO: 27813 - DNA, 534 bp, Zea mays
  Peptide Sequence Number=SeqID_71188
atgcagagcttacagcgaaaaataaacgctgattccgccgaaatagaaggcgaagaagctcctaagggaggcttacagcgaaaaataaacgctgattccgccgaaatagaaggcgaagaagctcctaagggaggcttacagcgaaaaacatatataggatcattatcatcatatcatacagagaaggcagatgcttcggctataaggataaagcttcgggaagaacagaaagaagaaattttcatgcttcgttgtgtacgaaaagaagggaaggtgtttttcgccttcggctcaaaaataaaatttcgtccacagcaaagcacatcatacatggacaaaggggtaaagatatattacgagccagtctttaggaaagcagtagctatgcctcgagaagctaacaaggcacagaaatcggcatgcccagcgataacttcgtcaagcgcatcaacttcgccctcaatatattcaaaggttcttggcaggttttcaactgaaggtgtaaacttatcagagctagctccaattgagtga

SEQ ID NO: 27814 - DNA, 1245 bp, Zea mays
  Peptide Sequence Number=SeqID_71189
atgtcttcgcgctcccttatgcatcgtgtctttccaccttccgagcccccggatgggggatgcccgcagtccttccgccttgtcgttgggggaacgcaactccgtgggagttggtacctttcagccatcgttcggcttcaaggattctcatcagtcagcccggctgcatcccctcgccggtggtcacccgagacggtgaccaccagctcctgggtggggagaagcaagccgggctgcgatcttggtcccaccctcagcttcaaggatgtttatcatcctcgctggggtggaggccgggctgagccggagctctacctcccgtgcggtttcgtgggtcagcctctccctcatcgttcgagggagagggcgctcactggccctgcgagaggggcggacttcgacaacgcggggctggccgactgcgggcgtcgtcagcctcggcgcgttggactcgccggcttggctcccggtgccccctcctgccgcgaaggcggttgtcgcgccgtgcggacgggaggaccgcccaagatgtcgcgcgctgccagggcggcgttcgtgttctggggcggtcctgcctttgcaccggtacgacgcctccacgtggaggtcggcgagggcaaggctgcagcagcgtccgcccctgaggccatcgctgctgcagttcggccacccggagcgggggtcgttgttgttgctgccggagcgggcgacggcgagccgcccgtcggtcttctgttgctccgcaggcttcccccatcgaatggggttgagtccctcggctcggtcagccttgtcgtccgaggcttctcttgcttagttaaaggaacccctcggccgctctttgatgagccgaggctaggggtagcggtgttagcacgaacagaggcagagttggctcgaaaagaagacctggtcggccggagcctggccgggtcgtccgttagcaggaccgacgccggagttgatcttccgaggtctcgggccgggctgatgtcttcgggggacagctggccgaggcctcggggtgaccagccgagccgcttgctcgggccggattctcggagaagacccgggcggcgatggcccgggcgtgatgatgaagtcgtccttcggagtggtgaccctcggacagcgtcgccgtccgaggctaggtcggacctcgccgaaggtgtagttgatgccgagggtgctgccgctcccttcaaccgtcaagatccgagcctgcgggatcggatcatcttgtag

SEQ ID NO: 27815 - DNA, 273 bp, Zea mays
  Peptide Sequence Number=SeqID_71190
atgcaggcggcatgcaaccgcgccaagtgggtgcacttctctgacttccaacacgcccagcatggaggcccaggcccacgcgtcatgcaaccggcgcgccggatgctgcttgcgagccactgcaccgccgcccgcgccactaccgcgcctcctcgactgccgcctcagagcgcgtgggctccacacccactattggtcagaggttcgaaggccggcccctcagaagggttcaacgaccgcctcaggttactcgggctccgcgcccactactga

SEQ ID NO: 27816 - DNA, 576 bp, Zea mays
  Peptide Sequence Number=SeqID_71191
atgcaggcggcatgcaaccgcgccaagtgggcccacttctccgacttccaacacgcccagcatggaggcccaggcccacgtgtcatgcaaccggcgcgccggatgctgcgtgcgagcaactgcaccgccgcccgcgccactaccgcgcctcctcgactgcggaaccaataccgcgactcgaggcgacccaacgcacgacccagcagcgccagcctggcgcgacgcgcctctggcaggggaagcgggcgacgcttcgccttcgccataatgaccgcatcgaaaaagggaccggtaaagggggacaccccgaaaaggatccttccccatgaaggaaccaggctccgagcctccctactgatcagaggttcgaaggctggcccctcggaagggttcaacagccgcctcagagcgcgtgggctccacacccactactggtcagaggttcgaaggccggcccctcggaagggttcaacgaccgcctcaggctactcgggctccgcgcccactactgatcaggggttcgaaggctggccctcaaagggttcacagccgcctcagatacagagcgagggatga

SEQ ID NO: 27817 - DNA, 852 bp, Zea mays
  Peptide Sequence Number=SeqID_71192
atggcgcttcctgtcgacgtggtcggtccgtgccctaggttgggcaatgtggaggctcctctgaggtcgaggtcgagtctgtcttccgtggccgtggtcgagtccgagcccccgggtcgggcgaggcggagaccgtcggctgaggccagggctgagtccgagccctggggtcgggcgaagcggagttcgtcgtattctggggctgagcccaagtctgagccctgggtcggacggagcggagttcgtcgtcttcaggggcctagcccgagtccgagccctgggtcgggcggagcgcccgagtccgagcccagggtcgggcggagcggagttcgccgtctttcggggcttagcccaagtccgagccctgggtcgggcggagcggagtttccaatggggcctgaggccgggcctgaccgcctggcctcgggcgagccgggaatatattcgttgctggaggggcgcctcaggcgaaacggagatcctccagggcctttacagctttatgctgatgggggttaccagctgagaattaggagccttgagggtacccctaattatggtccccgacaggtggacaaagtgcaaatcatgtcaaaagcgcagtctgggtgcaccagacagtgtccggtgcgccaggctggctcaggcgaacttgctgctctcgggaagaaattaacggcgtatggctataattcaccggactgtccggtgtgcaccggactgtccggtgagccaacggtcggccgcgcgatccgcgcgagacacatggccaagccaacggtcaggagggggcaccggactgtctggtgcgccaacggctcccaggcgccaacggtcggcttcgccaaataa

SEQ ID NO: 27818 - DNA, 630 bp, Zea mays
  Peptide Sequence Number=SeqID_71193
atgggagtgaacaagcccgtggagcgcgaaaccgtgatttgtaggttatgccacaaggaaggccataagtctttccaatgcaaggagatgaccgggaataagcaaaggcaaaatctcgagcaaaagccaacaagcaaaatctccaacacctacatcaacaaggtgaacaaaaaggctcctacaccatatttggtcaagaagaaaaagaatggaaaggtgatatcaatcaaggccaacaagcaagccaacaaaggaaagggggccaaacgcatctgggtgctaaaggaaataatttcaaccataaaaagtgaaagggaaaaagggtgccaaaggttcaactcaaaccaatcaaaagaacaagttagatctcaaaagaaaggagcaaaaaggaaaccgaaggctgccctggtctggcgcaccggacagtccgatgggccaccggacagtgtccggtgcaccagggtgaatcagctcgaactctccaccttcagatttcccaagcacagctccgctataattcaccggactgtccgagttttgactcccattgaacttcctccaaagttttggaggcttgtaaaagctaagcaagagacaccaaagagtgtggtgatccttgtggggtcttaa

SEQ ID NO: 27819 - DNA, 231 bp, Zea mays
  Peptide Sequence Number=SeqID_71194
atgaggtccccctgcttgacgatggacaacgtggtgcagccgctctggatctcgtccaagaggcagctgcgtcagagcttgtcatatacagcggctcatgcggccatgtgggactgcttccagaggtcgaactggcagtcgtcaagcttcttctcgtcatcgatgagcgacgccaatgggatgggaatgagagaacatgagaatgggctgtgcggggagaagggaatgtga

SEQ ID NO: 27820 - DNA, 681 bp, Zea mays
  Peptide Sequence Number=SeqID_71195
atgtcgcgcgcgttcgacgactactatatcatggaccgtggtgtcatctcggcgccggaggtgaagcagaggaggatcgacagcaatgatcagttcgtcatcctccccatcgtcggggcatggggcgtgctctccaatgatgagactatggaaatcgtggcatatacgaacctatttggcgatctatacctccgcacgattgatggtcctcgactcagttgccaccacctcgttcggcattctacttcttttctctctcccctcacgcctccacctccgcgccacccattctcggcaaagggtgtaggagcaggcgcctcctcctcgtattcgtccgacaccagccccgacattgactcgcgcagtggcttttgcacgtccacgaggatgtttcacatcatgcacgcaccatcgttttcgtcgtcgtcggacgtcccgttcgtcttcccggccttcaccctgttcttcctccccaacctgctacccacggtcgcagccgcgagccgaccgacgctcgtcgacgcagcgggtccagggctgggaaggcactcacattctctcgcccttctcggactgatgcctggtgcggatgcccagatcttcgtcgtgtccttctccggcaacgaacatgtattcccgcctcttcccttcccctcctgctctacgaaaccttggaagtag

SEQ ID NO: 27821 - DNA, 270 bp, Zea mays
  Peptide Sequence Number=SeqID_71196
atggcatccacgatcccatttgagaagagggcccactcccaaccaggcggcgttgacatgccggtctctactgaggagcgcttcctcctcccactcagttgttcagccacacatcgtcgacatcgacacctcctcctctccctcgactattcttgcccgctacctatagaggtgcatggtggaggagagtcagctattcaggaagagagtcagattctcggccacagatcgtcactggagagtcggatgccaacaagatggactacttga

SEQ ID NO: 27822 - DNA, 753 bp, Zea mays
  Peptide Sequence Number=SeqID_71197
atggggagcgcccgcgttgcctttgtcttgttgtgggaggagcgcaacctcgtggaggttggcacctttcagccatcgctcggcttcaaggattttcatcaggcagcccggctgcatcccctcaccaatgcttcaaggatcttcatcatccttgctggggcgggggggcgagctgagccagagctctacctcccgtacgggcctgccttcgcgtgggctggcgtcccgcttcttcctccggcttctgggggtggaaaccatccttcagctctgcggaggaggcgtcctccagccatgccggtgaaggcgaactgctgctacccagccagggtgcagcattccgtcctctgtccgggcgacggtggccagccgcaccggggggtctcacaacacgtcgtacgccgcgagggcggtactcatgttctgggatggtcccattctcgtttttgtggcgaggacaggagtgaggacctgccggtgcgctttggggcggccggcgctcgctggtgcggtgttggtgggcaggtggacgccgccgttggtgctgaggtggtggcagctggagaaagcttctccgccaacgagaccgtcagcgccacccgcggaccgacctccggctctttggctttgatagcctgtcatcgcccctcgagtggggacgcgggcgagggccttgtcgcagcagcgtctgccctgaggtcatcgctgctgctgtttggccgcccggagcggaggtcgttgtcgctgatgtag

SEQ ID NO: 27823 - DNA, 843 bp, Zea mays
  Peptide Sequence Number=SeqID_71198
atgctggtggcatgcatctgcaccacggggatgcaccctttcgacttcgacgcatccagcatggaggcccaggcccacacgtcatgtaaccggcacgccggttactacgtgcgaaaaactgcaccgccacttacgccaatgccgcgcctcctcgactgtggaaccggtatcgcgactcgaggcaaccctacgcacggcccaacagtgccgaccaagcgcatcggtcacgggtcattcagccgcgggagaaggcgcgacagtcgatatggccaaaagtgggccggcagtaatggcggcagcaggcgggcggaagcagcagtcaaatcgtctgtaggctcacgtcccctcctggagcagcaggggagccctctcccacggcgtgaagatgacgtgctcgcgaagcgggcgacgcttcacctccgccatgatgaccgcatcaaaaaagggaccgggaaaggggatactccgaaagggatccttctctacgaaggaagtgggccccgagccctcctattgatcaggggttcgaaggctggcccctcggaagggctggcccctcggaagggttcgacaaccgcctctggccactcgggctccgcgcccactactgatcaggggttcgaaggctggtcccccgaagggttcgacagccgcttcagaacacgcagaacgagggatgactctgggtacgtccgatacatggccgaggctcgggctacgcttccgagaggctcgggggctgctctcgcaaacctggctccggccaaaccgttgacagcgtcaacataccagcccgagaactcgaaacctgaccatgcaccgagccacgatcagatcgcatga

SEQ ID NO: 27824 - DNA, 789 bp, Zea mays
  Peptide Sequence Number=SeqID_71199
atggctgaaaggtaccaacttccacgaagttgtgttcctccgacgacaaggcagaaggattgcgggtgttccccatccgggggctcggaaggtggaaagacacgatgcataagggagcgcgaggacatgatcgcctttcgagggggtcaccctccttttaaaggcgactctccccacctgcgtccccagccgtcgcgggctgagtcttctccaacacgctccaaggtcctccccctacggcgcgggggctgcgtcccacgcgtcatgcaagctggcccagagcagaagaagccgaaccgtcgcgcgcggtgcatgcaactgcccagcggttacgagcattcctccactatcgcccagaccagcgggcccacacgtcatgcaatcggcgcgccggttgctacgtgcgagcaactgcaccgccactcgcaccactaccgtgcctcctcgactgcggaaccagtaccgcgactcgaggcaaccctgcgtatgacccaacagtgccagccaggcgcgacggtcaatactgccaaaaatgggcctgcagtaatggcggtggcaggcgggcggaagcagcggtcacgtcgtcaaccaagcttacgtcccatccagggacagcaagggaaccctctcccacggcgtgaagacggcgcgcccgggttccgttcctcgaacggctcgcacacgcgcaacggctgccccgcgaaccactcgccctgtcgcattaactccgcggcgggacaggcggcacctttggcaggagaagcgagcgacgcttcaccttcgccataa

SEQ ID NO: 27825 - DNA, 231 bp, Zea mays
  Peptide Sequence Number=SeqID_71200
atggagcttgtggagaagatctacgggcctcatgcgtgggcccagcgtgccagagggatcgcccagcacgcgcgtgcggcatccggtttactgacgaagcggccccagcgggaggtcggcggggcagctgcgaggccacggtggcgaaaagcccgcagagcagttgcaaggaggtcgcgacagagtccacgcttgtgggggaagatctacaagagcctcgtgtgggaatga

SEQ ID NO: 27826 - DNA, 1023 bp, Zea mays
  Peptide Sequence Number=SeqID_71201
atgctgaagggagcaacagcaccctcgacgtcaactacaccttcggcgaggtccgacctagcctcggacggcgacgcggttggaggatcccccactccgaaggacgacatcagcatcacgcccgggccatcgctgccagggcctcctccaggaatccggctcgagcagacggctcgggccggtcaccccgaagcctcagccagctgtcccctgaggacatcggctcggtttgtggcctcggcaactcgactccggcgtcggtcccgccagtggacgacccggccaggctccggccgaccaaatcttcttttcgaagccaactctgcctctgttcgtgctgacactgctacctccggcttcggctcatcgaagagcggccgaggggttcctttaactaaccaagagaagcctcggacagcaaggccgaccgagccgagggactcctacgcctccgggatacggatacctcactcgtcaccttcccacgaggcgactcacacttgcctgcggggcaacaagttccgggcgactcgccagcgacctctgcagcagcagctatggtcccagcacgaacgcggccaccggaaggctctcgttcgcgtccccgctcaagggacgctaaccagacatcaaagccaaagagccggaggccggcccgtaggcggcgctgacggcgtcgacggtggggaatcttcccccggctgccaccacgtcaacaccgacggcggcgtccgcctctccaccaacgccgcaccggcgaacgcgggccgctccaaagtgcaccggcaggtcctcgctcccgtcctcgccacgaaagcgaggaagaggacggaatgttgcatcctagctgggcaggaacagttcgccttccccggcatggctggaggacgcctcctccgcagagctggaggatggtttccaccaccagaagctggaagaggaggtggccagccgacccgtgcgggaggtagagccccggctcgcctcgctctccgccccagcaaggatgataaacatccttga

SEQ ID NO: 27827 - DNA, 225 bp, Zea mays
  Peptide Sequence Number=SeqID_71202
atggattcaaacaacactcccctagttgatgttcaaggaatgaaggaaaggaccagaaaggacgtggtgaaggacttggaggcgtggaaggccagcaaggacgttcagatcaaggtggaggcctataatctgtctcggcaggaattagccctcatggcaaggtcaatcgcgcagtgcacggttgataaccagatgagaagtggtgctgcgattgcggggttctag

SEQ ID NO: 27828 - DNA, 69 bp, Zea mays
  Peptide Sequence Number=SeqID_71203
atggactccatggtgtttgaggtttctaaattggatggagtaagagcaactccaacagaagagagctag

SEQ ID NO: 27829 - DNA, 693 bp, Zea mays
  Peptide Sequence Number=SeqID_71204
atggagggaggtagccgcgcggatgggcagaacccgaaccagctccggctgttcacctgcaccgggaacttgctccaccgcgcccacggctgcgcgcggtgggcgcagggcggaatcgtcgtgctagccaccgtgtatgggcctaagccggggaccgtaagggggagaacccccgagaaggcctccatcgaggccgtgtggaagcctaggaccggccagatcgataccccgctcttcccctcaagttcattttgtcccacggctgtgcgtgttactgggtcactgaaatggcgagttgtttttgtaggaaggcaagacagggagtatgagatgacactcaagagaacgttgcagagtatttgcttgctcacagttcatgctaacgccaccacctctgtcgtgcttcagggaggttcgacccagctgagattccaaccacgttatggaggactccttgcaacggcttcagacaatgtagtctctatcctggatgtggagaggcaagctttcgtgaggagatttgagagccacactaagggcgtcgattccgtgtgctgggatcccaccggcgagtacgtggtgtctgtcagcgaagacacggtgaaggtgtggtctttgaacgacgagagcttcatgaacgagcttagctgcggcgggagaaagttatcgagatattatatgttccagatgtaa

SEQ ID NO: 27830 - DNA, 957 bp, Zea mays
  Peptide Sequence Number=SeqID_71205
atggagtcttcaactacggcgacctcgaccactttgtcgccaattgcctcaataagggcaagtctgaggctgacccacgtgaccaccattgcagtcacgtgcaagggaaagcgggagtacaccttcgacaagcacaagtctgagagaggattcgacaaggaggcactcaagaagaagtaccttcagaaggccaagatcaaggagtgtgtcttcctcgcttcccttagcgacgttgaccacgactccgacgacgcatcatcttcctttagtgacgaggagactcacaagcgagtcaaggataagctgaacgaactcttcttcctcaccaacatcgcaggtggtttttgcaccatggcgtttggtgatgatgcagtgggcggccacgaccaggacatcggcgacggctctgcttctgatgtatcacattccaccgacgatctcaccgctgaggcagaggagccaatatcttatttggctagtcaggataagctacttaggcttgctgctcgtgagaggaaagattttaaattcaaatacgagagcacgcttaaggagactgagtctactagagcttcaattgtggtgtttgatgagactgaatgtgatgagtgcgctctacacatgctgaatatcacaactttgcagaccaagtatgccaccttgctagatgagtgcgacaagttgggatctccgtctatcttgataggtgtgtctagtagtgagccccagttgggtatgatggtcagtcggttggtgaggggaactagcgaaccagggttaggctttgctgctaaggatgggagtgctgcatgttttggaaaggttggtgagtggagtggatggaaaccatcagagaaaccttcaagcactcccaagctcatgaaaatcaccccacctaagcctaccaccaatgtgagagatggtgtgattgaggagcctgtgagagcccctccttaa

SEQ ID NO: 27831 - DNA, 882 bp, Zea mays
  Peptide Sequence Number=SeqID_71206
atggcgcttcctgttgacatggcgggtctatgccctaggcagggtgacgtgggggctcctccgaagccgagtctgtcttctgttgccgaggccgagcccgagccatggggtcgggcgaggcggaagtcgttcggccgaggccagggcggagtccgagccctggggtcgggcgaggcggagtttcgtcgtcttccggcccgagtccgagccctggggtcgggcggagcggagttcgccgtcttccgggtcttagcccgagtccgagccctggggtcgggcggggcggagtttcgtcgtcttccgggtcttagcccgagtccgagccctggggtcgggcggagcggagttcgccatcttccgggtcttagcccgagtccgagccctggggtcgggcggagcgaagttcgccgtcttccgggtcttagcccgagtccgagccctggggtcgggcggagcggagttcgccgtggcgcctttggcaaggcctgtctgcctgtcagactcactctgtcgagtggcaccgcagtcggagtggcgcaggcggcgctgtccttctatcagactggccagtggagcggtggagtgacggcggtcacttcggctctgccgggggcgcgtgtcaggataaagctttatgctgatgggggttaccagctgagagttaggcgccttgaggaggacgttgctggagacagccggctagctccagcaaggcaccctaaagggttctgtatcctaaatatagaggatcaaatggtcctctatgtcctccagcagcgtcctctaaacggacgtgatttagaggacgttgttgaagaggaaggagatatagagaatgaaatttttttaaaagagaccgtaaaggacggatatagaggatag

SEQ ID NO: 27832 - DNA, 210 bp, Zea mays
  Peptide Sequence Number=SeqID_71207
atgttgcattggttaatcagcgcagttcctatggggttcctgcaaagcactttttcgctgttgatcggcaccggctgcggcatctacattgcccagaactacgacgtcccaaacataaagaagctcatgaggagcctggtgggcaaggccaaggaggttgaggagtcatacaagaagacgggcaacagcaagaacaaggataacgaatag

SEQ ID NO: 27833 - DNA, 957 bp, Zea mays
  Peptide Sequence Number=SeqID_71208
atggggctgtcgaagatctctcctgggattttgcactatcttgttcctcctcaaatgctcagggatagaaggattataggagggggaaggtacaagatgagttccgtgaaagcaaacaggggtttagtatttgttcttctacttattgttttgcctgcgctttcgattggagaaaggaagttgcgcgatgaaaaggatcacaagttatatattccgtcagattcgacgattgagaatacatcaaagaataaaaatgtggaactcgtattttcagatgaagagcgtgaccaagaacttcctgatttttcatcatttattccattcttacctcctctgagtgcagctaatataaaggtctactatgccacacgtttcaccatcatagttgggataatggtgttcggtgattttcttgcaccaatcattgatactaagtggctgagttgttttgatggcagctcagactctaacgaacaatgccttctcccctttgtttggactggacttaataacaactacaggtgctactcccaaattgtgtgttccgtctccggggaaaccacaaatcctttaatatggtttcgagaaggaggagaaaatacaaggcgaattttactgttgatcatgacttccatgaaacttggatcattggatgagttattgaaagcaaggagaaccgttgttacccctccttgggaaggctcaaatttgatccctagggatgtgttgtggtctgacccttccctgcagatgggtctttctctgaataaagaacaaggcattggtttgctttcgggtcctgatatcactcaacaatttctgagaacaaatcatttgaagcgcctgtgggtatgcctccttcgcctcttccctgtttcttctttctctttagtagcaaattttgaggcctgtgtagatatgtcaatgagtattgccatagggattctgaaggaataa

SEQ ID NO: 27834 - DNA, 1176 bp, Zea mays
  Peptide Sequence Number=SeqID_71209
atggaatcatttctaatgctaagaatggtgacaatagacgtgggcttccaggctgttcatcctagggagcggaatatgatgctacagaagtggggccatacacagattgctgttggaacaagaatggcttcctaccatgatgaagttaaaatcagcctacctgctcttttgacaccccaacatcatcttgtgttcacatttttccatgtagatcttcaaatgaaacttgaagcaccgaaaccattttcctaccatgatgaagataaggttccgcatgtgcagcaggccttcacctgggactgcggtctcgcttgcgtgctcatggtgctcaggacgctagggattgattgctgcgacggcattgccgatctcgagaggctctgccacaccacgagcatttggacggttgacttagcatatctgttaaacaagttttcagagcaattgcaagaagacatcgatcgagtggacgagctatttgggaaggcgctcgatgttggaattagtattcaatgcaggtccatcaccgcatacgacattgcttttctactattatccgggcactgcattgctattgctttagtggacaaatcgaagctaaagttacttaggtgcaaaatcatttggttttcaactgaaaacaagtggtcctatattgttgtggttatgaaagttgaggtaccgacagaacataatgataaccgtaatcttgaatgcagtttgccttgcatgagtgattatgatgtacaacaacacaacgatgagcctgactacatgggacactatgtcgtaatatttgggtatgatgctgatgattgtgaatttgagataagatatcctgccagtgccaggaaacgcgaacgggtgacaatgaagagcttggacgaggcccagaaatcctttgggaaagacgaggacattctcttgtggtggtgcactggcgtttcatacaaatcttctcttgtaggtctctctaacaggaaagagtgggatgaagctgtcgctagttatgactgtcgagtgccagtcctgtacgtagctgagaacattctcgcagttacagctgatagcagcagtgtggtagtgagcttagtaagcatcctgtatgttggcccatgccgttcgccaaaccatggtcgtgcaaaggggttcagcggcagcaaaaggctctgctga

SEQ ID NO: 27835 - DNA, 183 bp, Zea mays
  Peptide Sequence Number=SeqID_71210
atgccaacatatgggatgctgcctctggactttgcactgctgccgacaatgctgtcgccgccacatccgccacaaattcctgtgggcttcgagacacctcccgcttcagttgtcgtacctggagatgtgtctcatcaagacgacgcctcgacttcttgggtgaacaacattttcaacacatag

SEQ ID NO: 27836 - DNA, 303 bp, Zea mays
  Peptide Sequence Number=SeqID_71211
atgagttcacccgcctgcgcacgaggaccagtcgattccggccagcaccgtcgtcgagccgttcctcgctgtgaccgccagaacctcccggagccaacccgcccctcgtcggacctctcttgccgccgcatacatgtttcttactcattgcattcgatagattgcaacctagctgacggagagtacatcctcgtgccggagcaaggagttgctcaggaggtaaccccggatccagcaccagagcctgccctagaggatctgcctgccccagctttggaaggcaagccccggttttatgcataa

SEQ ID NO: 27837 - DNA, 753 bp, Zea mays
  Peptide Sequence Number=SeqID_71212
atggctcgtattagaggcactgcacgtaagtcaatgatcccctttttgccttctcgcctgacggagcgcccactgcgtcgcatagtgccaagtcagtccagtcacctggagagactgcatcgtcgcctgcatgaggagcaggagcaccgacgccaggagcaggagcaggaccaggagcaggaccagcaagactcttccccctcgcttcagcaggagagccacaacacaaatctctcagaggagcaggagctggagggatggatcgctagacccatcactcgtgacgtcgctcgcgggtgtcacttccacgacgctctcgacaccttgttgcgtcggggcttcgaccgacacacttggtctatcgagtaccgttgtgtagtctaccagcctcgtcgcaggttatacctagaccagtgggaggctacatgtttggtgcgtcgtccggacaatgatctccggggtgcagaggccttcttagagcactatttgatcactgagagggatactgccgaggcaggcatcggggtagctgatggccttgacatgaagtattaccctcgtcgttcgaccggtagtgttggaggtctgattgtctcgcctgttggtgaaggcaatcccaagctaaacatcatggtcaacctggccgccgtgctccacactgagctggaccacgcccttgatgagttgggcaagatgtctgagaacaggcacagaggtgcaaggcgtgctcagccgggacagcaggcaccctag

SEQ ID NO: 27838 - DNA, 105 bp, Zea mays
  Peptide Sequence Number=SeqID_71213
atggcggtgggtgcgctgcaaaagggggtgtgggtggcggtgggggtgcgcatggaggcgggcacgcgtgcggggggcactgcttattccatgcttcaagggtaa

SEQ ID NO: 27839 - DNA, 837 bp, Zea mays
  Peptide Sequence Number=SeqID_71214
atgacttctcacggatcctcggatgaaaggaatgcacagtcccacactgacgggcttgcacgagagggtttcccccgtatcttgtgggaggtacttcagggagctggttacacgacgcctccccagtacgcggtgcagctgttcgagaagcaccgagtgccccgttgtaggccaggctggcgttcgctggactctgagtcttttggatatagagctgaggatactatcgaggcgattgctcttcacggactgaccaccttctgtggattccaccccttggagctgtccactcaccccattggtttgttccccgcggagaaggaggacgacccaatgtggaaggaccgagtggagcatgccaaggatatctgggctatctacccaggtcagactgctcacttgacggtgcggtgcatgaatgctttgtatcgtctgcaagtgatgcgtggagaggcaatgtcccatctaatggcattgttggaggcaaccaagatcactttggataacagagaggaacttgtggttgacttgtccactgagatggtggaaaaagacctacaagtggaacaattgtcaaatgagatccaagagcttgagcagctagtgggaacgagggagaacaccatcgaggttctcgaggatcagcttatcaacacccagcagcagcttgcagaggctaaccagcatctagatatgcaccaccaggagattcaggacatggaggccaacgaggatgtcgacatcgagggaggagaggagcctgcctctagcttggacactgctggctcagggagaccaccttctcccgattcgagtgttgcctcgtttgctcactag

SEQ ID NO: 27840 - DNA, 93 bp, Zea mays
  Peptide Sequence Number=SeqID_71215
atgccgttgggattcgaccgttggagctctgtcttctgggcccgcctggatgtccgatggcgcaccggacaggtgaccgttggcgcgaagtag

SEQ ID NO: 27841 - DNA, 489 bp, Zea mays
  Peptide Sequence Number=SeqID_71216
atgggacaaagccctgagtacgatgtgtactttcgcaagtcttacccgactaaggaaaaagactctcaaggatatgctggatttaggaatcaaggagaggcttttagcaagaatcaacttagatacttttgcagaaaaagcttactaaaaaaaagaaaaaggaaaattgtgaacagtgctggacctcattcagcccagtcggcccaaatcgaacaggaaacggggacgcgcccagctgctagaacaacactcgagaggggcagagctttaccagagtggtccggccacggagcgcagacacttgtgctcgctggtgacagagaaaaggggaaaatgacgtcgcgatggctctggatgaaattgggaggagagattggggctacacggccgtacggaactctagtttcaccgtgcacactcaatttgaagagaggtggagaaggcagtgcgaattttgggtttttctcaagcttgcggttgaggctgtga

SEQ ID NO: 27842 - DNA, 411 bp, Zea mays
  Peptide Sequence Number=SeqID_71217
atggagaccccagcggagcggggcccgctggtcagtgacgaggccggtgcggggcatggtgagacacgagatcacggagatcagaggaggggaagatggtgcaagggaaggagagggggaagtgggtgctcacccacggggtcgccgccaaggacgaagctcgggtcggtggagatcgaatccggtgaaggggcggtgaatggcgaggcgcagtcggtagcggagctccaagcgcgaggtggcacgatgaggcacaacgtagctgagggcctcgacaaggtgcacgggtgcgatggcgtcgagctcaaggatggacctctagtggtggtgcatgggcgcgatggggagagagagagtgagggggtgttgagtgaggcaagagagtgcgcagagagggagaaaaaggggtga

SEQ ID NO: 27843 - DNA, 786 bp, Zea mays
  Peptide Sequence Number=SeqID_71218
atgctggtagactacacaacggtactcgatggaccaagtgtgtcagtcgaaggcccaacacaacagggtgtcgagagcgtcgtggaagtgacacccgcgagtggcgtcacgagtaatgggtctagcgatccatccctccggcttcagctcctccgagagctctgtttcgtggctcgaactgccactgacgtcgtcgtcttctccgtcttcgttagtgtctcctccagcagccgtgatgccctatggtggtacagagggcatctctggctaaggtgcaggggaaggcggcctcttagactccacctcttgctaaggcgagggggaagagtcctgctgctccttctcctggcgtcggtgctccagctcctcgtgcaggcgacgatgcagtctctccaggtgactggactgacctggcaccgtgcgacgcagtggacgctccgccaggtgagaaggaaaaaaggggatcatagacttacgtgcagtgcacctgatacgggccatctagaaaagacatcaggttgcacactttacccacgagtcgtgatccctttccagcctgggttgtacagacctgatcttcactaccgaggtgaatggccagggatacactacgtagcctttacaaagactcccctggtgtatagctgcacattaggtttcgccagtcgtacaaacgcagtacacctccccaaggtcctttcggagaggtactcaggaaaatggcctgagtcccctagagtatcacaagaccatcagcataatcaagataatagtattgtatcataa

SEQ ID NO: 27844 - DNA, 180 bp, Zea mays
  Peptide Sequence Number=SeqID_71219
atggagcgagaaagaagagccctgctgctcctgtcgtcgacgttcctactcctcatgcaggcggtggtgcagtctctccaagtggctggactgtccggccacgggacggcgaagcggacgctcagcaaggcgggaggggatatcaaagtcaaggcagggacagaggtctatagtccttag

SEQ ID NO: 27845 - DNA, 780 bp, Zea mays
  Peptide Sequence Number=SeqID_71220
atgccccctgcaccacctcagggcatcccggctgctggaggagaccctgacggagatggagacgatgacgacgccggtggcagttcgagccacggcatggagctctcggaggagctggagccggagggatggatcactagacccatcactcgtgacgccgctcgtgggtgtcacttccacgatgctctcgacaccctgttgtgtcgggctttcgaccgacacacttggtccatcgagtaccgttgtgtagtctaccatcatcgtcacgggttatacctggaccagtgggagactacttgcttggtgcgccgtccggacaatgatctccggggtgaagaggccttctcagagcactattctattactgagagggataatgccaaggcagccatgcaagatgcagcacgacgggcactttcgcagtattgctcgttgttcagcggggtagctgatggcctcaacctgaagtactaccctcgccgttcgacaggcagtgctggaggtgtgattgcctcgccagttagtgacggcaatcccaggctgaacagcatggtcaacttggctgtcgtgctcaacacagagttggaccacgcccttgacgagttgggcaaggttcgggcggaggttgcggaattgcgtgctgagtgcgaagcacgccactatctggatggtggttctcctgcccctctcgggattcagcacccttaccgttcaccgccccgtggtcgcttcgactatggtaccccagactgcaggtcccggatagatttggatccctag

SEQ ID NO: 27846 - DNA, 213 bp, Zea mays
  Peptide Sequence Number=SeqID_71221
atgcacatcttcttcgtgccatccttcttctccacaaatagcactggggctgcccaaggcgaggaagacgggctgcctggttgctctgacgctggtattaatttcctccttgctggttgttctgacggtattgctgctgatggtgaggaaattgcctctggtactgctgctactggttctaatgctgatgctggtgctggtgaccttgcttga

SEQ ID NO: 27847 - DNA, 840 bp, Zea mays
  Peptide Sequence Number=SeqID_71222
atggcttaccagagagctcggtccacgcgcggcggcgggcgaccgaagtccggcgagggcgatcttgggcttccggtgaagttctgccgggtccgaggacttggaaagcctcacgggccaatggcgaagctaaccgaaggtgtggtgcggcttgggcgcgactggagggagctggccacggcggccgaggcttggaaagcttggcgggcggtggcgcggcgtgctcggggcaaattccggcggccgtggaccggcgagcacgcgcgggtgggcgctggggagcgcgggtgcgcgaacgggcgtgaaccaggggtggcgcgcgtgcgcgaaactgtatccgcgatctgggccgtgcgatcaagatcgtacggaggtgatcagaccaggaaggacgaactgctgcaggtggcgctgctcatctccgcggcggtgagatggggaagaacgacagtgagaaagcctcgggcggaccagaggaactctgctaagggattccggccacggggagggggcttgaggcgcgctaaggcgtggaaaggcttcagtagaggcagtggtgacatagggacctacatcggggcactagaccaagctaaattggccagccaccacgtgggcgcggcggaccgccacgaccgagcactggcgatgccaaaattggctgagcatagagcgaaatcaggaaaattaggcacgggcaaaggtgtctcaccttggggcggagctcggggtggcttggcgcggtctctagcgagctggatggctggggaagcgggcgtgggtctccagcggcgtcggcggcatgggcagagcgagagagagagggcggagctgtgctaa

SEQ ID NO: 27848 - DNA, 357 bp, Zea mays
  Peptide Sequence Number=SeqID_71223
atgacgcagttacaatcactaaccccatggctaatacaggtgttccacaacttgttaagcccacaacttcagcacatgcaaattcattgggcactggtcacacttcgtgaaaaacgatatagcctctgctgctctgcatacatagatgggataaagatggctggcagaatggtttgtgaagaattttatggctacgtgacaccaccaagtgatcttgtaacttgtatacgaccatcaatttggtctagacggacggacaccgacatagaaggtgctcttagagacattgaaagacctctcggaggtattgagggaactctgatcgctactgaaggagctctcatggccattgaatga

SEQ ID NO: 27849 - DNA, 492 bp, Zea mays
  Peptide Sequence Number=SeqID_71224
atgggcacggttaaggtcaaggctcagtccactcaagggacacgatctcacctcgcccgagcccagcctcgggcaagggcagccgaccccggaggattcgcgtctcgcccgagggccccctcaagcaacggacacaccttcggctcgcccgaggcccagtcttcgcagagaagcaaccttggccagatcgccacgccaactgaccctaagtccagcctcgggtgccataggaagctccgcctctcccgaccccagggcttgggctcaacctcgacgctggacgacggactccgcctcgcccgaccccagggctcgaacacagcctcggcctcggaagacggtctccgcctcgcccgacccagggctcagactcaacctcgacctcggaagacggactccgcctcgcccgaccccagggctcggactcagcctcgacctcggaagacggactcggcctcgacctcggaggagcctccgcctcgcctgacctag

SEQ ID NO: 27850 - DNA, 771 bp, Zea mays
  Peptide Sequence Number=SeqID_71225
atgccgacctcctcttcttctgctgccgctacgccgccggccgacgcctcgccgccggccgacgcctcgtctgaggagacgctgagtactttggtggcggaggagttgcgcgccggcgatacggtggattttggtgtgtcgaggatgtcgtcggcgttcttcgccgccggtctccgccttcctgcgcaccgatttgttggagacgtcctgcgcagatttaatgttcagatacatcagctgactccgaatgccgtggtggctctgtcgaagtatgtctgggcgacgacttcgtacggcgggcggccatcacactacaagaaactggctgttataaagcagttcagtactactggctatgagcggtcagattccattgtaattgatgaggttgaactacagagacatcaacagcttgagaaattgtatacttctactcgttctgtaagggatttccagaaggacatagttagagcagctgaaggtttggtgtctattggaaacaaacatattgaagtgggaacaaaattttctgaggactgctatagatatggaagcgaaaataatgcaagcgacgaagcccttagaaaagcagcatcactatacggaggtgctttgagaaatattgagaaagagtatgaagatttcaacagaattttatcttctcaggcaggaaatataggtgttatgggaattggggaatgcatatttaagggtacagttaccagtttaccactcatggagcgagttgctgattgggatggatttgaataa

SEQ ID NO: 27851 - DNA, 258 bp, Zea mays
  Peptide Sequence Number=SeqID_71226
atggtgcagcttcatatccttagagatatggaggcagaagtcattattgcatttgtagccatgtgcattcatgggagtggtgttgaatctattatgtggatgtggataatttggacttgtgcatggcacctaatttctgctttgggaatagagggatgtagcagcacggccactacacctttaataaaggaaccaccattttataatgttgttaatcagagttggacaagtctagtgaattgctttgttcttggttga

SEQ ID NO: 27852 - DNA, 441 bp, Zea mays
  Peptide Sequence Number=SeqID_71227
atggcccccaagcgagctaactcgaaggctgccccatccatcgatgacacggcgaaggcagcgcttctggtggataagaaaggcaaggccctcgtggactccacccccaatttcgaaggcgcgccacaagcaccatcgccaggcttcgctctaccagagggcgaagacaccatagaggatgaagaagtcatcggcatctcagccaaagaccagctaaagctgcgagctctgctcatcaaaaaccaccacctccagaagcagaaagaaatcctcgaagccaagcaccaacgagtcaccatgcaagccaaagtcatggaattaccactagacgcgcagagcagcggaagacgtctcgatgtagacgaacgcgtcgagcagtgccgtgcagtcgccggcgtccttcacgtcctcgcacggttcgtccaagtgctccagatgtag

SEQ ID NO: 27853 - DNA, 390 bp, Zea mays
  Peptide Sequence Number=SeqID_71228
atgcggtcactgcctcccccaccacgacagcccgcgtgcgatgccaccacatcgctactcacacgaggcctcctcgcactcctcgccctcgccaacacgctggcctacttcaccgactccccgcacaatgaccacgtctactacgaagtcaccacccgcaccggcctctcgctcctcgactatacgtcgggtgcgtcgctgcagtccgtgggagccaccaggtgctactggctcgcgttcctcgactttgtgcaagtcacgctatccgccgccgtattcggggtcttcgcctgcctctgtgggcttaggccggacaggggcctacaagattgtggcagaacctcccaagttattggcccacatggacctgtccttgtcccaaggacctaa

SEQ ID NO: 27854 - DNA, 390 bp, Zea mays
  Peptide Sequence Number=SeqID_71229
atggagttgagagacggccgccagcaactcttacacggtgaccgcacgaccaacacttcccagcaggcggcggggaaaagccagaaaacggcgacgttggacctaggggagctatggagcggagatgaatggataaggaacggcggcgcgaggctttatacccgagagggctcggagtcacgccaggctcggaacaatcgtggcgccgcaagcctcgccgagatccccgcgaggtggctgtggacccgcctggtgcggcgcttttcgcgcgacgacgaagaccgagaggtggaagagagtcctcaagcggaggaagaggggagcgtgcgcatggtgatccggggcctgggggtcgcatgtcaacggtactcatcgcgcgaacacgcatga

SEQ ID NO: 27855 - DNA, 387 bp, Zea mays
  Peptide Sequence Number=SeqID_71230
aggtggtaccctttacccacaagtcatgttacccatctgccaagggatcgcgacttcccatacacctctaccgaggaggcgaggcagggaatcccttgcaggaccgccatcgcagcaaaatcctcccgagggcctccctacactgaccactcccctactgcccttgcccctttcgggtaccaagatgatcttcaggtgacacgtgccctcactgctaaacgtagcaatacagacaaacatgccgaggtcgaccagagtacccgtgtccccaccggaaagcacaccggcgcgcgaccagccgatcatcaggcgcccatctacccgagcggtttggttctacgcgaagcaagggagatggcgaactttctggtggtttcaataccttga

SEQ ID NO: 27856 - DNA, 1809 bp, Zea mays
  Peptide Sequence Number=SeqID_71231
ctcgtgcttcgccgactaggagttccgacgtggatgctgagggtaccggcagcagctgccctagagatgttcgtatcccccgcgcggacatccttcaccccgttaccgctcgcgtcctcatcgattatagagtgtttccttacgggcggaatattgctgctgttgtgtcggcagtgatggacaaggatcgccagggagctgcacagaagcgccaggcggttgtcaggcttcatgaagccaggccgaagaggcagcgaggggctgcgaaggctgctgcccccggcggaggcaagccgccgctggcggcgaagtctgccatccctgcgtctagcaaggcgacggaggctgcggctggcgccggtggttccaagtctgcgaagactgtgccgccgtccagcagggcgccggaggtcgcgaaggcggcccgagggttgccgtcgccgggcaagcgcgtcgccgacttcgccaccgatattagcgtggacgactatcttggtgggtcggacgaaggccaacttgttattgttgcgcctgccgcggcgaccacggcggcggccgtagtgccgaaggcgaagggcggtgctcttagtgccggaggcgagatgccggcactcgctgctgtcagggacgaggcgggcgctgtgtcccgccggctgaaggagatgaaggaggcgctaagtcaggcggatgacttcgcggaccgcgcggcgtcgggggccctcacggcagttgtgtctgccgaagtcgagagactttggacgcaacatgctgacgccgtccgagaaaaatcggccaccgacagtaagtgccgcaagctgacggacaaggtggccgcgctggagggggaaaagactgacctccggcgccaattggtggaggagaggagggaggccaatgaggccctcgccaaggcgcaggctgcgctgttggaggagcggctcaacgccctgcagagccgtgtggagaggaccgaggccgcgacgcgcgcggaggctgagcggacgcgcaaacagcttatggattcataccatgagctgggcgcgcggaccggtgacttcgaagtgccggaccgagagcccggactttgctgcctggagtgggtacaggaggagttgcaggcactccccactattgtggaggggtttatgtcgtatgcctccctggtcacctgcgagggggcgatgaacgcgctctcgcgcgaagggtgccggcactttgaggtcttcgaccaagctgatgaggattttgagcgagatatctacaaggttgaggaccctatagtgaaggagtccgccggagccatctacgaccggatgaggggcccgcacggtcgagaggtggtcagggagcgggccgagacggcgagggctcaggcggcgcgtggcgagagggtggatgatttcggggcgttgaacagcgcgctgcctgacccggagtcgaactcggcggatgccgtgtccgaggccgccctggagccgcccccggagactgtcgaaggcgctcctgatgcccccgcagccgctgcggccggcggaggcccgcccccagagaccgccggaggcgctcctgatgcccccgcagccgctgcgccgagggctgaaatcctgcgacggtggcggcggaggcgacagcggaggcaacagcggaggctcccgcgacggctgggtcttcgcaggtggcgcagtgggtgtgggtactcggttgagtggactgaggagtcgtcggaggaggacttggactattttgcggccttggatgtggcagcggtggagacttcaccgcacgctgcggacatagaagatgtgcctg

SEQ ID NO: 27857 - DNA, 117 bp, Zea mays
  Peptide Sequence Number=SeqID_71232
atggtgaacaggagtgggattactgaatcaggggaaagcgagaaggtcttgctgctcatggagagtgttgtcaggataccctggtattatccttttccattttgggcttggcagtaa

SEQ ID NO: 27858 - DNA, 462 bp, Zea mays
  Peptide Sequence Number=SeqID_71233
atgacttcccatggatcctccgatgacgaaaatgcactgacccacactgacggacttgcacgagagggctttccccgcatcctgtgggaagtacttcagggggctggatacacgacacctcctcagtacacggtgcaacagttcgagaagcaccgggtgccccgctgtagggtgaggatgactttggagcctcatcccctgcagccaggctggcgctccttggactcagagtctttcggctggctacccaccccattggcttgttcccccgctgagaaggaggacgacccaatgtgcaaggatcgggtggagcatgccaaggacatctgggccatctacccaggtcagactgcgcacttgacagtacggtgcatgaatgctctgtaccgtctgcaggtgatgcgcggtgaggcaatgtcccatctgatggcactactggggaacaaagatcacattggataa

SEQ ID NO: 27859 - DNA, 204 bp, Zea mays
  Peptide Sequence Number=SeqID_71234
atggcggcggcgggcaggaagacggccctcgccgtggccgccgcgctcgctctggaggcggcacctccggcggcggccgccatggactgcaaggccgggtgcgccgagctccgggcctcccggctcggcgtcgccaactgcgagaggcgctgccaggcgatcgccgcccagcggaaccctgctagcaagtcgcccttgttttga

SEQ ID NO: 27860 - DNA, 210 bp, Zea mays
  Peptide Sequence Number=SeqID_71235
atgcaggcggcatgcaaccgcaccaagggggtgcaccctttcgacttcgacgcatccagcatggaggcccaggcccacacgtcatgtaaccggcgcgccggttactacgtgcgagaaactacaccgccacttgcgctaggaccgggaaaggggatactccgaaagggatccttctccacgaaggaagcgggccccgagccctcctactga

SEQ ID NO: 27861 - DNA, 231 bp, Zea mays
  Peptide Sequence Number=SeqID_71236
atggagagtcatgatctccgggcagaatgggaatcacggcttgtgggtaaagtgcacaacctctgcagagcgtttgaaaactggtatatcagccgtgctcgcggtggttatgagattgatgattctggttatgactatgatgctggttgtcagcattgcaaccactgctcaggcgaagatgaagctgtggaaggagacttccaggagttccaagattacgacgagttctag

SEQ ID NO: 27862 - DNA, 144 bp, Zea mays
  Peptide Sequence Number=SeqID_71237
atgtctagaggtagagggagtagactcctcacaccgggttctctggaggagatggttgctgggataacttggccgaccaccctgccaccgggttggactgtcgagtgggaccctgcctcggctgaggaggagcatgaggagtga

SEQ ID NO: 27863 - DNA, 594 bp, Zea mays
  Peptide Sequence Number=SeqID_71238
atggaggtcctggaccttacccggaggtccggtctatatatacaagggtccgtcaccttcccatgggggtccggactcactgttgataccttggagtacatcatcttctcaggccacgtggcggtcccggagccttccacatggtggggtcgggcgctgtttaccacgcgactagagatagccacgtgggtatcacgtcttcatactgtagtaagggatacccctgtttcagggtaccgacagtggccccccgggcccacctcaggggaggatacgagcctgcaggtggggccaaagcttgattggcgattggtgcgccacttccgtgcgtttgctgacgtaatcaccgccaatccgccttcggtcacaccaactgccatgtctgtccccggctccccacgggaaccgacacccaaagagtatgacttgtgggcctggacccgtgtcatagactgggtcgttgttttcggcggagatgaagaggcgcactaccacgggcaacggttcgctcctcgcgtggcggttcgccttctccgcactcggagaccagcacaccagctgtatgacttgtggacccgggcccccgtgtcatag

SEQ ID NO: 27864 - DNA, 276 bp, Zea mays
  Peptide Sequence Number=SeqID_71239
atgcccctcataaaagttgacaacattgactcagacccttatggactaaaaggtcattctatctttaagtcagttcgaccctacaacttcggatatgttgtagttccggagcttcgtgaacggtgtcttcggcatcatgttcaagcagcttcagctgaagctgtttctttttgcaggaccttcggcgacgaagcatggtcccaacaatttgttctctcttcatccaaggaagaatacaataaggtgagcggcttggacaatgccaagcagatctag

SEQ ID NO: 27865 - DNA, 300 bp, Zea mays
  Peptide Sequence Number=SeqID_71240
atggagaagctggaagaatcagagactaaggttggctttctgtggtatgaacatatatacaagctagacaaagattatcctatgcttaacttcatgcttactacatcgatctatcttcttgtgatctggctattagttttcagtgtggcgtgctttggtggaatgtctctattaacggggtgtgtatcagcgatagaagaatggcttggggtgacaatcaccatcatcatcctgcaacttgtctttctcaagtttgactacaagctattgcttctaattgattctccatctaggatctag

SEQ ID NO: 27866 - DNA, 462 bp, Zea mays
  Peptide Sequence Number=SeqID_71241
atgcttaataagaagcacaataggaagaaaagggaaattttgggagaaatagatggcgtacaaccaaaaccttccagggatctcatggaacctagatatataattaaagagtgtgagttcattcacaatctcaaagactgtaatctcgctgacggggagtacatcctcgtgccggagcaaggagttgctcaggaggtttgtattgtgcaattaagtgtaggagttgtttggaaccttagttgcatggactcaggtttttcccttgtgatggatactagtatgctagatcgagtagctgctttactaattagggatctcagtagaagtcgagtgatttttctagcactcgcgcgaggttctctggaggacatagttgctggagtgacttggccgtccatcttgccaccgggttggacagtcaagtgggaccctacctcagcagaggaggagcatgaggagtga

SEQ ID NO: 27867 - DNA, 354 bp, Zea mays
  Peptide Sequence Number=SeqID_71242
atgtcgccgcagaacgcagccgtggacagctctaccactggccatccaatccatgttgatccgactgatcttgcacgagcactgaaggcgtgctctaccgtaggagatgcctcgggatcgagttgccgggccaagagggtcgtcggcgtcgtgcccagcgtgggcagggtaagcttgaacccggctattccatacatgaaaagacaatcgcgcactgggagtggagagatggcgagagtggcacgtaccctcctggcaaaggaccgcctaaaaaggatggtgtgctctcaggtggcgcggacctgttcatgcagtggaggatccgtgggaatggttgacatgtgcaagggttaa

SEQ ID NO: 27868 - DNA, 291 bp, Zea mays
  Peptide Sequence Number=SeqID_71243
atggcgagagtagcgtgtaccctccgtggcaagaggctggacagtggggtatctgtgctctcggttggcgtgaactcggtctggcacagaggagggagatgtgcccagccagagcagcaagccacgcaggatgaggcaccccaaccgcagttgctcctgcctcctccgatgtcaatagagcagatgttcctcatgcagactcaggcagttcaggcaattgggcagaccctggcagctatgcagcaagttcaacagcaacctcaacctcacccgcagatgcagatgtcgtag

SEQ ID NO: 27869 - DNA, 240 bp, Zea mays
  Peptide Sequence Number=SeqID_71244
atgggggtttatgcgcaattgtcggcgaaacagggaaacaatgttgtgggttctttactggtttttcaaatcacccaggacctttacgcaaaaaccgctagcgcagaaaacaaagaagaagtagttgttgaagaggaagttacaccaccgactgaaattccacctgtcggggacagtttttactttgacatttgtggaacagatcccgagtctcctacgacacaaggtgataggtgttga

SEQ ID NO: 27870 - DNA, 252 bp, Zea mays
  Peptide Sequence Number=SeqID_71245
atggataggccagagcacccgccgccgacgagctcgcccgcctgcgtacgtggaccggccgattccggccatcaccgtcgtcgagccatacctcgtcgttaccgcaaggacttcccggagccaaccccgtccttcgccggacctccctcggcgctgtcaaaccaattttgccaggttctaaataatgtgaactacttaggaaaaatacaaaaacccctaagtgttgcaaaagaatttaaagttttgaattaa

SEQ ID NO: 27871 - DNA, 504 bp, Zea mays
  Peptide Sequence Number=SeqID_71246
atgacgcgtactaggaaaacatcgcgcaaatctaatggacctcttggtgtgccacgacatcagctagcttccaggcacgaaggaagtagtagtggcagtaatgacccgattggagacctggaagcccgggtagagcaacttcggtcagagttacgccataggaacagggcacatgagcaggacagtcaccgtatagcggaattgtcagccgaagtcagccgcttgcagtacaaaatctcggaacaggatacgaccattaattgggttgtcaacttgcgttctttcgcttgggactgcgaagcgaaagctctagctcgtgtggaagagcttagtgcatccctcgaaagcctgtactctgaagaacgattgcgatactacagtaacagaaagatctcaggtgcggagcacctcgccgccagcaccgatcggcgctgtgattcgcgccgcatcccgatcaagtgctcgatgggcatctcttcggagcgatattcacagactgggtaa

SEQ ID NO: 27872 - DNA, 489 bp, Zea mays
  Peptide Sequence Number=SeqID_71247
atgcagaaacaaaagaatgtgtggcaccagtatcaaataatacttttgctaggtaggattcgactagaaacatacctactgccatgtcctgagcatcctagattgcttcggcctccaggtggttcacctttccacggttgtaggcctgaccacggactcctggtgcttgctgtggtgctccttgtcttgctggggcattcactgctggcggttgctgggctgctttctttggacaattctttgcctagtgattatgttctccacagtagaagcatgcacgacctcctacttgtgctggggcttcttggccattctggttggttgtgggggcaggaagacgagctgcctggttgttctgacactggtactgatttcccctcggatgagtgttctgacggtactgctgctgctgctgctgaggaaactgcctctggtactggtgctggtgctgacgctgatgctggtgctggtgctggtggccttgcttga

SEQ ID NO: 27873 - DNA, 822 bp, Zea mays
  Peptide Sequence Number=SeqID_71248
atgtcaggtcagtccagccagctggagagattgcatcgtctcctgcacgaggagcaggagcgccgatgccaggagcaggagcaggagcagcaggactcttccccctcgcctcagcgggaggtggagtctgagaggccgccttcccctgcatctcagccagagatgccccctgcaccaccacagggcatcccggctactggaggagaccccgacggagacggagacgacgacgccggtggcagttcgagccatggcacggagcactcggaggagctggagccggagggatggatcactaaacccatcactcgtgacgccgctcgtgggtgtcacttccacgacgctctcgataccctgttgcgtcaggctttcgaccgacacacttggtctatcgagtaccgttgtgtagtctaccagcatcgccgcgggctatacccggaccagtgggaggctacttgcttggagcgtcgtccagacgatgatctccgggctgatggccttgacctgaagtactaccctcgccgttcgaccggcagtgttggaggtgtgattgtctcgccagttggtgagggcaatcccaggctgagtagcatggtcaacttggtcgccgtgctcaacacagagttggaccacacccttgacgagttgggcaaggttcgggcggaggttgcggaattgcatgctgaatgcgtggcacgccactatcttgatggtggttctcccgcccctgttgggattcagcacccttaccgttcaccgccccgtggtcgcttcgactatggtaccccagactgcaggacccgcatagatttagatccatag

SEQ ID NO: 27874 - DNA, 165 bp, Zea mays
  Peptide Sequence Number=SeqID_71249
atgggcgggggcctcctggcagcggcatctagcccgaggtcggcgttgccgctgcttggtccctcggagcagaaggcgtcgtcgtcgccgctgctggagcaggccttccccctcggagtggggtcgttcgtgcctgcggagggggaaccggagttccgttcgtag

SEQ ID NO: 27875 - DNA, 219 bp, Zea mays
  Peptide Sequence Number=SeqID_71250
atggggctacgagcaggggcccgggccaagcaggggctgcacgcacggggcaggggacgcgcacgagcaggggctgccgcgccgaggccgcacaaggggctgcgccgggccacacctaggactgcgccggggccgcgccgaagggttaggtcttcttggacttctaggtcttctactggcaactgcccttctggcacacgcaaacacttcttcaactga

SEQ ID NO: 27876 - DNA, 651 bp, Zea mays
  Peptide Sequence Number=SeqID_71251
atggggcccacgggacagtggctcgggcgggcggtgagcgggtggtggctgacggggggcatcggcgtggtcgggcctgctggaggaccctcgacgaagctccggccggtgctggggcacggcgagggcatggtcgtttggcctagcgaccactgcgagggagaggcgaggaaaaggagagggggagaggtatatgctcacccgagcgacgacgacgagctcgaatgtggacaggatgacggtgtggaggtgctcgacttggtggggcgcatggctcggtgctccgacgataggcgtcggggcataggcatcagtggtgctccaagcacggtggggcgaggctcggcacgtcggcggctcggtgactttggctctggcgcggcggtttcgagcaagcgagggggagagaacaaggtcgcgtgggggttcaaaagagctagccgtgtgggcggtttcgagctcgacgcacaacgtgggcacgacaacctcggtgtgcgcgcggcttgcgcgaatgagattgacaaggcatccatgcttgacgagatcatcgaatacatgcaagagcaagggcctgtgccagcctcatgcccatcgcgctggcgtcggcgatatcggatcaaggggggcgtcctcgcggcggtccagccgtaa

SEQ ID NO: 27877 - DNA, 270 bp, Zea mays
  Peptide Sequence Number=SeqID_71252
atgcagcgcgcttccgtcaccagtaccacgcttctctcgctcagccggcggaggaggggctacgcggccgcagcggagttgcgcgcggcggcggcggcaatggcggcgagagccccgggcgcgggcggtgccgctgacggcgcggcatcgtccaaggaggtcttctggatgagggacccccagacggggtgctgggcccccgaggaccgctttgccgacgctgacgccgccgacctccgcgcgcgcctgctcgccaccaggaaggactag

SEQ ID NO: 27878 - DNA, 480 bp, Zea mays
  Peptide Sequence Number=SeqID_71253
atggcgcctggggccagacttggcggctgtcagcctcaccctggcgggtggcacagcagtcggagcagcgcaggcggcgctgttttcctgtcaggtcagccagtggaggggcgaagtgactgcggtcacttcggctctgtcaacagaagagcgcgcgtcaggataaggtgtcaggcgatccttgcattgaatgctcctgcgattcggtcggctggcgaggcaatcttggccaaggttgcttctccgcgaagcctgcccgagctgggcctcgggcgagtcgaagtcaagatgatatacttttggcccttaaggggactcgagctgtttctcgagtgcctctccgtaaggactggtggtgatgaggatgatggttttggttatgaccatggtgatggttgtccgcgttgcaaccactgctcaggtgaagatgaagtcatggaggaggacttccaggagttccaagagtacgacgagttctag

SEQ ID NO: 27879 - DNA, 320 bp, Zea mays
  Peptide Sequence Number=SeqID_71254
agacaactgatcaagccaaggatggaggcaagaagagcttcgaggtaccgagtgcacgggagaaggtcaaggagaccaggaacccaaagccaggggtgaagaagaagacttgcaaagtcaagagtgctgtcaagaagattgtaagcagccgcggctttgttgtaacccaactcaacatagtggaaggctctatctgtcatactgacagatctgagcaaacggaggaaggagttgaaatagactccaagcccaggatcttctattctgctgcaacctactcgaaggatctttcattccactatgatctggtctttgagtag

SEQ ID NO: 27880 - DNA, 582 bp, Zea mays
  Peptide Sequence Number=SeqID_71255
atggtcctcgcctcagttgccgccacctcgttcgtcatcctacttcttttctctcccccctcatgcctccgcctccgcgccaccccattcttggcagagggcgtgggagcaggcgcttcctccctgtattcgtccaacacatgccccgacactgacccgcacagtggctattgcacgtccacgaggacgtttcatagtatgcacgcaccatcattttcgacgctgccggatgtcccgtttgtcttcccggccttcgccctgttcttcctccccaacctactgccctcgcccacggtcacagccgtgagccgatcgatgctcttcgacgcggatgtccaggtcttcatcgtgtccttctccggcaacgaacaggatttcgagatccatgcgggcactaccacagggtgctcgtctcttgtgttcttggctcttggaagcattaaggatggagcaacaatgatttgtcacactaacagtaaaaggaaagtcgttgtgaactctcttctaatagctcccttcattggtcgtgttgtaccaagatatattggatggagtaaacaacaacatcagttattcaaataa

SEQ ID NO: 27881 - DNA, 141 bp, Zea mays
  Peptide Sequence Number=SeqID_71256
atggcgaacgaggtggcgacaactaaggcgaggaccatcattatcgtgctgaggctggcgccgccctggccagacagatacaataattttgagcgtatgggtggatgcaggatgaccgttaaaactggtgcttcaatgtag

SEQ ID NO: 27882 - DNA, 237 bp, Zea mays
  Peptide Sequence Number=SeqID_71257
atgaggtccacgacaagaatttttttcaggaggtctatacgaggtccacagcaagaattgttttcaggagagacaactgatcaagccaaggatggaggcaagaagagcttcgaggtaccgagtgcacgggagaaggtcaaggagaccaggaacccaaagccaggggtgaagaagaagacttgcaaagtcaaggttgatcgagttaagagttatggtgtatcaaggatcactacataa

SEQ ID NO: 27883 - DNA, 543 bp, Zea mays
  Peptide Sequence Number=SeqID_71258
atggacgcgacagcagggaggacgcagggaccaagttcgctggcgttgctgccgagccgggagggactcacggcggggatgaccggctcaggggtagtggcgagcgcaggggcgagccagggagctccggtcgggcgctgcggagaaggccgagccggggccgcgcggagggagatggagcacgcgcagggaactcgacggcggccgggcagagggagctggggccgggcgcgcaaggagcagggcgcgtgcgcggacgatgagcaggggctggggcaaggaagagcgcggacgggcggggccgagctgcacggccgacgagcgccatggtggggaggagctcggggcacaccatgggaaggcagctggaggaagaggaaggagacggggaggagctcggctggagaggggcgagcaccagggagctcagcgcgcaggaggccgacgcgcgtagcagggagaaggggagggagggagagaaatttggacctgagcgagaaacaacagactgattccggctttgatattttaatttacaactga

SEQ ID NO: 27884 - DNA, 300 bp, Zea mays
  Peptide Sequence Number=SeqID_71259
atggccgctttggataggttcgccggagttagccacctcgcggtcttgtgccacgtgcctcggcatttaccatgtcgcagtcactcgcgttatgcatgtccggtgattgccgaaaatgaaaaagagatagaagttgaagaagcaaggactacaccaccatcaccacctgaagaacctcaggcagggaactacttttattttgacatctgtggagcagagcctgaatcacctataacacaaggcaagccccgatgcatttgccacctccttgctattttaaaatctttctcacttgcttga

SEQ ID NO: 27885 - DNA, 1716 bp, Zea mays
  Peptide Sequence Number=SeqID_71260
atggttgcgcctggcgcggagatcgcgacggcggccatagtgccgaaggcgaggggcgaggcccttgacgccggaggcgaagtgtcggccctcgcggtggtcagggacgaggcgggcgcagcggcccgccggctgaagggagtgacagaggcgctgagtcaggcgacggaggcgctgagtcaggtggctgacttcaccggccgtactgcgtcgggggccctcacggcagctatgtctgccgaagtcgagagacttcggacacaacatgctgacgctgtctgtgagaagtcggcctccgacagcaagtgccgtaagctgacggacagggtggccgccctggagagggagaaggctgacctccggcgccaactggcggcggagaggagggaagccaatgaggccgtcgccaaggggcaggctgcgcaggcggaggccaagctggcgcgggcggagggtaatcttgccaaggagctcgcggaacatctgcaagagcggctcaccgccctggagagccgcgcgaaggaggccgaggccgcaatgcatgcggaggccgaacggacgcgcacgcagcttatggatacatatcgtgagctgggtgcgcggaccggtgacttcgaggtgccggaccgagagcccgggtctcgctgtctgcagtgggtgcaggaggagctgctggaacttccagccgtcgtgggggggttgatgtcgtacgcctcccttgtcacctgcgagggggcgatgaacgcgctctcccgcgaagggtgccggcacttcgaggccttcgaccaggcggatgaagattttgagcgagatatctataaggtcgaagaccccgtagtgaaggagtccgccggggccctttacgaccggatgtggggtctgtacggtcgtgaggtggtcagggagcgggccgaggctgcgagggctcaggcggagcgcggcgagcgggtggacgactttggggctctgaacagcgcgctgccagacccggagtcgaccctcgcggaggctgcgactggggtcgccctggagccaaccccggagaccgcagcgatcgcgacggctgcccccgcatccgccgcggccggcgaagacctgcctccgaaggtggccgaaggcgcccctgatgcccccgcagctgctgtgccaagtgttgaaggtcccgcggcggtggcggcggaaacaacggcggaggcagcggcggagccaacggcggaggctcccgcagcgccagggccttcgcaggttcaagattttgggcctgcgcacgcaatcgctactactgagtttttggcggcttcgaccgcggaaggtggaaatgaatatggtgggtctgtatctgagttttttgattttactgactctgggagctcggttgagtggactgaggagtcgtcggaggaggacttggattattttgcggccttggacgtggctgcggtggaggcttcgccacacgccgcggacgcgccagacgtgccaggccctagcaccggacgccgacgacgaagggcggttgcaaagcgtagggttagtgcggaggaaggggctcggcttcgcgtgagtagggctggtcggcaggagctgctgtctttgccggccgccgcgggtgcaggggaaggggagctgcgaagtctttttgcgggtgaggagcttaggataatgttatttaattatagggagatgggaattattcctaaggttgagccgatgtag

SEQ ID NO: 27886 - DNA, 456 bp, Zea mays
  Peptide Sequence Number=SeqID_71261
atgacgcgcttgaagcggcgaactgcgaacgtgaagcgtgccgaaggcacacgcgctggggttgcgcgccgaggccgtgcgacagcagcgccgaggctgcgccatagcagtgatgaggctgcgcgtagggaccgggccaagcaggggcatgcacggagcaggggatgcgcgctggtagggggccacaccgggcagggcgccggggagctgacgaggggcgtgccgggcgagggaggccgcgtcaccgaggtgggcgcgccgggcaggggaggggtgccatcggggggggtcgaggccgaggccgcacgggggactacgaggaggacgcgttggtgtcaggccgccgccgggaaggggtgccgcgcgaggaccgccgcgtccaagggagggcgcgccggggccaggctgctgctggggaggggcaccgcgcaggtggccgggccacgcggggaatag

SEQ ID NO: 27887 - DNA, 345 bp, Zea mays
  Peptide Sequence Number=SeqID_71262
atgacacctggtatcagctccaggttatcctcaccaccaccagccgcccatccctcaccaccaccagccgccgcgccatcagccgccacaacgccctcccacccgccctctccaactccagatgcattcactcggctcgaagagagttttggccgtctcgaagaaaagtgggatcaatccgttgtgatgttccaccgctacaaggagaagacagagaaggaactccaagcagcggtaagtctatggcagctcaaggacgagctggtcctcaagggaggaggagatgtcatgggcatcatagggagcgagaggcaacaaccaggctgggataaggctagagaataa

SEQ ID NO: 27888 - DNA, 2097 bp, Zea mays
  Peptide Sequence Number=SeqID_71263
atgcacgcctcgctccctaagggtcttacggccattactgcaactcaacaaccagcaatcccatcataccttaaggctctccaatccccagctaaggccgctcaccagcaaccaaaacctccacgacccattacagcaaaggctgtctgctaccgctgcctctcgccggagcatcttgttcgggcttgtcgggatcccgtccggtgccgcaaccgccatggttacggtcaccggagccacgattgcaaaatgcctatttcacaaacactctcgcctgccagccaccaccgcaaaacgccgacgatccctgtcccagcttcacggctacctgtccatgctgtcccgttcaactacccggcagccaaggcatcaagctctacaccgccaacaccaccaagctctcccgccacccaaacctacctggatgcatatgcccccaagaacatgctagcctcatctagcagctgccctccagatttcatgctgccaagtgccggtgcttcgaaggcttcgtgcatggaggggccgctgggcctgggaagggcggctttgccaaaggcgcactgttcctccccgccaaggaggatggtcgacatctgcatagattcaaggaacggcaaggctcctgtggagccagtcttcgctccgtcgcgctcaccatctcttggtaggaggtcgccgccgtctggccccgggtctcctgtacctcggtccggttcgccgccatcctggacaggcagtggtacaggcaatgattctggcagcttccctaaacccgacctcgcaataccagttcagagtccaagccttgacttgggggggaccagaaatagtgacggttcaagccttgactgggatggtcgtactcctcacatcgaggcgtgggtcccccagggctgccgtgaaacaaacgacaagctcatctatgcatatctggatcaacacctgcctctctctgcagctgaggagttcatccaaaatatcctgcgtacggctgccccaggaattcagttccagatgctgccatcttcgcggggaatcaagcttcttcatttttactccagagctgatagagatgaggtccgactcatgagtccgctgcttgctgatggtctgcagctaaagttggaatgtccggaagagacagacaacagatttttcaggcagccgcagtggctcgcttttgctatgattgtggacttcccaaccgagcattggtccgaggcttcaattcgtcgctgtttcggtgcctgttgtgaagtggcagaagtggacccgcgatgcctcacaggtgataactttggcccaatccgggtgctgctagaactgaaccactaccttgatctaccgtcggaaatttgggtcacgaccatggatggggtttccaggggcggatgcatcgcccaggtcttgccgctgcgggtttggccccgtgccgaccagcttgggccggatggtcgcctaagacgttttttccagcatatgtctcctccacctgcgcctcctatgctatctgaggtgcctgctgctctacctcatgttccacaacagcaaaatgctagcccggtgcgtaacgcccaacaacaagccaacaccaccacctcccagacgtcctctgcattttcaactgctcagctcctatgcctctccgctatgcttgcccagcttactggcccacgcacaacagaaacacaatcacaactgcctcctcaacaaaacaccactcctcaaagccattgctccagcaaacggcagccgacatcacccactactttcaacgctaccaggcacaaaagagctggtcgcccacctcgaaacaatgttcccaagccgatccagcgcaagagcagtcggctggcggcaaaagctaacggaaatttcgtggatatgactaataaggcggtcaagttgaaggaactgagggataccctacaaggctgctctacagcagtgaaggggggagtccagaaaaaaggtttgctcagtcgttcaatggcgtcgatctcgataccagctcttcgcaagcttgttcgcgcggcaggattggggtgctcagctgcgaatgctgttggggtggtgccgctcgccaaggaatga

SEQ ID NO: 27889 - DNA, 225 bp, Zea mays
  Peptide Sequence Number=SeqID_71264
atgtcgcctttagatgtccaggtcttcatcgtgtccttctccggcaacgaacaggatttcgagatccatgcgggcactgccacagggtgctcgtatcatgtgttgttggatcttggaagcaataaggatggagcaacaatcatttgtcacattaacagtaaaaggaaaggttatttgtggaggagtcacagcctgcatgggtggatgaaaaataacctattttga

SEQ ID NO: 27890 - DNA, 201 bp, Zea mays
  Peptide Sequence Number=SeqID_71265
atgggcgagggcagtaggttggggaggaagaacagggcgaaggctgggaagacaaacgggacatccggcagcggcgaaaatgatgtgtcggggcatgtgttggacgaatatagggaggaagcgcttgctcccacgccctctgccaagaatggggtggcgcggaggcggaggcatgagggggagagaaaagaagtaggatga

SEQ ID NO: 27891 - DNA, 294 bp, Zea mays
  Peptide Sequence Number=SeqID_71266
atggccgtgcgcttgccctgctcgggtctcctgcccatggctcccagccccatctcggcctccagttcgcctccacctcagctctggtgcgtgctcggccaccatgatgtccccagcgccggtgaaggtccgtcctgcagcagcgtcgtggtggccttcgacttggagcactgcgacgactccatgctgtgccctctgcttcctccatgcccgagtctgggatcctcctgcggctggttcatcgcggacatgggcaaagagccatgtatattaatcgtgatgattctgtggtga

SEQ ID NO: 27892 - DNA, 507 bp, Zea mays
  Peptide Sequence Number=SeqID_71267
atggcctcccccggactccagacgccgagggctatcggcgactattcactcgggcggccaaccaccttctacctctcgctcatccgccgagcgacctgcgacacaccatcaacagtcggtgggacgcacgaagctccatcaacgcttcgcgcgaacgacgacacaagaatgagatctgccaccgagaagagtatgaccgggatcacggcatctcggcatggagtcaggccaccagaactgagtcggcaacagcttcgactggtggcaccacccgaggacggtcgaggcaccacgacaaccactcccctccctgggacagacatcatcatcgacgacaagaagacacctgtggagtatcagcgctcaatccacgcctcagggccatttagtggccccctaacttcaaggtctccaacatcgacaaatatgaacctaagcaagatccgggaggctggctggccgtctacaccactgctgcctaagccgctggggcaaccgaagacgtaa

SEQ ID NO: 27893 - DNA, 378 bp, Zea mays
  Peptide Sequence Number=SeqID_71268
atgtcgaagctatcacctataaagcttcggcatagtgacatgtctcaagacgaaggagtgaaccgacctaaagatgaaatgaccaataaacccatgatagtttgtgtcatgattgtaaccgattgtgaagggcataaatttgaaggggggcatgcacaaaaggactgggccccgacatgtgggcccagggacataaagaatatagtgcttggatcctctaatgtctgttgccgaggcaatcttcttgtgccctgcgccggagatctgcgtgtccttggcgtgctggggaagctttcttgcagaagggacaacgagcatagtccgctgcatggcacaggcgcgttgtttgatgatagattggacaggcgtgtcatctga

SEQ ID NO: 27894 - DNA, 483 bp, Zea mays
  Peptide Sequence Number=SeqID_71269
atgcaggtggcatgcaaccgcaccacggagacgcaccccttcgcgttcgatgcatccagcatggaggcccaggcccacacgtcatggaccgagaaaggggatatttcgaaagggatccttctccgcgaaggaagcgggccccgagccctcctactgattaggggttcgaaggccgcctcagagcactcgggctccacgcccactactgatcaggggttcgaaggctggcccctcgaagggttcgacagccgccccagagcacgcagagcgagggatgactctgggtacgtccgatacatggccgaggctcgggctacgctcccgagaggctcgggggctgctctcgcaaacccggctctggccaaaccgtcgacagcgtcaacaaacaagcccgagaattcggaacctgaacatgcacccgggctacgatcagatcgcatgagggaacaaccagaccggccgaggcatcacgaaaggcattaa

SEQ ID NO: 27895 - DNA, 393 bp, Zea mays
  Peptide Sequence Number=SeqID_71270
atgagccggagccggaggcagcggtgtcagcatggacagaggcggagttggcttgaaaaaggggcttcgtcggcccaggagcagtatcaggacttgttcgtcggtagcagaatcacttatccacgcgagagttacttatcgcggaaggtgatgagtgaggattctgttatcgatatagtcgagaaggcacgaaaaatcgttttggcagaaaagttttcgagcgttaagacttgttcggtcagcggaatcgcttatctgagcgtgagttacttatcgcagaaggtgatgagtgaggatcccactatcgaagtagtcgaaaagcgcgaaagatgttctggcagaaagactttttccaaggaaaattttgatgcagagggggttccccccttctag

SEQ ID NO: 27896 - DNA, 504 bp, Zea mays
  Peptide Sequence Number=SeqID_71271
atggcgtggtcggtccgagcacaaggtagggcgaggcgaagactcctcctgaggccgaggccggggtcgggcgaggacgcgattccgcctgaggtcgaggttgaggctgggccctggggtcgggcgatgcggagaccaccttccgaggtcggggtcgaggccgagccctggggttgggcgaggcggagtccaccttccgaggccgaggcgggggctgagccctggggtcgggcgaggcggagaccgtcttccgaggccgaggcgggggccgagccctggggtcgggcgaggcagagactatcttctgaggccgaggcaggggccgagcccctgggtcgggcgaggcggagacctcctgttgcgcctgaggcaggacttagttgttgtcagcctcaccctggcgggtggcacagcagtcggagcgtggcaggcggcgttgttttcctgtcaggtcagtcagtggaggggcgaagtgactgcggtcaccaggaccctgccgactga

SEQ ID NO: 27897 - DNA, 327 bp, Zea mays
  Peptide Sequence Number=SeqID_71272
atgacgatggcggttttcagccccctacggaagcaaggagacgtcagcaaggtgaatttcaggcacgaagcgggacctgtagggtatgacaccgctcatgatgcagaggtagccggtgacgtgtggcgacgggtgaagcgcccagtggcaggagcggaagttggggccagtgaggatgcggcgccagctcttgcatacgacgacggcccgaatgaggcacgcagggttgtcgggcgtgacgcggaggaggatcttcgagacgagcttgtcggacagctaagtcatcgcccctgctttagcctttgctctgctcggggagatgggtag

SEQ ID NO: 27898 - DNA, 309 bp, Zea mays
  Peptide Sequence Number=SeqID_71273
atgcggtcggtcggcgtggcgatcgggccaaggttgcttcttggcgaagactgggcctcgagcgagccgaaggtgcgtccgttgcttgagggggccctcgggcgagacgtgaatcctccggggtcggctgcccttgcccgaggctgggctcgggcaagggatcttcaaactagaacccacggtatgaagaagcacagaaagaatacgaaggatggaacagagccgaagctgtgcgcaagggagcttcggcatgatggcagaaaagaggaaaccgacttaaagaggaaaagactatctagacccagatag

SEQ ID NO: 27899 - DNA, 2826 bp, Zea mays
  Peptide Sequence Number=SeqID_71274
atgccatcctcttcttcttccgccgacgccacgccgccggccgccgcctcgtctgaggagacgttgagtaacgtgatggtggaggagttgcgcgccggcgactctgttgaatttggtgtgtcacggatgacatcagcctgtattgaagatatgcagcggttgggctactttggcggcggagtcgctcgtgctccggggacggaggaagtccccgagccggagggcgagttggttgttttcgaggcgttcttcgtcgccggactccgcttgcctgcgcaccgaaaaggatggttgaggacggagttgccccagttcgggtcatgcacattcacgccgaagaccggcaagaccacaatgccagtagtggagttggtcccgtgcgcccgcaacaagtggggcaattggaatgaattttggttttatgttgctgaggctactgtcgaaggccatgaagggctccccgtgtccttaatgtgctctcactattactctgcgtatccgccttatgaagtggcagaagaggatgcaaacgaaggggcccttcggtgcgccgccggtcagagcagcggtcgagatttagttgaagagttcgtggcgtacggggtctggcccttggcgcacggctgggcgctgggcaaagtatgccctcgccagatgccctttcacggaggaagggtggtgcgaagtcctgccttcgcactgaatttgcgaaaccgtgacccggccgcctttgtgcgtgatgcggaggacttggcggtgcggctcgtggggcgttacgtgccgaggacggaaggccagcgcagctttgacatccgcgggtcaaatgaacgtttgaacagggtctttgaattaaatcaactgccgtacgacggctaccccggtcaagacgaagcggaccgccgtgggaagaaaccggcggtggagactggaggcgaccctgcgctggtggccgccacctcctcgaagaagagaaaattaggtactgcgatgggaagacttggggtgtctgatagtttcgctagagagttaatgaggacgtgtgcggccccggtggagaggatgtcttcgcccgagctccgggagtcttcggctcggatgctgagggttaccgggggttgttggcctaaagacattcctatcccttgcccggctgaggaggactgttttacatctcgtatggttcatcggtggagagtttttccttatgggcgaaatatcggtcatgttgtgtgggcagtgatggacaaggatcgccaaggggcggcgcgaaaacgccaggcgactgtgagggttcacgaagcccggccgaaaaggcagcggggaacggcgaaggctgaggcctccggcggaggcaagccgccgctgccggcgaaggtgggcgcctctgcgcccggcaaggcgccggaggtgacggtgggcgccggaggccccaagctgacgaaggtggtgtcgtctgtcagcggagtggcggaggctgcgaaggcggcccgaacgttaccgccgcccggcaaacgcgttgccgacttcggcaccgagattaatgtggaggactatcttggggggtcggacgagggcccgcttgctctagttgtgcctggcgcggcgatcgcgaaggctgcgccagcgccgaaggcggggggagagacccttggcgccggaggcgaggtgtctgccctcgcgctggtcagggacgaggcgggcgtggcgacccgccggctgaagggagcgacggaggcgttgagtcgagcgacggaggcgctgagtcaggtggctgacttcaccagccgcaccgcgtcgggggcccttacggcagctttgtctgccgaggtcgagagacttcggacgcaacatgctgacgctgtctgtgagaagtcggcctccgacagcaagtgccgcaaactggcggagaaggtggccgccctggagaaggagaaggctgacctccggcgccagctggcgggggagaggagggaggccaacgaagccgtcgccaaagagcaggctgctcaggcagaggccaggctggcgcgggcggaaggcaatatcgccaaggagctcgccggagagctgcagcggcggcttactgccctggagagccgcgcggagggggccgaggccgcgatgcgagcggaggccgaacggacgcgcacgcagctcatgactgcatatcgcgagctgggtgtgcggacgggtgacttcgaggtgccggagcgagaggccggacttcgctgtctggaatgggtgcaggaggaactgcaggagctccccactgtcttggcggggttgatgtcgttcacctccctggtcacctgcgaggcagcgatgaacgcgctctctcgcgaaggctgccggcactttgaggccctcgaccaggcagatgaggattttgggcgagatatctttgaggtcgaagaccccgtggtgaaggaatccgccggggccctttatgaccggatgtggggttcatacggttgtgaggtggtccgggcgcgggccgaggctgcgagggctcaggcggagcgcggcgagcgggtggacgacttcggggcgctgaacagcgcgctgcctgacccggagacgacccctgcggaggccgcgactggagtcgccccgggaccgaccccggagactgcggaagatgcaccaggcgcccctgcacctgctgcggccggcgaagaccttcccccaaaggtggccgaaggcgcgcccgatgcccccgcagctgctgtgccgagcgctgaagatccagcggaggtgggggcggaggcagcggtggaggcctcggcggaggctcccgcagcggcagggccttcgcaggtggcatag

SEQ ID NO: 27900 - DNA, 450 bp, Zea mays
  Peptide Sequence Number=SeqID_71275
atggagcagtgtcccgggctgaagaggttgctggagactacccatctggagctcgaccggaagttgttcgtcaacacgcagcaggcccctacctggcgcgccaactgtcagcgtttcgaccccgggggtccgagcccaaggtcgggcgaggcggagactcctcctgaggccaaggccggggtcggggcgaggacgcgattccgccccgaggtcaaggttgaggccgggccctggggtcgggcgatgcggagaccaccttccgaggtcggggtcaaggccgagccctggggttgggcgaggcggagtccaccttccgaggccgaggcgggggccgagccctggggtcgggcgaggcagagaccgtctttcgaggccgaggcgggggctgagcccctaggtcgggcgaggcggagacctcctgttgcgcctgaggcgggacttagctgttag

SEQ ID NO: 27901 - DNA, 345 bp, Zea mays
  Peptide Sequence Number=SeqID_71276
atgaaggagagcgaggagtggttgtgcgccgttgcgcctgggatctcctccataccgtttctctaccgtgtggtgaacgcggagcttcgtggaggtttgggggcatggctctcgggtgttggcttagccaactccggcgagctctgccaccgtggtgcagggcgggcgccgccgtggccggccgtagtcagaggaaggatgaagaagccgctcgggccattggatagtattcaatggtcacgattagatctcagggtaatcatgtttgcgccgttggatccacatctaacggctacagatggatcaatagccttcgtgtgtttaatcatgtccgtaagatcttga

SEQ ID NO: 27902 - DNA, 741 bp, Zea mays
  Peptide Sequence Number=SeqID_71277
atggctaggatgcatgcattggaagagcagcagctgcttgaggatgaccccacagtcgtgtacctcactacatacctactcaccctggatgcacaatatgatttcttagctcagcaccaccgtcagatgattgcccgagcagaagatgcagagaagcgcaatcgtcagctccatgtggatctcaccacagctcaagcccatgcaactgccttggaaagtcgtgaagtcattgctgttgaagccctgaagcaagcaaaggatgagcacgtccagaagctgatggaggcctacttggtaacctgtaaccaacgtagagccctacggatccaagagcccgcttcatccaacccagttcaacccatgaaagctgaagatccccagattcttgaaggtcacccagtctctaccagaggagaaaagaaggcttgggaactcccagaaggagccatagtcttggaaggaattccaatcttccctcaggctatggataagcaagagcaccccgaatcctcccaagatcccccgccagagttgtttgagcccctcaccatgaagaagattccaccaccgtcccgtgaaaaagctgcaagcaccccgccagcaccgccgccctctaaggagctacaagagccagtcccgcttgaagaagagttcaaccccatcttgccatctcagtcgttgccagaagaagtcatcaacattagctccctcttgacccatccaggagatatctcagattga

SEQ ID NO: 27903 - DNA, 378 bp, Zea mays
  Peptide Sequence Number=SeqID_71278
atgaaggagagcgaggagtggttgtgcgccgttgcgcctgggatctcctccataccgtttctctaccatgtggtgaacgcggagcttcgtggaggttcggaggatgtccgaggattcgtctgggcgggtttgggggcatggctctcgggtgttggcttagccaactccggcgagctctgccaccgtggtgcagagcgggcgccgccgtggccggccgtagttagaggaaggatgaagaagccgctcgggccgttggatagtattcaatggtcacaattagatcttagggtaatcatgtttgcgccgttggatccacatctaacggctacaaatggatcaatagccttcgcgtgtttattcctgtccgtaagatcttga

SEQ ID NO: 27904 - DNA, 648 bp, Zea mays
  Peptide Sequence Number=SeqID_71279
atgttgaaccctagatttcacttttgcttggtgcataattcttggaaaacccctcttccacctctccctcgctgcgcgcacgccagagcaccgccgccacaaatccccgccgtcccgagctcgtttcccggccgccgtttggagctccgccgtgtccgttgccacgccgcggaggtccgccaccgccgccccgggccaccgttgcgcattcccgccgccgaggagtccccggagcccgccttggaggtcgcctcggagccccgccaaacgcccgcgcccctcgtctccggcgagttctccgccgcggggacgagcgccgccgccccagctagccgtaggagaagcctaggccggccacccgatccccaccgtccgtcccagatcgggcggccccgttttaatcaggccaaacctaatcctgaccgtccgccggagatccagcggcccaggcccactttccccgcaccccgtctccctgccgtttgggccccgcctgtcagcccgcccgcgcgcgcgctctgcccgccggccccgcctgtcagcctgtccgtgccccgcgctgcccgcccggtcccgcctgtcagtcgcccaggccgccgcgcgctcgcgcgcccgcccgcaggatctaatcctggccgttcgctttag

SEQ ID NO: 27905 - DNA, 390 bp, Zea mays
  Peptide Sequence Number=SeqID_71280
atggcgcccccgacccgatgcccctcggcggtgccccctgcgcgatccccttccctcgcccggccatggcaagcccgccgtggcagctcggtcttgccccgcctggcgcagcgccctccccgcgtgcccgctcggccccggagccccccccggcgtgcacccctggcgcagccgtggtgcgaccccgtcgccggccatggtggctcggccccgcccgcccggtacggcctcgccctggcgccccgccttgccccggccatggcgcggccttggtgtggccgtggcccggccatggcgagccccggcagcccgcccgccttggcgtgccccgcccctgcccggcgcggccgcgacgtgccggcccggcgtgcctatggcgcgcggccttga

SEQ ID NO: 27906 - DNA, 132 bp, Zea mays
  Peptide Sequence Number=SeqID_71281
atgccgtcaatggggctcggtgtatgcggctcgctctgccaagcttgggtggcaatgagattgatggttcttggtattggttctggtaatgatcctggcacgtacatggttcgcattcggtttgccttctaa

SEQ ID NO: 27907 - DNA, 117 bp, Zea mays
  Peptide Sequence Number=SeqID_71282
atgtacggattgcaggtggcaatgagattgatggttcttggtattggttctggtaatggagaagatgaagccgtggaaggagacttccaggagttccaagactacgacgagttctag

SEQ ID NO: 27908 - DNA, 444 bp, Zea mays
  Peptide Sequence Number=SeqID_71283
atgccgagaaatatggtaaatcgcagactttacccctcacgcgacctgattgaacctggcagcagactttacccctcacgcgacctgagacgtggtctcccattccggttatggtgggtacaagtgcggtcactgcacgacggcagtcgaggacaaggcgtccactacgatgttgaggcgccccggacggtacacgacgtcgaagtcgtagccaaagagcttgctgatccactagtgctgcggcatggtcgacaggcgctggtccagcaagaacttcaagctataatggtcagtacgaatattaaaatgacgcccccacaagtaagggcgccaatggcgcactgcctgcaccagccgaatcagctcgcgctcatatgccgccaacttgaggtggcgagcggctcatatgctgaagaaagcgagaggctcggcgccctggtgtag

SEQ ID NO: 27909 - DNA, 795 bp, Zea mays
  Peptide Sequence Number=SeqID_71284
atggcggagatgatgtgggagacgatgctcgagacgatgatggtgattattctgaaggcgtggattccggtgctggtggagattccacagctggctccagagcttccacccaaatctcggtttttgataaagctaagtggaaagacttggatccacgactcgttcactggcagaggacactacaggcagaaacggtataagttgccgcaagatgggacatatgatctgaatgctcgttatgtgtttgagaataacgcgaatgatgtcgttgcggatgtaatgtgtttgtgccttggatggccacccgatcataatgttattgggccttatgaaggtggtgggctttccctgagtttcgtgccatttccgaaaggaacaggggaaaccgtggtactgagtcgttccacaactatggcagcgatcgacatgtgcgcttggctaagcgaatggaaacttcgtcttcaagatacaagcttctcccttatgacgaaggcacacaagatgaagatagatccaaagaggataaaacaactggcacaacaagcgggtgtcccaataccaacatatgggatgccacctctggactttgcactgctgccaccaatgttgtctcctccacctttgccacaattccctgtgggctttgagacacctctcgcttcagttgccgcacctagagatgtgtctggtcaagacgacacatcaacttcttgggtgaacaaccttttcaacacccagagtccagccgaaggaagtggctataactccaaccaaccaggtgacagatatgtgtga

SEQ ID NO: 27910 - DNA, 306 bp, Zea mays
  Peptide Sequence Number=SeqID_71285
atgggcgttggagccgatgaggcggtgggggcagagagggcgctggttagaaggccgcccgcgggtgcctgctgtggcgggcgccggcgggacgggcgactgcatgggcaggaggcgattgcgggcacagtggcgggcacaggcgaggcggtggcgggcggcagagggggtggtggcaggcggcgacggcgagatggtgtttaccacggatcagatcgagtggcaaacgtgattgtgaagaacaattgcatttgtaaaactaaagatatgctagatgcaaggttgcactcgattccccatgaatag

SEQ ID NO: 27911 - DNA, 900 bp, Zea mays
  Peptide Sequence Number=SeqID_71286
atgaggcgagtcggggggccgcctccgcgtgggtcggctgcccctttcttccccctgcgcccgggggtgaagggcgtccttgagccccacggagacttcctccagccatgccaggatatgcggggcgctaggggccctgggtccccgtctccttgcctgaatggctggttctcgtcctcagcgggggggagcccttctgctgtgacacctcccccaaagctgctgcttaagctgcttcgctgtctggggcaggggtggtggccgtcgcggttggaacgggcggcagcgagccgcccatcattcttcagttactccgcaggccttccccttcggaggggggttgttcgtacctgcggaggagggaaccggagttccgttggttgtggcatctcgtatgccacggagccgacgccaaagtcggtcagtcgaggcctcggatcgggctggcgcccttggaagccggttgaccgaggccccaggggtaaccggttgagccgcctgctcgggccggattcccgggggagcccttggacctcggcgccgcccgaggctgggtcgggcttcgctggagacgtcgtcgatgccgagggtgctacggctcccttcggcgtgaagacccgagcctgcaggatcagatcatcttgtagcgtgtgctttctgcggccgccgaggccagaagaacacgccctcgccgtgcttgcgaagctgcgtcttttttcctcctgtttcgagcatctggactctgtcggtaacagggatgtttgtgtgagcgagagttgcttttcgcggaagggacgagtgaggtatccgtatcccagaggcgtgggaatccctcggctcggtcggccttgccgcttatgcgtactttcacccgtccatgaggccctgtccccgacttag

SEQ ID NO: 27912 - DNA, 459 bp, Zea mays
  Peptide Sequence Number=SeqID_71287
atggggtttctcctccattgttggcatatgttggcgctgagggttgagggaagtgttatacaacctattgtggttgttcgaggaaatgagatggttgtccgtgctcggcttcaggcgctgtcggcgtttcgagacaggggggtccctaagccgacgatcggagtggcgcaggcggcgctgtccttctgtcagactggccagtggagcggtggagtgacggcggtcacctcggctctgccgggggcgcgtgtcaggatagaggtgtccggccacctttgcgttaaatgcccctgcaatttggtcagtcggtgtggtgatttagtcaaggttgcttctgagcgaagccaaggccttgggcgagccggtgatgtgtccgccataaaaagggggcctcgggcgagacggaagtctctcgaggtcggctgccttcggccgaggctaggctcgggtgaagcctga

SEQ ID NO: 27913 - DNA, 192 bp, Zea mays
  Peptide Sequence Number=SeqID_71288
atgaggaacttgattagcactggtcaagcggacgaagcaagcagtcgcgagtatgctccccaaaaacctaatcgtccgcacacccgtgcaagtgtctctctgcggacggcgattttggaggcctactctcccacattctttgtgctcgtagaaggtgggatggggatgggctttacgaacatcatcatataa

SEQ ID NO: 27914 - DNA, 645 bp, Zea mays
  Peptide Sequence Number=SeqID_71289
atgaaggcatgtaccattcttatggccctttgcctggtggtttttgtgtcttccaatgttgtggagggtggagcatacatgaggcacgaagcactttctcgcaaaggtctaaaacaacaacgcaagctagccactagtggtctgaatccttcggttagcaatttgtcaggccagacatctagcagcgttaataatgttgtgaacaacaactacgaaagcacaaacactaatatgtcggatgcagctacagccactaccccgatgaccgccactaccactgattcccaccatgacctctcagttgatcagtaccgcaggatcacccacaatatggtggccggtcataacatctctccgcgcatgcgcaaacaactcgtcctggagctggaagtccgggtagtgcgccttgaactcgtcgactgtctcccacgttgcgtcgtcttcaggaaggccgcgccacttgatcagcacgcgccaaatgccccggcgcagctgcgcctgaagggcatgctccggccccgggaggatgcgtccatccatgaccggcggaagggaggtcggagttgctggaggttcgccatagtgaggcttcagcagccctacgtggaagacgtcgtggatgcacgcctcgtcaggaagctgtag

SEQ ID NO: 27915 - DNA, 60 bp, Zea mays
  Peptide Sequence Number=SeqID_71290
atgcccttcgactctcggttgaagacgatgtcggtggcgactggcgaggaaaaggtttag

SEQ ID NO: 27916 - DNA, 243 bp, Zea mays
  Peptide Sequence Number=SeqID_71291
atggaccgaaggacgccggggttccgccgtggtggcctcctagattcgattgtcgcctctgcgtctcctcctcttcctctgctgtatgtggttaaattcagcgagattatattccctaccgatttcattgttggtgctgctgatctaagttggatcttgaaatactggtgcatatttaatactactagattgtttaggctagctgactccgcagggaagtttcccaacgaagcacgcgcgtga

SEQ ID NO: 27917 - DNA, 558 bp, Zea mays
  Peptide Sequence Number=SeqID_71292
atggagaatgtgtataaagcaacagttggagctatagcacaaaatggatactatgtagcctatgatggctggggaaacagggaagaggcagagcatgttctatttacagcaggccagcagacaccaggcatgcattttgagaaggataaggctttggctcacagattccagccagtattggtgaatgagcctagccaggttctgaagcgagatattctatgggagcattacatgtcaactaagcttatctccgaaacgtgccttcagcttttacggcgatatgaccacaaaccggagagccagcgagctcctttgcttgaggagttcaagctctgcaaggtgaggtctgttcagtttagccagaaaggcatcccctatctgagcacctacgacgaccgcaccatccgctaccccgaccctctcatcaaggtcaacgacaccatcaagatcgatctagagaccaacaagatcatggacttcatcaagttgtatttgccctttcatggacttcaccaagctatatacttagttaggctcaatgttagcacaaacagttga

SEQ ID NO: 27918 - DNA, 654 bp, Zea mays
  Peptide Sequence Number=SeqID_71293
atgtcggacgaccttgttgttcctgtccactttgaagttggccaagaactttgctttcgcctcctggatcatccgctccttgtgctcctcaaactggagctgctcgtcagccggcaagcccaccgctacctcgcgcccgccccgccgccccaccgcgcgcctaggcagggtggtaccgcggtgctcgccatcaagcgccgctgcggcgagcacctcaacccgcagccgaggaacccctttctcggcgtgcccaagtccttccccggcgtcaagctggagttctgggatgggatgcggtcccgcctcgccgccctccgacccgacgggtccatttcgcgccggttcctggctgacctccctaccgtgcttgtagtgggcgactcagtgttcgtccatggggggctcctcgaggccaacgtcgagtacggcctagagcggatcaatgcggaggtcacccttaggattttattccgccctccgtctccgggctctcttggatcgatatgggcgtctgcgtgtccaaggccacctgctgctgctactgccgggagccgcacaacggggttactaacgacaggactgatgctgctgcgtttccgcactgccgctgagccttttttttgtggaaccatttctgatttcggcgctctttga

SEQ ID NO: 27919 - DNA, 1444 bp, Zea mays
  Peptide Sequence Number=SeqID_71294
tatgcaggctgcagggactaggctggggcgcggcggagaggcgcccaaatcccaatcgctaggcgtgcgcggcgggctggcgggcgccggctcggcggacgtagactgggctgccgcgctggccgctgggcgagtgctcggcctcgatggacccaagacgcctggacgcagacgagacaggcggacagcgaatgggacggcgccacggcggactagggcgcggcgcgcggcggcgcattgggggctggggcacggtggacggggacggggcgctggccgctgggcgagcgctcggcctcggcggaccctggatgcctggacgcagacgggacaggcggacagcgaatgggacggcgccatgacggacttgggcgcggcgcgcggcggcgcactgggggctggggcgcggtggacggggacggggcgcgacgcgcggcgagccgtcacgcgctcggcggtcgacgctctgctggcccaggatctaggatcttctaaaaaattaatgggcctgcgccccgggccgtggcccaggcggttatgggcctgggtccgcccctggaatgccttacaattggctggtctggggaattttaagaattttcagttcccgccggactattacaatggccttgcagcgttgttcttcaacacaaatgatgatgccatccgcaatctattcaccagtggcaccaagaacgtgttccacatgtccactcttttcgtattcttcactgctatacttgctggggctacatacatgcaggcgcatagtggggacccttcttgtggtctgatatcggaccatgatcctggactgttcgcacttcttggcgcgacatctttcctcgatcggcgaaacaatgaggatgactgtgtcagtctgtgtgatacttctggagctcatgtcgaaccatacatgaggcaccttggttgctggcgatgttgcgttgaggatcacaggccacaatggggttccagtggtcgacgagccacctctatcagaggctccagattccagaactcgttaggcttgtgcttagatccccacctgctagtcatgctaaaaggcaagggcttcatgaaagagaaggtgaagaccagcggtagctccgtgcttcaaagatttggtgccttcgagtttgccaagcgcggttcaggaaagggtctgaagattgagaacctggatttctctgatgaggagatggacatgtacgtcgatctccatccaattacaaatacgtcaccgtacacggtggtcgagaccatggcacttgcaaaggccgccgtccttttctgtgctctgggactaaaggcacctgctcgctgtgccaaagaccccagggagacctccgattgttggaattctgacgaggcacgatttcatgccggagcatattcatgggctgttcccaaacatacacaagtcgcactaatggagcactga

SEQ ID NO: 27920 - DNA, 708 bp, Zea mays
  Peptide Sequence Number=SeqID_71295
atggccaaaagagaggaacagacctccaaaaaacccgagagggacagaaacttcagaaaaaatacacaaggctcttctgagttccgatgcagaaaaaacttgaggacccagagtctggagagaaggagcagtgacgcaccgtccactggtgcgaaagtgcgagcagatcgttggctgcctgcgacctcgccaccaccaccagattgcagcgcggtgcgtgggcgccacctgttatttgcttcgtcactgaactatcgtcgcgcgggctctgttggatcggagaagggtgaagatgcgagaagaagggtaaacatgcagttagctgaccatgattcagctgatagaccatgcaattggtgctattttctcggcaacatattttgtttgcaccttacaggtgttaaccaggatgaaacacccctactctatagtctagtttttggtgaaggtgttgttaatgatgccacatctgttgtgctctttaatgcaattgaaaaccttgatattgataattttgatgctattgttctgttgaatttcgtcggaaaatttctctacttgttcttcaccagcaccataattggagtagttgtaattaatcccctaccaccacttttgttaagattcccctacgttaaggatgagagtagttggtttcaggataagaatggtttaagtttcacaaacttctgtaattcgttgccatga

SEQ ID NO: 27921 - DNA, 402 bp, Zea mays
  Peptide Sequence Number=SeqID_71296
atgccccctagccccaccaccatcatccacacgccatccaagcctgcgctcgcgattcttggatccgccatcctcccatcgacaccggtgatgtggcagccaccgtccgctccccctacggcgcccgtgtggcacaacaagccaccgcccaggaattcacaatccaccccctcccccgccgtcggtgatgtggcagccgtcgtcctctcctccagcgactgctggagatctcagtcctctggagatctcggtccgctggagatcttggtcgtggagagctacacgaaccacaccctctctgcgaacctgctagcgtacaagcagagtcggggccaaatgggagctgcggcgcctggtgagctacgtgatgttgatggcgttcgtggtggatgcgcgacgtga

SEQ ID NO: 27922 - DNA, 516 bp, Zea mays
  Peptide Sequence Number=SeqID_71297
atggaagccgcagcctccgcccttctcctccttggcctcagcgccagcctcgctcccttcgcctcggccgcggctccgtacgacccgccgacggtgccggagctcatggaccagttaggcctcccgcgcgcgctgctcccggagacagcccggcggtacctcctacacgacgatggcacctttgagctcttcctcgacgacggttgcgtggtagaggcggggggctaccgcgtcggctacgacatcaagctctccggcaccgtgtcccctgggtcggtcacggggctcgagggcgtccgcgtccgcgtgctgttcgcctgggtgcccatcaccggcgtcgaggcggccgacggagaggtcactgtccacatcgggccaatcaggaagtcgttccccgccgttgggttcaaatccagcccccggaaaaaaatagcgaataggaagaaacaaccgaaaatattaaaaatatgtattgaagatgacgaagcaactgaaaacataaaaaaagcatcgtga

SEQ ID NO: 27923 - DNA, 657 bp, Zea mays
  Peptide Sequence Number=SeqID_71298
atgtccttcgcgagcgtgctggcgtcgtccgtctgcttggagttgcccgtgttgcggggaaacgacgctcgtcttcgtctcagacgcgaggtcgacgcccgacgtgtcccccgctggggcgccggcgccgtcgactcgctcgacagccgacgaggtgccgcctcctacttggccatgcctgccccgcctcctcctccgtcggcggggaaggtgatgggacagacccgggtgttgctcttccgccacgtggggaagacgtcgtcgattccgccgccggcgggcgggctgacggccgccattgtcgttgtcgcgcggcggaggaaggagtatcatgtcgtaactgccgtcgagggacatgaactcaagactcccgaaacgaagcatcattccgggttgaagaggttgctggagactactcatctggagcttgacgggaagctgttcgtcaacacgcagcaggcccctacctggcgcgccaactgtcggcgtttcaaccccggggggtccctggaccgacgagtaaattgtcgccgcgtgtcccagcccagatgggtcggcgcgagacggaacacaaaggggagaaagacagcaaaggggaaacctgcggccttcgtgttgtcctgcgcccaggtcgggtccgagcccgaggtcgggtga

SEQ ID NO: 27924 - DNA, 447 bp, Zea mays
  Peptide Sequence Number=SeqID_71299
atggagagttctccgatgtcgtcagctaccctcaccgctaacgacctcctcaagcgagtcaagggcatggtggggaaggctgattacaacgtccttcctcaggttttctgtttgttcccgggggttgcggggttacagatccgccctgcctccagtcccgaaggacgtggtgagccaagtgtcgcgcagagagacatgcaagacagtagggatggaaccgtgtcaggtttggggtgggtgcaatgtccatgtacccacccggaaacccgccatcaaataccgactcgccttgaacctcagtgcgagttaaaaactacaccccccgaacacaatggggacccaaaaacctatggttcccccaaaacccatatggagttgggagactgggatgggcggggcgcccaccgtgaagtcgttgcaggctctagggctagttggtacaagtga

SEQ ID NO: 27925 - DNA, 789 bp, Zea mays
  Peptide Sequence Number=SeqID_71300
atggaagcaggaggagcaggagcggagggggtgatgagggtgctgctggtggacgactcccccgtcgaccgccgcgtggcgcagctgctcctcagcagcaactcctgcgccggctcattccacgtcatcgccgtcgacagcgccaagaaggcgatggagttcctcggcctcaaggacggcggcaaggagcaggccatcgacatggtgctcacggactactgcatgccagagatgaccggctacgacctgctcaaggccatcaaggcgctgaacccgctgaagccgatccctgtcatcgtcatgtcgtcagaagacgagccccagaggatcagccgatgcctgaacgccggcgccgaggacttcatcgtgaagcccctgcagagcaaggacgtgcagcgcctccggaactgctccacggtcgggaggcccagcaacaagggcggcgccacgttgccgtgcgaggagaacgccgtggccaagtggagtaacaacaagctgccgccctccgccggcgccggcgccggcgccagcgccacgtcgccgtcggggcggcgggcgaacctcgccggagtcgccatgattaaagctcaacgtctctctgaccgtgaccgtgaccgggtgtttctctgccagcgccaggtgctgcactcgtcgagagtggagatctcgcagtacctgccgctcctgctcaagctcgtcgtgctggcgtacgccgcgctgtgcctgggcgagctcctgcacagatggtcgtcgggtggcagctgctcgctctccccgtggtgcgcctga

SEQ ID NO: 27926 - DNA, 90 bp, Zea mays
  Peptide Sequence Number=SeqID_71301
atggcctacttcatccaccccgccgtcacgaaaatggggaagaagcttccatcaggcccgaggtcgcagcggctgggaagggggtcctga

SEQ ID NO: 27927 - DNA, 825 bp, Zea mays
  Peptide Sequence Number=SeqID_71302
atgtctcaacggaggtgctggtgtctccatggcacgtggggctgcaagcccggccccacccatcagccgcgctcgccctcgctccctcgcaaccgccctctctctaacaagcgggccccgcttgtcagccccttcatcgcgcccgtgacaaagctatcagcgcgatcgccgccggtcgccacccgccccgtcgccatgccattaacacgctcaccagcaaggttggcgccttgcgcccctgtctccttgcgccaacccgagccatcttgtcacccgcctgcccaagccatcccgtcgccaccactgtgtgccgtcatcgccgtcgtggcaagctcgccggtgctcgccacctctcctcccttccctgccctgggcgcctataaaaaggaccgctcgagcaccatccttcttcacaccggcctcggccactccctctcccctcccctcagccgaatcgagctccgcgccgtcgcgccctccctccgctccgcccttaaggtttatcactccctcacgaacacgacacaccactccccttcacctattgcgcctggcaacctcgccggcgatcccactaccgcggacgcctgcgacctcgccgtggaccggccgtcccgagcacccttcggccaaattaacccctccaccatgatcccctacccccacccgtgcttagccacctccccgaccacccgaaatcgggaccccgacggagaaccgccgtggaaccacaccggcggtcgacttcggccggagaagagggatccgatcctccgaaatttgcagctctggaagaggggcaggaacccgacctctccgaaatag

SEQ ID NO: 27928 - DNA, 174 bp, Zea mays
  Peptide Sequence Number=SeqID_71303
atgggtcggcgcgaggccgagcgcgaaggggggagaaaggtggccggagacaggcgtgagagaggtggaaatcccgcggccttcgtgttcgtcctgcgtaaggagaggatccaggtgtacaatgggggtgtagcagagtgctacgtgtctagcggaggagagctagcgccctaa

SEQ ID NO: 27929 - DNA, 435 bp, Zea mays
  Peptide Sequence Number=SeqID_71304
atggaggtcccacggtgggccggcgtgtttgagcgcggggacgagacagcagcattctacgagcacctgggtgaggagacaacgatgttctgtagcggggcaccgaccaccatgtgcccccatagtcctacccttctactgctaggagatgcgagagatcatctgtgcaaagtggtggaggcactcagtctggatccttttggtggctgcaatgcacatatcagcgtaaggctctctccaacaagcttcgcatacactgtgaatgtcgaatatgcacacaaagctgcaattcggaagcatgctttgtggtcaagtattagtgtggatctcctgatggcttttgtccttggagcagcattcttgttaaatacagagactatttgtatttggactattgctctcgtccacaacatgacagaagtgaaagggaattag

SEQ ID NO: 27930 - DNA, 642 bp, Zea mays
  Peptide Sequence Number=SeqID_71305
atgtccggtgcgacagccatgtcaccaaagccgttgggttccgaccgttggagttctgacttctgggcccgcctcgatgtagccgttggcgccagaagtagtcgttgccccgctgttacaccggacagtccggtgtacaccggacagtccggcaaggccgaccgagccgagggactcctacgcctctgggatacggatacctcactcatcgccttctgcgagaagcgaactgatcctgcaggctcagacgtcgatggagggggagcagcagcaccctcggcgtcaactccaccttcgacgaagtccgaccgagcctcggacggcaacacgggcgaagggtctccgctccgaaggacggcgtcagcaccacgcccaggccatcaccgccagggtctcctccaggaacccggcccgagcagacggctcggccggccgccccgaagcctcagccagctgtcccccgaggacaccagcccggctcatggcctcggcaacccgactccggcgctggtctcgctagtggacggcccggccaggctccggccgacgaagtcttcttttcgagccaactctgcctctgtccatgctgacaccgctgcctccggctccggctcatcgcagagcggccgagggttcctttaa

SEQ ID NO: 27931 - DNA, 288 bp, Zea mays
  Peptide Sequence Number=SeqID_71306
atggccaatcacgggcaagatgggaaggggctgacgagcggggccgggctgtcagaaagagagagcgggtgcgaggagaaggggcgggcgtggctgatgggtggggccgggctatcagggaagagcgcggctgtcgcagaacctcccaagttatcagacccacatgcacctgtccttgtctcaaagacctcagacagctatgcgtgtgcaccaaacaacttaacaggatctgtccgagtgccccgaggaccccggataaacgacttaccgccaagatcgcaggattaa

SEQ ID NO: 27932 - DNA, 213 bp, Zea mays
  Peptide Sequence Number=SeqID_71307
atggcattatctggcgaagaagctgattgtacccaagctcctggtgcgaatggaggcgagtgctcaagtacacggaacaattattggcaccaccaccaacaaccgcagcctccagggccaagagtagttagggggcagccgcagtctaatttgacttcgctgatggatagttcgatttgtgtcatgatatgccatacgcctagctcacgttaa

SEQ ID NO: 27933 - DNA, 227 bp, Zea mays
  Peptide Sequence Number=SeqID_71308
gggaagtggagattggagaaggaccagcttcgttgaagatgcatgctgatggcggtgaatttctcagtgaggccatggatgacattgatgacgaggaggcacaacatttcaacaccatcccaacaaactcatcgcagtccatggacatccaatctggtagagttgggtccagtgttcttaaggcgcctaggcgagcaagtgcaccagccaaccgccttagcgcctag

SEQ ID NO: 27934 - DNA, 231 bp, Zea mays
  Peptide Sequence Number=SeqID_71309
atgggggaagagttcatgccaccaagagtagtggccagaggtgaggtcaaggatgagaggcacccgggtatggacgtcctctgcacactccgaagagacatgcttgtggtcaacagcgtcatagcgatccttggcagaggtagcggcttcatgctcagcagcctcaagggtgtcagcatcattggtgccagggtgtcgccacgtgccttagcagaagcagtgatgtgctag

SEQ ID NO: 27935 - DNA, 798 bp, Zea mays
  Peptide Sequence Number=SeqID_71310
atggttgccatccaagggggtcaccctccttttaaaggcgactctccccacttgcgtcctcagccgtcgcgggttgagtcttcaccaacacgctccaagatcctccccctaagacacgggtgctgggtcccacgcgtcatgcaagctggcccaggacagaaggagccaaaccgccgcgcgcggagcgtacaaccgcccagcggttacaagcactcctccactttcgcccagaccagcggggtgaaaagggcggaccgccatgcaggcgggcatgcaaccacaccaagggggcgcaccctttcgactccgacgcatctagcatggaggcccaggcccacacgtcatgtaaccggcgcgccggttactacgtgcgagaaactgcaccgacacttgcgccagtaccgcgccttctcgactacggaactggtgccacgactcaaggcaacccagcgcatggcccaacagtgccaaccgagcacgtcgatcacggggaccgagaaaggggatactccgaaagggatccttctctgcaaaggaggcaggccccgagccctcctactaatcagaggttcgaaggctggcccctcggaagggtttgacagccgcctcagagcactcgggctccgagccctcctactaatcagaggttcgaaggctggcccctcggaagggttcgacaaccgcctcagagcactcgggctccgcgcccaccactggtcagaggttcgaaggctggcccctcggaggggttcgacagccgcctcaagccacttgggctccgcgcccactactgattag

SEQ ID NO: 27936 - DNA, 1266 bp, Zea mays
  Peptide Sequence Number=SeqID_71311
atgctctcctgcttcgcctttgaacgcgtcactgatagtggagacagagacagaggtgggctttgtggcggtcttgccggcggagatggaggagaggacgacggatgccacgacgcgagccgagtcgatgtggaggagaggatggcgggcgccgcgatgcgaggcatccataaatttttggtgcacggttctgtcgatccgccatcaacgcgcactcgccctctgctccccgccatcaacgcgcactgcatgtctgcgtcgcggaccccccaccctcctccccctctgctcctcgccatcaacgcgcaggcggatgtcgcggatccccccaccctcctccccctctgctccctgccatcaacgcgcaactggatgtcgcggatcctcctatccgccataaacaccgatccggggatccatgcccgccctgcctcctacgacttgcaacctccaccctcggtgattctagctccaccagccccacatccctggatcaccgcgcacgcgccttcgatggaggatgtcgccggggaagaagctctttgcgtcccccagcccggtgcgcagattggctactgggggagaaccccctggcgccccacacgagaggacgagatcaccgtctgtatctcctcgtccccctcctggtcgtcaaactcgtgccgaggtcaccaccgcctcctccatgctatccccttatccggcttcaagaggatctccaacgaagtctctccgaaggccacgagctgtccgactatggggacctcgtccgaggatttgatcgaggcgaccaccggctcggaggttgatttggcgctaggcggtctctgcaacaacgtgttcatgtccatctctctcgccagcatgtacgacagtgttgcgattactaaggataaggtctttgatgcggtaccgtcgaaacctagcactgagtttcctaatgcagcctggtggtacaagaccgtctttgagtctgtatttgattttttcactgattgcaaatttattctctataatgttgttggcgtaaatatgcatgcgtcatcagctcctgcggcagctactcttgctgctgagcgtgttgacgcccctcgtgatgttgaaactgatgaagacctatccaatgaagaaaaagacatgctgcacatgcacgagatagatgtcggctctatggacgaacactcaaccaagtcagatgaggagtatgatggcctagccatgtgcgacgtgatggcgactggtccgacgatgagcagcaagttgtga

SEQ ID NO: 27937 - DNA, 1944 bp, Zea mays
  Peptide Sequence Number=SeqID_71312
atgtcctccctgcgcgtcgtcacccgcggtgcgaacccaccttccttgggcaccgtgagcctgaaaacgaaggcgccaaagatggcggggatgccgatcatgtccctcgcgaaccaggacgccagcacccctgccactgtcaccgccacccacgcctcggtgctatctttcactgcatccacgcgctaccagatgcagggccccaccgagcatgtctgcccctacgagcttgagcaccagggaagtctcatcaggcccagcgagggcaagctgtggtgcactgagatcatggaggatagtgggaacggcaacctggatggtgcgggtaaaagcagcaacgaagatctagttctcccaggactgcttggaggtatgacccttcccatgtttgatgaaatgtctcctaacagcggtgaggaagaaattgccctattctctgaaggctttgattatccggtgtttgttgatatgccacttgagaaggtggtttgggatgaggaacctggatatgatgatttgttgaatcaactagcacagggtgcagatcatttggttgatgccacgatgcaaccaactatacatccgatcgctgtggacaagcagttacaacttggggtcaatcaaggttgtttcgagatgcctgtcaacactgatgataccgaagatctattccaaaactatgatgttgctgcctcagatgctagagaaaccagtgaagaagaggtggaagattaccttgctgaatctaaagaaggggctatggatgaggtgctacaggttgagctgatcgatgatgaagttcaatgggatgaggagtcacctaaccagagtgtgcataaaggcttactgccacacacagtgaggaaaatggtatatctgaaggggttcagtcagggaggaggaatatcaaccatgacacaagtccagaggtgccatcctttagctccattatctactgctaaaatttcagttgctatagcaattgtaagggctgctggatgtgagtttgcagtcaagtattatccttcatttaatgaagctatacagagaatagatgtgaatgacatagctctggttatggtggatcattcgtgctctggctattgcagcgaagctgatgctcactattgcagaactggcaactctccgttatgttgcagaactgacagtgatagtttaatggagaatggttatgctcgtcctgtggaaggaatcagcgtggctgctctctatgctggttttgctgacacggttcttcttaagactaaacacaggcaatgcacttctggccttcaggacgttgcagatgttgctgttgcgattaaagcaggaccttatgacattggtattgttgctggtttacagtccaagacagtgaacaaagttagtcttgttgagcaaatgaattccaaagtcgagctattttctcaagcacatggttgtttttttccaaatggtctcacatatgagaatattgcacactgctttggcactacacgactgcaaccagatcaagctgatgttgagtcacaccctggtaaatccaaagatggtttggttatctattctgttgcttatgttggtgatagttgtgaacatagattcataacacataggccgagttttgttgggatggttattctgtatggagacccaaatgaactacattaccgccaaaatgcatttgatgctggagaagaggggcttgaaatcaaagtgcattctcgtgagaagggatgtgaatgcttggacaacttgctcgtttccaagaccagacatgagtacctgaacttgataagaaatgatgcattgctacttatgccagcagaactccaagtgcttccatctgttcgcgtgcttcttctttggatgattagaccttggaatccaggtattttggctacactatgtgtcactgttgcttggggacaagcaacgttttga

SEQ ID NO: 27938 - DNA, 159 bp, Zea mays
  Peptide Sequence Number=SeqID_71313
atgtcttcgcactcccttcatgcatcgcgtccttccaccttccgagcccccggatggggagcgcccgcgcccggccgcatcccctcgccggtggtcatccaagacggtgaccaccagttcgatggtggggagaagcaagccgggcagcggcctctgtga

SEQ ID NO: 27939 - DNA, 423 bp, Zea mays
  Peptide Sequence Number=SeqID_71314
atgaacagtcgatgtataactcatggtggtgccgagcttctgcagggtataaggcctgctgtccaaaaagttgtgcttgctataatgactgagggacagatttggcgcctggctggggcttctgccctccaggacttggtccttaagctggaccactttggttcgtttctggaagtcagtgtagaagtcaagaagaaaaagagaggggcacgagcagttggtcctgacaaaaatggccgtggattgcgtcaatttagcatgagagtatgtgagaaagtcgaaagcaaagggagaacaacctacaatgaggagaactacgccccattatataataagaaagaaacaaaaagggtctacaggagacccaagtacaagaccctccttatggaggccagaaacaagcatacatataactgtccataa

SEQ ID NO: 27940 - DNA, 324 bp, Zea mays
  Peptide Sequence Number=SeqID_71315
atggcgggaccagggtggctgccggcgggcgtcatagatgaggatggggccagggaagacacagtcagcgccggcgagcaaggagccaaggcgctgcagccggcgaggacgattggtgacgaggtggagcagccgccggcgagggtttacgaccggctacggcgcgtggcggccagcgcggctgatggtggcggtggtagaggggaaagggacagaggagagaacctgacggtggcgcaggggcatgaggacggtggtgcggtgatgggcacagggacgatcaccagtgaagaaaccctcggggacaaaaattcggcagcctga

SEQ ID NO: 27941 - DNA, 276 bp, Zea mays
  Peptide Sequence Number=SeqID_71316
atggtggccggctccctgctcctccattcggtgcccctggttcagggccggtcgacctccggcgacctcctccccatggcacagcaggccgacgcccctgcctctactccatcttccccattggacagcacgagctcctcctcgccgatacgccagcaaccctgcagcagcgccactcgatctcctctatacgtgaacaacagcaacccggatcccatccacgtcccctccgtcgatgtcacgcttcgctcatcgctcctcgacgaagagccgtaa

SEQ ID NO: 27942 - DNA, 663 bp, Zea mays
  Peptide Sequence Number=SeqID_71317
atggtcgccttccaagggggtcaccctccttttaaagtggctctccctacttgcgtccccagccgtcatgggctgagtcttctccaacacactccaaggtcctcccctacggcgcggggctgggtcccacacgtcatgcaagccgactcagagcagaagaagccaaaccgccgcgcgcggtgcgtacaaccgcccagcggttacaagcgaccctccacttttgcccagaccagcgggcgaaagggagggcagacatgcaggcggcatgcaaccgcgccaagtgggcgcacttctccgactcccaacacgcctggcatggaggcccaggcccacgcgtcatgcaaccggcgcgccgaatgcttcgtgcatgcaactgcaccgccacttgcgccaccaccgcgcctcctcgactgtggaaccaatgccgcgactcgagggaccgggaaagggggataccccgaaaaggatccttctccgagaaggaaccaggctccgagcccccctactgatcagaggttcgaaggctggccccccggaagggttcgacagccgcctcagatcgcgtgggccctacacccactaatggtcagaggttcgaaggccggctcctcgaaagggttccatggccgcctctggctacacgggctccgcgcccattactga

SEQ ID NO: 27943 - DNA, 852 bp, Zea mays
  Peptide Sequence Number=SeqID_71318
atggcgaagaggccctcgccctcgcccccctacgggggtgatgacaagaccatccaagccaaggagttggaagctcggcggctgacggcgcctgcgcccgactcgctgatgaacatccttgaaactgagcactggcggaagagcgccaacccccacgaggtcgcgctcctccagcaacagcaagaagaaggcgagatcggtagcgccatcgtgcaagaaacaaagagcgtgagctccccagcggcaagatcgccgagggggaaggcgctgacacagatccttccaccaaatgccgacgcgctccatccaggcaggcggcgcgccagactcctccgctcgtgccccgaaaggccacgagaagtctccctcgaagcacaccggagcacccagcctatgacgcggggcccggccccacaagtcatacggctggtgcgatggtctcctagtgcgcagaaggcgaaccgccgcgcggggagcgaatcgccgcgcctcttcaccccgccgagagcagcagtccagcctctggcccaggggcccgggtccacgagtcatactcctcgggcgtcgacctccgtgtgtggagaaggcgaaccgccgcgtaaggagcacaccaccagctatggtaagaagttgaaccgccgctcgcaccagtaccgtgcctcctcggggctgccacagaagacagagaaggaccagttcagctggtctagaccagagagttttggagagaaaaccccagctcagctgcccgggggcaagttcagctgggtatggtcaaagaggtccacagctgaagttgaagttcagctggagttgaaaaagttcaactcagctgaagtccagctcagctga

SEQ ID NO: 27944 - DNA, 1761 bp, Zea mays
  Peptide Sequence Number=SeqID_71319
atggtgccctcggtgagccggcgctccttagcatgggggcgacgcgaggccctaactaacacgaggcgcaagcgcggtgcggatccaggaaagcttgatcgccggccctgggcggagaggtgggtcggcggcggcataaacggacagcggagggaagaggaggcagaggagacagtcagccaaattctatccggtatagttcgaaggtacgagggcaaagagaactcgactccaaatgacgacctggagaggctggagatggcgcatatcaagctggaggcagttctcgagacatccagcaggtggcagatcactactggttcaccgctgtcgcggtggcgcaagaagctgaagcgggctgctcaggagtgcgacgacacgctgtgcgagcacaagaagatggtcctcgaagaagaagagacggaacaggaggtgaggaattcttccttccccagaagactagcgcacgctaccagatccttcgttttctcagccttgggccgccgcagcaacgacggcgagtgcagctccagcaggtccgccgtcgtcagaaggttcgagtggtttgcggacagcgctagcgagttcctgagattcgtagagctgggcggcacgccgtcgtgccgccgtcacatgccgctcgcctctttcgccaggcacctcttcgcgggcaaggagctgcagcacaggatcgttggtggggatgagcatgaggagcgccactcgtctcttctatggctggcgcccttcgttacggaagagcatgggacagaagcctgcctggtgcttatcaagaaagatagaggaggagatacactgggggtggggggtagcttcttcttcagtgtgatactccagctctcagaaagtacagacatggttgggaccgcggtggagtgcttgaatctgttccccgctcactttcagcccgcggctgacaccatcaggaaagaactcactcagctgcccacgacacaggacttctcatgggcgccgtacgctggtcactggcacaaaagacactgggacgatctccatagcttcagcactcgatggtttcgcccagacccattatgctgcaagcagcagcagcatggccagcatagccgatgcacggcggatgccgctctgggttcagttgtcgaagtgaatttgcagtgccagatctcactactgccgtccgagcacaacaatggacatcggacgacgtcgccgtcgccgacgtctgaaggcagaggcagacaccctctgcgcgatcgtcaggatctggaagctgggctcctcttcagcccccatggctcctcggaaagcatgctaccaccaccggcagatacagcttcttcgacgacggtgtccgtccacgggggagaacagcacaccggcgtgaccctggagcaactggaagagattgtgctgccgagggcggtagatcacttccagcggaacaccgaagcgacagtctaccagacactttggaaggccgtccatggcgctgcgtacatccacttcgcaaagccggcaacaggaagtgcggaggcggctccaccaggtgcgcggagagcttcgaggggagctagcagctggaggaggaggaggaagctgcaggtgcgacgacgacgagaggatctggagctgcatcgccagactcgggtgatctctcacgtgctcgacttgtggggcgcgcacgcacccgtcgagctacgaggcttggtcttgaactggattcgaaaggagaaggaaaggcagtgcctgaggttctga

SEQ ID NO: 27945 - DNA, 225 bp, Zea mays
  Peptide Sequence Number=SeqID_71320
atgtcggaccggacccctgccttagcaaggcctgggtattctctgccccagagtcccgggactcggctgcgggtagtccggatcccacgcagagaggtccgggacccgacccggaggtccgggctgcactcgcggggacctggaccttgctccagaggtctggtctacatgtacaagggtccggcactttcctatgggggtccggacccactgttggcatcttga

SEQ ID NO: 27946 - DNA, 423 bp, Zea mays
  Peptide Sequence Number=SeqID_71321
atgggcaagaacaacaaacgcaagcgcgagccgactcctccatcggaggatttcggtgactcggaatactcggaggaggagttctcctccgagtccgaggggtctccggctcccgtctctcccccggcgtcgtccgatgactcggacgactcccaggggatagccgcggaggtctggacgtacatccgggccgtcgagcgctccgggctcgaaggctcggatgagtcggagtactcctcgaatgaggaggactcggatggcggcgacgagggtgaagacgacgacgacgacgacgacgacgacggcgacggtgacggcagcggcagtggcaggggcggcggcgacggcagcagggacagcaccaagggcagcagcaggggcagcaccaagggcggcggcggcaggggcagggccagtggctag

SEQ ID NO: 27947 - DNA, 843 bp, Zea mays
  Peptide Sequence Number=SeqID_71322
atgtcgtcctcgtcctcgtcctcgtcgtcctccgccgccacggtgttcccgcggtccccgcagctgccgcctccggtcctggtggagaacggcctcacgccgctgcatcagcttacgccggtagccgcggccgcgccggccgccgagcagctctgctacgtgcactgctacttctgcgacaccgtcctcgtcgtgagcgtgcctacgagcagcttgttcaagacggtgacggtacgatgcggccactgcagcagcttgctcaccgtcgacatgaggggcctcctcttcccgggcacgccgacggacacggtcgcgggggccgcaccaccaccagctgctgacactagtacgactaccaccaccatcaccacggcgccgccgccggccaactcggtcaacaacgggcagttccacctcccccactcgctcaaccaccctcaccaccaatccctcctggtggacgagatatccagcgccgcgaacccgagcctgcagttgcagctggagcagcacggcggcctcggcggcctgatactcggcggcagcaggaacacggccgcgccgcctccgccgcagccgcctgcagcggctccggagaagaggcagcgcgtgccgtcggcctacaaccgcttcatcaaggacgaaatccaacgcatcaaggctggcaatcccaacatctcgcacagggaggccttcagcgcggcggccaagaactgggcgcactttccacatatccactttggactcatgccggatcaccaggggctcaagacgacaagcctgctacctcagggccagggcgtgccgccttccaatacaattagggcccgttcgtttctctag

SEQ ID NO: 27948 - DNA, 1623 bp, Zea mays
  Peptide Sequence Number=SeqID_71323
atgaacaaagacactggcattcaaagtgccattacaaacggaactccggttccccctccgcaggcacgaacaaccccacaagactggggaacctgcggggcgatcgcgggccgacgggcggcccgccgtcacccggtccggcaacagcggcaaccaccctcgccccgggcggcgaagcagcttcggcaacggcttcggggcgggggttatggcagaggggctctcacccgcagaggacaagaaccagccattcaggccgggagacggagacccagggctactggcggagttggcaatctcgtcggtagagaagccaccaccggctgccgacgcctcgaagcgcgccggcaggcttccgccccagtcagaaccgcccagagcatgggcgccgccctcgcggtacgcagcgcaactatcgtccgggcggagggcgtggcgctgcgccctagccgagtgacggcggcccacctatcccggcttggctggaggaagtctccgcgaaactggagggatgccattctcccccagacgccaggggaagaaaagggcagccgacccacgcggaggcagcccccccgactcgcctcatcctccatcttggcctggatgacgaaaatccttgaggccgagggaggggcagaggccgcagcccggcgtgcttctccccacccaggaactggcagtcaccgtcttgggcaactgcaccgccacttgcgccaccgtcgcgcctcttcggttgcggagccaatgccgcgactcgaggcgacccagcgcacggcccagcagcgccagcctggcgcgacggtcaatgcggccgaaagtgggccggcagtaatgacggtggcaggcgggcgggagcagcggtcacgtcgtcagccaggctcacgtcccatccaggggcagcaagagagcctcctctcacggcgtgaagacgacgcacccgtgatccgtccctcgaacggctcgcgcacgcgcaacggccgccctgccaaccactcgccccgtcgcattaactccgcggcgggacaggcggcgtttctggcaggagaagcgggcgacgcttcgccttcgccggaccgggaaagggggatacccccgaaaaggatccttccctgtgaaggaaccgggctccgagccccccctactgatcagaggttcgaaggctggccctccgaggggttcaacagtcgcctcagatcgcgtgggccctacacccactactggggttcgaaggctggcccccgaagggttcacagtcgcctcagacgccgagcgagggatgaccaggggtacgttcgatacataaccaaggctcgggctgcgctcccgagctcaccggagacaccatgttcgatgcccatcgagggtaacatggcgcactcccccctcctccttgcggaaaggcgacgtaggggcgtatgtaaaaaagccgagtctgtccctgatcgccctctcgccctatgcggaggctcgggggctgctctcgcaaacccggctccggccgaaccgttgacagcgtcaacataccagcccgagagcttgggccccgaccgtgcacccgggctacggccagttcgcatgagggaaccaccagaccagccgaagcattacgcaaggcattaa

SEQ ID NO: 27949 - DNA, 306 bp, Zea mays
  Peptide Sequence Number=SeqID_71324
atggagaaatcacccaaggctgaactcagcatcagcgagacggagattgcgcccgagggccggattcagcgtcaggcgaggcagagatttgcgcccgagggttggtctgcttcacccgtcgtattaaatgtcccaacaggggatggcagccggcgtgcatgtactatagcggggggtgtaatcatgttgttgcgtctagatatgtctgttgtcttgttatccaccgtgctcctgttgccatggcgtggggtaggtatggctcaagactcgacacctgaagatggtgccgatgtattctttatatag

SEQ ID NO: 27950 - DNA, 793 bp, Zea mays
  Peptide Sequence Number=SeqID_71325
cttgattcgtttgtccgcgggcgtcttcgactcggtgctccgcgacggccaccacgtggcgcaccggttcgcccgcgcgctcgccgaggtcctccggcgcgccggctgggacctggccgcggctgccgaggccgcctaccccggtgtttcctactccaaggccggccactgccgctacgcgctcctctcccgcgtctgcctctccatgttcgacgggttcgactcgcaccaattcggcgccacagctggcacggcagagctcggaggaaccgagccggcaacaacccgtaggaacgagtcgttgcggcaattcatcgagcactcggacgcagaccccatggagctggtgaactcgaggccggactgcgagttcgcccggttctgcgaccgcaagtacaagcagctgatccatcctggcatggagtcctcgctgttcgggaacgcaggctgcgggacgctgccggtgatgagcgtggccggcccactctacgagctgttcgtcgcaatggcaagctcggtctggacgctccacaggctagcctgggcgtatgacccagcggtcggcgtattccaggttggccggggcgcagagttctcgatggtgtacatggagaacattgtccggtcgtccaagggtctcgcggggagcagggagcccgggaagccggcgcgacgaccgaaggtcgggttcaccgtggtgccgggcttccggctcggagggacggtgatccagtgtagggtgtatctagatcacgggaagaggggagaggaaactattatagactcgatttga

SEQ ID NO: 27951 - DNA, 198 bp, Zea mays
  Peptide Sequence Number=SeqID_71326
atggagaaaggatcttggggttgtcttgggatcgacaggccatccaagatgtctctagacgacatagagtcgaagataggtgtatcttcttttttggaagcctatctcgaaagaacctccaagttaagcgtgcttggcttggatcaatttaggatgggtgatcgaccaataaatgagaagatttttaaccggttttaa

SEQ ID NO: 27952 - DNA, 84 bp, Zea mays
  Peptide Sequence Number=SeqID_71327
atggtggctaggatgactgctactgctagggggctctgcgggtcgggtgggaatggaagccgattgggcatctgggccactggg

SEQ ID NO: 27953 - DNA, 249 bp, Zea mays
  Peptide Sequence Number=SeqID_71328
atggagcaggtgctacgaggcagcgggtgcgacaaggggagggggcctggtgttgccggcgatgatggcggcggcaggtgcgctgcaaagggggtgtggggcggtggtagtgcgcatggaggcgggcacgcatgcgaggggcacggcttgttccaggcttcaagggtaagcttcccggtatcttcttggggctctagccaaagcgaagaaaaacttcactacccaatgcatgcagaggactgggcataa

SEQ ID NO: 27954 - DNA, 618 bp, Zea mays
  Peptide Sequence Number=SeqID_71329
atgagaagaaggttgtcccagaatcaaccctgtgtcagtcatttctctgcagcctgctcaagcagcagcagcagaagaaggccccataacacccttgttatgaggtacttcaaggagttcaaaaccccaagattcaagagttctaccctcattctttttaagtggggtagtgttccagcaaggttcctgctatggagaaaaagaagaaggcctgtagcaatcttgtggaggaccagatcaccaaagcttataagtttctggatgagaagtggtcacccaagttttgttgatgaagcaccagaagaccaatcaaggaaggaatccatgtggaagttcgcaagagaaagttcacaggatgcaagaactacttggactaaggaattgaggaaagcaacacctcaaaagaagacattaagaagatcaagaaaagtccaagaaaggaggcgtgtgctgcctgcggactgtctgtgcgtggagcaccggactgtccggtgcccacacgccggactgtccggtgcacctgggaactgcagcccaacggctagttccaggtggcacccggagcctgcggcgccaacggtcacctgctctgacaggaggcagacaggcaacggctag

SEQ ID NO: 27955 - DNA, 180 bp, Zea mays
  Peptide Sequence Number=SeqID_71330
atgtgcagccaactccagctcagcctggcacaccggactatctggtggtgcaccggactgtccgttggtgcaccggacagtgtccggtgccccaggctggtcaacgatgaagtagccggtctcgagaatcggcggagttgtatgactataaatcaccggactgtccgagacaaatggtaa

SEQ ID NO: 27956 - DNA, 324 bp, Zea mays
  Peptide Sequence Number=SeqID_71331
atgccgccgaagaaggcttcagcaccaggggctggcacgctgcagccgctggaccccaatcaagacgtcctttctcttagagaggcacgaagccagaagaggaagccaacagcaaaggccacaatgctcctcacaggcttctggacaacagcaaagctctctccggccaccagctccaagaggcagaggcgccaggggcttcggaggaagatttggcgatcaaccgagaagaatcttttgcttattctgcgattgaaggacatggatggcaacgaaattccaaggtcttggaatgcggatgagcttcggcgatactatgtataa

SEQ ID NO: 27957 - DNA, 4077 bp, Zea mays
  Peptide Sequence Number=SeqID_71332
atggagcactccaagtgtgggaagacacgagttataataaaccctaacagacaaccaatggaaactcatttctttgagcgtgcagctgttgaaacaatggatatcacaaaaatactaactcttcaaggtggagaagcagtgtacccattaccccgaattaaaaatttggcagtgcatcccaaattcaatttggctgcagtaatttttgcggatatgtctgggacagaagctgcaaagaacaaagctgcatacacaagagaagggaggagacaactttttgctcttcttcagggagctaggggatcaactgctgctgttttaaaggagaaactattagccttgggatcatctggaatattagcagagcatcaacttcaggcacaactacaagagcagcacttgaagggccagagccagctgactatttcagatgttgcaaggaaggcattccttcacagtcatttcatggaagggcatgctcaaagcggtccaatccctcgcctacctcttgttacaatttcagattctagcaaccttttgcgagatgttcctgtttgtcagattccttcgaatgtggaatgccatcccacgaatatgtcatacagcccaaaacagcatttatttcttgtcgtgtttgaattaagtggtacaaatggagtggtacatgaagttgttctttactgggagcagactgatctacagacagtgaacagcaaaggaagttccataagaggtcgagatgctgcttttttgggcccagatgataatcaatatgctattctggaggaagatagaactggtctgaatctctttagtctcaaagctgtagctacaaaggaagctcttgaaaataatgctgctgtgcttgaagaaaacacttttgctgataatgctgctagtgctacctcaacggaacgtcaaggtcctctacagtttacttttgaatcagaggttgatcgcatattttcttctcctctagaatcaaccttgttgtatgttatttctggaaagcatattggacttgcgaagcttctgcagggatataggctgtctgcagacaacgggctatccattacaacaaaaactgatgggaagaagtttattaagttgaaaccaaatgagactgttcttcaggcccactggcaaacaaccctaagaggtcctgtggtaggaatattgacaaatcagagggtgctaattgcttctgctgatcttgatatactatcaagcagctcaacaaagtttgatcgtgcacttatcttctcaagcgcaactgcaataagtatgcttgggtgggacaacaaagtccgatcaatcctctccactagcttccctcgctcagtattacttggtgcattgaatgaccgcctactgcttgtaaatccgacggatataaacccaagacagaaaaagggagtggaaataagggcctgtttagttgggcttcttgaacctcttctcattggatttgctaccatgcagcaacacttcgagcaaaaacttgatctttcagaagtcctgtaccaaataacctcgaggtttgatagtttacggatcactccaaggtcattggacatattaactaaaggacctcctgtttgtggagaccttgctgtatcattatctcaagcaggacctcagtttacccaaatcatgcgctgcaattatgcaatcaaagctctccggttctctactgcgctgtcaattttgaaagatgagttcctgcgctccagagattatcctcaatgccctcccacttctcatctgttccagcgtttccgagaattgggatatgcatgtataaaaccttccattcatggaataaaaacagtttttttggatgagtttgactgtttgagtgttggaggcttgccggtgctagacatcttgaggctttgggtcctggtgctgcaatttttaggtcaagggttcttttgggtgattagtgaagagcagttgtatggtcagtttgacagtgcaaaagaaacttttgaggttattacagatcacgagagcatgctggatctatttatttgtcacctgaacccaagtgcattgcgacgccttgcacaaaagttagaggaatctgctacagattctgagctgaggcgataccttgagagaatattaagagttcgttcgactggatggacacagggtgtattcgccaattttgctgctgaaagtatggttcctaaaggccctgaatgggcaggaggaaactgggagatcaaaacacctaccaacattaagaatatacctcagtgggagcttgcaggagaagtcatgccttatatgaagacaactgatgctggtatcccatctgttgttgcagatcatattggtgtgtacctgggtgtgatgaaaggaaggggtaatgttgtggaagtaagtgaaaagagtttggttaaagctatagctgcagctagcagtgagaacacacagccggtgtcttctgcatcagcagagaaaagtaaggcaattcctcgtggtgattcggttggtgatactttggcaaggcaactgggagtccagattgcatcttctgatgaacaggcaaaagctgccgaggacttcaagaagactttatatggtgttgttgatgatggaagtagtgatgaagacgagtcaacctcaaagactaaaaagatacatataaggatacgtgataaaccggctgcacctactgtagatgtcaacaaattgaaagaagccactaaacagctaggcttgggtcctccgctgagtaggacaaggtcattatcagggacacctcaagacttcaatcaggctcctacacaaccaggaggtccagccgcagctgtttccccagcaatgccaaattctgcgattgatttatttggaacaaatactttagtgcagccgcaagcaccctctagttccacaggtcctgttattgcaggcatgggagtgacggctgggccgatccctgaggacttcttccagaacactattccatcgcatcaacttgcggctcaactacctcctcctggaatagtcctgtcacggatggctcaacccgctcctggcattgaacaaggccgaccagtacctaatcaaatgatggctaatgttggtcttccagatgatggggtgccaccacaagcaccaccgcagcagtcccagtttcctccgcagcagtcccagtttcctcagcaaccaggcattcctatggattctattggcctgcctgatggtggtgtccccccacagagtcagccacttccttcacaaggccagtttcttccttcacaggcacagggctttcaacttggtattcctgctccatcacaaccaattgatctcagcgctctcgagggtcctggagcggcgaagcaagctgctcgccctccagcacctactgctgtgcggcctggccaggtaccacgcggggcccctgctgcagaatgctacaagatggctcttgctcatcttgagcagaatcagcttaccgatgcactatcttgtttggacgaagcattcttagcccttgcaaaggaccagtcacgtgaagccgacatcaaagcgcaggccaccatttgtgctcagtacaagatcgcagttgctctgctgcaggaaattgctcgtctgcaaagggttcaaggagctggtgctctcagtgcgaaggaggaaatggccaggctatctcggcaccttgcttccctgcccatccaggccaagcacaggatcaactgcatcaggaccgccatcaagcggaacatggaggtccagaactacgcctacgccaagcagatgctggacctcctctactccaaggcgcccccgacgaagcaggacgagctcaagagcctgatcgacatgtgcgtccagaggggcctgacgaacaaatccatcgacccgttcgaggacccctcgcagttctgctccgtgaccctcagccggctgtcgaccatcggccacgacgtgtgcgacctctgcggcgccaagttctcggcgctctccgcacccggttgcgtcatctgtggcatggggagcatcaagagatccgacgccctcgctggtgggcctggacccgtgccgtcacctttcggctga

SEQ ID NO: 27958 - DNA, 420 bp, Zea mays
  Peptide Sequence Number=SeqID_71333
atgaggaacaagctcaaggtgatgaaaatgaagatcaagaagatgagccacctcaagaggaggacaatgatcaagggggagatgaagataatgaagacaaggaagatgatcaagaaatatagggtcaaaggcctccacaccctagagtccaccaagcaattcaacgagatcaccccgtcaactccatacttggtgacattcataagggggatagaggatgcactaagagatccgaattgggtgctggcaatgcaagaggaactcaacaacttcataaggaatgatgatggcaaactcatcaagacacccatgggaaccaatgggcatctcgacctcgacatgggaggtaaatccgtagatcaaaaggcagatcctaaggaagttcaccttagggccgtaaagaaaatcatgagggtgtaa

SEQ ID NO: 27959 - DNA, 243 bp, Zea mays
  Peptide Sequence Number=SeqID_71334
atgagggcccaattgaatggatcagcggcgaagctgatgcttttcgaggaaattttaaatggccgtggagacgtctgcgccttttctgccgaactatctcctcccccggagcccttcgattcattggtcgaccccgaagcagaaaaggaagacgaaattactaagatggccgaagctattatggacgaagctgttactcgactactaaacgaagctgcggaagcagttttaaaagaagagtag

SEQ ID NO: 27960 - DNA, 603 bp, Zea mays
  Peptide Sequence Number=SeqID_71335
atggcgccccgcacgctctatgacgacggcggctctcagcccccttacggaagcaagaggacggccctcttacagagggttggccgcgcggggaaaggacgggacaggcgctcgcgcacgcgcgcgagcgaaggctgggatgcgaggcgcgcgacatggttgggcgcgcggctgcacggctatggcagcacagctaaccgaggctgccgcgatgagacgcggaggctcgccggcgaggatggaacgtggacaacgacagagaactctagcgcacggcgtgggacgaactgcagcgtgcgagtcgcggtcgtcagggcggacgggcgtgaagtgctccggcgacgggcgtcagagagcccgctccagcacgccgagacggcagcggcggcggtggtggtcgcgctggatctcgcaccagggacggaccgcgcgccggggacgcgagccgccgggcagctccaggacgtagtcgatcctgcaccagtccgtgggcgctgggccagctcatggggcgcgcgcagggcgaagggcgcggctgggcgctgggccggggaaagggcagtgggccgcgggcaggccagggggaaagcgcgcgcgggatag

SEQ ID NO: 27961 - DNA, 714 bp, Zea mays
  Peptide Sequence Number=SeqID_71336
atgtcgttttgtttcgtgcgctctcttctttgcttgtgtgtgtggtgttgctgcaattgttctcttgtgtgcatttctactcccctccttactccggatttgattgtgaataattgtgtaaggcgtgagagactccagtttgtggaaattcctcacagctgggatattgatataaggaagacactgtggtgctctcattacttcaagatcccactccaaacctccgtgaggtacgagggcgaattgttctatgtcaagaatctagccgacaacgccacatgcttcatcggtcaagagttggtgccgacagatgactggaatcacggggcggagccgggtctaaatggcaaggtggaacctattttggtggcgctcaaaacgctaaaggagaaaagtctcacaggccctttgatggctcgccgaaggccattgcacaagtattctagcgtcaatgatcccgacggccactcctctgagccgttcgcgctatccgagattgaagcgagagtcaagtatgtcactgcattgtcgttagggttcttcatggatgaggacttcatggacccctttctcggggcataccgagtggcctaccaacgtgtatgtgccacacaagtccgtgagggacgcaaccttggtggtcagagcgacgcctctatctccccaggactttgggttgcagccacagggaagtatgccccctctggctcataa

SEQ ID NO: 27962 - DNA, 528 bp, Zea mays
  Peptide Sequence Number=SeqID_71337
atggcgcctcctgttgacgtggtcggtccgtggtgccctaggttgagcgatgtggaggctcctccgaggtcgaggccgagtctgtcttccgtggccgaggtcgagtccgagcccctgggtcgggcgaggcggagaccgtcggctgaggccagggctgagtccgagccctggggtcgggcgaagcggagttcgtcgtcttctggggctgagcctgagcctgagtccgagccctggggtcgggcgaagcggagttcgtcgtcttctggggctgagcccgagtccgagccctggggtcgggcgaagcggagttcgtcgtcttccggggctaagcccgagtccgagccctggggtcgggcgaagcggagtttcctatggcgcctgaggtcgggcctggctgatgtcagcctcactctgtcgagtggcacagcagtcggtgcggcgcaggcggcgctgtcctcttgtgagaccggtaaaggtgtcgaggcggatctccaggagttccaggacttcgacgagttcaaggattag

SEQ ID NO: 27963 - DNA, 1029 bp, Zea mays
  Peptide Sequence Number=SeqID_71338
atggccgaggtcgccttggtcagcgctgacatccaggaggtcatcgggagcgccattgccatcaagatcctcagccacggcctgttgcctctctggggcggtgttgtcattaccgctttggattgctttatgattctttccctcgagaactatggggtgagaaagttggaagctctatttgcggttctaattacaacaatggcgtgctccttcgcatggatgtttgtagagaccgagcctagtggcaaagatctattcattggtattcttgtcccaaaactaagctcgagatcgataaaacaggccgttggccttgttggatgtgtcatcacaccccacaacgtgttcctccattccgctcttgtgcagtcaagaaagattgacccggacaaggaatacgaagtccgtgaagcgttgaggtactattccattgaatccaccctggcattggtagtgcccttgatgataaatttatttgtcacgacagtttttgcaaaggggttctatggtaccaaggaagcggatagtatcggccttgagaacgccgggaagtatctgcaggagaagtttgggggagactttttccctatcctttatatctggggtgttggactgttagccgccggcaccagtagcaccataactggaacttacgctgggcagtttataatgggtgggtttctgaactggcggctgaaaaaatggatcagggcattgatcactagaagctttgcgattgttccgacgataatcgtcgctttgtacttcaacaattctggctatgagctggatgttctcaatgagtggctcaatgtgctccagtcagttcagatccctttttctctcatcccactgataacactggtttcaaaggaggaagtcatgggggtgtacaagataggtccaagaatgaaatggtcagtggatggtcgagtcctcgtgacatggatctcccaaaagtcccctccatgggagatcgaatccccacatcgcggtcatgtctcagaagttcccccgagacacctgtaa

SEQ ID NO: 27964 - DNA, 1224 bp, Zea mays
  Peptide Sequence Number=SeqID_71339
atgccgaccgcctacagcctccgcgcgccgccctccgcctcgcagcagcgcctcaggctgcccctaccgccgcccccgccgccgctgccgttttgcccgggtggaggggccgcccgccggaggaggggtgtcggggtggcgtctgcgtccgcgtcgcccttcgacgagctgcacgcgcggggggaggcccgtacatggaccctccaagggaaacagaaatctgacgctcctgcagttctatttatcatcaagaaatccatgctctggaacttgatccaggatatagagcccttggacctaagtgtcatccagaaagatgttgctcctgaaacagtagatgcaatgaagaggactatttctggcatgttgggtcttcttccatctgatcagttccgtgtcattgtagaagccctttggaatcccttcttcaagttattggtatcttcaattatgactgggtatactctgcgaaatgctgaatacaggctttcttttgaaagaaatctagaactgcctgaagaaggtgtagaatgcctaaaaagtgatgtcactgaagataatcatcataacatcaatttgggaagacctgtcactatttttagattatccgaagaagacatgcctcaggaccctggaaaaaccgatgaagcatcatcttatgaaaatatgggagaagagcttggtgacttaacaccacaggcagaggagtatattattcagatgcaatctcatttgaatgccatgaaaaaggagttacatgatctcaggagaaagaattctgccttacagatgcagcagtttgttggggaggaaaaaaacgacttgctggactatttgaggtcattaacaccagagaaggttgctgaactatcagaatcgacgtctcccggtgtgcaagaaactattcattctgtggttcatggtttgcttgctactctttcccccaaggtacattcaaaggcccctccaccgctagataacatttctggtggtgttctaaaccttgggggcgaggatgatgatcgtgcagaacttgtggagaatgcttccctcccatttcagcccctaatatctgttccccgtgattatcttgcacgtttgctgttctggtgcatgctgctgggtcactacattcggggtctggagtaccggttagagcttgctcggcttctgcgaatatccagcgtgggttctttctctggtggagatgatcatgttgtttga

SEQ ID NO: 27965 - DNA, 273 bp, Zea mays
  Peptide Sequence Number=SeqID_71340
atggctgggaaaatactggacaaggagatgagtgtgataggtgcaaacataccgcaccaggtgaagcaggttgtcccggcggcgttcgatggtggccctgcgtcgtttgaatcggcggtggatgaatggcacacaccaccgagtcctgaactgacggtgcaaaacacaactccgcctccccgaactgatggcgtccgcctccacaccccggttgccaagaacgcagtccgcgtgtgtcgggattccggcacggcggctcgccctccgcttccg

SEQ ID NO: 27966 - DNA, 315 bp, Zea mays
  Peptide Sequence Number=SeqID_71341
atgggcaaaggcaagagaggtcgaggctcgccccgtcgtgctggcgacaagcggaagcgtgatccaagtcctccctcggaggacttcggcgattccgagtactcggaggaggaggtttcctccgagtccaaggggtcgttggctctcgcctctcccccgacgtcgtccgatgactcggacgactcccagaggatagccgcagaggtctggacgtacatctgttccgtcaagcgcaccgggctcgaggagtcggatgagtcagaggaactcctctggctcgtccgaggagcggagtggcaacgacaaagacgatga

SEQ ID NO: 27967 - DNA, 51 bp, Zea mays
  Peptide Sequence Number=SeqID_71342
atggggcctagatttattaggtccacttccaccagcacaagaggaaagtga

SEQ ID NO: 27968 - DNA, 210 bp, Zea mays
  Peptide Sequence Number=SeqID_71343
atggccggccggggaggaagaagcgagggcgagatcaaagagcatggagaggaggtggaggagggcgaatctgaattcctgagcttcctggaggacgcactcgagtcaggattcatgatggagggtggaagcaggtacgcgaaggaacgcatgcggggacagcccaagggtgtggacggcgacgggaggatcgtggctcggctgtcgtag

SEQ ID NO: 27969 - DNA, 624 bp, Zea mays
  Peptide Sequence Number=SeqID_71344
atgcagtacaaggaatcaagcagtctcattagctgtgagaagcagacgattcgaatcgagtttttaaccttgcaaggcctcaccgccttggcatacaatgctccactgaccccggctgccgccgtgcataaccgcggcggaagaaagggtggaggggcttaccggcggcgagattgctccggtgaagtggtcgaggacgtaggggaggtctcggggatcacaacggtgtgcgggtcgccgtcggagagaggttcacgagatgccagagaagatatgggtgcaaggaattggtcggagactcactggatagctcggtgcacgcgcggcggcggaagaccgaagtccggtgaggtcgatctcgggcctccggtgaagtccggctgggtccgagggcttggcaagcttcacgggctactggcggagctagccgaagcactggctcgacttgaggatggctggagtgggctggccacggtggccgaagctctggcggcaatggcgggcggaattgagctcgccggagctaaggagagggggctggccggtgaggagatatggagccaggaaatccggtctgtctccctgcccaaacccgaggcaaatccaaggttttgtcgtgtctag

SEQ ID NO: 27970 - DNA, 114 bp, Zea mays
  Peptide Sequence Number=SeqID_71345
atggtgccgcggcggtgcaagctcaccgccgacgagcaagccaccgtggaaactgaggttcaacaagtagagatagctgagcaggagctcgtggaaggcaagttgtgcccttga

SEQ ID NO: 27971 - DNA, 423 bp, Zea mays
  Peptide Sequence Number=SeqID_71346
atgccgggccagcactacaagccgaggctacgacccaagcaccgcacgacgctcgtgccgggagcaggcgcctcctccccatattcgtccgacactagccccgacaccgactcgcgcagtggctattgcatgtccacgaggacgtttcacatcatgcgtgcaccatcgttttcgccgtcgtcggacatcccgttcgtcttcccggccttcgtcatgttcttcctccccaacctgctgcccccgcccacagtcgcagccgcgagccgaccgacactcgtcgacgcgggtacagagcgagtcagtcatgctcttggcctttctttgtgtgtatcgtcgaggaggacatggtggcgcctgccacacttaggttatctgggcgatgatgagtccagatatgagatattggacaatcaaggcccgtag

SEQ ID NO: 27972 - DNA, 1206 bp, Zea mays
  Peptide Sequence Number=SeqID_71347
atggagaaagatcgtcaagatgcggtgcggaagcgcctggcggtcattagggtcagggaccctttccgcgaggcaaagaaagcgtggggcacgaagctggccgccgccgccgggcccagcaagctgccctcggcgggtgcgaaggctgctgcttctggtgtgggcaagctgccctcggccgaggccgctaaggagcgaagggcatcgtcgccggcacgcactgacatggtggcacgtgttgccgactttgacacggacatctgcgtgggggattacctcattgggtcagacgccgggcagatgtctgttgtcccgactacggtggtggccacttcgccaacggcggtgggtggtgcgaagggtgcttcgcaggactcgtggtccaacttctgtgtgagcggcaagatttcgtcggtcgccgccgctaaagatgtggcgagctctgtgtcccagcatctgaggcatgtgtctcagcagctgaagcatgcggccgccttcaccgaccatgttgcgtcgggcgtcctgacttcagagcttgctgctaaagtcgagcgtcttccggcgcagcatgcagatgctgttcgggagaagtcagctgcggaaaataagagccgcaagctgatggagaggtttgctgcagtggaggccaagaagggggatctccggcgtcagctggcggaggagaggagggacgcgaacaaatccattgctgatgcgcaggctgctcacgccgaggccaagcttgcacgggcgggggccagtctcgcctgccaacgcgccgaggagctagagtcgaggcttaacggcctgcacaaccgcgtggacaaagccgagacctcgacacgcgcggaggtcgggcggacgcatgcgcagttcgtggacgtgtaccgggagctgggtgcgcggacggccgccttcgatgcgctcggccaagaggtcggcctccgcttccttgaatggctgcaggaggagctgggggtgctcccgatgatcatgacgggcctcatgtcctttgcctccctcgtcacctgcgagggggccgtgaatgcgctgtcctgcgaggggtgtgggcacgtcgaggtcttcgaccagtcgaacgaaggctacaaacacgaaatcctccaggtcgaggacccggtgctgaagcgctcggcaggggcgctcttcgataggatgtggggccctcacggccgagagacggtctga

SEQ ID NO: 27973 - DNA, 159 bp, Zea mays
  Peptide Sequence Number=SeqID_71348
atggcgagagtagcgtgtaccctccgtggcaagaggctggacagtggtgtatctgtgctctcggtgaagaagcagccaacttttgttgcttctgttcaaaggtggtaccaaaggaagagaatcaagactagaactgcgggaggaaaggtcctcaattaa

SEQ ID NO: 27974 - DNA, 399 bp, Zea mays
  Peptide Sequence Number=SeqID_71349
atggaggcactcctggctgatgaccagcaaccctttgaggacctcgtaaggcgcaaggagaaggaggtgatgcgacaatggatcgaacaacatgacaaggaggaggcagaactgctgcataaactctccgaatggtgcaaaaaggcggcagaaaagtacctgccacacttcacggtagatcgccaccagaagatcattcatctaggagagatcgatatggaatctctcctacctccgcttcaggctcctgctctaatcgccgccaccaggcacgcgacaggctctggagacaatcggaccatccaagagtcttctcgaatagtctggctatatcgcagaccgtccagcatatttcgccaaccgttcgaccctacacaagctcgtgcacggaacacttag

SEQ ID NO: 27975 - DNA, 381 bp, Zea mays
  Peptide Sequence Number=SeqID_71350
atggagagtcatgatctccgggcagaaagggaatcacgtcttgtgggtggcaatgagaatgatggttttggtattgactctggtgatggtaagtggtattccttccatttggaaagggttgtccgcattgcaaccactgctcaggagaagatgaagccgtggaaggagacttgcatgagttccaagattatgacgagttctaggtgtgggttagcggcaacccccaatcggctgcttgtgaaggccacgtgtatctacgtttcttttccgcactttgattattgtaaagactatgtggatgtctggggcgttaaacctacatcggagggctctcggttgcgtactgattcattaaagaccagatctaatcctgagcgctga

SEQ ID NO: 27976 - DNA, 666 bp, Zea mays
  Peptide Sequence Number=SeqID_71351
atgccgtcaatggggctcggtgtatgcggctcgctctgccaagtttggttcgccccttggggagaagtgcgtgatcaatggagagtcatgatctccgagcagaaagggaatcacagcttgtgggtaaagtgcgcaacttctgcagagtgtttgaaaactgatatatcagccgtgctcgcggttatgagcggccaagggagctccagtgatcagtggtacttgatcagagatgttcggattacaggtggcaatgagaatgatggttttggtatttactctggtgatggtaagtggtactccttccgtttggagaggatggctcgtcttagacacactgcatggaagtctgtcatccccttcttaccctctcgtctcgcggagcgtccgcttcgccgtccagtgactggtcagtctagccatttggagaggctgcaccaccgcctgcatgaggagcaggagaaacagggctcttctttctcgctcctgcaggagatagagtctgtgaggagctgttcccctgtgctcccgctggaggcgccccctgcaccaccactgagcgccctagcccctggagtagctgctggaggagacctagatgacggaggtggcgacagcagctcgagccacgacaccgacctttctgccgaccaggagttggaaggatga

SEQ ID NO: 27977 - DNA, 318 bp, Zea mays
  Peptide Sequence Number=SeqID_71352
atgccgtcaatggggctcggtgtatgcggctcgctctgccaagcttgggtggcaatgaaattgatggttcttggtattggctatggtaatggtaagtggtactctttccgtttggaaagggttgtcagcattgcaaccactgctcaggagaagatgaagccgtggaaggagacttccaggagttccaagactacgacgagttttaggcgtgggttagcggcaacccccagtcggctgcctgtgaaggccgcgtttatctacggttctttttcgcactttgattattgtaaggactatgtggatgtctcagacatatga

SEQ ID NO: 27978 - DNA, 726 bp, Zea mays
  Peptide Sequence Number=SeqID_71353
atggagagtcatgatatccgggcagaaagggaatcacggcttctgggtaaaattgctcgtcttagacacactgcacggaagtctgtcatccccttcttaccctctcgtctcgcggagcgtccgcttcgccgtcctgtgaccggagatagagtctgtgaggagctgctcccctgtgcttcccctggaggcgccccctgcaccaccaccgagagccggaaggatgggttgctcgacccatcgctcgcgacgctgctcgcgggtgtcacttccacgatgcgctcgacaccctgctatgtcgggcacttgaccgacaacagtctctggggtgctgaggtctgctcggagcactattctatctctgagcgggactcagctgaggcggccatgcaagatgccacacggcgtgcgctttcgcactactgctcagtgctcggtggggtagctgacggtctcaacctgaagtattatccccgccatccatctggcagcacaggaggcgtgattgtttcacctgtcggtgaggacaatcctaggttgagcagcacagtcaacctagccgctgtgctaaacacggagctagaccatgcattagacgagctgagtagggctcgtgctgagatcgcccagctgcgggctgagcgcgcggaacgtcgtcacctggacgatggttcccctgctcccgtcgggactcaacacctgtaccgctcacctcggcgtggacactga

SEQ ID NO: 27979 - DNA, 348 bp, Zea mays
  Peptide Sequence Number=SeqID_71354
atgccagtcgccggcccgccgtggtcccttcccttctccggtcatccgctcatctccccggcagccatcgcactttggctccacagaactatctgcacttacttaattcggcttttatctttgacacttgtaatgattcccctttttatgtctgttgcatggccaacaaacaagatgagtcgtaacaaaaaatcaacattggcccaaggttctgcagcagcagtttttggtggagagtttgtcatgttgttaaggcttcatggttctcctgaccgagtgtatctgtacatattgattgatcagaagaggtgctggaagcacgtaggatcggatcgagttgatgcttga

SEQ ID NO: 27980 - DNA, 240 bp, Zea mays
  Peptide Sequence Number=SeqID_71355
atggaaagcggagaagagagtgaagtgattgaagagaaggcacaaccaccacctttggaatctcgggcaaggacttggctctacttcgacatctgcgagtccaagcctgactcacctcatacccttgagagtcttttccttagtcaggtgaggaagcgacaaagttttgttgcttttgctccaaggtggtatctaatgaagaaaaacaagaatgaagatacgggggcttcctccacatag

SEQ ID NO: 27981 - DNA, 501 bp, Zea mays
  Peptide Sequence Number=SeqID_71356
atgaagacaactagacgaaccccaaagggaccccgcgttccccgatctacggagctgaagcacgccttcctccggaggcccctccggattccccacgggtccgggctgcggacaggtacatacagaagtggccacagccagagacgagggctcccgtgtcaaatgcatatgggaaccctgggtcaggacctagccccacaacaagtaccatgccaagaagggctccgcaactctcccccagctgggaaggacccttcaaggctcgcatcctcccctgaggtgggcccgagggccactgtcggtaccctgaatcaggggtaccctcttctacggtatgaaggcgttgcacccgtaccacacctccagttcggtaaagtacaaggtaagttagttgaggagatcaagttgagggtagtttatgtccctgttaatcctctttcaccagtgcctaaggaaacaaaggaatgtgatggatctcttgattcaaatgtggactattaa

SEQ ID NO: 27982 - DNA, 2241 bp, Zea mays
  Peptide Sequence Number=SeqID_71357
atgccaccgtccgcactcccgcgcggcgtccatgccgtcctcatcacctcaggccacctccgcaacctcgatccgcacctccaggtcccccctctcctcctcgtcaactccctgatcgccgccttctcccgcgccgccctcccgcgcctcgcgttgccgctcctccgccgcctccttgcaggcgcccacccgctccgccccgactccttcaccttcccgccgctcgttcgtgccgccccgggtccggcctctgccgcgcagctccatgcctgcgcgctccggctggggctcctccaccccaacgtcttcgcatcgggttccctcgtccacgcctacctgcgtttcggccgcgtcgcggaggcgtatagagtgtttgatgaaatgcccgagcgggacgtgcccgcgtggaacgcaatgttgtctgggctgtgccgcaacacccgggcagcggacgcggttacgctattagggaggatggtcggcgagggggtcgcaggggacgccgtgacactctcgagcgtcctgccaatgtgcgtcgtgctcggggaccgagcgcttgctctggtcatgcacgtgtatgcggtgaagcacgggctgtctggcgagctatttgtgtgcaatgccttgattgatgtgtacgggaagcttgggatgctaacggaggctcattgggtgtttggtggaatggcattgcgggatctggtcacgtggaattcgatcatttcagcgaatgagcaaggtgggaaggttgctgctgcggtggagcttttccatggtatgatggaaagtggggtttgccctgatgtgctaacactcgttagcctggcatctgctgttgctcagtgtggagatgaactcggtgcaaagtcagtgcattgctatgtaaggaggcggggctgggatgtgggtgacatcattgccggaaatgctatggttgatatgtatgctaagatgtcgaagattgatgctgcccagaaggtatttgataacttgcctgatcgagatgttgtgtcctggaacacattgattacagggtatatgcagaatggacttgctaatgaggcaatcaggatatacaatgatatgcacaatcatgagggtctgaaaccgattcaagggacgtttgtcagtgttttgcctgcatactcgtacctgggtggattgcagcagggaatgcggatgcatgcactgtcgattaagactggattaaatcttgatgtgtatgtcactacttgtctgatagacttgtatgctaaatgtgggaagctggtagaagcaatgtttttgtttgaacatatgcctagaaggagcacaggtccttggaatgccatcatagctggtcttggggttcatgggcatggtgcaaaggcactcagtctcttctcacaaatgcaacaagaagaaattaagcctgatcatgtcacttttgtttcattattggctgcctgtagccatgctggcttagttgatcaaggtcggagtttctttgatttgatgcaaactgtttatggtattgtgcccattgcaaagcactacacatgcatggtagatatgcttggcagagctggtcagttggacgaagcttttgagttcatacaaagcatgccaattaagcctgactctgctgtttggggcgcactacttggtgcttgtaggattcatgggaatgttgaaatgggtaaagtggcctcacaaaacctatttgaacttgatcccgagaatgttggatattatgttctgatgtcaaatatgtatgcaaagattgggaaatgggatggagttgatgcagtaaggtctttggtcaggcgccagaatttgcaaaagacccctggatggagttcaatggaggtcaaagggtcagtgagtgtattttacagtggcacacagacagaaccccaccctcagcatgaagaaatccagagagggctacatgaccttttagccaagatgaaaagcgcaggctatgttcctgactacagttttgtcttacaggacgtagaggaggatgaaaaggaacagatcttgaataatcatagtgagagattagctattgcctttggcattataaatactcctccaggaactccgctccatatatacaagaatttgcgggtctgtggggattgtcacagtgctaccaaatatatatcaaaaataactgaaagagagatcattgtccgggatgcaaaccggttccaccactttaaagatggacactgctcttgtggagatttttggtaa

SEQ ID NO: 27983 - DNA, 492 bp, Zea mays
  Peptide Sequence Number=SeqID_71358
atggcggggatgtactgttgcgcgcgtgcctgcctcaactggaggatgcagccaccggcccgcaccgtcatgcggaccttcttttcccccgtcgtcaaggcaaaaggctccacggagaagagatgggtccacagatcccggagcgcccgcatgaaacgacttgttggcactccgaacccccgctcatggaaggagacgaaactcagcacataccccggcggcggggtcggaccggccccgctcggagggaccatccactccggctgcgggtcaccggagaggggacagagcaagccatcggcgacaagggcctccagatcgtccaccgtgacggtggagaaaggccatgggtcgcgcggcggaacgacggttacccggtcggccatcgccaaacgaaggggcggcggcggagcggacaagggaccgggaaaggggatatttcgaaagggatccttctccgcgaaggaagcgggccccgagccctcctactga

SEQ ID NO: 27984 - DNA, 153 bp, Zea mays
  Peptide Sequence Number=SeqID_71359
atgcaccaggggagtctttgtaaaggctacgtagtgtatccctggccattcacctcggtagtgaagatcaggaggaggtacattcggtgctcaggaggagatgctggcaacatggaggactttgaggagttccaggactacgacgagttctag

SEQ ID NO: 27985 - DNA, 216 bp, Zea mays
  Peptide Sequence Number=SeqID_71360
atgggaactaatgggcatctcgacctcgacatgggaggtaaatccgtagatcaaaagggcgtaaaattgattaaaaagagcacattaaggacttgtgagtttctggggagatccctagtgtcttgggctcaaagaaacaaaactcagcagctctttctaccgccgaagctgagtacattgctgcaggccattgttgtgcgcaattactttggatga

SEQ ID NO: 27986 - DNA, 132 bp, Zea mays
  Peptide Sequence Number=SeqID_71361
atgacaacggacaggccactggagctactccacatggatctattcggcctgatagcttacataagcatcggcgggagaaaaatcacaaaaccaagagactttaaagggattcttgagacgggctcaaaatga

SEQ ID NO: 27987 - DNA, 900 bp, Zea mays
  Peptide Sequence Number=SeqID_71362
atggctcgtattatgtgcactgcatcggagcgtcccctgcgtcgcacggtgccaggtcagtccagtcacctagagagactccatcgtcgcctgcacgaggagcaggagcgccgacgccaggagcaggaacaggagcagcaggattcttccccctcgcctcagcgggaggtggagtctgagaggccaccttcccctacacctcagccagagatgcccctgcaccacctcagggcatcccagctgctggaggagaccctgacggagacggagacgacgatgacgtcggtggcagttcaagccacgacacagagctttcggaggagccggagccagagggatggatcgctagacccatcactcgtgacgccgctcgcggaagccttctcagagcactattctattactgagagggatactgccgaggcagccatgcaagatgcagcacgacgggcactttctcaatattgctcgttgttcagcggggtagctgatggcctcgacctgaaatactaccctcgccattcgatcgacagtgttggaggtgtgattgcctcgccagttggcgagggcaatcccaggttgaacaacatggtcaatctggttgccgtgctcaacacagagttagaccacgccctggacgagttgggtaagatgtctgagaacaggcgcagaggtgcgaggcatgctcagcctgaacagcaggcaccccaagagggtgcagccccacaacatttgccactgccacccccgatgactatcgagcagatgttcttgatgcagacccaagtagtccaggcaattggtcagaccttagcagccatgcagcagctgaggggagcaacacagtcttggtgggagtcctacctcgccacccatgccaaccctgaagccatcacttag

SEQ ID NO: 27988 - DNA, 1665 bp, Zea mays
  Peptide Sequence Number=SeqID_71363
atgaaccaagagatgacaacaatgttccctagtggcatcaaagccttgattgtggaggatgatgcaaggttcatcaagtcatcttccatgcttttttctctcctaaacttcaaggtggcatcttgtggaagccctatttctgcacttagactcctctccggtgacaagatcaaagacgtgcacgtggtcctcgtcaacgctgagaaggctaccacctgcggcttcgacttccgcgccattgtcgagaccgatctctgtatcccggtcatctacttcttgccgcgcgaccacgtggccaccggcgacgaggcggacgagctgctccgcacgctgagggactcgacctacgtactcaggagcccgctgcaggccagcgatgtcggcgacctgtggacggtcgtcgcgtggcgcaagtgctacctggagaacaaggcgaagaaggcggccgaccgccgccggcgcgtggttcccgccgccgttcaggcgtttctggccggtggttattctaccgtgggcgagggaaggaacgacgacgaaagccgggtccacttcaaggcggtgagcgccggtggtcgtaggggccgcaagaggaagagcggcggccacaccgtcgtcgtcggttcctcaggagacgaccagacaggcaagggacatgggaagatgaacgcgacaggcgggcacgagaacgacgacgacgacgacggcggcgtgtctagccagcaacagcagcagcagcaacccgtggccactgctgcaacatcccgctggaaccaacccgcggccggcagcgtcgcaccgccgacggcggcagtaggaaacatggctaccaccgtcacagacgagccggagttctcccgcggcagccaccaccaccaggccgtttctctgccgctgatgttcggaccgtttccgtaccagggcccgcggccgcaagtgctgaagcaggccatgttcgtgccgctgccgcgatacagcgggactgagagcatcggtggcgcaaccgtcgctgcagatgcaagagagtacggcaacgctgccggttcacttcttcagcccctgaaccttggcacaggaccacacggccacgacgagcttgcagccatgacggcgtacaccgagtccaatgatccaccggtggcagaggcagctaccaatcctaccatagaagaagtgctcaacaatggcgacagcttcagcacctacagcacctcgctcatggcacctaatcaggttcttgatgacatggcttcggatgtgaatgagttggcaatggcaggaggagcaattttcagcaacgacgacgcatcgtttacggcgcctcaggatctcgccgcggcgctagatggtggccagctagcaccaggagcattggacgccatcagtgcatcgctcatggagacggacgggaaccctggtctcgagctagaggcaatgttttctcctgatcagtacgagaacaccttgtttccgctggaagctctgctggggctggatgatgctcccgtgtacgaggacggccaagactaccggcagggtggcgggagtgccgacgatgaggctgcagggacctcgctgatcggcggcgctgatgacagtcttgacgtcctggatgattatttgttcatggacagcgctggggatttcaacgacgatgaacgtgactaa

SEQ ID NO: 27989 - DNA, 2544 bp, Zea mays
  Peptide Sequence Number=SeqID_71364
atgccccgccccagttcacgcgccaaggcggcatcaccgccggaggcggtggccggtgcctcgcagcgcacccctgcgccgtccccgtccacctccctccgcctcggcattggccccgtagcctccgatgacaaccgcggcgccggatccctcgacctcaagcaacccgccgctgggcctcgccgacacagcctgcgcctcatgggcgccgccctcggcctcggcctaggcccggtctcccaccacgatgactgcggcgccggatgccccaacctcagtcctcccgccgccgtgcctccccgacgcagcctgcgcctcgcgggccccgccttgggtactccaaacactctctccgctcgtgacggcagttcctccgggttcgggtcgggcgggagcgagaagaggtcggggagggcccgtgctcgagtccctgcctcttcgcttgctacatccatctcgccgaggactgggaactccaatagcgatggcggagggtcgggggcggacagggtttccgcgagcggcgacagctctggcggttcggatcccttcacgaccctgcggtcagggtttcggatcgcgaagcgtcggatggaggcgggtggggaggcggagactgggtcgtctcgtcgaggacaggtgcataacgaaatgctgcaccaacacgtggacacgccgacgaagcggtgtaagaccatattggtcggtggagtggagacagagcatgtctctgacacaaagggtgattctgatgaggattgtatgatgctgggtccaagtgggaccgaactgaattatgttgctacgaagactgaaaagggggatgtggatgatcctgccaatgcaagcaatggagaatctctgcagacgcataatctgttaccggcagcaaatggtggggtggttgagcaattagtatatgcttcaggaagtcctgcaagttttgaagcacaagtctctgcagatatgtgtctcaaggaaggttcgagccaatgcagttctaggaaggaaggcaaagtgaaagagaagcttgttttggggaataacaaatcttgcgcttatgctaatgtgggctctgcagtcgatacctgttcccacaaattcaaccctgatagcaaaggaaaggaaaagatggttgcagaagatagtttatcatctctgacctcgagcgaggatgagccagatttcgatccagtggattccaaagagactcagctcaactcaggatcagtttctgcttctatggagtcatatcgcagacaaaccgtaaaagaaagggctatcaagctggcccctaaatttgcattcttcaaagcagataaagatgagcatagtgaagatgacgatgaagagttagagcctggtcctgacactgaagactggccaggcccatttgcaactgcggcaaggatatatgaagaaagagaagctaagttgagagctcgagagttgaattctttaaagctggacgaatctgcaaacagggtcatccgttggtcgccttcaaaggataggaaaaatctagtacaagctcaagttgctccatcacttacaagtgtatgcttaaatacccttgcggaacattctgaatggattcaatcgcttgaaggtgtcccagaggagctaaagcacaagctgttaaagattctgtgtgattccaggaagatgaatactcatcttctcaataaactattgtgtgacagtcctacagaactgcatctcagcgagtgttcatggctgagtgaggatgactttgagaaaacttttgggaaatgcagcactgaaagtttgcaggatctacagcttgatatatctgggagatgcatacctgactacatattgccaactaccttagctaaggttcctaactgcatgccattgttgagaaaaatatctctgaagggaaattatcgactttctgataatggtttagtcacaatcatctctgccgcgccttctttatgctccctaaatctgtgcgagtgttctcttctcacttcatctggaatcgatattcttgcaaacaagttatgttcagttcttagagaactctatatagatgactgcacaaatgtggacgctatgacgattcttccttctctacagaagattaagcatctagaggttttgtcaatgtctagaatacaatctgtttgtgacaaatttgtgaaggggctcattcctgtacatggtttaaatctgaaggagttagcatttgctggttgcttgaaacttacctcatcttccatcaagactattggggaatactgtcaaaaaataacttcattggacctttgcaacttgaatcggctgcgtgactcagcaatgatgcatcttcgtggttgtaggctaataaggaaactaaagcttcaaagaaatgcattcagtgatgaagctgtgtctcaatatttggaagcatctggaggatgcctgactgagctaatgctaaacaatgttgaggttttagttccaacagacgtctttcgctgccaccgctgcgccgccctcggggagatcatctcgacgggggcagcaccctcatag

SEQ ID NO: 27990 - DNA, 1854 bp, Zea mays
  Peptide Sequence Number=SeqID_71365
atggacaaggatcgtcagggagctgcgcagaagcgccaggcggtcgtcaggcttcatgaggccaggccgaagaggccgcggggggctgcgaaggctgctgcccccggcggaagccagccgccgctggcggcgaagtcgaccgtccctgcatccagcagggcggcggaggctgcgaaggcggctgccgccggtggttccaagtctgtgaaggcagcccctgcgtctagcagggtgccagaggctgcgaaggcggcccgagagttgccgccgccgggcaagcgcgtcgccgacttcgccaccgacattagtgtggaagattatctagttgggtcggacgaaggccaacttgttgttgttccgcctgccgtggcgaccgcggcggctgtcgtggtgcccagggcgaagggcagtgctcttagtgccggcggcgagatgccggcactcactgccgtcagggacgaggcgggtgctgtatcccgccggctgaaggagatgaaggaggcactaagtcaggcggctgacttcgcagaccgcgcgacgtcgggggccctgacggcagttgtgtctgccgaagtcgagagacttcggacgcaacatgctgacgccgtccgggaaaagtcggccgccgacagtaaatgccacaagctggcggataaggtggccgtgctggagggtgagaaaactgacctccggcgccaactggcggaggagaggaaggaggctaatgaggccctcgccaaggcgcagtctgcgcaggcggaggccaatttggcgcgggcggagggcagtcttgccaggcagcgcgccgagcagttggaggagcggctcagcgctctgcaggcccgtgtggagagggccgagtcctcgacgcgcttggaggctgagcggacacgcaaacagcttatggattcataccatgagctgggcgcgcggaccgctgacttcaaagtgccggaccgagagcccggacttcgctgcctcgagtggatacaggaggagttgctggcgcttcccgccatcgtggaggggtttatgtcctatgcctccctggtcacctgcgagggggcgatgaacgcgctctctcgcgaagggtgccggcactatgaggtcttcgaccaagctgatgaggatttcgagcgcgatatctacaaggttgaagaccctgtggtgaaggaatccgcgggagccctctacgaccggatgtggggcccccacggtcgggaggtggtcagggagcgggctgagacggcgaggggtcaggcggcgcgtggcgagagggtggatgacttcggggctttgaacagcgtgctgcctgacccggagccgaacccggcggtggttgtgtccgaggccgccctgcagccgcccccggaaaccgccgaaggcgttcctgatgcccccgcagccactgcggccggcggaggcctgtcgccaactgccgcaccgagggctgaggatcctgtgaaggtggcggcggagccgacagcggaggatcctgcgacggctgggtcttcgcaggttcaaaagtttgggcctgcgcacgcaaccgctactactaattttttggcggcttcgaccgtggatgatggtaataaatcggatgggtctgcatctaagttttctgattttggtgactctgggagctcggttgagtggactgaggaatcgtcggatgaggacttggactactttgcggccttggatgtggcagcggcggaggcttcgccgcatgctgcggatgctgaagttgtgcctggtccgagtactgggcgtaggcggcgaagggcggttgcgaagcgtagagtgagtggggcggacggcggtcggcttcgtgtgagtagggctggcaggtag

SEQ ID NO: 27991 - DNA, 537 bp, Zea mays
  Peptide Sequence Number=SeqID_71366
atgggaggggcctgggacgagctcgcctgggccccgtgctctccgagcagggcgagcggtgttacaaatctaacccccttaacaggaatctcgcccccgagattcaagaagaagctagcaagacaacaagcatttgagaacaagtccccaacattggtgcccacctccggtgaactcacttccacttttgagctgatggctttgttcaacaaccaagccgaagtatcttcggctacgaagctggtgcttccaataacaggcggctcaggttcagagccggctaacaagaagcagaagaaggaagcaaaagaagggtacaacatgttggagtgcagggacccttcatcaagtcaaaatggtcccacatcccaatcaccttctcccaggaggaccttcagctcaaacattaccctcacaatgatgctatggtcatatcttgtgtcatcaagggatttctggtccataatgttctggatgatacatgtagtgcagtggatatcatatttgctaaggccttcagatagatgcaagaactag

SEQ ID NO: 27992 - DNA, 180 bp, Zea mays
  Peptide Sequence Number=SeqID_71367
atggcggctgggctccccagccacgacccctacatggtgaagccccgctccaatcccctttcccaccgcatcggcaccgcctcgccatgccagctctcgtcctcgtccacattcagcagccacgcgtgggctcgttgtctacacgcccccacacacctcgccgtccgccatcgtcgcaag

SEQ ID NO: 27993 - DNA, 234 bp, Zea mays
  Peptide Sequence Number=SeqID_71368
atggcctacagcgagtggacgacgcgcatcctggcgtcccaaccacgcccgcatgcgcggaggcggtggcaggagcagggcgagcgtgggcgctgcacgctggaccggctgggcgcgcagggctgcatggggcgctcggagccgcgcctctttgtgcgtcgtcaggggccatggggggcctgggacgagctcgcgagggccccaggctcgccgagcagggcggccgcgagctag

SEQ ID NO: 27994 - DNA, 138 bp, Zea mays
  Peptide Sequence Number=SeqID_71369
atggagagttatgatctccgagcagaatgtgaatcaaggcttgtgggttgcctttggtgcaatctatactcaggtaaagaagaaggtgtcgaggcggatctccaggagttccaggacttcgacgagttcgaggattag

SEQ ID NO: 27995 - DNA, 792 bp, Zea mays
  Peptide Sequence Number=SeqID_71370
atgtgctatggcacctctgaccctcctcgtcaccctcatggcggagttgctcctgatacagctcacgtcgtggctttgttccgaccgcccttctcagatgggtcgcgacgttctccggcagatttcaccacagcggctaggtttctatatcagctcatgagacggatgcttctgccacggatgggttaccgggaggctgccactcatattcagctttggctccttggtgccctagtttctcattcagagtttgatgttgtggattttctcatttgtgatatcaaggacatagtactggatggtctacgtgctcgtcgacagctgccttatgctcactatctgtgccacatctttgctcagctgatttggcccccacagttccagggtactcttgaggcctcttgcctcatctttgggtcgtaccgtccagctctagaggatcatgtgccggcacctactccagtgactgatactcaggccaaggataccacttttcaccagtttgagactcaggacgcaacagtccatgatgatgatgatgactttgggattccacctccgcctcctatgcctccacgctcacatgatcatgaggctggtagttctagtgctacccctgctgcccctcctgccattgaccctgctcttgcttcgatcctccaaactcttactcagcagcaggctcacttggcagccgagcaagcccgtcaggcagcgtcccaccagcagatgtccgagagaatgctctcgatgtttcagacgattcaggacaggcaggattctctacagtag

SEQ ID NO: 27996 - DNA, 459 bp, Zea mays
  Peptide Sequence Number=SeqID_71371
atgggtaagagtaagaagggtagcggttcttctcctcgctgtggcgacaaacgcaaacgtgagccgactcctccttcggaggacttcggcgactcggagtactcggaggaggagttctcctccgagtctgaggggtccccggctcccgtctctcccccggcgtcgtctgctgattcagacgactcccaggggattgtcgtggaggtctggacctacatccgggccgtcgagcgctccgggctcgaaggctcggatgagtcggagtgctcctcggatgaggaggactcctcggactcgtccgaggaggacagcggcggcgatggtggtgatggcggcgacgacaggggcgacggtgatggcggcgacgacggcggcaggggcggcgacagcgacggcaagggcgaccacggcagcggcagcaagggcagcagcaagggcagcaacaagaccagtggctag

SEQ ID NO: 27997 - DNA, 930 bp, Zea mays
  Peptide Sequence Number=SeqID_71372
atggaggccgcaaccgccgccacggcggcgatgatgtggttccggaagggcctgcgcgtgcacgacaacccggcgctggacgcggcccgccgacacggggccggcgctgcatccgcgcggctgtacccggtgttcgtgctcgatccgcgctaccttcgcccggatgccgtcgcggcgtccccaggttccgcgcgcgccggggtcgcccgcatccgcttcctcctcgagagcctcagcgacctcgacgctcgtctccgccgcctagggtcccgcctcctcctcctgcgcgcccgcgacgacgtcgccgacgctgtctgcgcggccctaaaggactggaacattggcaagctgtgcttcgagtccgataccgagccgtacgcgctggcccgcgataagaaggtcacggattttgcattggcgtccggcatcgaggtgctcacgcccgtcagccacaccctcttcgacccagaagaaattataaagaagaacggtggtcggccgcctttgacatatcaatcctttgtctccattgctggggagccgccagctcccgccatggaggaatactccgagctcccaccgctaggagacacaggggaatacgagctgttgccggtgcctacggtggaggagcttgggtacggcgatatcagccaggaggagattccaccattccatggcggagagacagaagctctgaggagaatgaaagaatcgcttcaaaataaggaatgggttgccaaatttgagaaaccaaagggtgacccctctgcctttgtgaaaccttcaacaaccgttttgtcaccatatctaaaggatgtgcacaggagcgtcagaaaccatacaaaaccacctgtttcattgacaggacaggtgctgttggacataaaggaacaatctggttacacggcttctttacttcggttctga

SEQ ID NO: 27998 - DNA, 513 bp, Zea mays
  Peptide Sequence Number=SeqID_71373
atggtaccgatccggggagggagagtcgcgccgcctgtagaggccgcgatctccgtcgacccggtcgccgccgccgggagcaccgtcggcgcgtctacgcctgtctgggctgccgccgcgtgcgccctcgcccagagcgtcgtcagcgcgtcggcgcctatctgggctgccaccacgcgcgcccccatgggggtgcgcggctgcccactgtgccgcctgctctcgcgctacttccctcgccagcctgagctcttcgttggtgttgtcgtcgacagaagcagagctaccagctctactgccgcgcagaacctcgagctctgctgccgccgcacgtgcagcatccgccgcctccgctgcttctacttccgctctcgctgctaccagttccgctgtcgccagccgtgctgccctcgccgctgtcgctgcagccgctgctgctgctcgctctcgttcttgtgccgcgacgacctcggcttcctgctagcgccgcgcactcgaagtgaccgagagtag

SEQ ID NO: 27999 - DNA, 462 bp, Zea mays
  Peptide Sequence Number=SeqID_71374
atgggcaagagtaacaaacgcaagcgcgagccgactcctccatcggaggacttcggcgactcggaatactcggaggacgagttctcctccgagtctgaggggtctccggctcccgtctctccaccggcgtcgtctgatgattcagacgactcccaggggattgccgcggaggtctggacttatatccgggccgtcgagcgctccgggctcgagggctcggatgagtcggagtactcctcggacgaggaggactcttcggactcgtccgaggagggcagcggcggtgatggcggagacgacgacgacgacggaggcgacggtgacgacggcgacgacagcagcaggggcggtgacggcggcagcaagggcggcaacggcggcagcaagggcggcaacggcggcagcagcaggggcagcaacggcggcggcagcagcaagggcagcaacaaggccagtggctag

SEQ ID NO: 28000 - DNA, 234 bp, Zea mays
  Peptide Sequence Number=SeqID_71375
atgtccgcgaccggcttctccaagcacaagcctacgccaaacgccactatgacagtcaccatcgcgacaaggagtttgcagtgggtgattgggtctggttgcgccttcctcaccgacaggttgcgaccctggtgcatcgccccaacatcaagttgggtcctcgctcgaggacaagctgtttttggaggccaggagagatgttatgactggcactcagtatcaccgccgacctag

SEQ ID NO: 28001 - DNA, 618 bp, Zea mays
  Peptide Sequence Number=SeqID_71376
atggcaactggacaaatgaagatgaggattaactcccttgttttgcttggtgcttggaccttatggaagcaccgtagtcagtgtgtcttcgagggcggcaatccaagtattgctgctattctggagcagtttatccactgggaaaaaggacgtgatgtgtttgaaaggctactgatagattctgactgggccattaacaacggcaactggctgtggctctcttgctcatccttcttctaccagtaccacagaatttactcccctattacattcgggaagaagtatgatcctaacgggaactacattaggcatttcatcccagtgctgaaagacatgccaagggagtacatttacgagccttggactgctcccactagcatccagaagaaagccaattgtattattggcaaagactacccaaaaccagtggttgatcatgagactgcaagcaaagagtgtagaaagaggatgggagaagcttatgcgttgagtcgcgttgatgccaaacctagcaaagggaagacgttgaactcacgccgaaaaatgctacatggtgaccgagacacgtctaactcaaccattgctaagcgactgaagaggaatagccgagctgagtga

SEQ ID NO: 28002 - DNA, 936 bp, Zea mays
  Peptide Sequence Number=SeqID_71377
atgcagcggctgggttactttggaagcggagttgggcgggctcaaggggctgaagatgtccctgagccggagggagagttggttgtgtttgaggctttttttgctgctagtcttcgtttgccagcacatcggttcgtggttgaagttctacggaggtttgagatggtggggaaccatctgttgaagtcttcacgaaaaattactgtctgcactggcaaaaaaaggaagttaggtggaatgattgctcagtttgggtactgcacctttacgccgaggactggaaagacctcagctgaagttatcgagattgttccgtgtgcgaaaataagtggtgtaactagtgggagttctggttttatgtggcaccatgcgacgtcgaaggttgcccagtttgccccttgctatcttgtgctcgtattgttatatggcgtttccacagttaaggtggcgaagggggatcaagacgaggaggtcgttcgctacgtagcccgtctgagcagtggatgtgacttggtggaaaagttcatcgctagcggagtgtggcctttggcgcacgggtgggctttgggagttaatggagatgtgcacgattcccggggaattgttgtcttcgcccgagctccaggaaacttcttcgcgcatgctgaagcagtgatggagaaagattgccaggacgctcaacgaaagaagcgggcggaggctgggcagtttgcggtggtaccgtcgatagtggctgccggtctaatgggtacggcgaagggcgacgcggggacctcagaggacccgtggttgaaattttgcgccgtcgctggaggcggaggtgaacttgcctcggccgccgccgctgctggtgactgccttcaccgagcaagttgcctcaggggcgctgacctcgcagtttgttttctagaggagatgactagagggaaggattga

SEQ ID NO: 28003 - DNA, 504 bp, Zea mays
  Peptide Sequence Number=SeqID_71378
atggcgagcagtctgcttgatgcgagccagatctttggtagagcgagagcagagagggcaagcaagcaaatgaaagagctagggtttcagcagcgggcgctcaaacaggtgaaaagctccagcctgggcccgactttttataggccaggagcagcgcctcgagaactcaacagtcccacagtaacacgtctcgtcaacggtcacatttcaaaaaaaacctgcaggaccacttcgagcgagggcagcatttttgccatcttacgacagatttcgtcaccagctgacttagtcgaactggtccctcggagtgcaaatgttggggcgaaggcgcaacgccccctcgctcgagaggccatcgtcagaggattcaagattggagaccctgaaggcttgaagagtgagctacattacgaagtgcatggggagaacgcgcaggcaaagactcgggtgctacctccacctggacaggctagggcgaagaccatcaaggacttcggagactga

SEQ ID NO: 28004 - DNA, 588 bp, Zea mays
  Peptide Sequence Number=SeqID_71379
atggatctccctcgcatttgtgtggagaatggagttattctggaggacagctcgaaggagtttctgcctacgcccagcccgttgacagaatcactagccttcacagctggatcgtcatcttcagcaccaccagcaccagcagtccaagcccctgctctcgaaggcgacgacccagacgactctggtgatgatgatgaaaacttcaaagaagaagaagaaggagaccatcaacgaggaagccaacgccacacttactggcagcagctgcacaacacgaagtacagacaccttccgctgcgtcttcgtggagaaagccagaccagcattgttctaggtggagctgaagaagatcgcctcaacaccctaattggtgtggtggcaggtcttagcaccgacctggatagtgctaccctggacctctctagggtacacttggagctagaggatgcacacgtaaggattgcagccctggaagctcaactagaaggaagggatcccctggaagctcaagtccctgccatggcgttgtcccctccccgcaagaggatccgctatggagaaccaggatccatcaccaggctgctatag

SEQ ID NO: 28005 - DNA, 321 bp, Zea mays
  Peptide Sequence Number=SeqID_71380
atgaaggaccatcaccgtgccagccctatggctacctccgcgccaatgactgatggccccgcctcgtcattcgcggttccccatccacgcgctcctgctatcactgttgtgtgggtcttgtttgtcagtgctctcctcaagctcaggatcctggccgaatcgttgggcgaggggaagggaatttctcatcggcatgacaccgtcgccgctgttctgtcgtaccgcgtcgacaacctcatcctcgtcaccaccgatggaccttcggcgatgaagcagacccccaacagtagccccttcgtggtgctagatcgtttttcataa

SEQ ID NO: 28006 - DNA, 117 bp, Zea mays
  Peptide Sequence Number=SeqID_71381
atggccaggtgtccctgcttcgccgccgtcgatcattatgttaatgggaacatggagcgaccacccgggaaaacagtgctaccacaaaggtttaatgggacacccttggctgattaa

SEQ ID NO: 28007 - DNA, 339 bp, Zea mays
  Peptide Sequence Number=SeqID_71382
atgacgaaggaagggaggaggaatcgatctactagccaaccccacaactggaggattatcaggcaacagcaaacagaaatgaatcctccaaatcctccaccggttggaaccgatccagtggttgccgcccaaatgctggtactacaacaaatgacaaacatggtgaacgaaatgcaaaatcatataaggcaagaacgccaggaaatgcatcaggaccggctggagatgcatcaagaaacgaggcaaggacgattggaaagacaacaacaacaacacccactacctccaccaccaccacaagctccactaagctacatatatatatattactatttgtaa

SEQ ID NO: 28008 - DNA, 369 bp, Zea mays
  Peptide Sequence Number=SeqID_71383
atgacagaccatcatcgtgccagccctgtggccacctccgcgccagtaactgatgggcccgcctcgtcatccgcggttccccatccacgcgctcctactatcactgtcgtgtgggtcatgtttgtcagtgttctcctcaagctcaggatggtaacaaatcccgcgctgctcgccgatatgggtgggaggcagtggtctcagctggccaaatcggtgggcaaggggaagggaatttctcatcagcacgcctccgtcgccgctgttctgtcgtaccgcgtcgacaacctcatcctcgtcaccatcgacggtgagaacgcctctgtatggctcgccttcatctctgctccgtctaccgtcccttggatttga

SEQ ID NO: 28009 - DNA, 441 bp, Zea mays
  Peptide Sequence Number=SeqID_71384
atggcgtcccctgctcttcactgcccggccaggaaacgcccaggccaggagcaccttgagctcgcccttgcttgctccggatgctcgtcttccccggcgccgtcaggctcctccatggccgtcggccccctgcagcttcccaagcgccccctctctccgtggcgagcagcaagctggcgcccccctgctcccagccatggcgtccagaaaatcctcccgccgagccccaagcagcggctcctccctcggcacctccccttgagcagcaaccgcgacaacttcgcgctttggcggctccctgttttgcgcagtccagtggacagcaccacccctccctccactttggctaaagcatgcccgaccctatacagcgcagctcctcgcagccgagatttcccccacaaccccgcaacattggcgcttcgcgggtgttcgatgtaa

SEQ ID NO: 28010 - DNA, 192 bp, Zea mays
  Peptide Sequence Number=SeqID_71385
atgacgaacatccttgaggctgagggcggaccaagatcacagctcggcttgcctctccccatccaggggctggaggtcaccgttttgggtgaccaccggcggaggggtgcaaccgggctggaccgggaaaggggaataccccgaaaaggatccttccccgtgaaggaaccaggctttgagcctccctactga

SEQ ID NO: 28011 - DNA, 498 bp, Zea mays
  Peptide Sequence Number=SeqID_71386
atgcggtccaagggtctctgctctgaaggacaacgtcatcaccaagcccgggccatcgccaccagggtcttctccgagaatccggcccgagcaggcggctcggccggtcaccccgaggcctcggccagctgtcctccaaggacatcagcccggcccgaggcctcggcaggcctcgacagccacgatgaacaaaaacactggcattcgaagtgccattacaaacggaactctggttccgtccccgcggggtatgtacaacctccacaccggggggcctgcggggcgacgggcaccgggggacccgccagcgacctctgcagtagcagccatggtcccaggacggacgcggccgctggagggctctcgttcgcgttcccgcttaagggacgcgaaccagctattaaagccaaagagcgggctgctccaaagggcaccggcaggtcctcgctcccgtcctcgccacgaaagcgaggaagagggtggaatgttgcatcctag

SEQ ID NO: 28012 - DNA, 441 bp, Zea mays
  Peptide Sequence Number=SeqID_71387
atggcgtcccctgctcttcactgcccggccaggaaacgcccaggccaggagcaccttgagctcgcccctgcttgctccggatgctcgtcttccccggcgccgtcaggctcctccatggccgtcggccccctgcagcttcccaagcgccccctctctccgtggcgagcagcaagctggcgcccccctgctcccagccatggcgtccagaaaatcctcccgccgagccccaagcagcggctcctccctcggcacctccccttgagcagcaaccgcgacaacttcgcgatttggcggctccctgttttgcgcagtccagtggacagcaccacccctccctccactttggctaaagcatgcccgaccctatacagcgcagctcctcgcagccgagatttcccccacaaccccgcaacattggcgcttcgcgggtgttcgatgtaa

SEQ ID NO: 28013 - DNA, 66 bp, Zea mays
  Peptide Sequence Number=SeqID_71388
atggctgctggccgagctctcctgctggccaccagcgaactggagttcggacgaacgaaagattga

SEQ ID NO: 28014 - DNA, 549 bp, Zea mays
  Peptide Sequence Number=SeqID_71389
atggccggagcgacggtgattgatggagatggcgcgacggggaggatggccggtgaattgccgggtcgagcgcgagcggcggcggcgtgcgcgggctgtggcgacagcgcgcgcagaggtggcggtgcacggggcagggcgcgcgcgggggaggcggcgcggggaagggcgcgcgcgtgggggagggggcgcgtacaggtggcggcgcgcgcggggtacggtggcgatgcttggggtggcggggagcggggccgggagcgcacgcgggcggcggcgacggcgctcctgggtggcggggaggggggctgggagcgcgcgcgggactttgccgagtgcggctctcggcaaaggcttctttgccaagtgcccaacaaaaagcactcggcaaagctcttggcactcgtcaaaggcccggattccggtagtaaattgggtgcttgtgtgaagctgaggcctcgtagcccctatggcgtcgtctactgggttgtgcttctaggcctcgtagcccctatggtgtcgtctgctgggtcgtgtgccgctgtacccctg

SEQ ID NO: 28015 - DNA, 468 bp, Zea mays
  Peptide Sequence Number=SeqID_71390
atggatggcggcaaccactcccgcagcggtgagtcccccctcccgcaacactttcagggcctggagaaggggtttgaggttcttctgtctctcgtgcggggtcccatgacgccaggcgtcggtggcggcggtgactacccgctgggagaacggtgggagcagctcaccgtcattccggagggaccgggaaagggggatcccccgaaagggatccttccccgtgaaggaaccaggctccgagcctccttactgatcaggggttcgaaggctggcccccgaagggttcaacagccgcctcagatcgcgtgggccctacacccactactggtcagaggttcgaaggccggccccccgaagggttccacggccgcctcaggctactcgggctccgtgcccattactgatcaggggttcgaaggctggcccccgaagggttcacagtcgcctcagacgccgagcgagggatga

SEQ ID NO: 28016 - DNA, 1191 bp, Zea mays
  Peptide Sequence Number=SeqID_71391
atggacttctccaccggcgggagcgtgagcgggggcggcggaggcgccagcgacggccccgcgcaggcggagcgctggctggagatcgccgagaagctcctcgcggcgcgcgacctcgtcggctgcaagcgcttcgcggagcggtcggtggaggcgaacccgctcctcgccggcgttgacgaactcctcgccgtcgccgacgtcctcctcgcttcccagttcatgggcacctcgggccagccggacccgctcgccatcctccagctgccgcccggagtcagccccgaccaggccgccgtgtcccgcgccttccgccgcctcgcgctcctcctcggtcccagcaacccgcacccgggagccgagatggcgctccgcctcgtcaacgacgcctacgccttcctctcggatccctctcgccgccccccgccgcccgccgatcccgccactggtaccccttactcctcccagtatcccgccgcggccgctcccgcctccgacaccccggagttctggacggcgtgccccttctgctgctacgtgcaccagtacccgcgcagcctgatcgggcgcgccctcaagtgccccaacgcgggctgccgccgcggattcgtggcttctgagctcccgaccccacccacggttgtgccgggcactgaaatgtaccactgcgcctgggggttcttccccctcggatttcccaacgcggccgacctgggtgccaactggaagccattctacaagatgttcccttggaacacggctcccagtggccaaggtggtggtggtaggagtcacggaaaccatggtggtaggcagccacagaatgacagtgctcgtggtggctcttctagaggtaggatcaagaagacgacggcccgcaagaaggtcggggtagggctcaggagacgttctcttggtgtggagagtggcattgattcttcgatgctcgggcaggaaggctgggctggggatgagaacgctggagatggaagggccgaggaggtgaggagaattaacataaatgaggcagcacatgctacagatggcactggtagggttaatgttagcggtgctggcggagttgaagatatcggcaactttcatatcgatgttgatgcatccgaggatatattggggaatttgcacaacatgcacttcttgagggtggacaatcttggacggatgatttaa

SEQ ID NO: 28017 - DNA, 294 bp, Zea mays
  Peptide Sequence Number=SeqID_71392
gacgagttccgtgttctgattcttggtgttgacagagctggcaagacgactttgctggagaagttgaaatcgatatatctcaagggggaaggacttccgcctgaccgtgtcgttccaacagttgggctcaacattggccgcatcgaagacgcaaaggcaaaacttgttttctgggatctaggtggtcaggatttacctggagccattgatgaggaagaattggctaaatttctgcataaagaactggatgagaggccatatacatttcaggctgtatctgcatatgatgggtga

SEQ ID NO: 28018 - DNA, 699 bp, Zea mays
  Peptide Sequence Number=SeqID_71393
atggcgcctcctgttgacgtggccggtccgcgccctaggttgggcgatgtggaggctcctccgaggtcgaggtcgagtccgtcttccgtggccgaggccgagttcgagcccctaggtcgggcgaggcggaggccgttggctgaggccagggcagaatttgagtcctggggtcgggcgaagcggagttcgtcatcttctggggctaagcccaagtccgagccctgggtcgggcggagcggagttcgccgccttctggggctttgtccgagtccgagccctgggtcaggcggagcggagttcgccgtcttccggggcttagcccgagtccgagccctgggtcgggcggagcggagttcgccgtcttccggggctgagcccaagtccgagccctgggtcgggcggagcggagttcgccgtcttccggggctttgcccgagtccgagccctgggtcgggcggagcggagttcgccgtcttccggggcttagcccgagtccgagccctgggtcgggtggagcggagtttcctatggtgtgcggccgggcctgactgcctatcagcctcactctgtcaagtggcaccgcagtcggagcggcgcaggcggcgctgtctttctgtcagaccgctttatgctgatgggggttaccagctgagaattaggagacttgagggtatccctaattatggtccccgacagtag

SEQ ID NO: 28019 - DNA, 384 bp, Zea mays
  Peptide Sequence Number=SeqID_71394
atgtccttaagcttctgccatgacgtgattgtccctggccggagagaagagtaccatgtctgtgccacacttcagactgccatgatgaaggactttgccatgactgcggtattgcccccatacgaagatatagttgcttcgtatctcatcagaaattgctttggatctgagtgcccatcatacatgggaagttggggtggctttggctgcaatgcagcccctagccctgaagctttcttcggcggcatgacgaaggtcgctttttgccgaaggtggtcaaatgagttcaccggaggatataatgatcttcagacgagggtcatgaaggtaataccttcattatcgcagtacaaatcaatgaaaggagaagcatatgaggcatga

SEQ ID NO: 28020 - DNA, 594 bp, Zea mays
  Peptide Sequence Number=SeqID_71395
atgacaaaggaggccagtttcagaggccacaacacagttcacaatcttcaggacagcagcagagctccttcaggccaccagcttcaaggggccgaggcggcaagggcttcggaggaagatatggggatcaacccaggaaaatctattgcttattttgtggtgaggacaagggccacactacaagaacgtgtcaaatcaccattcagaagcaaaaagaaattgccaaagcagaagcccagcagaatcagccgtagcaggtcttgcatactgcttcgtgccactctccctacataccagaatatgtgggcaatcaaccttcagcctttgttgcttcagcaagccacacacaagcttcctggcctcagcttccaccgccacccccattacaacctacttatacccgaagccagcagccagaagggtgccaacacccacaacaacaacgtgacttcagggaggagtccgaagctcgtacggtcaacagcaccgtaccagaatcaaaacacatctactgagcaatatccttcttctgaaatacttttactttctatgccattttactttctgtacgaggaacaagcaatggaaacttag

SEQ ID NO: 28021 - DNA, 4083 bp, Zea mays
  Peptide Sequence Number=SeqID_71396
atggttaacagagagccgcccgcgagatcgatccccgcgcggccaaggatcatcggccgccatggcgtcctcgcaaggggagtcggtacccccgtggctcaagtctctccctctggcgcccgagttccgcccaccgtggccgagttcgccgaccccatcgcctacctcctcaagatcgagcctgccgcggcgccattcggcatctgcaagatcgtgccaccgctcccgccgccgcccaagcggaccacgctcggtaacctctcccgctccttcgccgcgctccacccggacgatcccaccccgacattccccacccggcaccagcagctgggcatctgcccgcgccgcccccgccccgcgctcaagcccgtgtggctctctccccaccgctacacgctccccaagttcgaggccaaggccggcgcctcccggaaggcgctgctcgcgcgcctcaatgtccccgcctccaagcagctctcgccgctcgacgtcgaggcgctcttctggcgctcatcggccgaccgccccgtcgtcgtggagtacgccagcgacatgcctggctccgggttcgcgccctgcgccgcacgcctgacgcagctgcccccggcgaacgtgggcgagacggcgtggaacatgcgccgtgtggccaggagccccgcgtctctgctgcgcttcgtgcgggaggaggtgcccggggtcacgtcgccgatgctctacgtcggcatgatgttcagttggttcgcctggcacgtcgaggaccatgacctgcacagcctcaactacatgcattacggggctcccaagacgtggtacggggtgccgcgcgacgctgcactcgccttcgtggaggtggttcgcgtccatgggtatggcggggaggtgaactccttaggtgaggcggctgcattgcatcgttttcctactctgctgttattagttcagagtgcaggggagttcgtggttactttccccggagcatatcacagcgggttcagtcatgggttcaattgtggggaagcgtcaaatatagccactcctgaatggttgatagttgcgaaagaggcagcagtccggagagcttccatcaatcgtcctcccatggtttcacactgtcagttgctctatgaacttgcgttgtcattgtgcttgagggatccatcaaatgacgttatggaaccacgaagctgtagattgaaggagaagaagaaaagtgaaggggaccaattgatcaaaaagatttttgtgcaaaatgttattgaagacaataaactgcttggtcattttctgagtgatgggtctccttgcattattcttccagtcaattacaatgatggctctccactatcaactttgctctcaaaatttcagtcaacaactgattcaaggatatcgcatggccagtgcagtaaggcagaagctccaaaagactccagacgcttaccaatggatggggctgacaagaaccgggaattgtcatcatccaacaaaaattcattgtcagccttctcaggaaagacagtcccactcccacctagaatctgcatacatgaatgtgcaaatgtgactggggcatcacacgcacataatgcagaaaatgacaaggtggatatgaacagtgctgctgggcttttagaccagggtttattatcctgtgtcacctgtgggattttgagtttttcatgtgtggcagtgatcaaaccaagggagtgtgcagcaaaatggttgatggctgctgattctagtttgatcaacgatcggcttgctagttctggagaacatgatatagatgcattacaaggtgggaggacaactggtggaattttacgatcagattctgaaatgaatggcaatagtatagtttctgatgctgatgctgcacctctcaatgggcattctgctcttgatcttttggcattagcttatggagatccatcagattctgatgaagatgttatgaacataaaaaatcaggtccctaatgtctccaatgaattaataaatcacacgattgaatcacaaccatatacttcatgtaatggtgattatgatggaacaaaagtgtcctcaagtagtaaagaacgcgaacaaggaccaacttcccatagctcaaagtgtattggtaactcaaacaccttgaatggaccaaaaggtgttcgcactagaaataaggatctacttaagatggtgctttccgaaggttttcaaccaaaaggtatatgttcagaaacgcataagaaggttcagtgtgagccatcaagctcaaaaaagacttcaatggagatcccttgtggcacagattatcatgttagccataacagtggtacaatctgtatggacagcagcagaggctctacaactacaactatggtgaacaacttagttacatcagttgtgaaacctgataaggattcatcaagaatgcatgtattttgtcttgaacatgctattgaggttgagaagcaacttcaagctattggtggtgctgatatttttcttttatgccgtccggaatatcccagaatagaagtagaagcaaaattgctggctggagaaatggatttcgagtatgattggaaggatattctttttaaagaggtcactatcaaggatagggagaagatacaggaagttgtgcgggatgaggaagcaataccaacaaatagtgattgggctgtaaaactgggcattaatctgtactatagtgctaatcttgctaagtctcctttatacagtaagcaagttccatacaatagagttatctatgaggcatttggctgcggttctcccaatgactcaccagtgaagctgaagacttattccagaaggcaatgcagggcgaagaaaatagtcttggctggcaggtggtgtggaaaagtatggatgtcaaaccaggttcatccatacctggctgacagaatcaaaaatcatgagccgaaagaaatcgatgaaacatttccttctgatcagaaatcccatgctgaacctgttgaaaattcaagtagagaggcagcctccacaagaaagagtagcagcagaacaattgaaggaaaaacaagcaagagggagaaagaacagttggagaaagctaatgccaagaagccaaaatttactgaagaggacaactccaaatcattggagggtactgctgaagcctccacacagaagataaagggcagatcagttctagaaaaaacaagcaagaaggagaaagcgtataccaagaagctaaagcatactgaaaaggtctcggaagcactaaaaggtccttcagaagcctccttccctgcaccagctgggatggtagtccgcagcagctctaggatcgccaataggaaaatcatgttgaaatcaaagatggaagaagaggataatggctcagctgaccgtccaaagtcaaaggtcgaagacgacaaagataatcctgctggccgttcaagagcaaaaccactaaggcaaaagactaaagtagacgcgaagaagaaaacgaaggaaactagagtagaaaagcgaaaggctcccagtccagcttctcagaaggacgaagaggagcaatcagatgatgtcgagggacgttctaccactaaacaacggctgtctttacgtaagaagggggctaaaacagaaggaaaacagcgaatggagaaacccagattcgggggaagtgctcctcccccaagctctccgaagcgcaaggaagagtacgtgtgcgacatcgaaggctgctccatgagtttcggcacagagcaggcgctgtccctgcacaagaacgacatctgcccggagaagggctgctgcaggaagttcttctcgcacaagtacctgcagcagcaccgcaaggtccacgccgacgaccggccgctgaagtgcccgtgggagggctgcggcatggcgttcaagtggccgtgggccaggacggagcacgtgagggtccacacgggggacaggccctacgtctgcctcgagcccgggtgcggccagacgttcaggttcgtctccgatttcagccgccacaagcgcaggacgggccatggcgcgtccaagaaggcgaaagcgaagaagcaaggcaaagcagcagtaacttag

SEQ ID NO: 28022 - DNA, 90 bp, Zea mays
  Peptide Sequence Number=SeqID_71397
atggaagccgccgtcgacgctatgctcgccgccgcgagccgtgccttcacgagcacctttgccatcgccatccagatccaggatacctga

SEQ ID NO: 28023 - DNA, 369 bp, Zea mays
  Peptide Sequence Number=SeqID_71398
atggtgggtccccggcgaggcgaggcaacccgagcgaaccccggatccgaatatgcggggacgacaggggtgggggaaggggcaccgaggacctgcgcggaggagggcaaggatggcgaggtgtgtgggcgggcgtggggcgaggatggcgtggatggtagaggagcgggggcatggtgttgccttgtggatggtggcggcgaggatggtggcggcgagcaggcggggcgaggattgtgggatctgctggggaggcaatccctggaaccatgcccttccatcgatggagtgttgggcgagggcgagaatggcagggcggagtgttgggcgagggcgagaatggcagggcggctgcagaggcttccctga

SEQ ID NO: 28024 - DNA, 279 bp, Zea mays
  Peptide Sequence Number=SeqID_71399
atgaagctgaaacaatttgcttcttcatgtggttggtgcaaggttattcttcactgcgacggcaacgccaacagcgaacttggaggtgttgcggctctgcacacctcttgttcttctagcagtttaactttgctaattgaagctgcaaaattaacttcgacagcaacaaggctagaaggttttgatggaaccggtcgtattgaaccgagaaagagacgcagcggaccgcataaaacggatgcctataatttgtctatcaaagaaattaccgttatttag

SEQ ID NO: 28025 - DNA, 969 bp, Zea mays
  Peptide Sequence Number=SeqID_71400
atggaaggagcgcggtggctgcaaggagcgcggcgactgccatcggcggcaaatgctgtgggcgcggggaagcctctgcagccgccctgccattctcgccctcgcccaacactccgccctgccattctcgccctcgcccaacactccatcgatggaagggcatggttccagggattgcctccccagcagatcccacaatcctcgccccgcctgctcgccgccaccatcctcgccgccaccatccacaaggcaacaccatgcccccgctcctctaccatccacgccatcctcgccccacgcccgcccacacacctcgccatccttgccctcctccgcgcaggtcctcggtgccccttcccccacccctgtcgtccccgcatattcggatccggggttcgctcgggttgcctcgcctcgccggggacccaccatggcggtcagggagcatggtgggtgggggagatggggaggagcggaggaagcacgacgtcctctaggaagaagcacagccgcagccgcccgcaggctatggacgatgacatcgacagctcctgctccacccccgttcgccagcgcgccatccagccccggacgtccccacgccatcggccgcagatgcccgtgatgacgtcctcctcggtatcccctccagctgggtggctccgcaccgcatccggccccggccccggatccgacgcaactcacacatcgccaggcacccgcaaaatcccacccgacgccatcagcgcccgccatgccatgccccagaagcccgtccgcggttgctgctccaatcccttccgcggatgccgcataatcccaactgacgcagctccgcctcaagtcgtccttctcaggcggcgggtccggccgtccgggtgcgtcggcttgggcggcaccgacgggtcctccttggacaaagcgctaattggaatgcctactcgcactatgctgctgcctgagccttga

SEQ ID NO: 28026 - DNA, 156 bp, Zea mays
  Peptide Sequence Number=SeqID_71401
atggcccacatatcagatattaaactgataagaacagatactacacttgatcttagccaaaaggccgagaaaggcagatctgttggagtcgaaaggacaaccaaaagtctgggaccaaaaatgtcgattgggataccagaaaataatgtcccctga

SEQ ID NO: 28027 - DNA, 744 bp, Zea mays
  Peptide Sequence Number=SeqID_71402
atggcatctcttactccaggaatactattaaaggttctgaaaaatattaactcagatgtgaaattcatatatgttgagaaggtacagtcaagtatccctgtcccaattcttgtaagggtccgcccagttccaggaaggaacccttgcattggaaacccaaaggatttgatgcaaatgtcaactccctctgggattacggaagcaccggatcatcaacggaggacttccaagtcagctgatatgtctgaaagtgaaaaggaaaatttgcagaggaaggtagttatcaaagagcagaagatagttgttgcttcccgttacatgcttggggtatcaagcaataacgggaaaattaccagtctcaactccagcattgatagtgacaaaagtaatggaggaagcaccatatctgaaccaaataaaaaatctgttgccccaaaagttagacaagaggcaaaacctcagttagtttccacaaagcaagaaattagcaaggacacacgcaagaatggtggcgcttcacctagtccaaatggttgtgctgtagtcaagaagcaaatgccaaaggagagcaaaaaggaatctgctacagaaagaagatcaccaccaaagctttataagagttcaccaacaccagcgaggacttcaccaacaaagctcggtccagcagcaaagcagaatggaaactctagtccagtcccttctatatctaccgttaaaagaagggttactgaaactatctattag

SEQ ID NO: 28028 - DNA, 201 bp, Zea mays
  Peptide Sequence Number=SeqID_71403
atggatttaggcgatgcttatgcaaacaaatttatgctaataacatgtttgtggtgtacggattctggagaattccagccagttgtgcctgttgtgaaagccgagccacttaaaaatcagtgggctgatgaagatgttgaagaagatgatgtaaaagaatcatgggaagaagaggaggaggaggcaaatgaaattatatga

SEQ ID NO: 28029 - DNA, 1467 bp, Zea mays
  Peptide Sequence Number=SeqID_71404
atggttgctcaactttattctggtttggtgaaggtaccacatgatgtcactggttgtatgataacagctagaaaaagaatgccggtaacagccggagatatgcacagccgatacattcctcagcaagattacttctcagagggactctacacgttcgatattgggcagaatgaccttgctggtgagttctattcaagaacagaggaccaggtcatcgtttccattccaactattttgttggaatttgagaatggtctcaaggctgttatctctagcagacggctgagtaattatttatctactccagagcatcactcatccgagttaaatgcctctgctgaccttttaaaccaccactttaagagatataccaaaaagccagatgctcttcagaaagggattagcccaagtgatgctgcattcacactgggaattgctccagctttagcaaaggagcatcttctaaatgcagaaaacaaaggactgttgtgcagagatgttagtccagatggattccgcttttttagcaatttatttaaggtggtctttgttgaagcaattgaagcccaatacgcattcaaaaaactattatatacacgatataaggatactcctctgtatttggagtgtgcacctgaaaacatattgtctcctacctcagcaccggtggatgaggaagtaaaaaacgaagatggcaagcgtattcttactaaagctaatatagatcaaactgtagaaggagtaagcgctgaagatattgatccagatagagtggaggtagcaagtgatgctcttcagaaagggattagcccaagtgatgctgcattcacactgggaattgctccagctttagcaaaggagcatcttctaaatgcagaaaacaaaggcctgttgtgcagagatgttagtccagatggattccgcttttttagcgatttatttaatgacattgatcccccaaaatattcactcgcaaaaaccccatgggatgtacaatgcgtggatctccgttgcgatggcgtctcactgaaaagttcgactgggaatcagcaacaacaagatctatcagaggcctccctatggcttccattacaggtcttgaaaccaactacaaagcagaagttgcgttttgagggagattcgtacaagaaggcattggcggagttcctgcaggctgtgccagcgtttctgggcggtaaatgcagctgcctgcgatgtgagagtcctcgtgatgattcagtgatacaggcaggggaagggagcaagaagcagccccgcttggtcagcgttgatgacgggtcacctgtcacagacttggacttcgacttggatgaagaagagatcccatcaccttatagctgcgagaacgccatcagggctgtgataatcgacctgctgatggtgtgcatcttcgtcgcgtttctggctgggatgatcgaccctgcatccgttccagctagtgcctga

SEQ ID NO: 28030 - DNA, 693 bp, Zea mays
  Peptide Sequence Number=SeqID_71405
atggtgcatctgcacttgcacccgtatgtggtcgggaaggccgccgacgaagagttccacccgctgaaccgaggatacactgtcgacgtgacacgcaagcgcttggaagcgctcggcgaactcctgcaccgtggactgaaagggaagccgacccaactccgcaagtcggctgccctgtattggcggcccgaaacgcaggtggcagagttctcggaaccgttcccacgtcggcatgccctcgtcctgctcgagggcgtagtaccacgtctgggccgtgcccctcaagtgatgtggggaggtgttcttatctggaactcaccggactgttcacttggttccaagaaaactcatggtacccagaagaaaatgtcatctcaggaacttatggaggcactcgaaatatttgttggacaactaaggcagctgtttggtctaaaaccatcttatttctcacaagatatggacgttccaactaaatttctagttagtgaaaagggcttcacagaatgggagttagatttattatatcggcaccatgcacgttccaatctgctgtcatgcctcaccacattggagtctctatccagtctggtccactctctccctaggatgattgtcatggatgaaattggaagacaggttctacctcgtaccactctggctagatgggagctcatctcaattgatctgtaa

SEQ ID NO: 28031 - DNA, 354 bp, Zea mays
  Peptide Sequence Number=SeqID_71406
atggcgagcggggaggggcgcaaacctcgtgcgatgggggagatgaagagatgggagcagatctcgcgggggttggttgtggagagggttaatccccagttctacgcattcagatggataaccttactgctgacccaggaattcaacttcgccgacaccattcacatctgggacacactattaagtgatcctggtggcccccaggaaaccttgctcagaatatgctgcgcgatgctgatccttgtccggaagcgcctcctggccggcgacttcacctccaacctcaagctcctgcagaattacccaccgacgaacatcagccacctcctctacgtcgccaacaagctgcactga

SEQ ID NO: 28032 - DNA, 837 bp, Zea mays
  Peptide Sequence Number=SeqID_71407
atggcgagctcgccgcgatctcctccgccggcgcctacgccggaattcgagatctctcggcagtcccgcctctttgcggcgctgtccaagaaggtgatagatctcgatgaactgaggatgctggcggctcagggagtcccagacgcggcgggcgtccgagcaactgtatggaagctgctactgggctatctgcccaatgaccgctcgctgtgggagcaggagctggcaaagaagagagggcagtacgctgctttcaaagatgagttccttacaaacccttttatggccaccaatgcctggctaaatcctctcccgaaaatagaggttctgaatcctgaatttgctaggtcagaggtaacccgagaggagcaccctttaagccttgggaagaccagtgcttggaatcagttttttgagtactcagagattatggagcagattgaccgcgatgtaaagcgcacccaccctgacatgcagttcttctgcggcgactcgtcttttgcaaagtccaatcaggaatctttgaaaaatgtactgttaatctttgccaagctgaatgctggaataagatatgtacaagggatgaatgaagttttggcacccctcttctttgtatttcggagtgatccggatgataaaaatgctgaattcgcggaagcggattcattcttttgcttcgtcgagttgcttagtgggttcagagacaacttctgccagaaactggacaacagtgctgttggcattcgaggtacactagccaagttatcacagcttgtagcaaagtatgatggagaactccagcaacatctggaaataactacggaagtcacttattga

SEQ ID NO: 28033 - DNA, 498 bp, Zea mays
  Peptide Sequence Number=SeqID_71408
atggaacctacaagctacacccgcatagtaacaaggaaccgatttgaattcacaaggagggagaagggaagagatcgcgccacagatgcggcacccgcaaagtaccttctcgtcctggtgaagggcgatccagacgtggaccctgtccatggactgccagaagaggaacgccccgaagtagtaaagcagaaacaagtgtcctggaggctgcgagcgcgtagaaggaacggcgcagtggttgtgggatgggacatgggagggccgcggcggcattgcctggactggagggcgagctgccctggggcaagaaggagcaagcgcagggaagaccagtttgctcgtaatggtgggggatcaggtggatccattcgtgagagcctggcctgtgcaatgctctaccaatgcaccccaaggttcaatggcttcatcactggctgcgttgacgtctgcagggagccagggactgagggacaacagcctccaggtccaggaaggtga

SEQ ID NO: 28034 - DNA, 579 bp, Zea mays
  Peptide Sequence Number=SeqID_71409
atgggccgcctcggcgccggcagtcgcgccgcatcctcgggagcagccgccgtctggagggacggccaagccgttgttcgagtcgaggccgcctgcatggccgcgtctggccggggcttctgtgcccgcaccggttcgtgcgcgcctgcgcaggagggccgccgaggcgtgcccaccccttgcggttggcaaatccggccggatccggcggccatcaggggccgtgcgccggggcctccctggcccgcgcctggccggagtcgcctccgcagccagggcgcaccgcacctgcgcctggctgggtcgcctccgcggccggggcccaccgcgcctgcgctggcgcccgaccgtgccgaggacccgtgctgtgggtcgcgctcgcggccggtgtggccgagccgcgcccgcgccacgcgctggccgtgggcggatccggtcgagcccgcgctcgcacagaacctacctattggtggcgtggcgcgcgagattccgcgccctacgtctacgtggcaccgtacccgttgggtgtcccgccgaggcacaggaatccggaacctgcgctgcgtgtgtctcatatag

SEQ ID NO: 28035 - DNA, 1038 bp, Zea mays
  Peptide Sequence Number=SeqID_71410
atggccgataaagacaaaggcaagggcatcgtcatcagcaatcctcgcatgtcagatatatcacaaaaggagattgctcgaaaggcttcggacgagaaggctaaaagagatggggtagctagtgaaaaaataacaaataatgacgaaaggggatatataggctccacgctgccatgccattgctgtctccacaacaacgagaaggtctcgtacctaaacttccctccggagcctgcgggtggagtgctgccggctcagcaggatgactttggccagggagagtgggaccagtggattgtgaatgaacagcccattcagcaggccccgcagccctttttgccagaggagcagcacattcagcaggaagaactacaactcagtaaccaacactctggcttgtcgtcagatagctccattggtgctggtcagcttgcaccccttccgaatggtcatcttgcggtgaatggtcatgcgctgcttggggatggaattgacatcaatgttgccccatttattgggcctcaggaggtcgatggactggtgcctcaggtggatcatgtccatgatttggaggtcgtgccccctcaggcccatgttgatgagcctaacaataataaccctcagaatttggagatgaacttcatgctccatcaggaatggcagcctgaccccgtcttccagatgtttgaagagaggagaagagctgtccagttcacttggctctgggccaaatactttgctccgtctgggtcgactgaccactcggtggacatccctaagaagcatggggcctgcccaaaaaggaactgcctcatgtgcaaacataacttcgatggcccacccccactatcctccaaggtgctgtggaatctaggcaccaggcgttgtaatctgtctgaggatgatctttctgagcagaggttgaagcaaaagaaatcgactgtgggacctattgggccgtggagggttgacaggaaggacctggttgatgacaaaactgatgattcatctgatgaggataaacaaggcaaccaatag

SEQ ID NO: 28036 - DNA, 330 bp, Zea mays
  Peptide Sequence Number=SeqID_71411
gaagctgcccccggtaactggcgtatgtcccaatccttggttccgatcacatttagcacccctcaggttgatgaacaggtttcagctgagctcaataaagacaacctcgcgtcacctcctaagaacctccgccgcgtcttccgtctcgagcactccagcagcctaccacacacgccacgcctcgcctccgccgcgcgcacgagggcgtcgcctcctctcaaagactggactctgcccctgcaggcaactgcaaggctggcacttcatccggcggcggcaatggcggagccgcggggcgggaagagggacgcgctagggtggctggagtag

SEQ ID NO: 28037 - DNA, 426 bp, Zea mays
  Peptide Sequence Number=SeqID_71412
atgctagagttcatgactcagctgagggtgctaaatgtgatcggagccaaggattgggacatacgccagttacaggggcagcttcctaatatttgcaaacttggagtagcaaagtctacaattcaatgtggtacaactctctggaaagatgacttgttggcagggtcgaaaagcttgcggtttcttgacctctctggtaataacgaaataattagtggaaagagttgcatatctgccacagaaaaaagctgcagcctggagaccatcgtcattcatcaaggatgtgctggactagagaagatctcattggctgggtgtgctaagctagagaatgtactcttgacaggatcattcaatgagctcgttctgacccagattgttgcggcggtgaaggtgaagcagcggtgctccctatgtacagcttag

SEQ ID NO: 28038 - DNA, 236 bp, Zea mays
  Peptide Sequence Number=SeqID_71413
gcaaatggcttacaagcatatgcagtgaccttgataacttaccttggtttgtggtgggccatgtatttccatcttcatctgactctggatcctctgggaatgtgataattgacttctactggggtatggagctgtaccctcggattggcaagtactttgatatcaaagtattcaccaactgtcgtttcggtctaagtgaaataattttcttgctaaagggcatgcaaaccaaatga

SEQ ID NO: 28039 - DNA, 651 bp, Zea mays
  Peptide Sequence Number=SeqID_71414
atggcgcctcctgttgacgtggctggtctgcgccctaggtttgggcgatgtgggagctcctccgaagccgaggtcgagcctttgcagctttatgctgatgggggttaccagctgagaattaggagccttgagggtaaccctaattatggtccccgacatgggtgcgcacgagcgcacccgccgggtgtagcccccgaggcctcggaggagtggtttgactcctccgaggtcttaatgcctcgcgtaatgcttcggctggtctggtcgttccctcatgcgagctggccgcagcccgggtgtactgtcgggtcccaagttctcgggctgggcgagagggcgatcagggacagactcgacttttttacatacgcccctgcgtcgcctttccgcaaggaggagggggggaaagcgccatgttgccctcggtgggcgccgaacatggtgtctccggtgagctgcaggcgggtaatccaagtggacgtccgtgccccattcattaggggtcggctagaggcccagaggcacgcccaaaagtacctgcgggtgatctaccggacccggtcccctggcgacggggtccgagggctcgatgcctccctccgatgggattccgttacaagatcgttcccgctggtctcggaaatgtcctag

SEQ ID NO: 28040 - DNA, 792 bp, Zea mays
  Peptide Sequence Number=SeqID_71415
atgaacaacaacactggcattcaaagtgctgttacaaaacggaactccggttccacctccacaggtacgaacaaccccactcgaccgggggggcctgcggagcaacagaagaagaccgacgaacggcgcgccgtcgcccgctccagcagcggcgacgacgacgacttctgctctggggggccgaacagcggcaacgatgacctcagggcggatgccactgccaggaggcccccgcccgtgcccaaactcccgtcgcgggctgagtcttctccaacacgctccaaggccctcctcctacggcgcgggggctgggtcccacacgtcatgcaagacggctcaaagcagaagaagccaaaccgccgtgcgcgatgcgtgcaaccgcccagcggttacaagcggctctccacttttgcccagaccagcgggcgaaagagcgggcggccatgcaggcggcatgcaaccacgccaagtgggcgcacttctccgactcccaacacacccagcatggaggcccaggcccacgcgtcatgcaaccggcgtgccgaatgcttcgtgcatgcaactgcaccgccacttgcgccaccaccgcgcctcctcgactgcggaaccaataccgcgactcgaggcgacccagaacacgacccagcggcaccagcctggcgcgacggtcaatacgaccaaaaatgggccgactgtaatggtggtggcaggcgggcaggagcagcggtcacgtcgtcagccaagccttcgtcccatccaggagcgacgagagaaccctctctcacggcgtga

SEQ ID NO: 28041 - DNA, 990 bp, Zea mays
  Peptide Sequence Number=SeqID_71416
atgggcatcgatgtcgaagtcaccgcctccatcacgtgtctccgcgatgcaatcgctagcgatgattgggcagcgaggaaggctgcggcggaggcgcttgttgcattggccctagagcacacggatcttctcacgacctacaaatcctcttgtgtcaccttcttcgaggccagaaggtttgacaaggtcaaggttgtgcgagagtcgatgaaccggatgattgaggtgtggaaggagatctcgggtgctgaagaggacgagtgctcctccgctctgccaccagcgtcccagtcacaacgaagaccttctcttacagcaacaaggaagagcatattatctgtaagcaaatcatctctgcctgatgtgtctactagtgtcaccaaaacaaatagtccttcatccatcaggaacaagaaactgtcaccgccttcgtatcacaaagtgcgccaagcaaataattgtgattacaaggtcgacattgttgtttctctagatgctaccccaatcaaagtggtgatggaggagaagttgctgaaaggacgtggtgtgagagatagactggagtctaggaggacgctcttcaaaggcagcgaggataggtcgaccaagctggctgcccacaaagcagggtcacgagttgttccgtacgaaggtggtggtaatttggaagagatttcagaagttgaaggtggatcggaaaggggtgaaaatggactttgtgtggtgggtcgtgggcctgtccatgtagcgcgtggaagctcccttttccaactccaccatgcacttgtcccccgtgaaagcgcactttatggtttatggagctccatgaatggagctgctacagcatcaccttcttggtacaaggagctaaaaacagctccaggagctggaatggaatccccaccaaaaaacagtgtctgttgtagcaccgaactgttcggtgccacaagaagacaacaatgccaacggtcgactgctcccgaaccctaa

SEQ ID NO: 28042 - DNA, 357 bp, Zea mays
  Peptide Sequence Number=SeqID_71417
atgtcgaagcccaagccttcctccgccggcgccaagccgaccgcggctgcgccaccggttacagtgcactcggcgctggtcacctacacctccatgctcgcgctcctctccctctgcccgcccttcgtcatcctcctgtggtacacgatggtgcacgcggacggatcggtggtgcggacttacgagcacctcagggatcacggcgtgctcgaggggctcaaggccatctggcccatgcccaccctcgtcgcgtggaagatcatcttcggcttcgggctcttcgaggccgtcccaccggggatgctccctgggaagcgcttcgaaggacccactcgcctgacggaaagaattttataa

SEQ ID NO: 28043 - DNA, 417 bp, Zea mays
  Peptide Sequence Number=SeqID_71418
atgggaaatgctcggtctggggcaaggctccatctaaggttggaatacttaagatacaatcggtttcaaattaactggctgtattctcacaccaggaccactctgatgaaaaaatttcagattgttgcctcttatcagactacaaagggagaaactaaaaccagtcttctcttgacttctggatggtggggcttgtcacgtcacttccactatgtcccagagatactatctgcatttttctggactgttccagctcttttcaatcacttcctaccatacttctacgtgatctttctgactatattattgtttgaccgagcaaagagggatgatgaccggtgctcatcaaagtacgggaagtactggaagatttactgcaacaaagtaccatacagagtcattcctggcatttactga

SEQ ID NO: 28044 - DNA, 885 bp, Zea mays
  Peptide Sequence Number=SeqID_71419
atggtggggtcgggtgctattcaccgcgcggctagagatcgccgcacgggcaccgtgccttcatactgtagtaagggcgaagacgaggggacgcactaccacgggggcggtagcacgctccttgtgcggcggttcgccttcttgaccgttggtcatagcgaagatgaaggggcgcactaccgcggggtggtggcatgctccttgtgcgatgattcaccttcttcgcgctttgggccagctactgagtgggtgctcgacatggtgtgccgcctacttggatgggatgcgccggcgttcggcggaaggatttgcgccggcgccatcctccccgaggaaaaggatgatcaccagccttgtgaaggaggcgaacttcggctacgcggtcctggccagaccgcaagcaccgccttccgtcgtgctcccagctccatggcttggatggtcttgtcctcaccccgtatgagggcgggggcgagggcctcttcgccatgggcacgcgatgaggtggccgccatcactggcaagccgccgatgcagaggtggttaccgccgctggtgaggctacccggcgcagaggtggtcgcctccattggcgagccgctcggtgtcgaggtggtcgcctccgctggcgagccgctctgtgcagaggtggtcgccgccgctgaccaacaggtcgggcttatgagggaggacctcatcgggctggcgtacacagatgctccagtggtcaggaagaggtactccttcagtcatagcaagatagtcacccccgggtcggcgtattcccgtcaccttgaagggtccttcccagctagccatttctgcatggacttgtcagaagcctggacccgtggggagtctagaaaggtttctgggggaaggtag

SEQ ID NO: 28045 - DNA, 324 bp, Zea mays
  Peptide Sequence Number=SeqID_71420
atggcgcccgggaagaggcaaagtgagctgaagcggctgctgaacgtgaaaggcggtgttggcgtccttctggctgctggctttgagtatgggcaggtggcaaaggtggtggcagtggaagctgaggccaggaagcttgtgaatggcttgccgaagcaacagaagctgcaggttggttgcccacatattctggtatgtaaggagagtagcacgaagcagtgtgtaaaatctgcttcggctggttcttctgagcttctgcttcagcaatctctttttgcttctgaatgctcctaccacctctgccccttggagctagcggcctga

SEQ ID NO: 28046 - DNA, 621 bp, Zea mays
  Peptide Sequence Number=SeqID_71421
atgtgctttgtgcatacgctgtcaataatccaacttgcgtccacagtaggtttgttctgccacaccgccctccgccgcgcccctagtctccacgcccgcaatccccgccgccatcctcgcggcctccgtgcccgcaaatccctacagcagctgcagcttcgtaagccgccccgccatcatcgcatgaatcatcgcgtcgtaagccgccccgccatcatcgcccctcgcaccttccttcgccaacaatcacagatcaccccgcatctgtgctcccctcgcgcaatcctaggaaaccttcatcgccccgcgtccgtgctcctgccccggcccaccttcctacagcagctgcagctccctccggcctccggtggtctggcacgccgcctcctcgcccagatctgtccgtggtccgcccctcctgccctcgccctgtcctcggcgcccctcgccttcgtacctcgtcctcgacccgcaccctcgcgcaaggatccccttccgcttcttccaccgcccgcttggagtccaacacccgcacacggtggtgctgggcactgccccgccggttctcggtcgcatagggaccccacgacccgccgcccgcgcaaggcggatactcgctga

SEQ ID NO: 28047 - DNA, 489 bp, Zea mays
  Peptide Sequence Number=SeqID_71422
atggtggatcttgctgttgtctttgagatgctttttggaagcgactattttgaaagattacgttggccagcttgctctagcatctatagctttcggtggaggttgaagaaaactcaaacagacaagaagcaagagcaaaagttcaagaaaaagataaaaagtatgtttttcccgcctgctgtttttccgaatcatttgcatccagggagttacaaaatgaaagagaacaaaagcttactcaacatcggcggtagtcgcgccgtactggcacagcggaccgagtccgacctatcgcgggcgctcgtcgccccacggcccgatgctaaggcagtggtggcggggtggacctcgcaggagtcaagtgtagtaaaggttatatctgctaaattcttaagatgtggttttcccttaattgtccttgtcagccgccatgctttcctttttgacatgagcatgaaatgctggttaaggattgccggtgatggatag

SEQ ID NO: 28048 - DNA, 216 bp, Zea mays
  Peptide Sequence Number=SeqID_71423
atgaaaataaaactgaatagaaaagactgctatcaaagtccctttggtgtggggcatattgactcccttctggctgttgaccctgttgcagtggaggtggaggcggaggctgctgccaggaagcttgaggttgacttgccgaagctacagaagctgcagggtggttgtctatgtattgtgggatgtaaggtggatgatacgaagcagtatgcatga

SEQ ID NO: 28049 - DNA, 483 bp, Zea mays
  Peptide Sequence Number=SeqID_71424
atggctgaattaaaggcacgggaaggttgctcacctcgagtgcaaactctggagcgcttgggggacgacgggggtgtggtggagcctctggtcgacggcggtgggctccggctgcgcaagaagtgctccggtgagcgcggaccgggcaaaccagggagggaaaaggcaaaccgaagggtgtcccgagtagctgacggcgaggcggaactcatcgaggtaatggatggggcgcgggctcgacgacggtcgcagaacggacgacggtcttcggtgagcagcgacggagctacctggtcgcgtgggcagagcgagagagggggcgagagggttcgactaagggcgcaaggtgttacagatgactgccaggcgggctccggccgccagtcgcccttggcgctcacacccatcctatctctgtcgcgtggggccagaggattgctgcgccgcaggagcaatgtgcctgcatccattcgtcgacgctga

SEQ ID NO: 28050 - DNA, 621 bp, Zea mays
  Peptide Sequence Number=SeqID_71425
atggccggagccctcgtcttcgtcgctgttctcctcgccgcaagcgtcggcgctacgacggctaccacgctgaccatccacaacctctgcccccacccggtgtggccgctggtgaccccgagctcgggcttcccctccatctccaccaacaccgcgcggctgggccccaacgcgctgctctccctctccttcccgcccaccttctgggccggccgcgtcgccgcgcgcacgggctgcgacgccgccgcgtccggctgctggacggggaccacgcccgcccgccaccgtcgtgcaggtcaccgtccacgacggcgggaaacctggaccaggccacctacagccccgcaggccgtcggcggcgggcagtgcccggcgctcgggtgccccatcaacctcaactgcgactgccctccccagaaccgcaccgccgagggcgccgcgtgccgcggcccgccggagtacttcaagaaccggtgcccgctcaccaggaccacgcccaccgacgtcgagcccgtgccgcagagctgccgcgccccgggggagctcaaggtcatcttctgccaggcgaccatcgtcacatgcggcggcgaagcagagcgcaccgtcctcgccgacagctag

SEQ ID NO: 28051 - DNA, 225 bp, Zea mays
  Peptide Sequence Number=SeqID_71426
atggagcctggcggagggacagctgtcggagcggttgagtccttgctgacgtcctcttgcttccgtaagggggctgagagccgccgtcgtcacagactttgtgctgatgggggttaccagctgagaattaggaaccttgagggtacccctaattatggtccccgacaactttatacgctagcgctgtccgaaagggtatctggcgatctagaccgccggatctag

SEQ ID NO: 28052 - DNA, 735 bp, Zea mays
  Peptide Sequence Number=SeqID_71427
atggaggacgtcgaagggaagaggatcagaggacatccgcgagccctccaagtcagcctccggtgtcatctcccaaagcggcagccgtcgctccgccaagggaagcaccctccggcggtggatggcggcaatcactcccgctgcggtgagtccccccttccacaacgcctccaaggccttgagaaggggttcgaggttcttctgtctttcgtgcggggtcccgtggcgccaagcatcggcggcagtagtgactactcgctgagagaacggcgggagcaactcaccgtcattccggagtggtgcaagatcgcccgcatgaagcggctcgccggcacaccaaatccccgctcgtggaaggagaagaagctcacgatgtaccccggcggtggggacagagcggctccgcccacggggggaatccattccggccgctgctcatcgcagggaccgggaaagggggataccccgaaaaggatccttccccgtgaaggaaccaggctccgagtctccctactgatcagaggttcgaaggctggcccctcgaaagggttcgacagccgcctcagatcacgtgggcactacacccactactggtcagaggttcgaaggctggcccctcggaagggttcaacgaccgcctcaggctactcgggctccgctcccactactgatcaggggttagaaggctgccccccgaagggttcacagccgcctcagacacagagcgagggatga

SEQ ID NO: 28053 - DNA, 936 bp, Zea mays
  Peptide Sequence Number=SeqID_71428
atgggtgaaaagctaatacaaagaaatgagggagagggagcatgtattttatttgctcttcatttgagattcgaacctgatatgcttgccttttcggggtgctattacggtggtggagagaaagagaggagagaacttggtgctataaggaagaggtggaaaggcttgcatcctaacccagagaaaggaagaaggcaaggtagatgccctctaactcctgaagaggtgggtttgatgttgagagcgctgggctacagaaaggatgtccacatttatgtagcttctggagagatatatggaggtgcaaggactctggcacctcttaaagctctcttccctaatctccacacaaaagaaacaatatctagcaaagaggagctggctccattctctaaatattcttctcgcatggctgcacttgatttcattgtctgtgatgaaagtgatgcttttgtggctaacaacaacggcaacatggctaaaattttggctggacgaaggagatactttgggcacaagagaacgatccgaccaaatgccaaaaggctctatcccttatttttgaacagaggaaacatgtcgtgggatgcattctcctcaaaagtacacatggttcagaaaggatttatgggagagcccaaagagctgaggccagggaggggagagtttcatgagaacccttctacctgcatttgtgaaaggactgatggcaaagcagtagccagagccaaatctcaagatgatcaagtattgaatagtgttgctgaccaaggcaaaggcattggcgagccagctgttcccaatcatacggatgaagaggcgggcgaacctgatgatgacgaagatgtccctgctgacaaagaggttgttgacgctgaaatggttgacgatgtattggccggggatcctgagttagaacagattctttcagactag

SEQ ID NO: 28054 - DNA, 252 bp, Zea mays
  Peptide Sequence Number=SeqID_71429
atgccgttaatggggctcggtgtatgcggctcgctctgccaaggtggtgacgaggatgatggttttggttatgcctatggcaatgctagtgatatagctgaggtgcccgatcttttggcgagtagagataattccgatttggcggaagatgacccttgtgatccgactacgacgagcaagcccgaggcgccaatgcaatcgctgaaccaactccctgtggttaccgaccctgctaatgcgagatcggcctga

SEQ ID NO: 28055 - DNA, 411 bp, Zea mays
  Peptide Sequence Number=SeqID_71430
atgccctgcgcggctgtcccgtgcgccctgtgcgcctgtggcctggccgatcgtggccaccgtggccgagtcactgtcgtcgttcatcgtgtcgaagtcttcgccagcagttcgtcgtgttctgcgtccatgccccaatgccgtgcgtctgcgccccgccgttcgctgtcgtctaagatcgtgaactgtttccgagcttcgaggaatcgacagtcaagctttggcgaccaaatgatcgaactcttcaagttctacgagatcgaagaccctgagcatctgtttggtggtgacgaggatgatggttttggttatgcctatggtaatggttgtccgtgttgcaaccactgctcaggtgaagatgaagtcatggaggaggacttccaggagttccaagagtacgatgagttctag

SEQ ID NO: 28056 - DNA, 408 bp, Zea mays
  Peptide Sequence Number=SeqID_71431
atggagctcgccgcgtgcctcgggcacgccgggctggccgcacaggccgcgagctgcgtcgggcaccgcgcgcaccgcgtcgggctgcgtcggggcactgcgcgtcgggacgccgggcgctggctagccgcagaccaccatgtcggctggccgtgccgggccgccgcgcgctggctggccacggattcgagcggggttacatgcttctctactcttaaaggttttcactccgaatctcgggacgagattcttttaaggggggagggctgttacaccccaggtgtttatttctcgtgcgacaacgagtatggacttaagcacgggatgtcgatgaggatagtaatttcaatattctggtcattttcgccgatcacgattttaatgtcgcatctatttctagctatttag

SEQ ID NO: 28057 - DNA, 129 bp, Zea mays
  Peptide Sequence Number=SeqID_71432
atggcgagcgtagcgtgtaccctccgtggcaagaggctggacggtggtgtatctgtgctctcggttggcgtgaacccgatccccagctgggtattaatcgattcggatcaccgttacaagaagacttaa

SEQ ID NO: 28058 - DNA, 303 bp, Zea mays
  Peptide Sequence Number=SeqID_71433
atggcggcggacttcaccgacgaggctttacagggaaggtccgagcgcaggggcgagcttgggggcggccgacgatgggaagcatgcgggcgcgatagccagagaattaaaggcgagggagatggggaaggcctgcccgacggcgagcagtacgagcaagggaagcaggggtgcgcgcatgaccgacgaagctcgcggggaacaacggccgactcaaggaaaatcagggcgcagtctggtgagctgcagccatggggtggcgacctgggagctacggcgagggaggagctcgacctagtgtaa

SEQ ID NO: 28059 - DNA, 1578 bp, Zea mays
  Peptide Sequence Number=SeqID_71434
gttccttggtatcgtctaagccatgatgaccaccatcagtcccgccgccaccgccgccaccatcatctggcctaccaccgccacaggagcagcagcgtcaacaacaacagcagcaagggcagcggacgccccgcttccaaggtcattggaaggtccagggccctaagtaagtgtccccttctcttttcccctattggtttagcttacatgttgacgggtattaacccatcccttatcaggacctcttcttcctccgcctccaaagtcgctcccattggcgagtccggctcccagcagcaagtatctgctggctctgatgccggcgaccttcctccaactgccactattgaggtggcgtcatcgggcccccaggctccggctactgtcgtggcagcgccgtcggacccccaggttctggctggcactgccgaggcagtgccgtcgggcccccaagctcccgtcgggggtccagtagctgcgtcgccgggtccccaggttccggccggcactgcggaggcagtgccgtcgggcccccaggctcccgccgggggtccagtagctgcgttgccgggcccccaggttccggctggcattgccgaggcagtgccatcggaaccccaggctccagccgggagtccagcagctgcagcactgccaacggctatggcagacccaacggcggcggcgacggatataccttcggtaatggcggaacccatggggggcgtgcccgatcccgtctcgccgcccgttctggaggagccagaggtcgttcttgggcggcggctccagaccggcgccgggccagacacagcgccgcctcccctccctcagaagcagcgggataagcagaccgtgaccgaggcggcactacagaagctgcagcaggagcttgatgacaaggctggcaaaatctcttttgccgaagaaaaccttagggcgaaggatgcctccatggagaagcgggcgacggatctcatccaacaggagaaggacctggcctggagggaggagatgtgggaaaggcgggacaagttgttggccgagcacgagctcgaggcggagaagaaggagaagaacctggaggagcgggtccgctggttccaggcggcgcaggtagcccagatggcgcaggcggctctggtttctcaggcggcagagacgatgaagaagacgctagaggatctccaagcgaagcatcacatcggggtccagcgtatcgccgcatgggccgacgaggcgagttcggctctggtgccgctgggggtgagccccatccctgtgtcgaagcagttggtgtccatttccgacgcgctcccggtgctggattccgctgctaatcgcctccgatgcctggatcagatccttggcgcccgcttggaggctgagggcagcagactctgtcgggtggtgatagaatacatcctgacgtgcttccggagtcacgacccggccatttccttgggaccgatgattgccggtccggtggccgatgccgaagacgccgcccgggggagtgtgcaggacgttgtagacgtggtggccaagcgtttccagcgagatccttctgatgagtag

SEQ ID NO: 28060 - DNA, 708 bp, Zea mays
  Peptide Sequence Number=SeqID_71435
atgaatcttatcttctggctcttgcatttgtctgaaggctttagcaaatatgatgtcagctgcactgcctgtgtcaaccaagacattgtggaccagaaatcctttgataacacaagagataaccatggcatcgttgtgtgggtaacctttgagctgaaggtcctcttgggagaagctggctctgaggacgagccacctgtgatcgggagcaccagcttcgggtccgaagcagctccagcttggtcgttgaacgaagccatcagctcaaaaaagtggaaagaaatagaaacaatatcgaattataaatgtaccttcggcttggaaggagatgaaaatacaagtgtaacacaaaagcaaatgccaagtcagcgtgaacagtacgggggtactgttcacctatttataggcacggggtacgacccatacaaaattacatacatgccctttacatttggtgataattctatagcactctaccgaggtctaaatggccttttcatctttaagtcggttcctttttctgcgaacatgccgaagcttccctgcttggcagcttcagcgctgtgtcatcctttgtatcttttgagcttctcccttgaagaccttcggcgacgaagcatagacccaacagagtcgattaaggaccgtctcgatgtaggcttgttgatcgaggaccctttagctggtcacatgcctcgtcatgggtaa

SEQ ID NO: 28061 - DNA, 630 bp, Zea mays
  Peptide Sequence Number=SeqID_71436
atgatgaagttcaattctcttgcatgggcccgagtcactggcccaggtggaaagggtggcgcctggactggaaaagatggtgcctgggctggagaaggtgctgctggtgtagatgtactcgtgttggtgttgatgtccttatcagcgcccgtgcctataaaggccattggccctggacacccttgcctcagcctcgcacactcgccgcgctccccgagccaaccaattgaactattccgccgtgagcaggccggaacactcgcaccaacgagctcccccgccttcgcacgaggaccaaccgattctggccatctcctgcgccaacccacacatcgacgtgaccgccgtaacctccccgacctccctggacacctcaccggagctagatcgccgccgggtgcaacctcgctgacggatagtacgtgctcattcccgagcaaggagttgtccaagaagaagtccaggagccagctccagagcctgccactgaggatctccccgcagcctcagcttttgaaggatctcggtagaagtcgagtgatttttctagcaatcgtgcgaggatctatgatggtctatgaacttggatccagggtggatgcattgtccatgagacggaaatggaattaa

SEQ ID NO: 28062 - DNA, 165 bp, Zea mays
  Peptide Sequence Number=SeqID_71437
atggccatgatgggttcaacatcggaaaagatgtacctctgtcagaataagataacacacaatgggagtggagagatggcgagagtagcatgtaccctctgtggcaagaggctggacggtggtgtatctgtgctctcggttggcgtgaacctgatatggtcttaa

SEQ ID NO: 28063 - DNA, 258 bp, Zea mays
  Peptide Sequence Number=SeqID_71438
atggggaaccaccgaccccacggcggcggtcttcgcttgccgaggacacgcgcacgtgcagtggcatcccgcgacgcgctagggacacccgccgaggtcggggagttgcccacagacgagacccatgctggcggccaacacactggtccacggttgctcacgcgattccggcgtgcacgacaaaacgcccagctgatctacggtgggatgccgagagaagctcacggcgacagggttcttatacctaggttcgggtga

SEQ ID NO: 28064 - DNA, 393 bp, Zea mays
  Peptide Sequence Number=SeqID_71439
atgagggcaacaagcaacataattggcaatgatggtgcatcttctaaccgactatcctctgatcatgattgggttattggatggtactactgcaaaaggactaatacatactataggcgcttggctgaatgcttggctgggcgaggtggaggctcctccgaggtcgaggtcgaggtcgagcccccgggtcgggcgaggcggagttcgtcgtcttccggggttgagcccatgtccgagccctggggtcgggcgaggcggagttcgccgtcttccggggctgagcccgagtccgagccctgggtcgggcggagcggagttcgccgtcttccagggctgagcccgagtccgagccctgggtcgggtggagcggagttcgccgtcttccggggctga

SEQ ID NO: 28065 - DNA, 867 bp, Zea mays
  Peptide Sequence Number=SeqID_71440
atgccgccacgcacaaggagaacagcgcgcaaacatactggaccgattggtgtgtcatgtcaccagctggccccaagacatgataatagtagtagtggaagtgatgatccgataggggatctcgaagcagaagtaagtcggctccaagcggaactccgccgcaggacggatatatgggtcgcagatggcgaccgaataaatgaattgagaagagacgtccgccatctgcgagatcagctcgcggaccgagatttggcactcgactgggttgttcaatctcgttcacttgcatgggccaaggaggaaacagctcaagctcgagtagcagagctcaacttggccgttgataacctgcagacatattgcaataccttacatgaagaagttcatgtattatattcgcaactgcatcccagtgaacctgtggatcctgtcgagtcggaagccggaccctcgcatgttgcgggagaagcgcttggtgatgccttccaggactcgcgcacaggacggagccagtacctcccgtgggagggaggccacaccgaatccacctctagtccctcccacacttgtcgaggctatcgccgccttggtaaacgtgaccgcggacaatacccgttttctgagagagatggcgggtcaacagtttcaacaacaaggcgggcggggttatcaacagggccccgtgaaacctcttacttggacttctccgagacacgtccaccgttgttcgtaaaggcggaagaccccttagaagcggacgaatgggtccgtgtcatcgatcagaagtttgggcttattcgatgttccgaaatccagaagcccctatttgcggcacagcaattgcgtggacctgccagcacctag

SEQ ID NO: 28066 - DNA, 1140 bp, Zea mays
  Peptide Sequence Number=SeqID_71441
atggaaaggagccaaagtccttggatgctcgcgcgcttctggcacttcgtcatcatgggtgaaaagggtgtagtgtgcctgtcgaggaacgagagcctcaagacccgagcgtcttcagatatggaggaggcggcggttgcacggacgaccagcgagacccaggtgggcgacctgccggaggtgtgcctggcgcaggccatcgcgcggacctccccgcgcgacgcctgccgctgcgccgccgtgtccccggccttccgcgccgccgccgactccgaccaggtctggcgcgccttcctccccgagcagctcgaggcggctgaggaccacttggacagccgccgcgtgtctccgccgtcgcaggcggctcacccagcggcgaccgtgcgcggcctcagcaagaaggacgcctacctcagcctctgcgacgctgccggcgccgtggccgtcgacggcagcgggtgcagggtgtggctggagagggccagcggcgccacgtgctacgcgctgtcggctcgcaggctcagcctgccctgggacgacggcgagttctcctggaggttcacgcaccacccacgctccaggctggctggcttcctcaagtggtacggcggcttcggtgcagatcggatcggagtacttgagcattcggcagtactcgttcgtcgttcgttcttccagttcgcggaggtggcggagctggtggactgcacgtgcctggacatctacgggagcctgccgctggccgcgctgacgccggcgacggtctacgcggcgttcctggtgtacggcaccgcgccggagggggcctaccgcggcctgagctacccggaccaggagacggccgtggccgtgggcgggcgggtcgtcgcgcgccacgccgtgtgcctccgccccgacgacgccgaggcgcgcaagttcaggggccgcggcgccggggaggaggcgaggaggccgagcctgcgggctgacgggtgggaggagatggagatgggacgcctgcgcacgccgcccgtggaaagcggcggcggcggcggcgacgtctgcgtggtgcaggcgagcttcgaggtgctcggctggtaccccaagcgcggcctcgtcgtcgagggcatcgagttcagggccctccacgatgcttcatga

SEQ ID NO: 28067 - DNA, 825 bp, Zea mays
  Peptide Sequence Number=SeqID_71442
atgcagcccggctgcatcccctcgccggtggtcacccaagacggtgacctccagcttgatggcggggagaagcgagccgggttgcggcctctgccccaccctcagcttcgaggatcttcatcatccttgctggggtggaggatgaggcgagtcggggggctgcctccgcgtgggccgcgttacgtccttcgtccggacgatggtcgcgccgcggacggggcggccacgtctaggccttccttgcgccggcggccgcatcagtgggtcgcccagcacgtcgggcgccgcgagggcggcgctcatgttctgggtggttccggcgagggcgaggatctgccgacgtgctttgaggcgtccggtgcctgctggcgcggtgttgaggcggtggcagccggagaaggattctctactgacgagattgccaactccgcccgcacccctgggcctccgtctcccggcttgaatggctggttctcgtcctcggtgaacgagagccctcctgctgtagcacccgccccgaagccgttgctgaagctgcttcgtcgcccggggcggaggtcgttgtcgctgttgccgggatcgggcggcggcgagccacccgtcggccctcaattgctcccgcggactcgccttgtcgattatctgaaccgcttcaccgagcgtgagttgcctcgtgcaaaggtgacgagtgagagtgggggccctccgaccgcgtcgccgtccgaggctaggtcagaccccgccaaaggtgtagttgatgccgagggtgctgctgcccccttcggctgtcgacgtccgagcctgcaggatcaggttgtcttgtag

SEQ ID NO: 28068 - DNA, 413 bp, Zea mays
  Peptide Sequence Number=SeqID_71443
actccgacaccagcactgagtggtcttgggcgtacgacggagaatcgtcagatgtggagtccttggacaacgatgacgacccgatgtctggacattggatgggcatggtctcctcagacgacgaagatgacgagaatgacgacgacggcaacagtgactacgactgcagtgacgaggacagcgacgacagtggcgacgatgacgacgacgacgatggcggggcaagccaatgcgatgagatgcctcccagcaagccaatgcttgaacacataaatagaaaagggtggcctagctacagtgtatttgaaagtcgcctagaggggggtttggttcttgcaaacctactccccgttgaggtggtcacaaagaccgggtctctttcaaccctttccctctctcaaacggtcacctag

SEQ ID NO: 28069 - DNA, 840 bp, Zea mays
  Peptide Sequence Number=SeqID_71444
atggctcgtcttagacacactgcacgtaagtcggtgattcctttcctgccgtctcgacttgcggagcgtcctctgcaccgcaccgtgtccggtcagtcgagtcacctggagagactgcaccaccgcctgcgtgaggagcaggaacgccggcgccagcacagagagcagcagggctcttcctccccaccccagcgagaggtggagtctgtgaggccccgttcctctgtggcccagctggaggcgccccctgcaccaccgcgggacgccccggctgttggaggagctactggaggagaccccgacgacgatgactcagaccacagcacggagtcttctgagccgcaggaggcgggaggatgggtcgcccgacctatcacccgtgacgccgctcgcggttgtcacttccacgacgcactcgacaccttgctgcgccaggctttcgaccggcacacctggtcgatcgagtatcgttgtgtagtctaccagcatagtcgcgggaggtacccggaccgctgggaggctacctacctagttcgtcgtccggaggatgacctccgggagagtgtggttgtctcacctgttggtgaggctaaccctaggttgagcagcacagtcaacctagtcgtagtgcttaacactgagctggatcactctctggacgagctaagcagggctcgaacggagattgcggagttgcgtgctgagttggcagagcgccatcaccaggagggtggttctcccgctcctgttgggactcagcacccataccgctcaccgccacgtggtcatgacacttatggttcccctttctgtaagaccaggatagatctggatccttag

SEQ ID NO: 28070 - DNA, 360 bp, Zea mays
  Peptide Sequence Number=SeqID_71445
atgggcaagagtaagaaggacggaagttcgtcgcaccactccggcgacaaacggaagcgcgagccgactcctccttcggaggacttcggcgattccgagtactcggagaaggagttctcctccgagtccgaggggtcaccggtccacgcctctcccctggcatcgtccgacgactcagacgatttccagggggactcctctgactcgtccgaggaggggagcaacggcgacgacggtggagagggcgacgacggcgacaggggcgacggcgatggcggtggcgacggtagcaagggcgacggcggcagcggcagcggcagcggcaagggcggcagtggcagcggcaaggccagtggctag

SEQ ID NO: 28071 - DNA, 903 bp, Zea mays
  Peptide Sequence Number=SeqID_71446
atgcaggcggcatgcaaccgcaccacgaggatgcaccccttcgacttcgacgcatccagcatggagtcccaggcccacacgtcatgcgagcggatgcggcggtcaaatcgtctgcaggctcacgtcccgtcctggggcagcaggagagccctctcccatggcgtgaagatgacgcgcccgtgttccgttcctcgaacggctcacgcaacggctgccccacgaaccactcgtcccgtcgcattaactccgcggcagggcaggcgacacctttggcaggcgaagcgggcgacgcttcacctccgccatgatgaccgcgtcaaaaaagggactgggaaaggggatactccgaaagggatccttctccgcgaaggaagcgggccccgagccctcctactgatcagaggttcgaaggctggcccctcggaagggttcgacagccgcctcagagcactcgggctccgcgcccactactggtcagaggttcgaaggctggcccctcggaagggttcgacagccgtctcaggccactcgggctccgcgcccactactgatcaggggttcgaaggctggccccccgaagggttcgacaaccgcctcagaacacgtagagcgagggatgactctgggtacgtccgatacatggccgaggctcgggctatgctcctgaggctcgggggctgctctcgcaaacccggctccggccaaaccgttgacagcgtcaacataccagcccgagaactcggaacctcaccattccgggtcaaagctccgcccactcaagggacacgatctcgcctcgcccgagcccagcctcgggcaagaacagcagacccaggtggattcacgtctcgcttgaggatctcctcaagcaacgggcgcaccttcaactcgcccgaggcctag

SEQ ID NO: 28072 - DNA, 1088 bp, Zea mays
  Peptide Sequence Number=SeqID_71447
atggcgtgcttggcgtcggagctctggtccaccaccaccagcacccgcttccgcgccgccgcggtggcctcctccgtcctgcagaacccatcgccgcgcggtgtcaccgcgccctgcccttcttgcgttggggaaggtcttcctgcgttgcgcgagcgtgggcttcgtgggcatcctggggcgggctgccctgggagcgccagatccgggcgtcggcgtcgccgcggcagcggtcggcgcctagggctgtccgtgctcgtcacgggcgctgcgggcttcatgggcgcgcactgctcgctggcgctccgcaagcgcggcgacggcgtcgtcggcatcgacaacttcaactcctactacgacccctcgctcaagaaggcgcggcgcgcgctgctgggcagccacggcgtgttcgtcgtggagggcaacatcaacgacggcctcctcctggccaagctcttcgacgtcatgcccttcacccacgtgctccacctcgcggcgcacgccggcgtgcgctacgccatggagaacccggtggcgtatgtccactccaacgtcgctggcctcgtctccctcctcgaggcctgcaaggacgctgacccgcagtcggccgttgtctgggcctcctcctcctccgtctacggcctcaacgaccgcgtccccttctcggggctcagggggcgggggcatcgcgggaggtcgcgggcgggggcacggagccggggatccggggccgccccacccactgccctcgccgatccgccatcaacgccgatcccgtcgatggaaggtgagcggggcggccgcgttgatggcggggagcagagatcgaggagcgttgatggcgggagcgtagattgcggatcgaggatctcggatcgagggtgcgtcggtcgcgctgctggggctccggttcacaggatcgacgttgatggtggctcggcgtcgcgtggatggcgaggagcagaggggcggtgggtgggcagagggaaccagcagaacaagcacatggcctcggattttactggcatggccctggacacgggattcctctccggcgtggatctcctctggcggtcatcttcgcactg

SEQ ID NO: 28073 - DNA, 210 bp, Zea mays
  Peptide Sequence Number=SeqID_71448
atgtgggcgctcacccacgtcgccaacaggggcgacttcctcaccctgctccacgtcctgcagtcggagagcggccacaacaaccgtggtgctgcggaggacgcctccgcgctcgccaactcccttggcgcgctttgcaaggcctgcaagcctgagatttgttttcttcctgtagcaggcgactatacctatctctaccatcatgaatag

SEQ ID NO: 28074 - DNA, 1905 bp, Zea mays
  Peptide Sequence Number=SeqID_71449
atgcaggcggcatgcaactgcaccttggggaggcaccctttcgacttcgacacatctagcgtggaggcccaggcccacacgtcatcaggcaggcggaagcagcagtcaaatcatctgcaggctcacgtcccctcctggagcagcaggggtgccctctcccacggcgtgaagacgacgcgcctggaccgggaaaggggatactccgaaagggatccttctccgcgaagggagcgggccttgagccctcctactgatcaggggttcgaaggctggcccctcggaagggttcgacagccgccccagagcacccgagcttcaggctcattactgatcagaggttcgaaggctggcccctcggaagggttcgacagccacctcagagcactcgggctccgcgcccactactggtcagaggttcgaaggctggcccctcggaagggttcgacagccacctcaggccactcgggctccgcgcccactactgatcaggggtttgaaggctggccccccaaagggttcaatagccgcctcagaacacgcagagcgagggatgactctgggtacgtccgatacatggccgaggctcgggctacgctcccgaggcgtccactcggatcacccgttagcaactcactggagacaccatgttcggcgccctccgagggcaacatggcgcttttccccctcctccttgcggaaaggcgacgaaggggcgaaaacagcgccgcctgccttgctccgactgctgtgccacccgccagggtgaggctgacagtagccgagtccagcctcaggcgccataggaagctccgcctcgcccgaccccagggctcggactcaacctcgacctcggaagacggtctctgcctcgcccgaccccagggctcggactcagcctcgacctcggaggagtcaccgcctcgcccgaccttgggctcggaccgaccacgttacaaggggagcagcggcgactccagtgcaaacgtcaagagtctcgaggaagaaacggcggcgaagatcgagcaactcacccagcaggccgcaagcatctccctgaccgccatgaactcgtcgccgcgcggtgtcaccgcgccttgcccttcttgcgttggggaaggtcttcctgcgttgcgcgagcgtgggcttcatgggcgtcctggggcgggctgcactgggagcgccagatccgggcgtcggtgtcggcgcgacggcggtcggctcctggggctgtccgtgctcgtcacgggcgccgcaggattcatgggcgcgcactgctcgctggcgctccgcaagcgtggcgacggcgtcgtcggcatcgacagcttcaactcctactacgacccctcgctcaagaaggtgcggcgcgcactgctgggcagccatggtgtgttcgtcgtggagggcgacatcaacgacggccgcctcctggccaagctcttcgacgtcgtgcccttcacccacgtgctccacctcgcggcgcaggccggtgtgcgctacgccatggagaacccggcggcgtacgtccactccaacgtcgccggcctcgtctccctccttgaggcctgcaaggatgccgacccacagccggctgtcgtctgggcctcctcctccgtctacggcctcaacgaccgcgtccccttctcggggctcagggggcgggggcatcgtgggaggttgcgggcgggggcacggagccggggatctggggccgccccacccaccaccctcgcggatccgccatcaacactgatcccgtcgatggaaggtgagcggggcggccgcgttgatggcggggagcagagatcgaggagcattgatggcggggagcgtagattgcggatcgaggatctcggatcgagggactggtttgtgtgcttggatgggaggcaaaacagaaggcagtag

SEQ ID NO: 28075 - DNA, 960 bp, Zea mays
  Peptide Sequence Number=SeqID_71450
atgcattgcgcccttccaccttccgagcccccggatggggagcgcccgcattgctttcgtcttgctgctgttggaggagcacaacttcgcggaggttggcacctttcagccatcgctcggcttcaaggattttcatcaggcagcccggttgcatcccctcaccaatggtcacccaggacggtgaccaccagttcgatggtggggagaagcaagccgggctgcgacctctgccccgccctcagcttcaaggatcttcatcatccttgctggggcggggggcgagctgagccggagctctacctcccatacggaccggcgagccatctcttccttcagcattcaggggagaaggcgcttaccggcctagcggaggaggtggacttcgacaacgcagggccgatcggccgcatgcgtcctggctctagcgcagcttccagtgccacctcccaccgctgggcggagtgtggctatctgcccgccgtacgggcggctgttgcgctgtgcgcaccgggggaccgcccaagacgtcgcgcgctgctagggcggcgttcgtgttcttgggctgtcctgccctcgccccggcacgacgcctccgcgtggaggttggtgctcgcccgtctgggaggactcgagtggggatctgccggtgggcaggcggctaccgtcgttggtgctgaggtggtggcagctggagaaagcttccccgctgatgagaccgtcagcgccacccgcggatcgaccaccggctctttggctttgatagcttgtccttgcccctcgagtggggacgcgggcgagggccttgtcgcagcagcgtctgccctgaggtcatcgctgctgctgtttggctgcccggagcggaggtcgttgtcgctgctgcagtggtcagcggcgagccacctggagcttgtcgtcccgcagttcatacccgcgggagtggaaccggagttctgttcgtaa

SEQ ID NO: 28076 - DNA, 342 bp, Zea mays
  Peptide Sequence Number=SeqID_71451
atgcagcagcggccgagccctggccgagccgccctcccccgacggctcatgtcaaagaggcggctgtttcccaaagtttgcagtatggcggggttcccggaggacaaccagcacgagttgaacgggtacgacgaggaggtcgatgaagaggagggacaccccgggaggcgggtaggccgggatgggggctctggaaagatttttgtcggaggcgttacttgggagacaactgaaggttctctggaggacatggttgctggagtgacttggtcgtccatcttgccaccgggttggactgtcgagtgggatcctacctcggctgaggaggagcaggaggagtga

SEQ ID NO: 28077 - DNA, 1404 bp, Zea mays
  Peptide Sequence Number=SeqID_71452
atgtcgtcctcttcttcttcctccgacaccacgccgccggccgccgcctcgtctgaggagacgttgagtagcgtgatggtggaggagttgcgcgccggcgactctgttgattttggtgtgtcacggatgacgtcagcacgcgttgaagatatgcagcggttgggctactttggcggcggagttgctcgtgctccggggacggaggaagtccccgagccggaggtggcagaagaggatgcagacgaaggggccctccgatgcgccgccggtcagagcagtgggcgtgatttagttgaagagttcgtggcgtacggggtctggcccttggcgcacggctgggcgctgggcgaagtgtgccctcgccagatgccttttcacggaggaagggtggtgcgaagtcctgccttcgcactgaatttgcgaaatcgtgacccgaccgcctttgtgcgtgatgcggaggacttggcggtgcggctcgtgggacgttacgtgccgaggactaaaggccagcgcagctttgatatccgcgggtcaaatgagcgcttgaacagggtcttcgaattaaatcaattgccgtacgacggctatcctggtcaagacgaagcggaccgccgtgggaagaagccggcggtggagactggaggcgaccctgcgctggcgcccgccccctcctcaaaaaagagaaaattagtgatggacaaggatcgccaaggggcggcgcaaaaacgccaggcgactgtcaggattcacgaagctcggccgaaaaggcagcggggaactgcgaaggctgtggcctccggcggagggccgggcgagggccagcttgctatagctgcgcctggcgcggcgatcgcgacggccgtcatggtgccgaaggcgagaggcgaggcgcttggcgccgaaggcgaggtgtcggccctcgcgttggtcagggacgaggcgggcgtggcgacccgccggctgaagggagtgacggaggcgctgagtcaggcgacggaggcgctgagtcaggtggctgacttcgccagccgtactgcatcgggggccctcacgacagctgtgtctgccgaagtcgagagacttcggacacaacatgctgacgctgtccatgagaagtcggcctccgacagcaagtgtcgtaagctgacggacagggtggccgccctggagagggagaaggctgacctccggcgccagctggcggcggagaggagggaagccaacgaggccgtcgccaaggggcaggctgcgcaggcggaggccaagctggcacgggcggagggcaatcttgccaaggagctcgccgaacatctgcaagagcggctcaccgccctggagagccgcgcgaaggagccgaggccgcgatgcatgcggaggccgaacggacgcgcacgcagctcgtga

SEQ ID NO: 28078 - DNA, 726 bp, Zea mays
  Peptide Sequence Number=SeqID_71453
atggcttcccacggatcctcaaatgacgaaaatgcactatcccacactaacgggcttgcacgagagggctttccccgcattttgtgggaggtacttcagggggccggatacacgacaccccctcagtacgcggtgcagcagttcgagaggcaccgagtgccccgctgtaggctggctacccaccccattggcttgttccccgctgaaagggaggacgacccaatgtggaaggatcgggtggagcatgccaaggacatctgggccatctacccaggtcagactacgcatttgaccgtacggtgcatgaatgctctgtaccgtctacaagtgatgcgcggtgaggcgatgtcccatctgatggcattgttggaggcgacaaagatcaccctggacaatagagaggagctcatggttgatttgtccactgagatggtggaaaaggatttgcaggtggagcagctatccaatgagatccaagagctggaggaattagtggacaccagggagaacaccattgaggttctcgaggatcagctccttaacactcagcagcagctagctgaggctaatgagcacctggatatgcatcaccaggagatccaggatttggaggccaacgaggacgtcgacattgagggaggagaggagcttgcctccagcgtagacactgctggctctgggagaccaccttcccccgagtcgagtgttgcctcgttcgctcactag

SEQ ID NO: 28079 - DNA, 651 bp, Zea mays
  Peptide Sequence Number=SeqID_71454
atggcgctcgagcccctccgccatgggctggtgtcgctgctcgtgctgctgctgctgctggttcacgcggccagcgcggcgcgcgcgcgcgacttgcacctggagatggtgaccacctccgccgcgacggcgcgcgccgtgccgtcgtgtgcgagctggcgactcggggtggagaccaacaacatccgggactggtacagcatccccgcggagtgccggggctacgtccgcgactacatgtacggcgacctgttcaggcaggactgcgcggtggtggcacgtgaggccgccgcctacgcagaggggctcgagctcggcggcgacgggaaagaggtgtgggtgtttgacgtcgacgacaccaccctcagcaacctcccctactacgccgacaccggattcggggctgagccgtacaacgccacctacttcgacgagtacgtagcgaacgcgacggcgccgccgctgccggaggtgctgcagctatacgagacgctgctgtcgctgggcatcaaggtggtgttcatcaccggcaggcacgactacgagaaggagcccaccatcaagaacctccgcagcgccggctaccacacctgggataagcttgtgctcaagtacgtaaactttttaatttttgcgtatcaagtaggttaa

SEQ ID NO: 28080 - DNA, 192 bp, Zea mays
  Peptide Sequence Number=SeqID_71455
gtttcgcctatccacccccctctaggcgactttcacccgtacactagtgatgcgctcacacatgcagtcagcgacacaagaaagatgacagcccgtgcaggcggggctatcagttatttggttgagaagggaaagggcgccgacgtgggcacctgtcatgacaccgcctcttgccacgtctgcgagacatga

SEQ ID NO: 28081 - DNA, 522 bp, Zea mays
  Peptide Sequence Number=SeqID_71456
atggatgaagtgcaaatcaacaagaagaatcagaaaaagaaaagcattggaaaagagctggctgtgtacagccaactgcagctcagtctggcacaccggactgtccggtgcgccaggctggactccggcgaactggccactctcgggaaactgtggcggcatacggttataattcaccggactgtccggtggtgcatcggactctccggtgagccaacggccgccagcataacggtcggtcgcgcaattcgcgcgcgacgcgtggccccagccaacggtcggctgggggcaccggacagtgtctggtgcgccaaccagcccgaagatccaacggtcggctgcgctagaaatggaaggagatccacatcggacaatgaacagtggatgtccggtggtgcaccggactgtccgggcgagagtgtggcggaactgcccgaattattccaacttaagtgcctaagccccgccttagaggctagaccgcacttaaatgggaataacccgtcaatccctcggatctag

SEQ ID NO: 28082 - DNA, 378 bp, Zea mays
  Peptide Sequence Number=SeqID_71457
atggcgctggcgacgtggatgatcatctgccacttgggccacttgctcctgggcgttaggctggacctcgacctcctgttgatgggcctcccacttggcggtctaggattttatcaaagggtatgccgttcaaaaattttatacataacccgccgcccagccacaaggtcgtcgtggtcacgccaacttgggatgggcaggccgggcaggcagcaggccggacacaggctcagcggagcagatgcccgcatccataccagaggggacaccgctcacagggtatgccgtggcatatacggcatatcatgtagctccgccactgtgtttactccatccaatatgtgttggtacaacacgaccaatgaagtgaacgattag

SEQ ID NO: 28083 - DNA, 354 bp, Zea mays
  Peptide Sequence Number=SeqID_71458
atggggctctgcgcgtcctgctgcaagggtgccggacagagggagctgcagggggtggcggtcgctgtgcagagggggccaaccatgggcgacggtgagctccctgctcgagctaggggccggcccggccagggaagagcaggggcgagagaagctcacctgcgccctggacagcagagggagcggcctggaatttttctgggcgcctgctggcttgaggaagaagaagggggaggaggggtgcgcgcccagggaaggctggggaagaacgccctgctggatgggtgccaagcgccatggcgagaagaagccgagctccctgctgctagcgtgagggagaagctgctgccgtga

SEQ ID NO: 28084 - DNA, 465 bp, Zea mays
  Peptide Sequence Number=SeqID_71459
atggcgccccctttcttccttctctgttccagaccagcatcagggcagtgcgcgcagggctctcccagccgtggacagcacctttccctccctcggattccctgctcgccccagccatggaccatcgcgcagagcgtcgtcggcctcttgagcgcgctctccactgccccggcgtttccccctgctgttcctgcacctagcttttctcgtcgtgagcagcagccccaacgtcttcgtgcggctcgctgctttgtgctgcgcagtgaacagcacgccgtcgacgctcgtcgggtgtttgctgtttttgcgcagccccatccgcgacgtctttcacccccggagaggcaccccgtgttttgtgtggagaagaaggcaagccgctcgacgctcgtcgatgttcggagcgatgcacaaatcggaatcgccatcgtcctcaaaaacaccgattgggtttatttatggtga

SEQ ID NO: 28085 - DNA, 321 bp, Zea mays
  Peptide Sequence Number=SeqID_71460
atggcgagccccacgggcatctcaagcttactgaagaactgcgagcaccttgtcgtggctccctgctcaatttataggcacaacggcccaacagatgacccccggccacggatagcagcgcaagcgcatgcctaccacgtcggaaagggatacagtgagggagatggaggcatgggcgacaccgcggcaaaattcaatggggagaagaagggggaggcgcagggaagggaaggggaggaagaggaagagggagagataggagaggggaggggagctcacctcggggatccaactccgacgatcaccgtctccaaaacctag

SEQ ID NO: 28086 - DNA, 882 bp, Zea mays
  Peptide Sequence Number=SeqID_71461
atggggctcggtgtatgtggctcgctctgccaaggtggtgatgaggatgatggttatgattatgaatatggtaatgacacactgcacggaagtcagtcattcctttcttgccttctcatctcgcggagcgtccgcttcggcgtccggtggccgcaggagatagagtctgtgaggagctgttcccctgtgctcccgctggaggcaccccctgcaccaccactgagcgccccagccgctggagtagctgctagaggagacccagacgacggaggtggcgacagcagttcgagccacagcactgacctttcagaggagcaagagctagaaggatgggttgctcgaccatcacccgtgacgccgctcgcgggtgtcacttccacgatgcgctcaacaccctgcttcgccaggcactcgaccggcaacagtctccggggtgcggaggtctgctcagagcattattctatctctgagcgggactcagctgaggcggccatgcaagatgccgcacggcgtgcgctttcgcacttctgctcaatgctcggcggggtagccgatggtctcaacctgaagtattacccccaccgtccatctggcagcacaggaggcgtgattgtctcacctgttggtgaggacaatcctaggttgagaagcacagtcaacctagctgtcgtgctaaacacgaagctgtaccatgcattggacgagctgagtagggctcgtgctgagatcgcccagctgtgggctgagcgcgtggagcatcgtcacctggaggatggctcccccgctcccgtcgggactcaacacccgtaccgctcacctcagcatggacaccagacttatggcgaccccgactgcaggaccaagataaatttagaaccatag

SEQ ID NO: 28087 - DNA, 2123 bp, Zea mays
  Peptide Sequence Number=SeqID_71462
atgccctccctgggcgggcagcgggtgcgaagtccagccttcgcgttggatctgcacggccgggatcccgccgcattcgtgcgtgaagcggaagacggtgcggcgaggattgtggggcgctatgtgccgaggacagagggtctgcggagctgtgatatccgtgggtccaatgttagattgaatcgggtctttgaattgaactgcttgccatacggtggttatctcggggaggacactgccgaccgccgcgggaagaaaccggtggactggggggtgggggtctctgaaagttttgctatggatttgatggggacgtgcgcaaccctcgggggaaggatgtcttcgcccgagctccaggagtcttcggcgcgaatgctggaggttaccggaggtcgatggcccaagaatgttccgatcccccgcgcggctggcgaagacttttctacgtctcgcatggctcgtgacttcaaggtttttccttatgggcagaatattgttgttgttgtgttggcactgatggagagggaccgtcaagacgctacgcagaaacgccgggcggttgtcaggatcgcggatcctatgcgcgaggcgaaaagggcgcggggaagcgcgaaggctgctgcctctagcggtagcaaaccggtggcggctgcgaaactggccaccctcggacacagcaaggcggcggcgagtgcgaaggctgccgcccctggcgggagcaagccacccccgagcaggctcgagaagggacgaaggccactttcgccggtgcgatgtattgccgacttcggcacggacatcagtgtcgaggattatcttgtcggtaagttaaaacttttttcttttttcgatgaagtctctaactcgtatcatggtgtaggttcgggtgaggggcaactgactgttgtcccgcctccggtggcgactacttcgccaactgcggtggtgggggcaaagggtgtcgcgcgggacccgtgggccactttctgcgcgagcggcgagattctgtcggccgctgccgctaaggacgtggcgggctccatgtctcagcgactgagggaagcgtcgcagcagctgtcacagcagctgaagcaagcgaccgacttcaccgatctcgtcgcgtcgggtgccttgactgcggacgttgctgccgaggtcgagcgtctccgggcacagcatgcggatgttgtgcgggagaagttggctgcggaaagcaagaaccgcagactgtcagagaaggccgaagccaaagtggcgtgggcggagggcagtctcgcccgccaacgcgccaaggagctggaggcgaggttaaacgccttgcgcagccgcatggacaaggccgagtcctcgacgcgcgcggaggaggagctgctggtgctcccgaccattgtgactggtttcatgtccttcgcctccctcgtcacctgcgagggggccatgaatgctttgtcccgcgaggggtgcaggcattacgagatggctcatgccgaagacgttgaggaccttgttggtctggacggcgcgctgcccgaggccgcggaggtcggtccggtgccgccgtcagatgccggtgaaggcacctcggcgatccctgcgcccactgcggccggcgaagaccccacaccagcccctgcgctgatgggcgaagccgccccgaaggtggtggccgagccggcggccaaagaccctacagccgtggctgggccttcgcaggttcttgggtctgggcctgcgcacgcaaccgctactgacaatgatatttttgtggcggcttcgatcgtggctgctgatgacgattcgtttggctctgtgtctaagtgttttgagtctgatgattctgggagttcgattgcgtggatggaggagtctctagatgaggacttggattattttgcggcgttggatgtggctgcagcggagccttcgccgcgcgcggagggttccgaggaactccagggcgcgagtactgggtataggcggcgaagggcggtggcgaagcggagagtgagtgaattgtcgcgaagtggtgagggggagctgcaaaatttgtttgagggtgaggaactaaggataatgctgttcaactacaaggagatgggtatcatcccaaaggttgagccaat

SEQ ID NO: 28088 - DNA, 306 bp, Zea mays
  Peptide Sequence Number=SeqID_71463
atggtggcacgcgcccctgctccttgttcccggctcgctgctctggttttcatctcttcgcgtcggtattgctgttcaagcgcttgcccagtccctgctcctccaagttgccgaggccccttccttggtcgtgctcgccttgatcgcggcggcgttgtccgtggcccgctccgaatcatgctggcgagtttctcccccagcgctgtctgttgccggtcatcttctgctcgctgcgcgcagcagctgagacctgctcatgtcggtcgtcgtttacatcgtcgcctggccgggagttgtcgtcactag

SEQ ID NO: 28089 - DNA, 144 bp, Zea mays
  Peptide Sequence Number=SeqID_71464
atggccgtgatgggttcaacatcgaaaaagatgtacctctgccaggtgaggaagcagcaaacttttgttgcttttgctctaaggtggtgccgaaggaagaagctcaagaatgaagtcgcgggaggatgttgtcctcccttttaa

SEQ ID NO: 28090 - DNA, 588 bp, Zea mays
  Peptide Sequence Number=SeqID_71465
atgcccccgctcgcgcaatcctcgctcccacggaaccctaaccaagaatctgactccgcgctagatgaatcggacggaaggaagacgagaaggccccgaggcgagcgggggaacaaagaagaagatgaaggggttctcgacactgaggaattagccattgtaaacagcacctttcgtaaggcccaaggttccaggctacctggaatcattgaggaaacaaggagatcaggggagtcaacaacctcaattctggaaagtgaaacatgggcgatggaaagccttgagactgaactatttgataatgtctgtgcttcgatccagagatctcttggcaaacctgataaactttcaggtcggcccgttgctgcctcaacccccccaaaggccacagcaaatgcacctcgtgttgcagagacagtaatggaggaggcctcgctcggaacggtggcggagccactgctggtgagcgcaatcagagggaaaaaggtcgagagggcaccaatctggctcctgaggcaagccaagaggtacatgaaggcaagtccacttccattttgtgacagtcttctgtgttggtctgctaagtaa

SEQ ID NO: 28091 - DNA, 939 bp, Zea mays
  Peptide Sequence Number=SeqID_71466
atggccgctgcgaggaggctctcagagctgctgcaggagcagcaggagccattcctcgtcgaggccgccagggcgaggcggccccgacgcgtccgtggcgcgagcgcggcggcggaggaagcgggaggggggctgggctactgccccaccgcggtgtgccggcggctgctcaggctctgcagccacgggttcaagaagaggagcaccagtggcctcaggtcggcgctgaccaggcctcctccaccgcgctccaacggccgcgactatgggatcatgggcggacccaacgacaacgtcgtcgtactcgccaccaagtccaccgttgccgacaccacctacgagagggtacgtgatcctgtgatgttccctcaccatcttctccactcattatgcatttgtgatgacaccatcacggtcaaagaacaagggctagaagaagaagaagtcctcgtcgtcggtcgctgcatagaccccaccatcgatggatggcgctttggatccagaggcctaccgcagctatttggaaccctaaccctagacaccgcctccttcatggtgtcctccgtgccgtccggcgaggtgtcgtcatcgtcccagcacggctgcgactacaggatcatgggcggacccaacggcaacaccgtcgtgctcgccaccaagtccaccgtcgtcaacaccactggtgagagggccatcttcgacttcctgtttttggcactccttgccgtcgcgaggtcactcgacgattccctcatgtgcttcctcaatgcactagccaactgtcgggaagaggtgtgcaaggagcttggaataccggaagagcagggtgaactatttgtgggcatgtcatctgactttgaacaagcaattgaaatgggaagatcaaatgtaagagttgggtcaaccatatttggtgcaagagaatacccaaagaactag

SEQ ID NO: 28092 - DNA, 288 bp, Zea mays
  Peptide Sequence Number=SeqID_71467
atggccgttggaagtgtgctgtcgcatgatgcatcggacagtccggtgcgccaccagacactgtccggtgcgctagccacgtcagcagaccgttggggttcgaccgttggagctctgacttgtggggcctctgggctgtccggtggtgcaccggacaggtcctgtagactgtccgatgaccgttgcgtgcgaagtagccgttgctccgctttcacaccggacagtccggtgaattatagcggagcgcccactgattttcccgaaggtagcgagttcagcatcgagtga

SEQ ID NO: 28093 - DNA, 3204 bp, Zea mays
  Peptide Sequence Number=SeqID_71468
atggcggcggcggacggggacgccttgatcgcggcgtttgcggtgtccaagggcggcatcgtgctcaagcacattttcctcaacgcaccaccgccggaggcgatgtgcgggtccggcggaagagaagtggagagtgatgaggaggacccgccggtgatggtgggtcggcaccccgactgccacgtgctcgtcgaccaccccagcgtcagccgcttccacctcgagctacggtgccgacgtcgacagagtctcatcaccgtcaccgacctccactccgtgcacgggacatgggtttcggggcgacggatcccacccaacacgccagtggatctcgctaccggtgacacgctgcggctcggggcctctaagagggagtataagctgctctggctgtcgcttcgtgaggcatttgagatggacgatctgatgtatatgccatcgctgcctgaggaggacaaagaggagccatatgttaaggaaccaagcagcaagttattgcctgggcacagggattcagtgaacatggagacccatcaggatacaagtgaacaaattgtgtctgaagacattgcatttccagccaaagtggccccctcagcacctccattgtctgagttccttcaacctttttttgtggaagagcattcactttcccaatttcatgagaaaagaaacggagtgacagaggaaaagttggtcgacaagaatcaaatttcagaatcttttggttcgttgatcatacaggaaatgccaggcacactgacaaatgctggaaaatcaatccagtcaggcgagcaggaggatgcctcaaacaaagtgtccaagaggtccaagttgaagtcagtcaaatcacttcgtgttgacacaggcaggagcagcgagagaagcagcactctgagccatagctttcagaagggagaccaaaatgatattgttgtatgttctcagagctgtgggacagaatgtgcggtatgtatagctttatttggtatttctgaaattgaaaaggctgaagaaaaggaagagttgattgctgaagataacgttgacatgaatcccccggccagcatgatcatggagggaaatatgaacgagagaaaacctgataattatatcccacaagatccaattggtgcaaagctgcagaagaaactaggcttattagattctgctctccctttgcatttcaaagatgatgtgttcgccgacaaggaaattccacaatggaatgttgctagtgttcatacagaatctgagcttctttcagaatatcttataataccagaagtgaagcacgatgacttgaaccatcttaacttggaggaaggtctctcaaaaagcgagaatataaacccaaataagattactgagggccctgggaactgtcagctcgaagggaccattcgtgggaatctatttgacaatttggatactgatggaattgaagaaggtgaagagatctgcccactggacaaggatgaaatcacccccaatggatcagatcatggcgacttttctgaaaatgagaactccatgctgaacactggagatcagatgaaattaaatgaacctgtctctgagaatcttaacccattaattccaactgatgaaaaatatctgaagagccaaacggaggagtgtatgcccatttcatatctggaattcaaagatgatatccttctggatagggaaaactcagtgctggctccgagaaagtacgaggctatgtcccctgtgaggcaggaaaatctgttctcagacaaagagaacgtgactcctgcctctaaggtgaagaccgttgttaggggagttcttggtacaaggatggataattcagtgtcagcagcaaatgcttcaaataagaataaagttcttgggtcaagggtcgataattcagtgtcaacagagaatagctcaaataagaagcaatgtgaattatcatcgaagtccaaaaaagtccacacagtagattttgatgttttctattcggataaggagaacttgactcctatatcttcaggaggcatgaaagcaaggaagtgttttcccaaggacctctcagtcgacttagaccaagatcaggaagcattctgctcagacaaggagaacttgacaccactatcttctgcagctcggaaaacaagggacatgtctggaaaccttacacgagttgaaagtgcggtcacaaagaaaagggttgttggtaggctccccttccagactcttgtgtcaaattctcctttgagacctgctagctcgcatgattgtacctgtgctgttgctagaccagctggcgttgctgctggtgacttggcgatcaagttagaagataaattgaacgatctctcatgtaatggccacgaatcaggtagtgctggagaaggcatgaaaacctggaccatggtggctaatacagacagtcttcttgatgacgagtctaggaaggctattatgctgctaaaaggcttaaaaggaactcgcctgttcataccaaggattgtgatcagggagttggattccatgaagcagcgggagggcctgttcagacggtcaacgaaggcgacctccatcctgcaatggatcgaggagtgcatggcaagggagagctggtggatccacgtccagagctcggccgacatgttcccggtagcaccaaccccgcccgcgaccccttcagcgcagcgcatcgacgaggagatcgagatcagctccggctccttcaacccgatgatggcgttgttcggccctcgaagctccgccgcgctcgcggatatgatatctcccagacccgaggaccgcgtcctcgactgcgccctcctcgtcagtagggtccggagcaacgagaaggtcgtggtgctgtcaaacagcgtcacgctcaagatcaaagccatggcagagggcctgccatgcgagggagccaaggagttccgcgagtccctcgtggacccgtcctccaggcggttcatgtgggcggccagcgccccacgggggtcggcctggtcctgcctggacgcgtccgcgctggcggagaactactacaacagccgccaccacgctatgaagcggagggttctggtggcggcgaggccctccgagtccgaggccgccaagggcctgaagctgatcctgcgtcacaattccctgtacgcgcaggccacggacgccgtcaacaagacgccgctggtatcgctggccgcggtgtga

SEQ ID NO: 28094 - DNA, 1322 bp, Zea mays
  Peptide Sequence Number=SeqID_71469
atggcaaggacacagaagaacaaagccactgctcaccatcttggtcttctgaagataatgatgttcgtgaaggtatgaagaagttctccaactggcccactgttcctcaactctactgcaaaggcgagcttcttggtgaatgtgatattgttattgctatgcatgacagtggtgaattgaaggatgtttttgaggagcacaatattcccctcaaaccacagggtagaaaaaatgaagaagtaggtcagcccgagtctgcaactgagaagggtggtgcagttgctgaaccaattgggcttactgatgctcagaaagctcgtttggaaagccttattaattccagcccagtgatggtattcatcaaaggtacaccagaggaaccaaggtgtggggttcagtggaagttggtccacatacttaagcaagagaatattcctttctcaggttttgacatcctttcagctgatgaggttagacaggggctggaattgataaggcattggcccagttaccctcaactatacataaaaggtgagctggttggcggctcagacatagtgatggagatgcacaagagtggtgagctgaagaaggttatgtctgagaaaggggttattccaaaggaaagcctggaggacagattgaagtccctggtttcctctgcaccggtgatgcttttaatgaagggcactccagatgctcctcattgcggcttcagttcgaaggttgtgaacgccttgaagaaggaaggggtcagctttgggtccttcgacatcttatctgacgaggaagttaggcaaggcgtccacaatcttacagtggcgcacggttctgccgtctccctccgcgctccctccacgctgcatcaacgcccgcaggttttgcctctgcctctcaccgcgccccttcccccgccgcacccctccaccgcgccccttcccccgccgtgcccgaaagcgccgcggatccaccgtacgcccgccctggcgccgtggttccacgccctggatccaccacctcctcctcctctccccataactgcgccgtctgcccccgccgtacacctccaccgcgcccccgtctccggcgtcgggagcgagacccccacggcggtagtgaggtccgagagcgagacccccacggcgtccttgtccccgtctgcgtccccgtccccatccgcgcccgggacgcccacggccgcggtcgcgtctccagcgccggttgcggggcccaggctggcgacggggtttacggagaaatcgccgcttcacctcgccgcctcccccaccgcgcgtccgcaagagccaagagtgggcgtctag

SEQ ID NO: 28095 - DNA, 630 bp, Zea mays
  Peptide Sequence Number=SeqID_71470
atgggccgcgtcacccagcccgggcgcggggcgcgacgtgctgccacccggcccgttgcgtcatgggccgcgtggaaatctctacaactattaagagcaaagtatagactgcccccgccctcaccagcccacgccgcgaaacccgcgcccccccccccccgccgcgattcaccgcccgcccgcggatccagcgtcgctgtagcagcaccccgcgcccggctccgtcttcctcctcatcctcgacgtcgccgtagcagcaccccgcgcccgactccgttcgtcggcgaaccctcttcccccgccccaccgcagtcccggccaagagatccggccgaccccggtcgctcggactcggaggccggcgagccgctcgttctgggcgccgggatgctgctcgtccatctccgcgcggcggaccggtgggagcgcgtggccgcggtgctgcccgggaggacggtggccgacattgcggcgcactacgacgacctggaggtcgctgtcggctccatcgaggccggcttcgtgcccttcccccgctacggcggctgcggcggtggcgctgttagctgtgtatgcgatcctgggatgcagttccacatcggcaaccttggccaccaccacatttgcact

SEQ ID NO: 28096 - DNA, 894 bp, Zea mays
  Peptide Sequence Number=SeqID_71471
atggctccgggcaccgacgccggctacggccagtgggcggcggcgtgccccccgctgcggcggaacctgcagctgctttcgcccgacgaggttgagctagcaaaaatgctgttgaatgaaggccagattcacctgttcgaacactggcctgaaccaggtgtcgatgatgacaataaaagaggcttctttgatcaggttcgccgacttaattcaagctatcctggaggtctggtatcttacatccagaatgccaaaaaacttcttgcggattcaaaggaaggcaaaaacccatatgatggtttcaccccttctgtgccttcaggggaggttttgacttttggcaatgacaattttgtttcactggaaacagctgggataaaagaagcctgcaatgctgcatttgttcttgtagccggagggcttggcgaaaggcttggctacaaaggaattaaggtagcacttccccgggaaacaactactggaaaatgtttccttcaacactatatagagtctatcctggcttttcaagaggccagctgcaaaatggttgatgaggggtgccaaacaaagattccatttgttattatgacttctgatgatacaaatgcgctaactatcaagcttttagagtcaaactcctacttcggaatggaaccatctcaagtgaaaatactaaagcaggaaaaagtagcgtgtctagctgacaatgatgcaaggcttgcattagacccaagtgacaagtacaaaattcaggcaataccatcagcattaggtgtcagtgccaccaagggttacaatgtaaattctctcgctgttcctaggaaagccaaggaagcaattggaggaattaccaaacttactcatgtcgatgcaaaaagaattattcaaatttga

SEQ ID NO: 28097 - DNA, 1614 bp, Zea mays
  Peptide Sequence Number=SeqID_71472
atgaggacgatgttgggcttgttcttgactaaggcaaagaaagatcccattaatgagccttacaatgtcggtgatgattataatagtgacactgatgaagattcaaagtatgacgaggaggaagaacttacatcttctttttctgctagagggaatcaatcacatgaattggcaccgagaaatggagatgttgatatttgtaaaggatgtgcaatctgcaatgatcaacgcctaggacgctgccttatatacatggtgtacctggtactagcaaggcgtccacacaccctctccgcgcacggttctgcctctgctcgcgacacccgcgtgtgccctcgtctacgccgccgcgatgctcgtgcctctacccccgcctcctccgccctcgcgacgctgcgccctcccccgcgatgcccgcgcctccgtccccgcgatgcccgcgcctacccccgcctcctctgcccccgcgacaccgcgcgcgcagcctcctccccgcgatgcccgcccaagctcccagatgccgccccccgtctccaccgcgtacaaccggctcggcaatcctcagccccgcgctcccagagtgggcgcaggcgacaccatggctcgctccgcaatcctcggtcccgcgctcgctctcccgagctccgatgggctcccgccctagcccctgacaccatgctatgcccaaccctaaacctagccaccacgccgtcaacaacgccaccttccttcctcgccaccacaccttctttagatggaaggcgcgactggtggcatcttcctgatctcggagcacgtctaatccttgctccaaatgctactccgcccccaatccgcgcggcatcttcagatggaagccaggacaatgccccgtccccctctcccgagccccgacgactgacattccagggatgtcgctctgcgatcctcacctcctcgtcgttggcggtcgcgcgacctcctgaccgtcgtctccgcctgcgagatccccccgactcgcccacctttccgtccacagccgcctccatcacgcacctcctccacgctgacgagaaggctcgcccacctctcactccacgaccgcctacgacacgccttctgaataaagatctctcgaagcacccggtggatgggttctctgctgggctggtcgacgacatcaatgtctccgagtggcaggtcaccatcatcggaccgcctgacaccttatacccatgccatctgccagtcaattcgcagaacgcaatcaccatctgcaatgacgcatcaattttcacattgtcctgcatcggtctccttttccctagcatggatttgttttgtcaggttactgaagaaaacctggcagcactatttataaaattgtggacaaagggtgcaagggctgctctgaatctgtcaggaactgtgctcagatattatcctgtcagcgttctgccatcaaaaactgtcattgcaccagtcaatccaacattcctacccagggtcactcaggcagatctgaaattgttctttgagtctatatgtggagagaaaatgacaattcaaccagcacagtatcattggctcactgcaatgactgctacaggtctttcggctgaggttgcttggtga

SEQ ID NO: 28098 - DNA, 495 bp, Zea mays
  Peptide Sequence Number=SeqID_71473
atgaagatacagataaccgaacttgctgagtcattatgtgcacctgcacgactatctgaggtccttaggacaaggacatctgtaggtgggtctaataccttgggaggttccgtcacagctgcaaaggttaatcccttgcagcaggaaatcgtggaacgagacacgactattgactgggtcataaactcgcgctcctttgccttggattgtgaggcaatagctttagcccgggtagcggaactaagcacatccctggagaatctgcatgcatattgtaacactctgcatgaggaagtgcacgtgttatacgaccggttgcatccgaatgtaccacaagaggttgcagcaatgggagccggaccatctggagcatctagtggaggacctgatggggagttggatctttttggagcccctccttccatgaacctcgcagatgaacgttctcccaaagctggcagtggagcgggagtggccaaggacgaagataattag

SEQ ID NO: 28099 - DNA, 333 bp, Zea mays
  Peptide Sequence Number=SeqID_71474
atgaagctttggaaggagacttccaggagttccaagactacgacgagttctaggcgtgggttagcggcaacccccagtcggctgcctgtgaaggccgcgtttatctacgtttcttttccgcactttgatttactggatcctcgcctaaccaccatcgcagcaaaatcaacccgaggacctccccacaccgaccactcccctactgcccttgccccttttggaagtgatcaaggacacaacttgtctgggactcgagattccaggtaccaggatgatcttcagatgactcataacctcgcgctagtcgtagcaatacaaacaaacagggtatag

SEQ ID NO: 28100 - DNA, 351 bp, Zea mays
  Peptide Sequence Number=SeqID_71475
atggcaggcggagcaccgctgcaggtcatcaaaggattgaagccaacagagcgttgtttgctcctaaagtttttggcgagtcaaccaactgataaaccattgaggactaaacacaggacgcgtcttgaattggagttctggttcaagaaggctagatatatgtcaagatgcctctcaatcgtttcttcagtttacctacctcctagaactgatgagactatgctggctgaatattttggcaccatagggttgctaatggtcattgcaaaggaaaaagttcccttcccaattccatcaatgattggccttatgcatgcgcttgcagtgctttttgatctgtccgggaaatga

SEQ ID NO: 28101 - DNA, 459 bp, Zea mays
  Peptide Sequence Number=SeqID_71476
atggatctgacgtccgccgctgccgcatctgacatggctactgcaacggcccttgctgctgccaccgcgccaagagcgggtctgaacgcctctctagccgctgccacagatctagctgctagcgtgagacccctcctcgcccacccgtggggcgtggcaccaggcgccgctacagcaagtctgctctcccggttggtcgtcgacactgcctcacaggttcgcctcctcgggctctctctgtctcaccctcggtgcgagcacatcggccctgtgcaccagcacgctcgccggggacggcctcgaacctctccctggagccctctcacccacgcagcagtgccctcgtcgaccccatcgggcttcaccctcactgcttccatgtgggccaaaactgttgctcccgcatcgacagcacccgccaccggctacgcattggtcgctgccatcggcacaatctag

SEQ ID NO: 28102 - DNA, 249 bp, Zea mays
  Peptide Sequence Number=SeqID_71477
atggaggtgaagcccaccttccgcgaggaattgtcgccccaagagaaaatgctcccgccaaaagggactacaggcatgctcgttgaactccgacgaagcacacaggtaccccaagatggtcaaatactcctagaaatcctgatctcccccacggcggatctcacttcccccacggctctgtttccttttctactcgatgtgggggctgtgggtggatggggcaccgtagaccttggttcttatacctag

SEQ ID NO: 28103 - DNA, 1179 bp, Zea mays
  Peptide Sequence Number=SeqID_71478
atgaagaaagggcgtggaaagctggagttcgcaagaataggccaaggcacaataatatttctagatggacctgggccgcgtactaggcagcaaccatgtgatataagggacattacgatacggaaggaagataacaaagaacagaaagctgatttccgtcgcaaactatctctcttctctgcattccattcgccttcttcgtctccaattctcttcctctctaccactacgctaacaggcgcgtcgcagtgggccgccgggttcacgttcgagtgggacggcgacgccggcaggacgggctttaagcgctcctgccacgtggttggcggcggcaagcgcgagcgcgggccagaccacgagcgcaagaagggcatcccctggacggaggaggagcacaagaccttgaatcatttgggaaatttaatgcagattggacactcagcatatgttgattctccactcgggccagatgcgtttcgggaatatgaaaccttacttattcaggaccatgatgagcttcttaagaagtctgagaatttagacagacataaagaaagcattcataaagaggcgagtgattttacctctaacgttgataattattctaagtggggttctggggtgcattatggctctaattctgaatccagcccaacgaaaagggattttttgatgacgaaatgggccagggtttttgttttgccctctgaaggcataattgctgactcaagcctgtcgaatcatcatgaggattcccttggctctggtttaccctccatatctactagtaaaccttttgatagtgacgaggtaccaccaggagtgacattgactacccagtttctgtaccatttggccaataagatggacctaaagcttgatatattttcacttggtgatacatcaaagccagcaaatggtgaagcagcaagccccaagaagcagagcccatctggctcacgctctcctgattctcttgagctatctgcactacaggaacgtaaagcattttcagcgggaaattggtttgcagaagataagccggagggaagcagtgcagaagataatcacccgagttgttgcagtgctgagcgccaacgaagaaaagtaaacaagcgacgcaaaaaaaggatctgtggatgtccagctgcgtcgggaggtggctacatcaacaaatga

SEQ ID NO: 28104 - DNA, 237 bp, Zea mays
  Peptide Sequence Number=SeqID_71479
atgggccctggttgccagaggcctcttcccagcgtccttgctgaccgatgggtcccatggatgggggatgtggcgaccacaccacaaatgtggttgatgtggtctcgtaagactacaagcccctctaagtacaacaatagtgcacgcaagcatcgagtgatgattacaaatgtacctttgaaatacttgaaggttgttcggaggtccaagcgttctaaagtttcgtatacgaagtga

SEQ ID NO: 28105 - DNA, 1422 bp, Zea mays
  Peptide Sequence Number=SeqID_71480
atgggcagcttggacaccaatcctaacgccttctccgccttcggcgtcgacgccaccaccggcttccagcccctccaccccgacgacgtccgcgcctacctccacaaggccgtcgacttcatctccgactactacaagtccgtcgagtcactgcccgtgctgccggacgtcaagccagggtacctgcggcagcagctaagcgccgcggccatagccggcgacctcatcgcgtccgccatgaacaccgtcggcttcacgtggcaggccgcgccagccgccacggagatggaggtcctcgcgctcgactggctcgcgcagctcctgcgcctgccgcccagcttcatgaaccgcaccggcgcagctgggcgcggcaccggcggcggcgtcatcctcggcaccactagcgaggccatgctcgtcacgctcgtcgccgcgcgtgacgccgccctccgccggactggctcccagggcgtgtccggccttccgcggctggctgtctacgccgccgaccagacgcactccaccttcttcaaggcgtgccgcctcgccggcttcgacccggccaacattcgctccatccccaccggccccgagacggactacgccctcgacccggccaggctcttcgaggtcatgcaggccgacgtcgacgccggcctcgtgccgacctacgtctgcgccacggtcggcaccacgtcgtccaacgccgtcgacccggtcggagccattgccgacgtcgccgccgtgttcaacgcctgggtccacatcgacgccgcctacgccggtagcgcgtgcatctgcccggagttccggcaccacctggacggcgtggaacgcgtcgattccatcagcatgagcccgcacaagtggctcttgacgtgcctggactgcacgtgcttgtgggtgcgcgacacgcaccggctcactgactctctcgagaccaatccggagtacctaaagaacgacgccagcgactccggcaacgttaccgacctcaaggacatgcaggttggcgtcggccgccggttccgggggctcaagctctggatggtcatgcgcacctacggcgcggccaagctccaggagcacatccggagcgacgtcgccatggccaagatgttcgaggacgccgtgcgctccgacaaccggttcgaggtcgtggttccgaggaactttgctctcgtgtgcttcaggatcaagccccatggtggcggtataatgacggaggaggacgcggacgaggccaaccgtgagctcatggagcgcctcaacaggaccgggaaggcttacctcgcgcacacggtggtcggcgacagatttgtgctccggttcgccgtcggttcgtcgctgcaggaggagaggcacgtccggagcgcgtgggagctcatcaacaagaccaccactgagatcatgcagaaataa

SEQ ID NO: 28106 - DNA, 1551 bp, Zea mays
  Peptide Sequence Number=SeqID_71481
atgggcagcctcgacaccacccctaccgccgccttcgccgacgtcgccggcggtggcttcgagccgctcaacgccgacgacgtgcgctcctacctgcacaagtccgtcgacttcatctacgactactacaagtccgtggagtctctgcccgtgctgccgggcgtggagccgggctacctgcgccgcctgctgcagtccgtgccgcccacctcctccgcgcccttcgacattgccctaaaggaggtccgcgacgccgtcgtgcccgggatgacccactgggccagccccaacttcttcgccttcttcccgtccaccaacagcgccgccgccatcgcgggcgagctcatcgcctccgccatgaacaccgtcggcttcacctggcaggccagccccgcctccaccgagatggaggtgctcgcgctcgactggctcgcgcagctcctgcgcctgccgcccaccttcatgaaccgcaccgccgctgcagggcgcgggaccggcggtggcggcgtcatcctcggcaccaccagcgaggccatgctcgtcacgcttgtctccgcgcgcgacgccgccctgcggagggcaggctccgtcggggtcgctgggatcaccaggctcgccgtctacgccgccgaccagacgcactccaccttcttcaaggcgtgccgcctcgccggcttcgacccggccaacatccgctccatccccaccggcccggagacggactacgccctcgacccggcgaggctgctcgaggtcatgcaggccgacgtggacgccggcctcgtgcccacctacgtgtgcgccacggtcggcaccacgtcgtccaacgcggtcgacccggtcggagccattgccgatgtcgccgccgtgttcaacgcctgggtccacatcgacgccgcctacgccggcagcgcgtgcatctgcccggagttccggcaccacctggacggcgtggagcgcgtggactccatcagcatgagcccgcacaagtggctcatgacgtgcctggattgcacgtgcttgtgggtgcgggacacgcaccggctcaccgattctctcgaaaccaacccggagtacctcaagaacgacgccagcgagtccggcaccgtcaccgacctcaaggacatgcaggtcggcgtcggccgccgcttccgcgggctcaagctctggatggtcatgcgcacctacggctccgccaagctccaggagcacatccggagcgacgtcgccatggccaagatgttcgaggacgccgtgcgtgccgaccaccgcttcgaggtcgtggtgccgaggaacttcgcgctcgtgtgcttcaggatcaggccacagggcaccgacttgacggaggaggacgccgacgtggtcaaccgtgagctaatggagcgcctgaacaggacgggcaaggcgtacctggcgcacacggcgatcggcggcaagttcgtgctgcggttcgcggtggggtcgtcgctgcaggaagagaggcacgtgcgaagcgcgtgggagctcatcaagaagacgaccaccgagatcttcgaggaagagacgatgtag

SEQ ID NO: 28107 - DNA, 597 bp, Zea mays
  Peptide Sequence Number=SeqID_71482
atggtggcgaggatgacaaactggtcattgttgttgttcctcctccgcgtcacctccagcgccaagatgacgccacagtccttgatatatttgtctacgaacgcgcgcgacatggcacttatcggtacccaaggttgggctacccacttctactgggtcaatgcgggatccatgtggctacccatagcacacggtgataggcagtctaccctgactcaaagtctgggtccatctgatagggccactggcctctgggtcagtgtcaccatatgccccatcggtgggattgctcggcaactacagcctatggccggacccccacatatgccatctaaacatccagccaagggaggcccgatgctactgcgtgtctgggccatcacgaatgagatccgaacctccataagtgtcatacggatgcccagccagggaagatatatcatcgacaagggatttatatgttactcaccttctactcaacctggaataggggaaatgatagtgttcagctcaggtggcgacgcaaaccccgatgagtggttaatgtacttgagttcaaacccatccccgtcatctgctgtagaacgattggagtga

SEQ ID NO: 28108 - DNA, 207 bp, Zea mays
  Peptide Sequence Number=SeqID_71483
atgacgggagcccacctggccaagggcatcaagagccccatgtttgaccagggtcatcgcgagcccaaaggaaaagtggcatgcttgaaccctgcaatagggctagggcctcctagagccagggaacatagggctcccaggccctgtaaagtaatcggtggagcacgagctcgagggagaccaccttgggatccaaagccctcttag

SEQ ID NO: 28109 - DNA, 267 bp, Zea mays
  Peptide Sequence Number=SeqID_71484
atggaaatacttaaattgaaacttgggttaggaacaggtgatgttctacccagatcctcagctgagtataatcgattcggatcgccgtaccttcgcggttatgaagacttggtcactttctacaaccatacccttgagagtcttttccttagtcgggtgaggaagcgacaaatttttgttgcttttgctccaaggtggtaccaaatgaggaaaaacaagactgaagtgcgggaggacttggtcctccacataggatcttttgcttaa

SEQ ID NO: 28110 - DNA, 636 bp, Zea mays
  Peptide Sequence Number=SeqID_71485
atgaacgtatgtgagctcactcttgctgtctcacacccccccacaggtcaagaacaggtaccacaggatgaggcgcatggaggatgctgcgatgtgttcgtgagaggaccctttacagtctcctgctggataagtgatgccttggatctcggaacaacaaggggagtcctcctgctacgcgtcgatttggagcttcgtctggggcctcagccatgtggccatggcagacacagtgtctggccctcgtgcagggcagagccacgactggctaatctgggcatcagctcgtcgattcccctaggcgcgcagtgttctcggcgcgggtggtcggatcttggccagaaatgggaaccccgccagacccacgctccgcagggccagcttcgggggagctcctcttcctcggtggctgctactcgccacgatggcgttggctcacacaaagaacagcaagaccccagccatgccaccgcgtgtgctcgtatcctcggcaagcgacgaccgccgccgtggggtcagtggttccttgtcgtcgacaaatctggccacgggccaccattcaccatggtggattctctctccatcccctcctccggtagggatccttctactgggttcgccttcctctctaattag

SEQ ID NO: 28111 - DNA, 849 bp, Zea mays
  Peptide Sequence Number=SeqID_71486
atggggctgcgcaaaaacagcaaacaaccggcgagtgtcgacgcgagcccacagagcgcggagacgccggggctgctgcaggaaatcgacgacgcgtggcttgctgcgcacttcgtcgagcacacagagagcgtcaacggcacactgcgcagcagcagagaggaggcatcggcagagggctcgcggccgagagaggagcacaggggcgccctgcgctgcggagatgaagggagcagcttccggcaacccaacgacatggagaacagggagggcgtggctggaggaaaggggcgagctgcttgtggccatgggggggagaagaaagggcgccgtcgagggagcttcaacagtggagcgctcggctgctgggttgctcaccgtggacagcagaggaaggcagatgcagtggagaaagggcgctcaaaactgctggccggagctagggctcggccatgggaaagaagggggaaggaggaaggagagccggctggtggagatgggagagctcggctccatgcagatgtggagctcgccatttggagcagtggcaggaggcgtccatggctgctggccgagcagaggcgtcagcgtgctcccaaggagcttctgctcctgcgcacacgaagcagagaaggaggaggacggccgagcgagggaggaaggggctgctgctcgccaggaagaggagaagaggtccggccgtggggagagagccacgtccatgcttgctgccgtgaagtgaagcagggaggaagaaggtgcgtgggaaaagagggagaagagagagtggcggctaggggagtagatgcaaattttccaatttgcaaggggaggcacttctatttatag

SEQ ID NO: 28112 - DNA, 585 bp, Zea mays
  Peptide Sequence Number=SeqID_71487
atgaggagtatgccaccgtccgcggtagtgtgcctcttcaactccgccgaaagcagcggcccagcctctgacacgggggcccaggcccatgagtcatactcttcgggcgtcggcctccgtgtgcgaggaaggcgaaccgccgtagaagtcgaaccgccactcgcgccagtaccgcgccccctcagggccaccgcagaggacggagaaggcgtggcagttggcgtgaccgagggcggactggcagtaattatgccagcgagcacacataagcagcgcggcaaccgacaatccagctttggccccacctgcaagctctcgagcggtgaacaacacccgacccctccacgtgggcagctccggggccgccacatggccagaggagatgatatactccaaggtggcgacagtgggtccggacccccatgggaaagtgccggacccctggatgcacagcccggacttcctggcggggttcaagacctcgacaggtacaaaccagacctccaggacgggtcccggacccctcaggaggggtccgggctactcacagtagggccccaggattccaaggaaaagaatacctag

SEQ ID NO: 28113 - DNA, 369 bp, Zea mays
  Peptide Sequence Number=SeqID_71488
atggccttgctagaccctcccgagcgcctccagcccgaggtggcactcaacttggtgcgcaacctgtttggatggggtgcgccggcgttcgccggaaggatctgtgtcggtgcctctcctcatggcaatctcgccgctggagagtttgtgttcttcatctccaaccaacctagcgggttggtgctgccgatcccgcctttcatcgtgctgctgctgaaggaggttggcctccaacctcagcacttcacgccctgcttcatccttcaggcggccatcatcgcctacctccgcaggatgtccgtgggggtgacgctccttcccgcttcttcttcaagcatttggggggaaggatgttcaccagcctcgtga

SEQ ID NO: 28114 - DNA, 1467 bp, Zea mays
  Peptide Sequence Number=SeqID_71489
atggagccagatgtaaggcctctgggccgcggatttattgcggaggaggcgcgccgcctgtcaagctggcaggtgatgtgccgcctcagcattaaatacgccttgtctactccactgacaagcgatgtgccgcctcaacatttaatgtgccctgtccactctactgacggacggcggccaggccatcctgcaggcggcgtgcccgtccgctccggtggcaggcagtacgcccgtgttgtggcatacattgtgctcatcatcactcgtacgttgccagtgaagcttccgctgcacgccgatactaccatgatggtgcaaatcgtggagcaccgcgctgagacttcggtggattttctgatggaggaagaagctgcttcttccacgccacaggttcccaaccgcccaatgccgggcattgctgctgcgcacgctgcacagccgcatacaaccacgcagatatcccggactccatcgagggccgctccgggggcgttgtctgcggccagggagttgttgcaccaccccccaagctccacggcctcactaggggccatgaagcagtggcgtgacgacgtcgaccgactgctcggcatggcgcactccgactcgaccaggtcgaggccatggtcatcccggcgccaacatgaggtgacggcgtctgtgcgctcaccttcggtgaggggtgcacagaccaacgacgtccgagcagaactcaaccgcaggcgtgcgggagaggatgctcgagtctctctagagagggcgcgtgagcgccggcaaaacattgagggtcgcaacctcgatcaagattttgctgcggtagcaccacagacccccagcgggcgctcggatcaaggcaggtgtcctgttagctggcgtgggctgtgccacgctcgcggaccatctccgcgcggtgacctggccacccaagttccggccgcactagccggagaagtacgacggtatgtccaacccgtcgaaattcttgcaggtgtacgtcaccgccattacggcaacaagtggagacaccgacgtaatggcaacatattttcatgttgccttgtctgggcctacccggacttggctcatgaaccttaccccaggatcaatctactcctgggaagagctctacacgaggagcctggggaaactctctggactttcatctcccgcttcaccaggggggtgcgtgatgaaaaaatgctggagaagttggccacgcatgacgtggaaactgtcaccacgctttttgctctggccgacaagtgtgccagggctaccgagggccgtgcatggcactcggcaccacagaccagggttgcccagacgagtggctcgggtgctgtctctcaggacggcaaaaagaaaaagaagaagaaccgaggctccgagaggccgtcgtctgctgctccggtcatcgcacctgcgactaggggccgaaacgagcgcaacaagcgcccgcggccgtag

SEQ ID NO: 28115 - DNA, 318 bp, Zea mays
  Peptide Sequence Number=SeqID_71490
atggcccgcgcccgcgcctataaagcccactcaggcgtcgaccatacccttccgcgcatgctcaacctcaccggagctcaaactcaccgtcggttgcccccctcggagaagactgagcacacctcggtgaagctcctcgagcgaggaatcgaagtctgcttcgccggagaggccagtccacggtcgccggagttcacaaccccgccggagtgcgtggaccgggacatggttgctggagtgacttggccgtccatcttgccaccgggttggactgtcgagtgggaccctacctcggttgaggaggagcatgaggagtga

SEQ ID NO: 28116 - DNA, 534 bp, Zea mays
  Peptide Sequence Number=SeqID_71491
atggcccgcgcccacgcctataaagcccactcaggcgtcgaccatacccttccacgcacgctcaacctcaccggagctcaaactcaccgtcggttgcccccctcggagaagactgagcacacctctgtgaagctccccgagcgaggaatcgaagtctgcttcgccgaagaggccagtccacggtcgccggagttcacaaccccgccggagtgcgtggaccggagcctccccgagccagccctgcccctcgccagacctttctcgccgccgatagactgtaaccttgctgacggagagtacatccttgtgccggagcaaggagctgctcaggaggtagccccggatccagcacccgagcctgcaccagaggatctgcctgccacagccttggaaggcaagccccggaatcccattcagatgaatactagttctctggaggacatggttgctggagtgacttggccgtccatcttgccaccgggttggactgtcgagtgggaccctacctcggctgaggaggagcatgaggagtga

SEQ ID NO: 28117 - DNA, 354 bp, Zea mays
  Peptide Sequence Number=SeqID_71492
atggcgagtcccttccgtctctgttctttccctgcttgcgtcgtgatctcccagctcctcaatacttgttcagtcgtctcgaaatcccaaaaatcgggtaaagacggagttagcagcgcgatattccccaagcaagaatcgggtgaagacggagttagcagcgcgatattccccaagcgctcgacaaattgcctggatcggaaaatcgctaccgatctcgcggattcgtgtcagctgtggaaacggtgctcaataaattgcgcaagtcacgaaactctcgtcgacttcgcagttcttgcgattattgagccaggttcagttatagcgagttatttcactattccggtcaattag

SEQ ID NO: 28118 - DNA, 345 bp, Zea mays
  Peptide Sequence Number=SeqID_71493
atgccgctgctcatcgaggacattgctaccgacgcccaaatcctcgaatccttcggtattcgatataggagcctcgggcggccgaaccatggcacaccggcgagagcgcgaccacgggggtgcccgacgcaactgtgtttgtggtcgggaagtgagaagtgtcgtgggcctttgatcggtgaacccacggtacttgttcggtgggttggatggcaaccgttggatctggatccaacgatccagaatagattaagtcaaggtgtgatctgggccatcgattggtcaagttgcgggcccgatttgggcaagtggtaccgtttcgtgaaggtagatctggaccgttga

SEQ ID NO: 28119 - DNA, 204 bp, Zea mays
  Peptide Sequence Number=SeqID_71494
atgggccaggagttgttagtggacgactacttggtgggcggattcaccatgtttgatgcccagactgggctgccacctgctggggcggatgctgggcaactagcagtggtaccgtctacggtgcctatcgacctggtgggtacatcgaacggtgacacgggggacttcgctggacccatggtcgaaattttgtgtcgctgctga

SEQ ID NO: 28120 - DNA, 303 bp, Zea mays
  Peptide Sequence Number=SeqID_71495
atggcgagagtagcgtgtaccctcagtggcaagaggctggacggtggtctttataacaaaattaaagctggtacattgcacaacaactttgatgtagttgcattagcagtttgccacataaaaattcaagaaaaacgcccttcaatgtgccctgtcaggcgctttaaagaagatcttcatggtacagtgtctgaaaatatcagtgatgcagtgcacctcgccgccggtgacctccacgccacaatccgcaccggccgttgtggttcgtgctcggcccagggaggatattaccgtgggacgtaa

SEQ ID NO: 28121 - DNA, 174 bp, Zea mays
  Peptide Sequence Number=SeqID_71496
atggcctcctcaagcagtgggcgcacccccggctcgtccgaggccaagctcgggcaaactttgtcgtacggcaacctcggccatatcgccttaccaccgaccgtatcgcatgcacatttaatgaaaacaacactattcaccctgtttcgactactgtgccaaccaccagggtaa

SEQ ID NO: 28122 - DNA, 288 bp, Zea mays
  Peptide Sequence Number=SeqID_71497
atggccggaactcccagcgccgcggctacctttctctggtgcttggctaactcgccgtcgggctggctcaagccccatcgcggcactccagctcgcctagtctccgcgccgcgacactccctctgtcgtctcggttcgctcggcctcaaattccagcgcctcgccgcctcgccctactctcgtggttcggcgacagccggcgcgagcctggccgtggcggtgttgtggtgtggggacgtcgtgcgcgtcgcgacagctgtcttggccgcgaagcagtccgcgccatag

SEQ ID NO: 28123 - DNA, 969 bp, Zea mays
  Peptide Sequence Number=SeqID_71498
atggtcgtgatgggttcaacatctaaaaagatgtacctctcacaggtgaaggccttcactgaccatgttgctttgggggcgctaacctcgcagctgatttccaagaggaaacggctcgagggtaggattgagtgcattttgacacagcataccgatacaattagggacaattcggtggccaaaaataagagccaaaaccttctcgacaaggtgacggcgcttgagaaggaaaaagaggacctcagccgctgccttaacgatgaaaaggaggatgccgagatcgcccacacggaggcccaggctgcccgcaagcgggttgtcgacttggagtttgaattgaagaatatgcgcgaccaccgtgagaagacggagtatgccacccgtgctggggatgagctagagtcgctcccgtccattatgacgggcctcatgtcctatgcgtctcttgtgacctttgaaggggttgtgaatgccttgtcccgcaagggatgtaggcactttgaggccttcgagcgagtcaacgaggacttcggtgctggtgtattccaggttgaagacgacgtgttgaagcattctacgggggcgctttatgataggatgtgggcgctcatggccgcggcgatgagggatgaagaggtggaggacctcactagccttgagagcttggtggcctggaaggatgctgcggtggaggtttcggcatctgggcctgcacaagcaaaccttgatgatagggcaaatgatgatatgttggtgtgtgaaaatgtagtgattcttagtagtgacgcatctgatgaatctgatgttgggtcatggtcttcagaaggtgaagggttggggagcccgtttgcttggatagatgacgagtcttcggaagatgacttagattattttgcggcgctagatttagctatatcagagtctctgttgaaggtcgccgcccttgaggcggtgacaactttggtcggg

SEQ ID NO: 28124 - DNA, 528 bp, Zea mays
  Peptide Sequence Number=SeqID_71499
atggcatctgcatgtggcgcactgcgtaggtcgacgtctcttgcgtcgaaggttgattggcgaagtgttcttgtttgggtactggtgggggtggtggtggattttggtgatgtggtggtggaggaagggcttggatctcttggtgttggtggtacatatggttttgctggtggagggatggaattgttcattgtggaattatcgctggtggtattgctgggggtggtaggtttgtgcaataactcgttggttatcaacttgttgatttctggccatcctgtctttggcagccttggttttagggcagtccctggtggtgtgcacggagtcttcgccgtgaaaaagtcaataaaaccttcgtggttgcgggactcggcctttgcctctgcctctgcctctgcctctggggttgctgccgtggccctgttgtgtggggtactcttggctacgagcggtgtctccagtctgctgttgattggtgatggtgttcactcggggctgtgtaacacctcaaatagcataaactaa

SEQ ID NO: 28125 - DNA, 370 bp, Zea mays
  Peptide Sequence Number=SeqID_71500
atgacctgcaagtttactgcaatacgttgcatgaggaagtccatatactatactcacatctacacccaagtgagcctgcacaacctgctgaggcggaagccggaccatctcacgttgcgggacatgccgaccaggactcgaggacaggacgcagcaggaacttctgggggacgggatgttaccccaaacccacctccagttcctcccacgttagccgaggcgattgccgccttggtgaatgccaccgcagacaatacccgcttccttagggaaatggcggaagtcgttgtttgccgcataaccgccgagtaccctccagtacctggtggggaaataacgtggctatccaacctgtcagacgaatcttcta

SEQ ID NO: 28126 - DNA, 75 bp, Zea mays
  Peptide Sequence Number=SeqID_71501
atggccatgatgggttcaacatcggaaaagatgtacctctgccaggtggtgccaaaggaggaggcagatcactaa

SEQ ID NO: 28127 - DNA, 723 bp, Zea mays
  Peptide Sequence Number=SeqID_71502
atggctacattgaaagatgatggaactgtagttatcgatatccctactactattgaagctgcatcacttgatcttcattcagaggatcaccagaatgtggcctttggtggcgaaccattggactcttcagatcttcaggatagaccaccaatgcaaattgctatgctgattgttggtacaagaggggatgtgcagccattcatagctataggaaaacgtttgcagatttttcatggtgtgcttatagaagatcagtatgtgggccaatttatttatgatgaattagcaacccatgccaacttcaaggacttcgtgatgactactgggttggagttttatccccttggtgaagacccaaaaaatcttgctggatacatggttaagaacaaaggattcttgcctgcaactccatcagaaattcctatccagcgcaagcagattagggacatcatattctccttgcttcctgcttgcaaggacccggacattgatactggtgtttcttttagtgcaaacgccataatagccaatccagcagcatatgggctccccgttgcgttgtggtttgtcggccccacgttcgccgtgctcatggcctcgtcttcaaggaagggtgccatcagagacaaatctgttttcatgttcaacacgctccttgaagaggaaaagaaggcttggatccagaaactcgagaggcaaaaagggcaagagttgtttgagtag

SEQ ID NO: 28128 - DNA, 489 bp, Zea mays
  Peptide Sequence Number=SeqID_71503
atggtcgtcagctttggcaacggcgactttgggagcattccggtgtcagcttcctcgggatgtcgcgcccgtcttggccccaaaggcaccggcgaaaggtctctgctctctctgcaactgcatcaatcattgcggcggcgtcttgcagcgaagacccgcctcctccttcttgtcgatatccctgctggtgtcgaggagattggttccgtcattgactggcggtggatcagttcctccaatgttgcctgcagggggaatctcagatcccgatgggataacggggatctgagacatagtcacagcgattccagtcactccgagcgcctaggtgatcggttcctctcaaataaattctcagtggtcgctctatgctatcaaccactcttaatccggctcttccaagaaatagctcccccagagagcataaagacataccctgaagtggacttcagtgtatctctacaccctccccagtcggcatctgcatag

SEQ ID NO: 28129 - DNA, 153 bp, Zea mays
  Peptide Sequence Number=SeqID_71504
atggggagattgaaagggaaatgtgcctttgggccatttctaagtattttggtgattgagtgccaacgcaagtgcttctgtgttgatctatgcaatatggtggacaaagtgcaaatcatgtcaaaagcatctagagctctagttgagttgtaa

SEQ ID NO: 28130 - DNA, 1017 bp, Zea mays
  Peptide Sequence Number=SeqID_71505
atgaagaaagagtgtctgatcattgtgaagaaagaggaggtttgccagtgcttctcatataaggggcaggttatagcgtcggcttggctaaatgatctccgccaccaaattgaacaaaccagaatcctaagcactttttatcgttctgcatcagccttgggatcccggcttccatctatggcaaatgctaaagcaagagtagctggtgctggcgccatcttaagacctgtatctactgggacgcaggttgtaatcaggagagctcgcagtgtagcacaggcagcatggacaagaccagcactacaactgtcctcatggacttgtattgggccaagacggcgaaataatatatctacctcaactgtcacatcagaggaaataataacatctacaggcggtggatctgaatccacttcattgttgactgaaaccactacagaaaccacagagacagttacatcagaagctgtatcagaagtggttcagagttctgtttctgtggcggtcgatgctgttgacttggtagatgacaagggagatagcgatgatgacatcgtcgatcaccatggggacgaggacaggatgactgatgtggagctgtggcagcaacttgaaagtgagttgtaccggaagagggagggagaagaagatgacatagccaaagagatggctgaaagtacaattgctgaggaggtgggtggcgtggctggagatgtgctcagcgagacaaaggaagtgcataggttctaccctcctggaaaaatcatgcacatattattctccagcagtgaagaagcagttcgtggagaggagcctaatgatgatgttacggatggggaggcacaaagcagcctagggatcttcttgacgccaagatctctgtacgacaagctgaggctttcgaaaatgatgatcaatgaccattacatgcctatatacagaagaaacatcgagcagctgatcgcgaagcttgagaaggattcctcggatcaaatagggtgcgtcaggtctagttga

SEQ ID NO: 28131 - DNA, 780 bp, Zea mays
  Peptide Sequence Number=SeqID_71506
atgggatgggtcgggtggcggtggccccgacgctcgctcgtctccggatctcttcttcctctccgcctcgcccttccccatcagtactgcctccgcaagattgggggatggaacgagggcgggggcaggggtcacgaagcggcgagcgggcgtgcatcgtgggcgagatccgcgggtgggttccatgcgcggacacggcgaggtggagcacaggcggagggagaggcggtgtggggagggccgggatccgcggcaccttccatcggcggcgcggtggaggcgtgcatcgtgggcgagatccgcgggtgggttccatgcgcggacacggcgaggagcacaggcggaggggagaggcggtgtggggaggagggccgggatccgcggcaccttccatcggcggcaagaggaccgcgcggcacaggcagaaccgtgcacgcctacactccactcttaaggagtattactgaaacttgtttaaccaaaatcacatctgacaaagagtttgtcgagagttttctcggttttgccgagtggcagcagctgcgcctgccatatatgatcggaaatcttcgtgtgacaaaggtacacgggaacccggaccgggccggagacagagacgacagtaccagcgacgagaagttggtggcaggccggctagacgaggatagaaagactgacgagcaggtaatcaggcactgcagtctgcagaacggctaccgaagtcgttacgctgttgcaacaaagcgccgggtgattggattgaccggcataccgagatga

SEQ ID NO: 28132 - DNA, 369 bp, Zea mays
  Peptide Sequence Number=SeqID_71507
atggaggagatgtcccagccgctacaacagcaggatggcgcaatcactacagtaaaaacaaacacctccgacggccatgttatctccgacggccacgcaggagaccgtcggagcgccaccgtcgtcccgtccccgagctcccgccgccgccacggccttccggccgccgcgctgcccgccccgcccgccgccgcgctgcacgcccgcggccgcgctcgccgcgctgctgccccacccacccggtgtgctgccgccccgctcaccacgcagtcgtccccgtcaacgccgtgctgcctcgtcgctgccgatcgcagccacgctcacatcgggagccccgcccgccccgccccgcactctcaatgtgcttag

SEQ ID NO: 28133 - DNA, 189 bp, Zea mays
  Peptide Sequence Number=SeqID_71508
atggcggcgcgggctgaggcaacaggagatggggtgaatctgccatggcaggggcgcagttattgcaagggcgaggtcgtggaagtttccattgcatgttcgagcataaaaaccttcagttttgaacgtaaataccgagtcaaagtgaaagacattggtaactctgatgcgttctattcattatcgtaa

SEQ ID NO: 28134 - DNA, 123 bp, Zea mays
  Peptide Sequence Number=SeqID_71509
atggcgccgccgcggggtggggtctgcgccgccgtgctggcgatcggagaaaggatgttcagtctagaattaatattggttcgcgacctgtttcggtccagggatcttagatccaacggctag

SEQ ID NO: 28135 - DNA, 315 bp, Zea mays
  Peptide Sequence Number=SeqID_71510
atggggaggctagaaccccgggcagaatgggaatcacggcttgtgggtaaagtgtgtgttggaacttgctaccaggtgcaaggggatccaacgggggtgagagttgacgtaaacagggttctagcatgggatggcaaaagctctgttaatctagcctctcacgggcactgtgcgggggcccgtaacgcgcagcggccacgcagggcctgttataatgggccggatcacacgtgggcctccatgctggacgaggtcacaatgatgggacgacctcgtcacaggtcttcgtctgatgatgtgtgggacgaagggtga

SEQ ID NO: 28136 - DNA, 489 bp, Zea mays
  Peptide Sequence Number=SeqID_71511
atgacgaacgccaagaaaggatgtcgggtgctcgcgatcgatgttaccgacgaaaggtgcggagacgaggcttttgctacacaccttgaaacagagtgcttcaaaaaatatgagaaggcgggcaagacgttctacaactcacagatagctgccacagttcggtggttgtcatctgcaacacccagtcagatgtgtgactgcctcgacgctcttatcgaccgaaccaaagatgatggtgcgtcaggttgccccgacattgtcccagagtcacctccagcatctcctgaaatcgtcgtcggcgcaaggtcaggagaaaccagtaacgacaaaccgcagcatatttgtgagttgaagagttcagatgagtctgcaaagggtgctgcagcatcgactgggaacatggtgctccccgccgtaccgacgttcaaagaattcttgagccaaaaaggaagggatcgggtgttggggactcgttctcaaatgctatga

SEQ ID NO: 28137 - DNA, 123 bp, Zea mays
  Peptide Sequence Number=SeqID_71512
atggcgccgtcgtgggccacactactccgagggcggtatgcgtcgcaacaccattgtaggggctgtgtcgggcttctctggtcgatggtcgacgccgcgggggaggccagcaccaccgcctga

SEQ ID NO: 28138 - DNA, 204 bp, Zea mays
  Peptide Sequence Number=SeqID_71513
atggctagctatggtgaccgaactgccaagcccgaccccaccgatgtccctgcagcccgccccggtcgttcgtctaccttcgccgtgtctccggctcgcttgcgtcgacgggacttcgtctacgctcgtctaccgcccgtctatccctcgtctacccccgtgtgcattcgtgtcgctcgccatcgcccgcgcatcgcgcattaa

SEQ ID NO: 28139 - DNA, 186 bp, Zea mays
  Peptide Sequence Number=SeqID_71514
atggccatggccatggccctgctcgaccgagccaagggagtcgtgcgaagatgctcgagaccgattgatgcaattcttgaggatctcctggacctgtgggttaggacccacacacgctttcgctacgccactctgatcttgttggttgatgttgttcgcattgtcttcattggggttagcggctaa

SEQ ID NO: 28140 - DNA, 381 bp, Zea mays
  Peptide Sequence Number=SeqID_71515
atggacaactgggtgcttctttgtgatgatgacagagttataaatgtcggcttgaaaaagattccaggaccttgggtcatggactctagggtgtctgtggaagatggtaggattggtaaacttgattttctaaagggagtccactcccttcaaagagatgtcagccatagtgtcttgagggccccgagacactgtggcctgatgcatgctgaggcccccgacataaggggcatcagatggaggcggctcaacatcatcgtcttgagcgacgtcttcttcctaacaggtgggagaggttctgcgctcaaactgaaggctgggttgctgtcaatgtgggatgaagtgaagaggaagaagggggtcacggtcaaaaaggcctag

SEQ ID NO: 28141 - DNA, 765 bp, Zea mays
  Peptide Sequence Number=SeqID_71516
atgtcaactacaaatgatgtcactaagtgcaaagaatgcggtgtgttggcaagtcaaaacaacactataaataaaacagctgatgaacagacattcaagacacaaaaggatgcacaactaaaccaacagacaagtgaccttggaacatgttgttgttgtgagtactatggaattccttgttgccaaatcaatgcaaatgaaagtgaaactgcaaaacagaagaaccagattttattttctggcataaaaagacagatgtctccccaagaacaactaatagcagattctctcatacctaatgcactgtcagtttttgaattgcgaagtattccaaaaaggaaacatcacaaggatgcccagccgcaagaagaaacacatgagtgttacattgatggatggactattacttgcacacagtttcagcctcgtaatcgcttcaggtccaagaaacgaaaagggaaacatggacaaagtcaagaaataacttcaagaaaagcttgctatcaatgtggacgtgaaggtcattacttccgtaactgtcctgagaagagttcactacagatcacctccgagatgaagctatctcagtcttcagacatggaatatgaacaaaaatgcacagaaacttctaccaacaacgtaaagacaactccaccatataacttatcaagtcgtgcttgctttggctgtggtgataccggccatcttgttaatagttgtgttggaggccgtcggcttccgaaggtcctcaaaaacataatttga

SEQ ID NO: 28142 - DNA, 447 bp, Zea mays
  Peptide Sequence Number=SeqID_71517
atgggagggaaggggagagggttggtcggcgtcatgccattgatggcattcaaggatcttgaatggagggagagagaagaggaaacagaagcaatgaactccaataacgtcgagggagagtggacggcgcgcaatccgctcggggctcagttaggcgggtgtcgcggtcgggctggtggcctgggcgtgcgcttggccgcgggcagcgcgcgtatggcgcggcgcctgggctgcacgatcacaggtgctggacgtcgggtcaactcgggtcagcgtcctggcgttcggtgcagacgcgctatcggccgggcaggggcggtcgagtcgtgccttggcgcggtgcgcagggcggggcagggcgctgggcggctgtgtgagggagagaacaggagagagggaaggagagagaagaatgggtgggagggagaagttcctggcggcggctag

SEQ ID NO: 28143 - DNA, 501 bp, Zea mays
  Peptide Sequence Number=SeqID_71518
atggcgcgggtggcggttcgacttctctacacccaggaaccggtgcccaaggaggatgactcatgggcccgggcccccgtgtcagagactgggccgttggtttcggcggagatgaagaggcgcactaccgctggcggtggctcgctcctaacgcggcagttcgccttcttcgcacccggagaccgacgcccaaagaaggcgtactaccgtgggcggtggaccgctcctcatgcggcggttcgccttcttcgcacccggagtccgacgcccaaggagtatgagtcgtggggcctgggcccccgtgtcagagactgggcagttggtttcggtggagatgaagaggtgcggcggttcactcctcgcgtggcggttcgccttctcagcacttggagacccgcacaccagctgtatgacttgtgggcccaggcccccgtgtcagaggctgggttgccttggtgcgcgtcgggcgaggttttctacggcgtcttggggcgcgagtaa

SEQ ID NO: 28144 - DNA, 291 bp, Zea mays
  Peptide Sequence Number=SeqID_71519
atggagttttgggtgacctccaacatgcatgggtactatcggtaccttaattcactttctaggatgactgttcttcccaagggaggaagtcaaatgaacgtccttggggagagtcatgccttcgtcaaggcgctgaatcgagcgaagggtgtccctgcccgctttgtctctgtcagaccagcgactgcggcggaggcctcgagcgaagggtggcgtctttgccttcgccccaacatttgccctccgagggaccagttcgacaaagtcacctggtgccgaagacgtcgctag

SEQ ID NO: 28145 - DNA, 533 bp, Zea mays
  Peptide Sequence Number=SeqID_71520
ctcgcaggctcgttggccagtgctgcccacggcaggcatggtggctgggcctctcccacgcgtccctagtcccgtctccggccgagcccacaccggtggccagcgcccgcgcaggcgagtccgtggccaagctcatggacggcgcggcagcgcgacctggagccgctgagcgcctcggcgtgcagacccccgcgcgccctcgtccagccatgctcttccctgctcggtccggcatggaggttgggagcagccgctgcgctcggggccgcgctgtagagctgctccttgcacgtccaccctcagctttccagccacgctcgctcgtccggcctcctctgctcttccccgggccatggccatggccatcctctgctgttggggcgaaggcaaagacgccacccttcgctcgaggccttcgctgcagtcgctggtctgacagagacaaaacgggcggggacacccttcgctccattcggcaccagacgaaggcctgcggcgacgccatcccgcagcgcggcctcgttcagctctga

SEQ ID NO: 28146 - DNA, 156 bp, Zea mays
  Peptide Sequence Number=SeqID_71521
atggggtccaggcacagtgcttgctctgccgaggctgggtgccgaggttctttcgttttgcttttgttagtcacccctcctgcggggagaggtaaagaagaaggcgtcgaggcgaatctccaggagttccaggacttcgacgagtttgaggattag

SEQ ID NO: 28147 - DNA, 450 bp, Zea mays
  Peptide Sequence Number=SeqID_71522
atgcaggcggcatgcaaccgcgccaggtggacgcgcttctccgactcccaacacgccggcatggaggcccaggcccacgcgtcacgcaaccggcgcgccggatgctgcatgcaagcaactgcaccgccacttgcgccaccaccgcgcctcttcggttgcggaaccaacgccgcgactcgagacggcccagcgcacgacccagcagcgccagcctggcgcgacggcggcgcttctagcgggagaagcgggcgacgcttcgccttcgccgtaataaccgtgccaaaaaagggaccgggaaagggggataccccgaaaaggatccttccctgtgaaggaaccgggctccgagccccccctactgatcaggggttcgaaggctggccccccgaggggttcaacagccgcctcagatcgcgtgggccctacacccactactggttagaggtttga

SEQ ID NO: 28148 - DNA, 1278 bp, Zea mays
  Peptide Sequence Number=SeqID_71523
atggcgtggcgatggctgcgctcagcgacgaggaggggctggtggaacgcggcgccgtcagggacgccgttgtttgcggcggagcagcgcgcgacgttggtgaacgtgaaggtgaagtgggtcaaggaccgggccctcgacgctgcagtgtcgcgggagcggcacctccgcaccgcccaccacctgctcgacctcgtgttctcccggcccggccaccgcgtctcgcggtcggacctcctcgctgaaaagtccgctcgaaggatatgtggttccgcacactctttgctcgagttcctcaggagataccataccatgttcacgttgtcccgcggcggcgtgtcgccgacagacatggcgttcgtcctgcggcagcgggaggtagattgtctcttcgccaccgagggcgacctcgtcgcccgcctccgccgtctcctcatgctcactctcccccgttcgctcccgctccacaccgtcgaccttctccgctgggaccttggcctgcccagcgattaccaggactccatcctcccccgctaccctgaccacttcgcccttgagcagccggagggcgacgagcgcgtctggctccgcctcctctcctgggacgatcttctcgccgtctccgagcttgagaagagcgctgacggaggcgataccacctgcatccccttcccggtgagcttcactaggggttatggtctgagaagcaagtgcatgtcctggctacgggagtggcaggcgctgccatacaccagcccatacgctgacgcttcaggcctcgaccgccgcacagacgtgtcggagaagcggaatgtgggagtgttccatgagctgctgcacctcactgtggcgaagagaacggagcgccagaatgtgagcaatatgaggaagctgcttggcatgccgcagaagttcaccaaggtgttcgaacgccaccctggcattttttacctgtccagggtttgtggcactcagatggttgttcttagagaagcttacggcggtggaagccagctgcttgagaagcatgcacatccgcttgttgctatcagggaagagtactccactttgttgagggcagcattgccaccaaggacgaggggtagagaaagacatggttcttttagcaggcagcatgagggatgtgtggtgggaggagatgaatttgaactctccaagctattccaaatagtaggcctacaaatccttgacattcagattggagaagagttctttgatgattcgtgggagaagattattcttgctgctggaggataa

SEQ ID NO: 28149 - DNA, 882 bp, Zea mays
  Peptide Sequence Number=SeqID_71524
atggcggacggcaagcgaggggaggattcggccgtggcgttgaagacctcgccgtcgtcggcggtgatggctgggggtttacgcggcgtgagcaaccctctggaggagtggagcgggcgcgtgaaggcgattgaggccgggttccgcgcgtggatggcgaagcaacccatccaaatcgaggccgcggtgaccacggccgtgggggcggtgcagggcggggctctgggtgggctcatgggctcgctcacagctgacggcgggtcgccgttccccatcccgcagccgccgcccaacgccaacccagaggccatggcgtcgttcaagcaggcccaggctttagctggtggacctttggtgcaagcccggaactttgcagtcatgaccggtgcaaacgcaggcatatcttgtgtcatgagaaggatacgagggaaagaggatatccagggcagcatggcagctgctttcggttctggtgctcttttctccatagtgagcggaatgggaactcctaatccagtagcaaatgcagttacaactggtgttgcttttgcagtatttcaaggtggctttttcatgttcattgccatttcctctttaagagagattgagctcgagacaggaatgttgtcatatctgtggaaaatcgggcagaaattctcaaagccaccaagtgaagatacatactactctcggacaagaagcatgctgcacaaactgggtcttgaaaagtatgagaagaatttcaagaggggtctcctcaatgatcaaacgttaccactccttacggacagtgctctgagagatgtgaagattcctcctggacccagacttctcatactcgaccaaattaaaagggaccccgagctggttcaagcaaagtag

SEQ ID NO: 28150 - DNA, 2664 bp, Zea mays
  Peptide Sequence Number=SeqID_71525
atggaggtgtgctgctgctccacctcgtcgtccgtcctcaccgccgggggccgcggcgccgcggcgcggaggctggccgcgccggcggctcgctggggcgcagcggggttcgggagggcggtggtgctggcgcacccgctcccacgcccggcatccgcggccgcggcggcgcccacgcgccgggcgcgcagggggggcgtcggcgtcgtcagggcggtgttcgagcggttcacggagcgggccgtcaaggcggtcgtgctgtcgcagcgggaggcccgggggctcggggagcccgccgtggcgccgcgccacctcctcctcggcctggtcgccgaggaccgatcctcgggcggcttcctctcgtcggggatcaacatcgagcgcgcgcgcgaggagtgccgcggcatcgctgccagtgccagggacgcggactcggccaccgcggcgtctaggcccgggtcgtcggggctcgacacggacgtgcccttcgccgcgcccaccaagcaggtcttcgacgtggccgtcgtgctctccaagaacatgggctccagcttcgtctcgcccgagcacctcgccatcgcactcttctccctcgacgatccaaccaccaacaacctcctaaggagagatcctgctgaaccatcatctttcaaagttccaaagaaagcccctgctgcagccggaagatctgccttctcccagtccttgactaaaaagaaagataagggtgcgctggatcaattttgtttggatttgaccacacaagctagtggaggtttcattgatcctattattggccgtgaagaagagattgaaagagtagttcagatagtatgccggcggacgaagaacaaccctattcttttgggtgaggcgggtgttggcaaaactgcaattgccgagggtctggctcttcgaattgcaaatggagatgtccccatttaccttgtggcaaagcgcatattgtcgctagatgttggtctccttattgctggtgcaaaggagaggggtgaactggagtctagggttactaatataatccgcgaggtccgggaagcaggcgatgttattctttttattgatgaggtccacaaccttattggatctggaactgttggaaagagtaagggttctggtcttgacattggcaacttgctgaagcccgcgcttgctagaggtgaattgcagtgcattgctgctacaactctagatgaacaccggatgcattttgagaaggataaggctttggcccgccgcttccagccagtactagtagatgagcctagtcaggctggaagtagagctcggatggaatcatttaataggaagaaggaagggcagtcttcgattctcttgaagtcaccagatgaatactggcaagagataagagctgctcaggccatgcatgaagtggtgttatctaacaaggaaaaatattctccaaatgagaatgctgaagagagtggtagtgctaacgttgaagcactacacagagacaatattgagtcaacatctacttcatcactctcagctgatgaaccagttgtagttgggacagaggaaattgcaagggttgcctcattatggtctgggataccagtacagcagttgactgccgacgataaaaaacttctagtaggactggacgacgaactcagaaaacgtgtcattggccaagatgatgctgttgtggccatatctcgtgcagtgaagagatcacgtgttggccttaacgatcctgatagacctattgctacgctgcttttctgtggtccaacaggagttggtaaaacagagctcaccaaagctctagcagctagttattttggatcggaatctgctatgcttaggttagacatgagcgagtatatggagaggcacactgtgagcaagctcataggctctcctccagggtacattgggtatggtgaaactggtactttgacagaagcagtcaggagaaaaccatttactgtggtattgttggatgagatagagaaagctcaccctgatattttcaacatccttctccaaatatttgaggatggacatttgacagactcacagggtcgcagggtttccttcaaaaatacgttgattgtcatgacttcgaatgttggttcaacatcaatttcaaaaggaagacagagcataggtttcttgaaggaagataccgagtcaggctcatacttcgcaatgaaatccttagtgatggaagagctcaaggcatttttccgtccagagttgctcaatagaatcgacgagatggttgtgttccgtcctctggagaagactcagatgctggccattcttgatatcatcctaaaggaagtcaagggccgacttttggccctcgggataggtttggaggtgtctgatgcaatgaaggacctgatatgccaagagggctacgacaaaagctatggcgctcggcctctgaggagagctgtcacccacattatcgaggatgtcatcagcgaagcgattctttttggcgagttcaagcccggtgacacgatactgatggacatcgatgcagaggggaagccatgcatgggccatctggaccaacagatcgtccagaagcacggccacggccacggccacacccaccaggtgaccggttctagctcacctccagtcaggctgttcgaactcgcctga

SEQ ID NO: 28151 - DNA, 930 bp, Zea mays
  Peptide Sequence Number=SeqID_71526
atgccgcgtcttctcgggactatagaaccagtgcagcgactcgaggcagccccgcgcatgacccaacagtgccaattacgtgtgacggtcatgggtcagtcatccgtggggatagacgtgacggctggtatgaccataggcggaccggcaataattgccgcaacaggcggaggcagcggtccaaccaccaaccaggccctggtcccacctgcaggctcgcatcctcccctgaagcggcaggggagccctctcctacagcataaagacgacacacccatgttccattcctcgaacggctcgcgcacgcgcaacagataccccacgagtcgcctgtcccgtcgcattaactccctggcaggacacacgtctcctctagcaggcggacgggcatcgttatgcctccgtcatgatgactgcctcaaaaaagggtttggcgaatgccccagagcactcgggctccgagcccttttactgatcaggggttcgaaggctggcccctcgaagggattcgacagccgccccagaacatgcagagtcagggatgaccctgggtacacccgttacacggccaaggctcgggctacgctcccgaggtatcctaagacatttccaagaccagcgggaacaatttgtaatggaatcccaccgaaggaaggcaccgagccctcagaccctatcgaatgggtccgagtccagcgaatcacctgcagggtaagactaacaacagtaagtcacgacttctcccgagttcagcctcaggcgcaacagagagctccgcctcgcccgaccccaggcctcggcctcggcctcgggagaaggtctccgcctcgcccgaccccgaccccaggcctcagcctcggcctcaggagaaggtctctgccacacccgacctctgtctcggcctcgggagaaggtctccgccacgcctga

SEQ ID NO: 28152 - DNA, 801 bp, Zea mays
  Peptide Sequence Number=SeqID_71527
atggctcgtagaagatcccaaaagaacaagaagaccaaagagaacacaactcagaaggaggtggcactaacggtctcgtcggcagaggcaaccacctctgcggtgggaagcctcacctttggcggccaccaccacctcagcaccgacaacagcggccacctgcgcaccaacgtcgcaccggcgaatggcggctgccccagctcgcacaaggaggtcctcgctcccgtcgtcgctacgggagtgaggacaaggccatctaggaacgtggacaccgccccgcggcgtacgatgtcttatatgacccccggtgtggccggcggcgcgggacaagccatggacgtggccgacctgtgcacggcgcgaccgtcgcccgtgcggtggacaaacagccacatcccgaccaggcagcaggtggcagttcgcctcctccgcaaggctgcacggatgatgaacatccttgaagttgagggcggcagggaggccacagcccggctcgctcttctccgccacaaggaagaagaaggcaacgccggtgcaccccatctagaggcctggaagatggaaagatgcgatgaatacgagaagagcaaaggcatggctactacccgggagatcgatccctttttaaagacggatctccccactcgtgccccgaagcatcacgggcaaagactcccccgacgtgctccagggttcccgccctacgacacgggggctaggtcccacatgtcatacaaactgacccgaaatacgaagatggcgaatcgctacacacgaagcatgcaaccgccctgcggttaa

SEQ ID NO: 28153 - DNA, 1173 bp, Zea mays
  Peptide Sequence Number=SeqID_71528
atggcccaagggcacatttccctttcaccagggctcggactcggactaagccccagaagacggcgaactccgctccgcccgacccagggctcggactcgggctcagccccggaagacggcgaactccgctccgcccgacccagggctcggactcgggctcagccccagaagacgacgaactccgcttcgcccgaccccagggctcggactccgccctggcctctgccgaacgacctccgcctcgcccgacccaggggctcggactcggcctcggccatggaagacagactcgacctcggcttcggaggagcctccacgtcgcccgacctagggcacaggccagccacgtcaacaggaagcgccatcatcaccctaccccgagccgactcgggccgcagagaacaagaccggctccgccgctcctccgacagccacgacaccacaccagctgggtgccaagatctctccggctgccacattggcatggccctcttagagagggttggccgcgtggggacgaggacgagacaggcgctctcttggggccgctcgcttccctcacccgcgtggacgcttgtaaccccctactgcaagcgcacccgacctgggcgcgggacgaacacgaaggccgcgggatttccacctctctcacgcccgtctccggccacctcgcttccccccttcgcgctcgcccacgcgctcgacccatctgggctggggcacgcggcacattcactcgtcggcttagggacccccccgggtcgaagtgaccgcagtcacttcgcccctttactgatcgttctgactggaaaacaacactattcaccccgttccgactactgtgccaaccaccaggttaagactaacaacagtgagtcacggcttctcccgagttcagcctcgggcgcaacagggagctccgtcttgcccgaccctaggcctcggcctcgggagaaggtctccgcctcgcccgaccccgaccttaggcctcagcctcggcctcgggagaaggtctccgccacgcccgacctctgcctcggcctcgggagaaggtctccgccacgcccgacctcagcctcgggctcgggaagagtcacaacctcgcccgaccccaacctcggcctcggaccgactacgctacaggagatacatcattaccctacctctagctag

SEQ ID NO: 28154 - DNA, 339 bp, Zea mays
  Peptide Sequence Number=SeqID_71529
atggtcgctgctgcatgtgagactgcatcggtgctcactcactgtctcgggagtaaactaatggtaataggaccagtcaaggtgaagattaagatgatggccgcttctggcatccatgttctccttcctgtgagctgcgagcaagagcttgatctggtcgtctctcgtctcggcctcctcgtcacggggcacgaggaccaaggcattccctgtccctccactcgaggtgcatgctatcgtacggggctccggcctgtggtgttgaaggcgtacaacaacgggtacacgtaccgcgacggaagatactcgcatatatgtgtgacaaacggaaccagctag

SEQ ID NO: 28155 - DNA, 390 bp, Zea mays
  Peptide Sequence Number=SeqID_71530
atgcaggccaagctcgacgaagaaacaaggcgacttatcagctccgacaaaacctcgagcaagagtgggcaggccgagcgctcgccggaggagcgcgtcatcgggctcgggacgtccagcgccgcattattgacgatgccaggggcaatgctgcccccggccttcaacggggccggccagaacctagctgcagcggcgatgttacttcgaacgatgccggagcgccatctaccaccgaggggtggcgtatccagggcgaactcaaggacctcctggaaaatgtcgcagcccgacgggccgagagctctgcctcccgaaggcgaggatgctgaaaggatcacgatgcccaagagggggggtgaattgggcttttctaaaaatcaacactaa

SEQ ID NO: 28156 - DNA, 126 bp, Zea mays
  Peptide Sequence Number=SeqID_71531
atggcgaattcaatatcccggtccggtggcattcctggcaattcatcagggaagacatctgcatactcacagaccactgggatcttcttcagaggtgtgactatcatgaatgaccctttagagtga

SEQ ID NO: 28157 - DNA, 280 bp, Zea mays
  Peptide Sequence Number=SeqID_71532
atgagcgaagtcctttctccgcacaactccaggctacaccatggccaatcaactacagagcagggatttatcccaaatacagcggacaactctacaaccactatagaagacacaatccatcaaccctccaggaattataccaacttttcaaaaaaatatgctcagtctgaagagttgcattaccagaaggtagagttacagcgcaagccgaaggcggactcgaagtcaagcaagccatggaaccggggcctgcagcaggaataccaccgtcaacaccacg

SEQ ID NO: 28158 - DNA, 438 bp, Zea mays
  Peptide Sequence Number=SeqID_71533
atgaccgtatcagagattcgtctagtttgctcgagtgttaagttatacaggtgccaaaggaaaagaaaaacaataaaaagaccaagtattgggttcaaacaaaggagcaagggtcaatcgaaggcacctctggtctggcgcaccggacagtccggtgtgccaccggacatgtccggtgcaccagatgactccgactccaaactgctcaccttcgggaaattccagagacaactccgctataattcaccggactgtccggtgtacaccggacatgtccggtgctccaaggaagagcggcctccggaactcgccagcctcgggaattcacttcggctgctccgctataattcaccggactgtccggtgtacaccggactgtccggtgtaacagcggggcaacagctatttcggcaccaacggctacctgcgacgcattaa

SEQ ID NO: 28159 - DNA, 165 bp, Zea mays
  Peptide Sequence Number=SeqID_71534
atggggattggttgtctacgagacggaaaaattggaataaggattaaggtgtggtaccgttctctggaggacatggttgctggagtgacttggccgtccattttgccaccgggttggacagtcgagtgggaccctacctcggctgaggaggagcatgaggagtga

SEQ ID NO: 28160 - DNA, 582 bp, Zea mays
  Peptide Sequence Number=SeqID_71535
atgccgtcttcttcctcgtctgctgcaaacacgccaccggccgacgcatcgtccgaggataccttgagcaacgtggcggcggaggagttacattcgggtgatacgatggagttcggcatttcatggatttcctcggtccgtgttcaggatatgcagcagctggggtattttggcagcggagttgggcgtgtcccggggacggaggagattcccgagcccgagggcgagttggtcgtgtttgaggcgtttttcaccgctggccttcgtctgcctgcacatcgctttgtggcggaggtcctgcagagattcgaggatttctggttttatgtttccgaaggcgaagtcgaagaccacccagggctccccgtggtcatgatgtgctcccattattatgtgacgtacccgcaatttgaggtggcagaggatgatgaagacgaaggagcccttcgatgcaccgcccgcatgagtagcgggcgcgatttagttgaggaattcatcgggtatggggtatggcccttggcacatggctgggcgttgggcgaagtatgccctcgcgagatgccctccctgggcgggcagtga

SEQ ID NO: 28161 - DNA, 975 bp, Zea mays
  Peptide Sequence Number=SeqID_71536
atggctgaaaggtaccaactcccacggagttgcgttcctctaacgacaaggcggaaggattgtgggtgtcccccatccgggggctcggaaggtggaaagacacgatgcataagggagcgcgaagacatggtcgcctttcaagggggtcaccctccttttaaaggcgactctccctacttgcatccccagatgtcgtgggctgagtcttctccaacacgctccaaggtcctccccctatggcgcgggggctgggtcccacgcgtcatgcaagctggcccagagcagaagaagccaaaccgccgcgcgcggtgcatgcaaccgcccagcggttacgagcattccttcacttttcgcccagaccagcgggcgaaagggcgggcggccatgcaggcggcatgcaaccgcgccaagtgggcgcgcccctccgacttccaacgcaccccagcatgggggcccacgcccacgggtcatgcaaccggcgcgccggtcgctacgtgcaagcaactgcaccgccactcgcgccactgccacgcctcctcgactgcggaaccagcgggcaggagcagcggtcacgtcgtcggccaagctcacgtcccgtccaggggcagcgagagaaccctctctcacggcgtgaagacggcgtgccagggaagcaagcgacgcttcgccttcgccataatgaccgcgtcaaaaaagggaccgggaaagggggataccccgaaaagaatccttctccgtgaaggaaacaagctccgagcctccctactgatcagaggttcgaaggctggcccctcgaaggggttcaacagccgcctcagagcgcgtgggttctgcacccactactggtcagaggttcgaaggccggcccctcgaaagggttcaacgaccgcctcaggccactcgggcttcccgcccactactgatcaggggttcgcaggctggccctcgaagggttcacagccgcctcagacatag

SEQ ID NO: 28162 - DNA, 179 bp, Zea mays
  Peptide Sequence Number=SeqID_71537
ccgcttccttcgcccacacgcccgcgcgctcggaatactccgaggagggtgctcgaggcgaaccaagggcgacagttccgccgccggagaagcttcgcggaccgccgacccggccgatccgtgcgaagacgccgccgccgttgctctctgtccgccggcacgtcgcctgcggggtctag

SEQ ID NO: 28163 - DNA, 267 bp, Zea mays
  Peptide Sequence Number=SeqID_71538
atggcggagcttgggtcacaagaatgggacgagggcgggcaaatgatggaggagggtctcgggcagaccaaagagtgctccagcaagcaatacacgccgcaattaatgggggataatccgttgcaccgatgccgacattttaacacccctggattttcatgtagtgtggaggaaattggacgtatttgcaaatggacccatggacaccatatggctaagtctgaatttcagtggaatggggtcaactttggagctctgtacctctaa

SEQ ID NO: 28164 - DNA, 279 bp, Zea mays
  Peptide Sequence Number=SeqID_71539
atggagcttctgctggcgaccctggagctcctgcgctggctgctgttgccgtgggaggactcctgtgcgaggagaagtatgagactgaccagaaatgagagatttagacaaatcaacatccgatacttgagaacaagttatagcatatatccagataatagggcaggattaataggggatccggagattcggatgataagccacaacatgattcaccaaggtaaagatttaccagattcggacgaaggagaggtaggaaaacaagatctgctaggatga

SEQ ID NO: 28165 - DNA, 342 bp, Zea mays
  Peptide Sequence Number=SeqID_71540
atgggcgcaaaatcggcatgggggcagcagagggcgcagaacacggcgaggcggcctacgacggcgcggatcaactccggtgaagaatttcgcgggcactggggcggtacttggcgcaataaagctacggagcgcttggggaacggcagggatgcgatggagcctcaggtcgacggcggcggacttcgactgcacggggaagactccggtgaacgtggaccgaacaaactagaggggttaggggcgaaccgaggggtgtcccaagctactggtggtgctgcggagcttaccgaggaaacgggtgcgacaagggctcaacgccggccgtggaacgggcgatga

SEQ ID NO: 28166 - DNA, 417 bp, Zea mays
  Peptide Sequence Number=SeqID_71541
aagcagtcctacgtggtcgcatgcatcgctatgtacgacaagctcccgcgaagccgccgcttggacgcggtccggagtagctgcaccgcgctgtccattgttaagcaatggggcctcatggttgtcgccaacgtcgacgactctcgggttgttctgaacaccacatccgacgacgatcgcgtccggtggtgcaacggccaggggtactacctcgctgatgagcctggggtgcacttcgtttggcagcccgaccaagagtcatcggtactcgtcatgtcgcacgcgttcgacgactactatatcgaggattgtggcgtcattttggcgccggaggtgacgcagaggaagatcgacaacagtgaccggttcgtcatcctcgccatcgtcagggtagcttttgtgccggtctgcctataa

SEQ ID NO: 28167 - DNA, 792 bp, Zea mays
  Peptide Sequence Number=SeqID_71542
ataagggttgaagagtttgtttcaatagtggaagctactgcctcccaggccaagggcggctctgtgagtccgtccaaggatagagacaaattgacattgaggaatacaacactatcttatgtcctatggagccaagccatgtggactttggcaaatctaacatcaaaggaggatatattgagattcttctatcctggctatcccaacatggttcaagattcgaagaagaggaagaaaaagattgcacctgaagctaaggtggcagctgaaattgaggaactcccttctatgagtgttgaagaggcaaagattaaagaagttattgccttgatatcgcaaagagtacctttggagttgctcccagagagcgaagaagaggaagatgagcgaatagctccgatgatgagctcattcttcgatgttgacgaagatgaaactgatgaaatagatattgctacggtgacaccttcgctgatcatggtagtcgaagagaaaggttcctccaagcctactctggcggaggacaagggtaaggggcctgctaagattgaagaggccaagaagtcaaccgaagatgatacaccgcttgccgaaggaccttttgaccaagacttgggtggtcgaagacgattattgtactgctgcccagaaaatatggaaactgaagtatgccgctatatggcggacaatattgggtttccgaagctggaagccatgctctcaagcatgtcctccgaggacttttctgattgctttgcttacacatatctcaagtatgacttgatggaataa

SEQ ID NO: 28168 - DNA, 516 bp, Zea mays
  Peptide Sequence Number=SeqID_71543
atggcccttggtgatgatgcggtggacgacgatggcaaggatcacaacgacgattccacttataaggtagcatattctgccgatggtctcgtcgttgaggtagaggagttgatgactactttggctagtcaagataagttgcttaggcttgttgctcgtgagaggaaagatttcaagagcaagtatgagagcatgtttagggagcttgagtatgctagagtttctatcgtggtgtccgacgagactgaccgtaataagtgtgctctacacacgtcgaacatcaccacattgcagaccaagtacgccaccttgctagatgagcgtgacgagttgagatataagtctagcttgttggctctttcagctgcctatcatgcctgtagagattttggaaagttaggtatgtacatgccccgcgaaggtaaagacaaaggaagctttggctttgggatgaaggcgtgtgatatgaggatacagcccgaaggcaacatggatggacgccgaagctatggctaa

SEQ ID NO: 28169 - DNA, 573 bp, Zea mays
  Peptide Sequence Number=SeqID_71544
atgtggaaaaaggtggtgatagagagcacctgttttaaagaggggcccatggtgtggagcatagggatgatggtcgtcaatgaaggtgaaggtcatgcaggacatggcagagccggccgtgttgatacatgtctaggacatgggggacgcacacacaatatgatactcaggatggtttggtggttgaaccttgaaaaaacacccagtgctacggatgacagattttcgatcaagtttggcctcaaaactcggcggtggcatttccggtgggaatcggaggtggcacatggcatcatcacggagggtgtgtcgaggcgaagcaacttcgtgttaagcgtgtggccgtcctacaccattgtcaagacgctaaacctcatggcttatgaactaggacttcctgcaggaaccacaatccacctcgtctttcatgtctcccaactaaagcttgtcattggcaccataaccagagtaccaaaggagattctagagacccacttgattcgacgcgctgccaaggtgaccactcaattcttgatcaagtggatcggctgccatcactcattggccacctag

SEQ ID NO: 28170 - DNA, 387 bp, Zea mays
  Peptide Sequence Number=SeqID_71545
atgacgaagaaaaatagaaatgatatcaagttacaaatgtaccttcggcttgaaagaagctcccctgcgcatagcttcggctctgcgccaaccttcgtattctttgtgcttcttcacactgtggttctgatccgagtccgaaggtacctgttcatgtattatactccaaaaacattgttaaatcatgtttttgaggaccttcggaagatgaaggcccccaacatggtcgatgaagagtttgatcggtgtgatcgagatgagaactacatgccttttacgacaacacatcaagataatacaatccaaatgggtgatgatgaaggagagggggacatgaataacattcagggtcaaattgtcaatgcattatttgctaggagaatgtga

SEQ ID NO: 28171 - DNA, 255 bp, Zea mays
  Peptide Sequence Number=SeqID_71546
atggcttgccttgtcgaggccgcgccccacaccggcggtgctgttggcaaggccgcgtccgtcgtgccgcatgccatggacagaggcgttgcctcctctgcccgcgacgcgaactggatctgccacgccgccacgaactggagcagccacgctgtcgtgaactgtatcacctatggtgtatcctatggccgtcgtgccctttttaggtcttggtttctaccattcgcgtcgccttctgtgaggaaccctgggtag

SEQ ID NO: 28172 - DNA, 432 bp, Zea mays
  Peptide Sequence Number=SeqID_71547
atggacggtgtagagggcattttattcatccgtgccaagacgcatcagccgagcacggtggtgccacagctagcgcggtggcgctctctcaccggcgcaagtgtgccccacctccggccatcatcctccaacggaagcatcgcaataggaagagggaataacgaaggtcgtcacgaggaggttctcaccggcggaaacgacgtgcagaggcccgcccacggaggatttgtggtccgcggcggagctggattcccggcgaggaattcatggggagtccgccgaggattccgtggcggcggcgcgcgctgcaacaaactcccaaagaaggcggatctgggttggtgcgtggagatcgatccagcggaggggaaagagctgatgactaggcccacatggcgacgagaaggcaggctgtgcgcgtcagagtggtag

SEQ ID NO: 28173 - DNA, 198 bp, Zea mays
  Peptide Sequence Number=SeqID_71548
atggaggggctcggccagggagaagaagggggcgctgggcaaggagatgagctgagcacagggagggaggtgcttcggtgcaccggaggaagggacgcccgggccatggaagggagctcggcggccatggagcttctgctggcgaccctggagctcctgcgctggctgctgtgtcgtgggagactcctgcgcgagtag

SEQ ID NO: 28174 - DNA, 159 bp, Zea mays
  Peptide Sequence Number=SeqID_71549
atggatctgacgattgggcgcacatggcgtcgagaaggcaagctgtgcgcggcagagtgggagtcagatgttattgtggacattactccacaactcatcacactcaatcaaagatccaaatcagacaaatatcataagaacaagcattcaagcatatag

SEQ ID NO: 28175 - DNA, 249 bp, Zea mays
  Peptide Sequence Number=SeqID_71550
atggccaccgccgcggcttgccctgcgccgccgccgttcctggctggaggtggggggaggcacgtcgaccgctgttctaaaattcgacggcgtagattagaagatgtggatacctgttcgtgtgttggtctcgaccgtttatttgcgatcggacgggttgtatcaaatcccatctatgttaagccaggacccctggatcgtgatccagcggccattaacgcataccaattctgcgcgggccagatctaa

SEQ ID NO: 28176 - DNA, 765 bp, Zea mays
  Peptide Sequence Number=SeqID_71551
atgaggctcggtgtatgcggcttgttctgccaaggtggtaatgaggatgatggttatgattatgcttatggtaatggagaagatgaagtcgtggaggaggactttcaggagttccaagaccatttggagaggctgcaccaccgcctgcacaaggagcaggagcgtcagcaacaggagttggagcagcagggctcttcttcctcgcttcagcaggaggtagagtctgtgatgagctgctctcctatgcccccactggaggcgccccctgcaccaccactgggtgtcccggccgatggattagctgctggaggagaccccgacgatggagatgatgacagcagctcgagccacaacatcgaccttttagaggagcaggagccagagggatgggttgctcgacccatcactcgtgatgccgctcgcgggtgtcactttcacgatgcgctcgacaccttgctacgccaggcacttgaccgacagaacagtctctggggtgcagaggtttgctcagagcactactctgtctctgagcgggacttagctgaggcggtcatgcaagatgccgcacggcgtgcgctttcgcactactgctcagtgttcggtggggtggtcgatggtcttaacctgagcacagtcaacctagccaccatgctaaacatggagctggaccatgctttagatgagctgagtagggctcgtgctgagcatggacaccatgcttatggtaaccccgactgcaggaccaggataaatttagaaccatag

SEQ ID NO: 28177 - DNA, 597 bp, Zea mays
  Peptide Sequence Number=SeqID_71552
atggaccagccgactccgaccacctccgacgccaacccgtacctctacgtgaccgccgtaacctccccgacctccctggacgcctcaccggagctatctcgccgccgctatggtgggtacaagtgcggtcactgcacgacggcagccggggtcagtggagcattgtatgccaaggcgaaaggagcgaacctagatgacttcacccaccccatcaatggaggagacactcgtttcagttccgactaccttttccatgagggtttcccttccatcttgtgggaggtgctctactctgccggttaccctacacccctctctatacggtgcaactatacgaggagcatcgggtgccacgttccgagttggcgttcccttgactccaagactattggattcagggcggacgacaccactgaggatgcagctatgaagaccctgacgactttctacggataccatcccttggagatggtaatgcacccactggtactcttccctgttgagaagagggatgaccccatgtggtgcaaccgagtgagccacgtgaaggacgtgtgggccatgctttccgaccaagttgggaggatcactgtctag

SEQ ID NO: 28178 - DNA, 1824 bp, Zea mays
  Peptide Sequence Number=SeqID_71553
atgccaaccctgggcgaccagctggtgcgaagtccagccttcgtggtggatttactcggtcgcaacgcgactgcgtttgtgcgtgaagtgaaggccgaggccgcgaagattgtaggaaaatatgtgccgaagacgaaaactctgaggagttgggatatccgcggttcaaatgttaggttgaaccgtgtttttgagttgaaccgtctgccgtataccggctacccgggggacgactatgctgatgttgctgtccgccatggggaaaaaggcgatgacaacgacggacaagggcccttcgcgaggaacagcaccaggcgcggccatcaagaagaggaaattagacagaatgttggtgatgttgtatcggcagtgatggagaaggatcgccaagatgcgccacggaagcgctgggcgtttgccaggttggcggacctgaggcgcgaggcgaagatggcgcggccgagcgcaaagcctgccgcccccggcgccagcatgcctccaccgatcgcgcccacacatgagcaaaggcttccctcgccaccgcgcgctgctgaggcagcggtggcgggcgccgaagcctccatggatattttcgtggatgattaccttgtgggcggggtcgcaatgttcgatgcccacacgggactggctcctgctggagcagagtccgggcaactagctgttgtcccggtggcggtggcggctggtctggtggctgtggcaaccgtggcgaaggggtcctcacaggacccgtggtccaagttctgcgccggcgacaaaattgcctcggtcgtcgctacgaaggacgtggtcgcctcagttgcgcagcagctgaaacatgctatccgagacaagtcggtggtggaaaacaggagccgtaatctgcttgaaaagctaacggcggcggaggctgagaaagaagacctcagccgtcggcttgcggcgttaaggggggacgcggaaaaggcccgcgccaaggcccaagttgcccgcgccgaggctagccatgctctaaagtgcgccaccgacgtggagtcggggttgaaaagtctgcgcggctacatggacaagacggaggcctccactcgcgctactggggttcgaccgagcacacgccattgctcgtggatgcgtaccgtcagcttggaggagttggagacgctcccatccatcgcaacgggtctcatgtcatacgcctcgctcgttacctgcgagggggctgcgaatgccttgtcccatgagggatgtaggcatttcaaagtctttgatcgggtaaccaaggacttcggccatggaatcttccaggttggagacgaggtgctaaagagtccactggggcgctttatgataggatgtggggcctctcacggccgcgacactgtccgggagagggccgaccgagcgttggagcagatgctgaatgataaagaagtcgagaacttcagtggcctggaaagctcggtgacccatatagaagatgcgaagacgggggctgaagagcaacgggcgcctcaagccgaccctagcagagaccctgcagcggcggctaccccggctggcgaagaccctgcagcggcggctgctccttcacaggttccgacgtccgggcctacgcaagcaacccacattgacattgatattaattttgtggtggctgcgaatgcagtgcccgttaatggaaattcgtctggttctaaaactgagtcatggtcatcggacggggatgattttgggagcccgttttcgtggattgaggagtcttatgatgaagatttagattattttgctgcgttggatgtggatgcggcggggtccttgccgtag

SEQ ID NO: 28179 - DNA, 411 bp, Zea mays
  Peptide Sequence Number=SeqID_71554
atggcaatggcgctggcggatgatttctggccgctgtccaagccaaagcctcctattctcgccgcgactaatggcacgaccagccgagaaacctgggcgtgggatgagttcgccggagatcacggaggacgcggcgcgggttctgttggcgtgggcgcgattgatctgacggcctggtcccacagggcagagacgagtggagaagcaaaacacctgcagccactggcggcccgggcccgccaggcagtcgctcacgactctttcgtgcgcgcagacaagaattgtgaggctggtgtgcaggtcccacatgtatgctcttgttatgatgaacatatgacacacaaaagtaaggagatcaactatatactcattgtatacatttttgggtattacaaatcctaccctccttaa

SEQ ID NO: 28180 - DNA, 748 bp, Zea mays
  Peptide Sequence Number=SeqID_71555
atggcgcttcctgttgacgtggcgggcctgtgccctaggcagggtgacgtgggggctcctccgaagccgaggttgagtctgtcctctgttgccgaggccgagtccgagccatggggtcgggcgaggcggaggtcgttcggccgaggccagggcggagtccgagccctggggtcgggcgaggcggagtttcgtcgtcttccgggtcttagcccgagtccgagccctggggtcaggcggagcggagttcgccgtcttccgggtcttagcccgagtccgagccctggggtcgggcggagcggacccgagtccgagccctggggtcgggcggagcggagttccgtcgtcttccgggtcttagcccgagtccgagccctggggtcgggcggagcggagttcgccgtcttccgggtcttagcccgagtccgagccctggggtcgggcggagcggagttcgccgtcttccgggtcttagcccgagtccgagccctggggtcgggcggagcggagttccgtcgtcttccgggtcttagcccgagtccgagccctggggtcgggcggagcggagcggcgctgtccttctgtcagactggtcagtggagcggtggagttgacggcggtcacttcggctctgccgggggggcgcgtgtcaggataaagggttgcttcttgagcgaagccaaggcctcgggcgagccggtgatgtggtccgccgtaaaaagggggcctcggcgagacgagcctcagtcag

SEQ ID NO: 28181 - DNA, 213 bp, Zea mays
  Peptide Sequence Number=SeqID_71556
atggaccgagcgattctggccatccccgccgtcgagccgtacatcgctgtgaccgccagagcctcccctagccaacccgcccctcgccggacctatctcgccgccggttctctggaggacatggttgctggagtgacttggccgtccatcttgccaccgggttggactgtcgagtgggaccctgcctcggctgaggaggagcatgaggagtga

SEQ ID NO: 28182 - DNA, 297 bp, Zea mays
  Peptide Sequence Number=SeqID_71557
atggtggtgggcagctttcgcgtttttcccgggtgctggatcatggcgacggggaagggcatggtctcatacttatacaccgagacgataatagcccgcaaaatccgagtaagtgggcgctcgcctgaggtctcggttgatccgttcgcaatagtgccgtccgagtcaaacagggaagaagaccctactgtcgagggggtcccacaagtagcgactgagtggggcggtacacacgcaagcaggaccggctccacgagtcagtgccaggtttatgtacgcgcgagctttggggagtga

SEQ ID NO: 28183 - DNA, 144 bp, Zea mays
  Peptide Sequence Number=SeqID_71558
atggcgtcaccgtgggctaacagcaccgccacctgtgtcggcctgggtgagaaggaggaaatgtggggatcgtcgatatcggttttaacggttatgattatagcaccgattaccggtttggctagaaactctacaatattttga

SEQ ID NO: 28184 - DNA, 357 bp, Zea mays
  Peptide Sequence Number=SeqID_71559
atggcaacaggcgccacgcgcggcaaggttccaccccagggcgacgatggcggccagcgaccatacaccacggccacacctcggggtcatcgcggcaaccacctgctcgagctacggaaggaaaggaacgtgggtggactacgtatcaagtctgatacgaagcggcttaggaaggataggatgtgggcgtatatgaaggcatgggatctccgtgaaaatcggtcagcgttgagccaggataactgcccagagatgtttagcggacatgggatgaacctgggcgacatcacccgtgacgtcatttccggcgagatgaataaacaatcagagaaaataaacaaacgtgtccctacgtga

SEQ ID NO: 28185 - DNA, 141 bp, Zea mays
  Peptide Sequence Number=SeqID_71560
atggctatgatgggttcaacatcggaaaagatgtacctctgccaggtgaagaagcagcaaacttttgttgcttctgttccaaggtggtgcccaaagaagaaaatcaagactaaagctgcaggaggaagggtcctccattaa

SEQ ID NO: 28186 - DNA, 330 bp, Zea mays
  Peptide Sequence Number=SeqID_71561
atggaattaccactagacgcgcagagcagcggaagacgtctcgatgtagacgaacgcgtcgagcagtgccgtgcagtcgccggcgtccttcacgtcctcgcacggttcgtccaagtgctccagatgcagcacctccgagggcatatttctaacacgaggaccggtggagaaggagcccaaaagttgagggttccacgcaagtaccgcaggatccgcttcatcgcagtgagggggccggcagtggagaccttgccctacgtgtccaccggggtcgcgcagggcttgcacccagccatgccagcacgaccaaggaggtcaactgtgtactag

SEQ ID NO: 28187 - DNA, 672 bp, Zea mays
  Peptide Sequence Number=SeqID_71562
atgaccggccgttccccattccccacctcctccaccgcaactcccatctctggcgactcctttccccctctccctctctcctacgaggctgccctcaccgcccccggctccgtgcgcgcccctacccctatccttgtcgccgctgtcgcgccgccccctcctctggccatttcggccgcaccccagcaggctctgaccgagtcgacatctccccccacgtcggcaccgccctcatccacctccctgcaggcccctaccccgacgaccgcagccctccaccccggcttcccttccagcgccctctccctgcccgacgcggccctctttcgctctcagctgctggcaccgggctttttgctcgacatgcctgtttgggccccccgccagtacgccgagacctaccgccgtctcaccggcaaggcatttcggatggctctcccacgtctgctcgacactacgccgacaccttcgagccagtggccgcctcaacctctacccttcgcgcctctcttcatgctcaggcggcgaccctcactagcatccaggccacagtcaccgacgtcctcgcgtcggacgccactcagtaccctcgatggcgtgactaggtcctgcagaccctgcgccgctacgccctcacagaccacgtcctccctccggtctctcacccgatag

SEQ ID NO: 28188 - DNA, 393 bp, Zea mays
  Peptide Sequence Number=SeqID_71563
atgctctcaacaccctgttgcatcgagccttcgaccgacacacttgatccatcgagtactgctgatggcctcgacctgaagtactaccctcgtcgttcgaccgatagtgctggaggtgtgattgcctcgccagttagtgagggcaatcccaggctaaagagcatggtcaacctggctgtcgtgctcaacacagagttagaccacgcccttgacgagttgggcaaggttcgggcagaagttgcggaattgcgtactgagtgcgcagcacgccactatctggatggtggttctcccacccccgtcgggattcagcacccttaccgttcaccgccctgtggtcacttcgactatggtaccccatactgcaggacacggatagatttggatccctag

SEQ ID NO: 28189 - DNA, 249 bp, Zea mays
  Peptide Sequence Number=SeqID_71564
atggtggtgcagggggcatctctggctgaggtgcagaggaaggcggcctctcagactccacctcctgctgaggcgagggggaagagtcatgctgctcctgctcctggcgtcggcgctcctgctgctcgtgcagacaacgatgcagtctctccaggtgactggactgacctggcaccgtgcgacacagtggacgctccgccaggcgagaaggcaaaaaggggatcacagacttacgtgcagtgcacctaa

SEQ ID NO: 28190 - DNA, 1411 bp, Zea mays
  Peptide Sequence Number=SeqID_71565
tgatctctcctgcctgcatgctcgtctccgggccaacctggattctctctttctcgtgagcactcaggtcaggatggtgcggacgaagaatgtctcagcgccagagggaggagacaacgaggaccctcctcgccccttcaggcaggtcaaggggaagacaatgtaccttgagcagcaagaaggccagaagaagcgggagcgtgacgagactgaggtgcgacccctagctgctgatcctcgactgcttgatcttcagcgtgccactgcagccgggactcagaagtccttctttcgggcacttttgtcagcgcagattgccctgcgagcgcaccggctattggatctacctgcttttctgctcgcagcaggtgctgattcagaggtgcatctctcctatctgccaggactactttctctactgaccgcgagtggcagatatattgaggagtgggtcagagtgttttatgctacagtgtggattgtcatagatcatcagtggatgatgttccgcttcgagagagaggatgtcactctgcatgctagccagatatgccggctctttggatttccagagtcatcgattcggctccatagtctatgctatggtaccttagaccctcctcgtcgccctcacggtagagttgcaccggccacagctcacgccgcggccctgttcagacctcctttcacagatgggtcgcgaagctctccagctgacttcaccactgcggcgaagtacttatatgagctgatgagacgaacactgctacccaggatgggatatagagagaccactacacatattcagctatggcttcttggtgccttgatctcacattctaagtttgacgtggtcgactttcttatctgtgagatcgaggacacaattttggatggtcttcatgctcaccgtcagctaccgtatgcgcattacctctgtcacatcttcgcgcagctgattaggctgcctcagttccagggcaccctcgaggcctctcgcctctatgctgcccctgctgcccctcctgctattgatcctgctctggctgcgatacttcagtctcttacagagcagcaggctcatttggcagccgagcaggcagctgttgtgccagctattcaagcaggacccccgcttcctccttttggtccttctccctcttcgctctggtcggtcactctggacttctcgtcaccggtcgtcgggaccgtcagtgctcagccgccagtgccgccagcgcctactgttaccactgttgttgtggcggtgtctgtgactgcaccagctccggcggatcctgcatcgcagcctctgttggagtcagtaccagctccagcttctactgcaaatcctggatccgagactgactccgatcctcagcttgtgtttgtatttctgcctcgaccgtga

SEQ ID NO: 28191 - DNA, 141 bp, Zea mays
  Peptide Sequence Number=SeqID_71566
atggccatgatgggttcaacatcggaaaagatgtacctctgccaggtgaagaagcagcaaactactgttgcttctgttccaaggtggtgcccaaagaagaaaatcaagactaaagctgcaggaggaagggtcctccgttaa

SEQ ID NO: 28192 - DNA, 849 bp, Zea mays
  Peptide Sequence Number=SeqID_71567
atgcaagaactagggcacggaaagcaaaggcggctaaaagcgcgactcttaagggatattcttgagccagataccctttcaaaaagtgcccagtcatcacccggcggtcatttccgaaatcccagcatgccacgtggatatccgacagttatttccaagaaagccgacgtgccacctcatcactcggttattttcctcaaagtaacttgtgaagctggctatcactcggcgttgcctctaaaacgccgaccacgtgttcaatcgctcggcgttgcctctaaaatgccgaagccgaccttcaatcactcggcgttgcctctaaaacaccgaccacgtgttcaatcgctcggcgttacttctaaaatgccgacgccgaccttcaatcactcggcgttgcctctaaaacgccgaccacgtgttcaatcgctcggcgttgcctctaaaatgccgaagccgaccttcaatcactcggcgttgcctctaaaacgccgaccacgtgttcaatcgctcggcgttgcctctaaaatgccgaagccgaccttcaatcactcggcgttgcctctaaaacgtcgaccacgtgttcaatcgctcggcgttacttctaaaatgccgacgccgaccttcaatcactcggcgttgcctctaaaacgccgaccacgtgttcaatcgctcggcattacttctaaaatgccgacgccgaccttcaatcactcggcgtgtcctctaacacgccgaccacgcgttcaatcgctcggcattacttctaaaaatgccgacgccgaccttcaatcactcggcgttgtttctaaaacgccgaccccgtattctgtcgctcggcattacttctaa

SEQ ID NO: 28193 - DNA, 804 bp, Zea mays
  Peptide Sequence Number=SeqID_71568
atgtcgatgccgcacccggtcacgggcgagaattttgcaattatggcaccgccaagggcgggcttcagaaacatggcacgcccatcaccgcaattgcattcgtggcattataatcttagccgatttgaacatttagcatcggaccctgggtttgcacagttggaggctgccatggaacctgccgcggagctatgttcccagaagctgtccgcggccgttgatgccgcccttgacacaatgaaagcttcatctaccgcctgtatggttgctggtgattattgcgccacattttccttaggtaatgatgtggtttctactcttgatgttcttgaatccgctgtggcggcggaaaaaagtgctatgagttcttacagccaggcgagtgcagccgtcgattgtgctaaggagactattgccaaatattgtgaggttaaccaaaaacttgcgcaagcactcagatattctctgtctctaatgagtgatacagctaagaaactacaagagactgcctctttgtgctacacagatgaagatgttgtcgacggtttcaatgtgactcaagtggctcgttccttggacgagttagctgaaacactagaagttactgcaattgactgtcaggtctcgatgatggatccaacaactatattagaagctggctatggtagcgaagatagtgcggtgtgggaggacgtattccgtgaccgagaaataatgaatcagccattggaagtggagacaacaactgagcactgtgctaagtgggggcttaattacaatgagatcagggatagatctgtgtaa

SEQ ID NO: 28194 - DNA, 453 bp, Zea mays
  Peptide Sequence Number=SeqID_71569
atgaaaagtaggttccaaaagagaagggagaaggccggctcaagttatgacccattagttattgaagactttgattgggacaatgagtggatagactccttggtggtacatccaggcagcgataatgatgataatgctttaacatgggatcatgttgatgttgctattggagcatcggagtcacttcaaggacgcaaccttccaaggcaagctagacagactcaaacctacacaaggcgtgcaagaatgaggacacaagttgaagatggagaagaagcacatgattctagtgttgatgacattggggttgatccagaggatgacatagatgtgagtgatgatgatgaagctaatggtggggaagaaggcggacaagacaatgttgatcccactgtcgatgagtttgatgatggatatcgaaagttgagacttgagagtttgagacttcattga

SEQ ID NO: 28195 - DNA, 696 bp, Zea mays
  Peptide Sequence Number=SeqID_71570
atggagagtgccggctctgttggtggtggtcaaactgatgttgctggtactagtagtgctgatgcgtatgatcctatggctgatccgaaacggagagcaaagtccaatgatcccggatggaagtatgggtattggacagaaattgggaaccgagataaggtcacatgcaacctttgcaagactgtgacaactagaggaatcaaaaggttgaaagaacaccttgcgggtggttttgtggatacattaatgtgttctaagacaacaacagagattggaaaagaaatgaaagcatatttggacaagaataagagatacagacctatttttcttgcggttggtcatgagcagcaggggcaacaggataccacttctgtacatcaacctagctcggggacagctgctaaaaggaagagagctgcatttcaatttagaacagcagctccacaaccatccaacatggaaaaagaaaaaggaaaggttgcaaccatgcttcggagaactcccaaacaagttgtggatgacaggcgctcctcagggtcacaccaaaccaccatagaggctgctagatatgttgcagagctaaggagttgtttcaatgatgtgctagcaagaatggagcctgatgaagagattaggtccaagattgatgagtatgccatgcattatgaagaccgaagagttacttatcttttctaa

SEQ ID NO: 28196 - DNA, 1368 bp, Zea mays
  Peptide Sequence Number=SeqID_71571
atgccgccacaagtgaagacgttcccagccgccgccgccacaagctctgacccgaaccgatgggtgcccccatcaataaattgcaggctacttgcgcatcagagggacggtgtgagattcttatacaatttgtatagaaacaatcatggcggtgttcttggagatgacatgggtttggggaagaccattcaaactattgcttttttgtcttctgttattggaaaaggcaatggccatgggcaatcaacaaacaaaggaaagatgactggtcctgtactcatcctctgccctacttcggtgatccggaactgggaaaatgaattttccgagtgggcagaattctctgttgctgtctatcatggtccaaatcgtgatttagttcttggaaaaattgaaaatcaaggactggaggtactcattaccagttttgacactttcagaattcatgataaggttttatgtggtatctcgtgggaacttgtggttgttgatgaggcacatcgtctcaagaatgaaaagtccaagttatatacagcatgcttggggataacaactcaaaagcggtttggtctcacggggaccataatgcagaataagatcatggaattatttaatctatttgactgggtcgtgcctggctgcttaggggaccgagaacactttcgagcttattatgatgagcctctaaaacagggtcagaggctaagtgctcctgagagatttgttcaagttgctgatgcgcgcaagaagcaccttgtttccattcttagggaattcttattgagaaggacaaaagaggagacaattggacatcttatgcttgggaaggaggataatattgttttctgcaaaatgagtgacgttcaaaaacgtgtttatagaagaatgctgcaacaacctgatatacaaatccttattaataaggatgtccgctgtagctgtggaagtcctttacctcaggttgaatgttgcaagagaactgaaccagatggtgttatatggtcttatcttcacagagagaaccctgaaggctgttctatatgccccttctgtcttgttcttcctttcctcgtcaagcttcagcagattagcaaccatctggagctgataaaacctaatccaaaggatgagcttgaaaagcagaagaaagatgctgaacttgcagctgctgtctttggtgcagatattgacttagttggtggtactgctaaaagtgagaacttcatgggtctcagtgatgctgagaactgtggaaagatgcgagcactagaaaggcttctgtcattatggactggacagggtgacaagattcttcttttcagttattctgtcaggttgttcatttatgcactaacatttagctcataa

SEQ ID NO: 28197 - DNA, 438 bp, Zea mays
  Peptide Sequence Number=SeqID_71572
atggagggcacaacagtagaagtggagcaacagaagtggagcgttgtggcgcgtgctcaggcacagagcatgagaacagccatcgtgggtggcagcgagcaggatacctacgcgcgggagagggcgagagcgttgaatcaaaaccaaggtgctatgtctagggagaaagagatgatttcttcacttaattgctcttcacaagatgtttccctttatgaggaatctccacaagttggagtctctcacccttacaatattgatcacaatgaaaaccacgagagtaagggagggaaagaaacacaagcaaaagctagagtcgcagcaacgacacgcacacaagtcaagaaacgagcacacaaacacagtgcaacgagttcacaactcgacaagtgctcaatctcaatcacaatgatccagatgggtgcttgcggagtctag

SEQ ID NO: 28198 - DNA, 357 bp, Zea mays
  Peptide Sequence Number=SeqID_71573
atgtcatcaccacgcccgggccatcgctgccagggtcttctccgagaatccggctcgagcaggcggctcggctggtcaccccgaggcctcggcagatcaactccggcgtcggtcccgctaacggacgacccggccaggctccggccgaccaagtcttcttttcgagccaactctgcctctgtccgtgctgacaccgctacccctggcttcggctcatcgaagagcggccaaggggttcctttaactaagcaagagaagcctcggacaacaaggctgaccgagccgagggactcctacgcctccgggatacggatacctcactcgtcacctttacacggggcgactcacgcttggtga

SEQ ID NO: 28199 - DNA, 1128 bp, Zea mays
  Peptide Sequence Number=SeqID_71574
atggtcgtcatcccaacgcacaagaattcatggccgaacaacccgagagtcgtcggcattggcaacgaccatgaggtccccctgtttgacgatggacagcgcggtgcagccgctctggaccgtgtccaagcggtggctgcgccagagcttgccgtacatagcggcgcatgcggctacgtaggactgcttccagaggtcgaactggcagtcgccaagcttcttctcatcgtcgatgagcaacgcgagcgcctcgtgttagtggtgtttgttcgagttttccatttgtctgctgagcagctcaacggcaatgccacattgtcttgcttgcctccttcagcttcggcggcatgccagctgcctgatcttccccgtgttccttctcccccttcctcaccttccggtgacctcttggagttcagcagcgctggagccatgcggcgcgtcttcagtaccggcgacctccggggcgccgaagaacgcagggagaagatcgagcgctaccggacgaagcggaacttcgacaagaagtcaagaagatcgatcacggaagacgctggcggacagcaggcccagggtgcagggccgcttcgcgaggaatggcgagacggaggccgagctggctttttgcaggccacgagagggaggccgagtgcagcagctacgagcactgccactgccactgcggcgacctcatcaccaccaccaccacctcctgctgctgctgctgcaacgcccaatgcaggggaagtggcatcaaaaccacagcaacatttgacgacggcaagtggtggtgggaaacgccggtggccgctccagctgcggagcggcatacttcgcgctgcccaacgatggacggacgcggaccgggtgccagtgccacagatcacggtgcacgccgaggccgtcgcatggcgacggcggttgccacttgtgccggccgggcgcttaagcttttgttgctggttgggccgccgccaccagagaatcgggagcaaaacggctggggagacaccagcccagcagccgagcgggctcgctcgtgcttgtggtcgtggcctcgtgggggtcgggctggtggacctggaaacacgcggcggtccagacgtgccgcgccgtatcgcaaaatga

SEQ ID NO: 28200 - DNA, 915 bp, Zea mays
  Peptide Sequence Number=SeqID_71575
atggccgcggcgtccaggcacctgacgcccgtcgcgctggagctgggcggcaagtgcccctgcatcttcgacgccatgggcagcgcccgggacctgcagatctcggttaaccgcatgatcgcgggcaagtggtcgtcctgcgccggacaggcctgcatcgccatcgactacgtgctcgtcgaggagcgcttcgcgcccatcctgatcatgcgagaacgtttgcatctgacgtacttttcgctcgcactgaagatcaaggtgctcaagtcgacgctgaagaggttcttcccggaagcggaccacatggcacggatcgtgaacgagcgccacttcgagaggctgagtaaccttctcaaagacagtgatctgccaacagctggcttcctgtgtgtagacagagacaggggggtcactgttctctcacgaaactgtcccaggtacattgagcccacgatactgctgaacccgccgctggactccgcgatcatgaccgaggagatattcgggcccctgctcccgatcatcacggtcaagaacatcgaggacagcatcgccttcgtgaaggccatgccgaagcctctcgccatctacgcgttcacccgggacgccgccctgcggcggcgaatcgtggacgagacgtcgtccgggagcgtcaccttcaacgacgcggtagtgcagtacgcgatagacgggctcccgttcggcggcgtcggccagagcgggttcgggcagtaccatgggaagtactcgttcgagatgttcagccacaagaaggcggtcatgaagcggggctacctcgtggagctgacactcaggtacccgccgtgggacgagagcaaagtcaccctcatgcgctacctctaccgcttcaactacttcgccttcgtcctctctttcctcgggctcaggcgatga

SEQ ID NO: 28201 - DNA, 486 bp, Zea mays
  Peptide Sequence Number=SeqID_71576
atgggcaagaacaacaagcgcaagcgtgagccaactcctccatcggaggagtttggtgactcagagtatttagaggaggagttctcctctgagtctgaggggtctccggctcccgtccccctgcgtgagacgtctgatgactcagacgactcccaggggcttgcggcggaggtctggacgtacatccaggccgtcgagcgctccgggctcgagggctcggatgagtcggagtactccttggatgaggaggactcggacggcggcggcgaggacgacgacgacgacggcggcgacgacgatggcgacggtgacggtgacggcagcggcagcggcaggggcagcggcggcggtagcaaggtcggtgacggcggcggcagcaggggcagcaaccagggcggcagcagcaggggcagcaaccagggcagcagcagcaggggcagcaccaggggcggcggcagcggcggcagcaacagggccagtggctag

SEQ ID NO: 28202 - DNA, 402 bp, Zea mays
  Peptide Sequence Number=SeqID_71577
atgaagcgacatcctggggtccgggtcgtgcgatcaagatcggaaggagggtccgaggagtccgaggggtccgagggggtccgagccgttcgatcaagatcggacgggggaaatcagactgggaaggatgagcggctgcgggtggcgctgacaggggggccaaggcctgtcaggcgtgcgtgcgcgaagcagtatcccacggtccgggtcgtgcgatcaagatcggacgggggaaatcagaccggggaaacagacgtgcgcgaagcggcgttgctcctcaccgcggcggtgaggtcaccggagttgaggcaggtgcaagctagggtggctccagggtcgccgaagttgggcagagagggagagggtgccacggcaaactcaatggcagggaagaggtcatga

SEQ ID NO: 28203 - DNA, 939 bp, Zea mays
  Peptide Sequence Number=SeqID_71578
atgcagcccggctgcacccctccgccggcggtcacccaagacagtgaccaccagcttgatggtggggagaagcggaccgggctgctgcctccgccccgccctcagcttcaaggatcttcatcacccttgctggggcggagggcggacagccgctgctcagccagggtgcagcattccgtcctccgcccggacgatggttgcgccgcgtgcgggccggccatgtccaggccttcctcgcgccaacagccgcatcagtggttcgcccagcacgtcgtgtgccgcgagggcggcgctcatgttctgggcggctccggcgagggcgaggacctgccggtgcgctctgaggcgtctggcacccgctggcgtggtgctgaggtggtggcagccggagaaggcttctctgtcaatgagattgccaactccgcccgcacccctgggcctctgtcctccggcctaaatggctggttctcgtcctcggtgaatgagagcccccgtgccgtagcgcccgcccggaagccgctgctgaagctgcttcgccgcccggggcggaggtcatcgttgctgctgccggaacgggcgacggcgagccacctgtcggccttctgttgctccgcaggcccctcccccatcgagtggggttgttcgtacctgaggaggtggaaccggagttccgtttgtaatggcacttcgaatgccagtgtttttgttcactgtggctgtcgaggcctgaacgagtccctcggctcggtgagccttgttgtccgaggcttcccttgcttagttagaggaaaccctcggccgctcttcgatgagccgaggccagggagcggagacccttggaccgcgtcgccgtccgaggctaggtcggacctcgccagaggtgttgtcggcgccgagggtgctgctgctccctttagccgtcaagatccgagcctgtag

SEQ ID NO: 28204 - DNA, 228 bp, Zea mays
  Peptide Sequence Number=SeqID_71579
atgattaacccaaaaaaggttgttgctcagagggatcttcggcaacacactcaggaaccacgagctgctcgttgtctaagtaaagtgagcatacattcaatacatttggaagagacaaccaatcaagccaaggatggaagcaagaagagcttcgaggcaccgagggcacgggagaaggtcaaggagaccaggaacccaaaagccaggggtgaagaagaagacttgtaa

SEQ ID NO: 28205 - DNA, 453 bp, Zea mays
  Peptide Sequence Number=SeqID_71580
atggcgctctcccccctcctccttgcggaaaggcgacgcaggggcgtatgtaaaaaagtcgagtctgtccctgatcgccctctcgccctgtgcagaggctcgggggctgctctcgcaaacccggctccggccaaaccattgacagcgtcaacataccagcccgagaacttgggacccgaccggatcagtccattcgagggactcgatcacgcctcgcccaagcctagcctcggacaagggcagccgaccccggaggatctccgcctcgcccgaggcccccctccagcggcgaacacgttcccggctcgcgtgaggccctgtcttcgccaagaagcaaccccgaccaaatcgcaggagcatttaatgcaaaggtggcctgacacctttatcctgacgcgcgcccctcagctgacagagccaaaagtgaccgccgtcacttcgccgctccactga

SEQ ID NO: 28206 - DNA, 369 bp, Zea mays
  Peptide Sequence Number=SeqID_71581
atggacaatgcggccgaaaacgggccggcagtaatggcggtggcaggcgggcaggagcagcggtcacgtcgcggcgcctctggcaagagaaacgagcgacgctttcgccttcgccataatgaccgcgtcaaaaaagggaccgggaaaagggggataccccggaagggacccttccccgtgaaggaaaccaggcttccgagcctccctactgatcagaggttcgaaaggctggcccctcggaagggttcaacacccgcctcagagcacgtgggctccacaccccactactggtcagaggttcaaaaggtcggcccctcggaagggttcaacggccgcctcaggctacttgggctccgcgcccactactga

SEQ ID NO: 28207 - DNA, 222 bp, Zea mays
  Peptide Sequence Number=SeqID_71582
atggtgattactgatgtcacctgtgattatatctgtcaggctcatggctgccagccattcagccaggtggagaggggatcaggagagaggagggtgcgggtgagatctgcgagtaaaattttgtgcccgaacgcgaacccacagtttttgaagaaccgaatttctacaagaaccgaggaaccgaaccaaaccgaaccgaagaaccgaatgccccaggcctaa

SEQ ID NO: 28208 - DNA, 162 bp, Zea mays
  Peptide Sequence Number=SeqID_71583
atggacagatcagcggggtgctgcaagaagcttacatgccgtggacggggcgggagctggtgccccgctgacgtcgcagacgagcgggccaactgggagcggttcaacccacaacaacccgtgtttggttcaaaaggctcgcgggttaggatgttcctttaa

SEQ ID NO: 28209 - DNA, 1140 bp, Zea mays
  Peptide Sequence Number=SeqID_71584
atggaggcgctgtggaagcaggcctccaggctcaaggaccaggtcgctcggcagggtgtgttcaagcagtttggctatgggaattctgataatgcatttacagatgaatcagaggttaaaatgcatcagagattggaaaagctttacttatcgactcgtgctgctaaacattttcaaagagacattgttcggggcatggagggctatatagtcacaggatccaaacaagtcgaaatagggaataaattgtctgacgacagccaaaaatatggtgctgaaaacacatgtacaagtggtgatactttatccaaagctgctacatacttcgggaaggcacgctcacagatggaaaaggagcgcggcaacatgttgaatgcatttggcacacaggtctatgttcctaatgctggatttgcttcaccttgtggcagagccactgcgggcaatggtaatgggtgtgcacctttagaggatgcaagacatctggcccagagatatgacagaacgaggcaagaagctgaagcacaggctgtcgaagtatcaagacggcagaatagggtgagggagtcagctgggaatggagatatgatatcgaaattggaagccgctgagtacaagcttgaagaactgaagtcaaacatggtggcattagggaaggaagctatctcagcaatgtcagcagttgagactcagcagcaatggttgaccttacaacgtctcattgcactggttgaggctgagagaggttaccatcagagagttctggagatacttgaccagttggaaaaagaaatggtgtctgagcgccaaaaaattgaagcacccctgactccagcagctgacaattacatgccaccaccaccaccatcttatgatgaagttaacggagcgtttgcatccacttctgttaatgaatcagtccaatctgtcaatttcttccttggagaggcccttgattccttcaaagctgaaagtgagtttgagcttaccttgtcagctggtgacattgtaattgtccgaaagatttcaagcaatggttgggcagaaggtgaatgcaagggcaaagcaggatggtttcctcatgcttatatcgaaaggcgagaacatgttctagcaagcaaagttccacatatcttttag

SEQ ID NO: 28210 - DNA, 1008 bp, Zea mays
  Peptide Sequence Number=SeqID_71585
atggaggttcgttgccaaaccagcttttgccagaatgaagatggtttccccaagttgctgagagcatgcacagttcgcctcggaatcaggagtcagccagagtatgatggtcgtgaattcgtcgagcatggcacagagaagtgtgtcgtgactgtatacattggatctagtccgcaccatgtggaatggagtgtcactgctgctgggcacagattcaaagacaactgtcaagtcgtcggtcgcaaggcattgagggtcctgtgtcagatctatgaacaagaagtggccgacacaccgctcagattctttccgccctttcagagagaccgtccagtttggatggccaggatgcgtgcattggaagggaagcagctgcttgaggatgaccccacagtcgtgtacctcactgcatacctgctcacccttgatgcacagtatgatttcttggcttggcaccaccgtcagatgattgcccgagcagaagatgcagaaaagctcaaccgtaagctccatgtggatctcaccacagctcaagcccgtgtagctaccttggaaagtcgtgaagtcattgttgttgaagctctgaagcaagccaaggatgagcacatccagaagttgatggaggcctacttggtaacccataaccaaggtcacccggtctctatcagaggagagaagaaggcttgggaactctcggaaggagccgtagtcttagaaggaattccagtctcccctcaggctatggataagcaagagcaccctgagtcctcccaagatcccccgacggagttgtttgagcccctcaccatgaagaagattccagcaccatcccttgaggtcaaggaagaagctgcaagcaccccgccagcattgccgccctctgaagagctacaagagccagtcccgcttgaagaagagttcgatcccgtcttgtcatctcagttgccgccagaagaagtcatcaacatcagctccctcttgacccatccaggagatgtctcaaattga

SEQ ID NO: 28211 - DNA, 954 bp, Zea mays
  Peptide Sequence Number=SeqID_71586
atggcctgtatcaggtgcactgcacgtcagtccagtcacctggagagactgcatcgtcgcctgcacaaggagcaggagcgccgacgccaggagcaggagcatcaggactcttccccctcgcctcagtgggaggtggagtctgagaggccgccttcccctgcacctcagccagagatgccccttgcaccaccacagggcatcctggctgctggaggagaccctgacggagacggagacgacgacgacgtcagtggcagttcgagccacgacccagagcgctcggaggagctggagccggaggggtggattgctagacccatcactcgtgacgccgctcgcgggtgtcacttccatgatgctctcggtaccctattgcgtcgggccttcgaccgacacacttggtccatcgagtgcctttgtgtagtctaccaacactgttgtgagttatactcagaccagtgggaggctacttgcttggtgcgccgtccggacgatgatctccggggtgctgaggccttctcagagcactattctatcaatgagagggatactaccgaggcagccatgcaagatgcagcacgacagacactttctcagtattgctcgttgttcagtggggtagctgacggccttgacctgaagtactaccctcgctgttcgaccggtagtgctggaggtgtgattgtctcgccagttggtgagggcaatcccaggctaaacagaatggtcaacctggccgccgtgctcaacacagagttggaccatgcccttgacgagttgggcaaggttcgggcggaggttgcggaattgcatgctgagtgcgcggcacaccactatctggatggtggttctcccgcccctattgggattcagcacccttaccgttcatcgccccgtggtcacttcgactatggtaccccagactataggacccgcatagatttagatccatag

SEQ ID NO: 28212 - DNA, 427 bp, Zea mays
  Peptide Sequence Number=SeqID_71587
gctgggtgttctgacggtactgctgctgctgttgaggaaactgcctctggtactggtgctggtgctgacgctggtgctggcgaccttgcttgaattgatgtgtcatgatttccctgtcaatcaaatgctagaaggtggggaaagtgtggttcatgagctggtagtggaggggatcaaccaatcctctcagaaagcgggtgagaaactcctccttcctcactatcatcagtccctcgggcacatggttaagatggaagttgtccctaaactcctcgcaagtaatggcttcagggttggcatgggtggcgaggcacttgtggcatctggacttgcactagaggctgaggtgggggtggctgctgctgcacctactgcatcactgctaaggcctacccaattgcctgaactgcctgagtttgcatcatga

SEQ ID NO: 28213 - DNA, 525 bp, Zea mays
  Peptide Sequence Number=SeqID_71588
atggcgagctccggtggcgagcagggcgctgctccagcttcggtccacaacggcgacggcagtgagctccgacggcgagggagagaacgaggagggagtgagaaagagctcgggcagggagagggagagggagagggcgtcgatttttatagagagggagaggcgccgagggggaggtggccggccatggcgccattgatggccatcaatgggggcgccataatggggaggaaatggagggagagagagggagaaacggctgcccgtttctggttcctggaggcggaagggcgcgacgtttcggtcggggcgctgctcggcggctgcgcgtcggtcgcctgcaggggcacggtcgggctgcatggggtcgggtcgggtcggggtctagggtcgcggcgcgtcggggtgaccggctccatgggcgcggacggggtggcgcggtgcagggcagggtggccgcgggctgatcctggcggcgctcgatctggagagaaagggaaggggagagagagagaaagtgcctag

SEQ ID NO: 28214 - DNA, 591 bp, Zea mays
  Peptide Sequence Number=SeqID_71589
atggaggaggttgtcgccgtgccggggatggaggagggcgccgccgcgtgctgcaatttctacttaggtttgagtcagacagctttctccggctcgactgttgaccgcaatagcggcaattccgaggagaaaagagtagaggatgatgatgagtacaagctgtttgatgaggatgagaccccaccaccgaaagtaaatttcagaaagaaagaattatcggaggttgctcttgattctggtacgaaggggaaagaccttaaggaaggttgggacaagatactttgcattcaacgttcaaatgtctcagcaaagctatgcaagtgggctccccttaaattaggaagatggcttgctgtgggagctattatatctaatgaaagaggtagaatatatctcgctgactgcgttggcgctaaagatgaaatttatacatggactgaagtttttatgtttaatgtcggcaaaggaataaattcattgtcttggaactcgaaatgcaaatatctccttacaacatgcaatgatgttaacactgttgcgatattaaaacacttctcaaagccatcaaagatcacttatgtttatgtttga

SEQ ID NO: 28215 - DNA, 456 bp, Zea mays
  Peptide Sequence Number=SeqID_71590
atggaccccaccttccgcgtcctcgacattggcgtctgccctgccctgcccagcctcgtggaaaggcgctccgctcttggctctccccacctgcgggcgggggctgttggttcgggggggaggcagtcaaatccgcctgcggctgaatcgggggagagggggcgcatggcggaggaggacaggcagcagcggcggcggttcgcgaacctgcgcagtgtccagtggcggatcgatctcggcatcctgccggcgtcgcccggggcctccgtcgacaagctccgccacgccactgcggattcgcggaggaggtatgttagtttgaggcgccgccttatggtagacccgcatcttccaaaggaggaggacagatcatccaaccttgttgttgacaacccgctctctcagaacccagatgtttattttgtttgctacccgtttacttttgacaagccttaa

SEQ ID NO: 28216 - DNA, 114 bp, Zea mays
  Peptide Sequence Number=SeqID_71591
atggaccccaccttccgcgtcctcgacattggtttcagcgccccaaaggttggattggatttggctccagctcctaaggatgataatgctcaagtacgattaatccagatctag

SEQ ID NO: 28217 - DNA, 363 bp, Zea mays
  Peptide Sequence Number=SeqID_71592
atggactcataccgcgagctgggcgcgtggactgctgacttcgaagtgcccgatcaagaggcgggccttcgccgcctcgagtggctgcaagaggaattgttggcgctcccgaccattgtggagggatttatgtcctttgcctccctcgttacctgcgaaggggcgatgaacgcgatgtcccgcgaggggtgcagtcactatgaggtcttcgaccgatctgatgaagattttgagcgcgagattttcaaggtcgaggaccctgtggtgaaggactccgcgggggccctctttgaccggatgtggggtcccccaaggtcgggaggtttaggattttgggcctacgcacgcaaccgctactgctaa

SEQ ID NO: 28218 - DNA, 291 bp, Zea mays
  Peptide Sequence Number=SeqID_71593
atgggcttcaacatcagcgctggagatggtgctagaggggcggagtccaacgcagacgcgaggtaccgagccgaggcagagctcgacaggatcaggtctccggtgtgcgccatgctagatccagtggccacggtgggcaagggggcaagggtgcggtctccggtgggtggggaaggggagctatggtggggaagggagaggtctccggtggggaagggcttggacgggggagggaatggcgtcgcgctagtgatggctggggaatggcttcgacgcggcaaccttccttga

SEQ ID NO: 28219 - DNA, 174 bp, Zea mays
  Peptide Sequence Number=SeqID_71594
atggcgtacaaggacccggtggcaacgacagctcaaaaatacaagccaatacagtctgttattcctgaaacaacccttggccctattcaaattgaagcatttttaggcggaggggttgttagttctcgtgaatgtcctgttatctcgaaatacagagcttctgtccacacctaa

SEQ ID NO: 28220 - DNA, 261 bp, Zea mays
  Peptide Sequence Number=SeqID_71595
atgaagcgctctacggggagcacgaggatctgcgcaaggatccccgagatggtgagcggctgggtgcggtacgtgaagaaggtgttgaggaagatgagtacgacgcaggagccgagccccagcgcccacgcccgaaatggcagtgacgagcttgctaggggcatgatggagatcagagaaggtcgaaccttctcgacggggaacgtgaagggcacgacgtcgacgacggtgaggcggacaaccgagggccacgagagctag

SEQ ID NO: 28221 - DNA, 306 bp, Zea mays
  Peptide Sequence Number=SeqID_71596
atggcggcgagctaccggcgtgcagtagtccgaggcctgggtgccaaggttcaagattcgaatgcccaactggtgatttggcgccgactggtgggtccacttggccagtggccgctcgcacgcgccatcctgctacactggctcgtggggcccttcgttagtgaatccatgcgcgttcgcttgcctgtttcgctgccaggtggggccaactgcgcagaagcttcacctacctcccctcaacagactgtgcgcatttcgggctattggcgcaacaaccgcgtgcatcctgttgaggatttgtcgtag

SEQ ID NO: 28222 - DNA, 453 bp, Zea mays
  Peptide Sequence Number=SeqID_71597
atgggccggcagaaatggcagtggcaggcgggcggaagcagcggtcaagtcgtcagccaagctcacgtcccctcctgggacagcgagagaaccctctcctacggcgtgaagacgacgcgcccgacaggcggcacctttggcaggcgaagcaggcgacgcttcacctccgccataatggccgcgtcaaaaaaggccccgagccccctactgatcagaggttcaaaggctggcccctcggaagggttcaacagccgccttagagcactcgggctctgcacccactactggtcagaggttcaaaggccggcccctcgaaagggttcgacggccgcctcaggccactcgggctccgcgcccactactgatcaggggttcgtaggctggcccccgaagggttcgacagccgcctcagacgcaaaacgagggatgaccctaggtacgttcgatacataa

SEQ ID NO: 28223 - DNA, 219 bp, Zea mays
  Peptide Sequence Number=SeqID_71598
atggtggatgctcctgcgatgcatctcgacgaccagctgtcggcgccgccgtggctcaacgccaagactccagctccgcactccgacacctcgactacagctccacgtcccgacaccttgtctacagaacggaggtgggaggcacagccaccaaggctagggcccatggggagggagggacgtgaggtgctgcgtacagaggataaggccgaagcctag

SEQ ID NO: 28224 - DNA, 300 bp, Zea mays
  Peptide Sequence Number=SeqID_71599
atgagccgggctcatgtcctcgggggacagctggctgaggcttcgggagatcctccgaccgcgttgccgtccgaggctcggtcggacttcgccgaaggtgtagttgacgccgagggtgctgctggtccccctccgtcaagaattgtttgtccgagcgagagttacttttcacggaaggtgatgagtgagaaggtgatgagtgaggtatccgtatcccggaggcgtaggagtccctcggctcggtcaaccttggctgcttacgtgtactccgtcgtttttaggatcccactttcgaagtag

SEQ ID NO: 28225 - DNA, 123 bp, Zea mays
  Peptide Sequence Number=SeqID_71600
atggccgcctatgtgtgtgccgccacgccagtcggcaccgacggatgcgacacctgggtgttcaacatcgacaagacggtgctctccaatctcccctactacacccagcacggctacgggtga

SEQ ID NO: 28226 - DNA, 414 bp, Zea mays
  Peptide Sequence Number=SeqID_71601
atggtaccgatccggggagggagaaccgcgccgcctgtagaggccgcgatctccgtcgactcggtcgccgtcgccgggagcaccgccggcgcgtctacgcccgtctgggctgccaccgcgtgcgcccccgcctggagcgccgtcagcgcgtcggcgcctatccgggctgccgccacgcgcgcccccatggggatgcgcggctgcccactgtgccgcctgctctcgcgctgcttccctcgccagcctgagctcttcgtcggtgttgtcgtcgacagaagcagagctgccagctctactgccgcgcagaacctcgagctctgttgccgccgcacgtgcagcatccgccgcctccgctgcttctacttccgctctcgtcgctgccagttccgccgccgccaaccgtgctgcaagtag

SEQ ID NO: 28227 - DNA, 285 bp, Zea mays
  Peptide Sequence Number=SeqID_71602
atggccgagctcccctcgtgtgcggcgcgacctgcgtacccacggctcgcccaggagcggccccggcatggctcacggtgccctcgcacggctagcgcggctcgagcagccccggcacaggcactcgcgcccttgcgcgtcgcgcaggactggttcgtgatcgtgagccgtttccgagcttcgaggaatcgacagtcaagcttcggcgaccaagagactgaactctccgagttctacgagaatgaagaccctcatcatctgtttggtgaagcaagtgtcctctga

SEQ ID NO: 28228 - DNA, 1881 bp, Zea mays
  Peptide Sequence Number=SeqID_71603
gaaggccgcaagaagcggcgttcggacagagaggctcgtgcagcaggaacggctgccgcagccgctgcacaggcagcacttggagatcagccggatgttccatcagatcagattgctttccgtgctcgtcatctcgcctcccggtctcgctcctccactcacacctccgcttccactccgccacccactctgcctgctccagtcacccctattgctccatccacctccaccgccatacccactaccagcactacgccagcttccactgctacccctgcacccgctcccgcttctgctccacctgtccctccacctcgcttccgggagcgttattgagactgaggtccgtcctctggcttcggatcctcgtctatttgatcttcagcgtgctactgcagcccgagtacgtcggttcaggtacgtacccgtggagtcttggctgccagctcagagagacccagcagcaggagtcctttttagcacacggattcaggagtcattcttcagggctcagatgtctgctcagattgcgctgcgagtgcaccgcctattggatcttccagctttcttgctagcagccggtgctgagtctgaggcgcatctcacctatttgccaggccttttgtcctttctgactatcagcggcagatatgttgaggagtgggtccgcgtcttctatgcctctgtttggattgacccggatcatcattggatgaggttccgctttgagcgcgaggatgtcacgatcactgccagtcagattcgacagctatttggattccctgagtcgacgaatcgccttcacagtctctgctacggcacttcagatcctccacgtcgccctcacggcggtgtggctccagggacagctcacgtcgcggctctgttccgcccgcctttcacagatgggtcgcgacgttctccagcagacttcactactgcagcgaagtacttatatgagctcgtcagacggacactcctacctaggatgggatacagggaggctaccactcatattcagctttggctccttggtgccctggtatcccactctgagtttgatgttgtggactttctgatctgtgagattgaggacactgttctggatgggattcgtgctcgacggcagctaccctatgctcactacttatgccacatctttgcgcagctgatccagccacctcgttttcagagcacccttgaggcctcacgccttgtgtttggatcttaccgtcctgctcctgagattccagtgccagcttatgctcctgtgtttgacactcaggccgaggatgcagcacttcgacagtttgacacccagggcacagcagctgatgatgatgatgatgattttgggattcctcctccgcctccgcctcctatgcctccacgctcacatgatcatgaggctgggagctctagtgctgtccctgctactcctccggctatggaccctgctcttgcttcgattctccagactctcactcagcagcaggctcacctagcagccgagcaggcccgtttatcagataggatgctctccatgtttcagaacatgcaggacaggcaggatgcacttcagcagcagcttattcaggatagggcagagaatagggaattcatgggctctcatgcttcagcactctggtatctccgcacctccggttcagtctgctccgccttcttcgcttcacgctccagtggtgccttcgatattccgccagtgccaccagcatctgctgttaccactaccgctgtggcagtatctgtgaccgcttctgttccggtagctcctgcagcgctgcctgcgtccgagtcagtaccagctccagcttctaccgcagatcctggatccgagactgactctgaccctccgtcagc

SEQ ID NO: 28229 - DNA, 270 bp, Zea mays
  Peptide Sequence Number=SeqID_71604
atgccggaccatggtggcgtcattacctcgctctatctctccctcggctccgttcactcgttttctctcggcgtcatgcccggtggcggcctccctcccccggtttctgtctactctctggccatggcaacgaggtggcttatggcgtcacaaggaagagaccgaggtgtgttcaagccagcacttcgagcaggacaggaacatggggcacggctgctgctgctgcatgctagggatggccaaacgagccgcccggcccgggtccaatga

SEQ ID NO: 28230 - DNA, 642 bp, Zea mays
  Peptide Sequence Number=SeqID_71605
atgccccaatccccgctcctaagggtgctacgtgaagcgcaggacatagggaatagggaggggtggttctcaccgacaacaagggtccggtcgatgctgtccacggaggatggcggcaacacggcggggatggttctccggcgagcgattcactggactttgaaggccaccgctgctaagcacatgcccgatcaccatccacatgcaccggcgattctcccagaccccaccatggacactgaatggaggcagagatgccggaccatggtggcgtcattacctcgctctatctctccctcggctccgttcactcgttttctctcggcgtcatgcccggtggcggcctccctcccacggtttctgtctactctctggccatggcaacgaggtggcttatggcgtcacaaggaagagaccgaggtatatatgcgtgcgcactccgctgattctggcgagctagcgagattcaccgcaacgataaactcggtcggcgcgcggttgttacgcggagttcggcaggttccaggggcgcccgcagcggactcgggaagggggaagcccctgacagcacaggcccgtgcagcggagagaggtagggcgggtgcgagcacagaggtgcacgcgagtttcacggacagttga

SEQ ID NO: 28231 - DNA, 156 bp, Zea mays
  Peptide Sequence Number=SeqID_71606
atggagtaccagaggcaacaagctgagtaccaaaagaagaaggacgagactattcgaaccttctggcctagaatcaagatctactctcggcctttgagacacctctcacttcagttgccgcacctagagatgtgtctggtcaagacgacgccttga

SEQ ID NO: 28232 - DNA, 117 bp, Zea mays
  Peptide Sequence Number=SeqID_71607
atggccagaccaaagaagcaaataatgaccaagaagaagaaggattggatgaggcgtgcaagtcctatcactaatgaagaagataccgaggagttagccaaactagaaaaaggttga

SEQ ID NO: 28233 - DNA, 834 bp, Zea mays
  Peptide Sequence Number=SeqID_71608
atgatggacagcgtcggtcggagttggtgcagcgtcggtggcagcacgagttcgtcggagccgcggctaggagaaggtgggcgagcggggcgggtaccaccggcggctgtggccgaggcgggtacaggcggcggttgtggctggggagacaccggcggcagcggcgatgggagacaagacgggcggcggctaggagaaggtgagtggggcgagtaccgccggcggctatggccggggcgggtacggacgacggctacggtggagatcaccagcggcgacggcggtgggagagaagacgggcagaggcgtcagcggtgcagaacacgggcacatcggcggtgccaaaggttcatctataactttactaaatcgactgtccagaataccgtagattattccgggcaggagaagctttttggaaaaacaggccaagcgcggaccgtccgggcccctgcagcggaccgtccgcgataccaggatacccttcggacagaaccaatgcaaaaatacaagtctccactatggactgtccggaggaaaagcaaggaccgtccgagccctcgcgcggaccgtccggcctcaggcgcggaccgtccgccgttgatctacaggcgcggaccgtccggatcaggcgggcggaccgtccgcggttggcagaatggagcaacggctaggaagtggttggtggctataaatacaaccccaaccacctccattcacttcaaccaagcatcccaaccttcaacattcaatacaagagctagcaatccattccaagacacattcaaagcctccatctctccaggtttcacaattgagaaaagagatcattag

SEQ ID NO: 28234 - DNA, 264 bp, Zea mays
  Peptide Sequence Number=SeqID_71609
gagctgaagcaggtttctgcccctgttggtggtgatggtatctatcggtacccgtactttgcgtcgctttattcccatctttgctgtgctcctgtgccgttcgaagacgttcagagcagtgctctcgcgacggttcagggtgtcttgctagccatctgtaaggtctgggatgcagagaagtcttgtaaccaaatgcagcgtaatggaaaacgaggtatctatgcggcagtgccacttggatactgtgtcgttggatgtttgtaa

SEQ ID NO: 28235 - DNA, 540 bp, Zea mays
  Peptide Sequence Number=SeqID_71610
atgatgatcctcgcctcagttgctgccacctcgttcgtcatcctgcttcttttctctctactctcatgcctccgcttccgcgccaccctattctcggcaaagggcgtgggagcaggcacctcctccccgtattcgtccaacaccagccctgacaccgacccgcgcaatgactattgcacgtccacgaggacgtttcacagtatgcgcgcaccatcgtttttgccgtcatcggacgtcccgttcatcttcccggccttcgccctgttcttcctccccaacctactgccctcacccacggtcgcagccgcgagccgaccgatgctcttcgacgcgggtacgggcgttatactacctatgtcgcctctagatgttcaggtctttgtcgtgtccttctccgacaatgaacaggttagtgttcttccgatgatggctcatggatcttgcaaaatatgtgttaggatttggagatccatgcgggcactaccacatggtgctcgtcccttgtgttcttggctcttagatgcattaggtcgtttctga

SEQ ID NO: 28236 - DNA, 702 bp, Zea mays
  Peptide Sequence Number=SeqID_71611
atgttctctgccgaatgttcagaggtttatcaagtgcaatatcttgataactcggcaaagaaagatttgccgagtgttccgcttggcaaagaatgccactcggcaaagtaccaacataaagcactcgacaaagagattgttgctgatgtgcagttcaatgagtactctttgtcaagtgtcacactcgtcaaaacatttgttgagtgttatcgaggatttcccgagtgcctgcggcactcagaaaagtactctcactaccggaaacgggcgctttgccgagtgcccgaaacactcgacaaagccccactcggcaaaggctttgccgagtgtcgcactcggcaaagaaggctcggcaaacagtacatcggcaaatgcttctttgccgagtactttttctcgggcactcggcaaagaggtttgccgagtgccagggagcactcggcaaagaaaagtggccgttacggcgacgaggtaacggagacggcttctttgccgagtgtcaaggacgacactcggcaaaggcttcaccgcctttgccgagtgtcttcccggaagcactcggcaaagaatacatctttgccgagtgccttctgggacattcggcaaagagcccgccagggagggtccccatgtcaggctcttcgccgagtgctctctggcactcggcaaagcctgcctctttaccgagtgccagagacataa

SEQ ID NO: 28237 - DNA, 795 bp, Zea mays
  Peptide Sequence Number=SeqID_71612
atgacgcatgccaacaacacatgtactgaacagaaagggaagacgagcctaggcgacgccatctaccgtagcatcaccgaggacacgttcgacccggtggagttcttggccgggatggacctttcgacggagcacaaggtgctggacctcaagaaccgcatcgaggcctccaccgtgatctggaagcgcaagatgcagaccaacaaggactccaagtcctcgtggagctccatcgtcagcttcgagaagcgcgagcagttcgaggagcgcgccgagaccatcctccacctcctcaagctccagttcccggggacgccgcagtcgcagctcgacatctccaagatccagtacaacaggggcatcgagacatccatgatccaggacgtcgggtacgccctcctggagagctactcgcgcgtgctggagagcctggcgtacagcgtcatgtcccgcatcgaggacgtgctgagcgcggacgcggcggcacagaacctgacggcgaccgaggcggcgcggcgggtgctggagtcggcggacctgctcgcgccgcggaagctggacgccaaggaggagctggagaagctgaacgaggccccggcgtcgatgacgctcttcgacttcatgggctggcacttcgaccaggacgagctgatgaagcgcagggaggacggcacgctggacgccgacggcgaggccatgctcctcaagaaggcgcccagcgtggcgcccaagaagttctcctacgtcgacagcctctcctccggcggcatgaggagcccctctgcgcgccactga

SEQ ID NO: 28238 - DNA, 340 bp, Zea mays
  Peptide Sequence Number=SeqID_71613
atggtggtggccccctgggtgaggtaccttagacaagaatacgtccccatgttaacgtgggcggccagcacctaccgctccctctcttgcccatatttcagagagcaggagggagagaaagggtcggccaggctcttcaatggggcgcagtcggacttcatgaccaccaatggcgccaatggttacaggggacgcgccgtcgggtctgcatccttgggcgcgtgcttggctgttcggttgggcgcgggtcgcggctggactgacgcgattgtcgcggtcaggctcggtgtctcgcggttggagcgtggggtgggctcagcgggcgctggcggcgcgtcgg

SEQ ID NO: 28239 - DNA, 374 bp, Zea mays
  Peptide Sequence Number=SeqID_71614
gagctgtcaccggcgagggaggatgcaggggcgcgaccgagaagcagaggccgaggaggagcgcggtcaggcgaccacacgacgctcgattagagaagcttggggcgcgacggttggagcaggaaatggccggcgttgagggcagagccgagcagggagggagctcaaagctcgagctcgacgttgggggcgagctcacgacggccctggcaacgggcagagggaggagcgccggcgaggtcggggaaagcagcgaccggcgcggttgggaaaaggcagggcgccggcgaggagaaccaaggagccgggggcgagcagggaaggagaggagggagcggctgagctgggcgggaagaacctcagggcgcgactga

SEQ ID NO: 28240 - DNA, 441 bp, Zea mays
  Peptide Sequence Number=SeqID_71615
atgggcaagaacaacaagcgcaagcgtgaaccgactcctccatcggaggagtttggtgactcggaatactcggaggaggagttctcctccgagcccgaggggtctccggctcccgtctctcccccggcgtcgtctgatgactcggacgactcccaggggatagccgcggaggtctggacgtacatccgagctgtcgagcgcgccgggctcgaaggctcggatgagtcggagtactcctcggatgaggaggactcggacggcggcgacgagggtgaagacgacgacgacgacgacgacgatgacgacggcgacgacagtggcaggggcggcggcgacggcggcagggacagcaccaagggcgacagcaggggcagcaccaagggcagcagcaggggcagcaccaagggcggcggcggcggcaggggcagggccagtggctag

SEQ ID NO: 28241 - DNA, 495 bp, Zea mays
  Peptide Sequence Number=SeqID_71616
atggcacgtcgaatgccacaaggactcagtccacactccacagggagggaggagggactgagggagcaggagaggcagccgagaagatcggttctagcgtcaggccgcacggtcgacgcgactgtgtccttcgcggccaccgtcatctgcggctacctcaccgcggtgctcgtcctccgctgcctcgtcctgccccgcctcccggcgctacctctgccggctctccacgcggcatccgccgcccacaacgcggttctgctgacgctctctgccaccatggctgctgggtgcgcgctctcgatggtcgcgacagcgccgacgccgtggtgggcatggcccttttgcttctcgccgcggggcaccacggaggcgtcggggcccgtcttcttctgggcgcacgtgttctacctctccaacgtgtacgagctcggcgacacgctgctcatcctgctcgcccatcgcgtgatgaggacatcacttctatacatacaatga

SEQ ID NO: 28242 - DNA, 165 bp, Zea mays
  Peptide Sequence Number=SeqID_71617
atggaggctttgaatgtgtcttggaatggattgctagctcttgtattgaatgttgaagacaacgagcagtctgaggttcctgagtgtgttgttggagacctccctgagcagcaacctggtgaaggcaagtgtcctctgacccattatgtcctacatactttatga

SEQ ID NO: 28243 - DNA, 375 bp, Zea mays
  Peptide Sequence Number=SeqID_71618
atgggtgctactggtattttatgtgattctacccatgatgcagtcataaaagaatgtgttgctccagtatcaaataagacatttgcggaatggtactcgactgaaaacgtacctagtgccactcttggagtctcctggactatgtcggcctccagtggaaacatgcacgacttcctccttgagctggcgctgcttgattgttctagttggttgctggggcaggaagacgggcttcctggttgctctggcgctggtattgatttcctccttgctggttgctctgacggtactgctgctgctgagaaaactacctctggtactgctgcggctggttctaacgctgatgctggtgctggtgctggtgaccttgcttga

SEQ ID NO: 28244 - DNA, 174 bp, Zea mays
  Peptide Sequence Number=SeqID_71619
atggagagtcatgatctccgggcagaatgggaatcacggcttgtgggtggttatgagattgatggttctggttatgactctggtgttggttgtcaacattgcaaccactgctcagacgaagatgaagctgtggaaggagacttccaggagttccaagactacgacgagttctag

SEQ ID NO: 28245 - DNA, 594 bp, Zea mays
  Peptide Sequence Number=SeqID_71620
atggacgagggttgcactcaacccctttcaagtgatccaatgatcaacttgaataccatggtgttcttctttcttatctcttttctcgttcgcgaggaatctccacaagttggagtctctcgcccttacaataaatatcacggtgaaagcacaagagtaaggatgggaagcagcacacacaaatccgcagcaatacacacacacacacacaagccaagacttgagctcaaaatgaagcacaacgagttcactacaagaacggagctcaaatcactaacacagttgatcaagtgcgtggagacggattgtggaagacttagaatgctcaaagtatgcttgggtagctcctacatgcgcctaggggtccctattatagccccaaggcagctaggagccgttggaggcattcttggaaggcaaatcttgccttctgtcgggtggcgcaccggacagtccggtgcaccaccggacagccacagtgcatgtctggtgcgcgatttccttccattcctggcacagccgatcgttgcaacttcgggctggttggcgcactcgacactgtctggtgcacaccggacagtccggtgcccctag

SEQ ID NO: 28246 - DNA, 1422 bp, Zea mays
  Peptide Sequence Number=SeqID_71621
atggcgcccacggatgaatcggctgctgatacgccagcgccaccaccgccgccacctcacttcgttatcgtccccctcgtggcgcagggccacaccatccccatggtcgacctcgccctcctcctggcggagcgcggtgcgcgcgcgagcctggtgacgacaccgctgaacggcgcacggctgcgtggcgtcgccgagcaggccgcgcgcgccaagctgcccctcgagatcgtggagctcccgttcccgacggacgtggacggcctgcccccgggcatcgagaacatggaccaggtcacggacaacggccacttcgtccccctgttcgacgctctgcagaagctcgccggcccgctggaagcgtacctgcgagcgcaggcgccgcgcccgagctgcatcgtctccgactggtgcaacccgtgtgcggccggcgcggccagaagcctcgggatccatcgcctcttcttccacgggccgccgtgtttctactcgctctgcgacctcaacgccaccgaccacgggttacgcgagctggccgcggcggcggcggcggctgacgtcgacgacgggcaggagaggttcgtggtgccgggcatgccggtgcacgtagaggtgaccaaggccacggcgccgggcttcttcaactcgccggggtgggaggcgctccggggcgagtgcgtggaggccatgcgcgcggccgacggcgcggtggtgaacacgttcgtgggcctcgagggccagttcgtgtcgtgctacgaggcggcgctcggcaaacccgtgtggacgctggggccgctctgcctccgcaaccgggacgccgacaccatgtcgtcgcggggggcggacggcggcgtcggcgtccgcgtccagcagcacagcgcggtagccgcctggctcgactccaaggataccggctccgtcgtgttcgtcagcttcggcagcctcgcgcggaagctcccgaagcagctgttcgaggtgggggcatggcctggaggactccggcaggccgttcctctcgccatcctgtcccaccgcgccgtggggggcttcgtcacccactgcggatggaactcgctgctggagtccgtcgcgcacggcatcccggtggtcacgtggtcccacttcgccgaccagttcctgaacgagcggctggcggtggacgtgctcggcgtgggcgtgcccatcggcgtgacggcgcccgtgatggtgttcgacgacgagagcgtggtggtggcgcgtggggacgtcgcgcgggcggtgtcggcgctgatgggccaaggggaagagaccggcgagaggaggcggagagccagggagtacggggagaaagctcacggcgccatggagaaaggaggctcctcgtatgagaacctgacgcagctgatcgagagcttcgggcaagtggaggcaagaaaaggttag

SEQ ID NO: 28247 - DNA, 270 bp, Zea mays
  Peptide Sequence Number=SeqID_71622
atgtccggcagcggtagaacagtggcggtgtcggtcatgccggtgggcagcggcaccgtcgagctgctgccgataaacgggtacccctcacttctggacggggccgccgcggacttgtttctcggctacagtgggagcaaaagcggaagaccatgggagtcggcgcccgtggaggacttcacgcgatgccccgctcctagatctgcggttgccgacgccgtgggcatcgcccggggggcgaaggacagggagctgtgtccaagggcgtaa

SEQ ID NO: 28248 - DNA, 1341 bp, Zea mays
  Peptide Sequence Number=SeqID_71623
atgtcggcggggagtgcggccgccgtgcctggcactgacccggcgccgcacttcgtgctggtcccgatgatggtcgcgggccacgctggcctgatgctcgacatggcccgcaccctctccgggcgaggcacgctcgtcacgttcgtcatgacgcccctcaacctgccccgcctcggccgcgcccctagcgacgacgcgctccccatccgcttcctgccgctccgcttcccctgcgccgaggaaggcctccccgagggctgcaagagcctcgacgcgctcccgggcctcggcctcctccgcaacttcaacgacgcttgtgccatgctccgcgggacgctcgttgcgctcctcagggatagggagggcgacgccccaccgccgagctgcgtcgtctccgacgcctgccacccgtggaccggcggggtgccgagggagctcggcgtgccgcgcttctcgttcgacgggttctgcgccttctcctccttctcccatgatttttcgtcctgcgtccaccactgcatgcgccagatgaatctccacaagatcttcgagggcgtcgacgacgacgatacgcgccccgtgcacgtccctgctttccccatcgacgtcgagatattgagggcgcggtcgcccggaaacttcacgggtcccggcatgaaggagttcggccaggagatcatggctgagagcgcgagagccgacgtcctggtggtgaacagcttcgcggagatggagcccatgtttgttgacgcctatgaggcggccctcggcaagaaggtatggaccatcgggcctctcttcctggcccccaccatgccgctggcggcgacagcagaggacgccaacgccgtccggtgcgtgagttggctcgagtccatgaagccccgaaccgtggtgttcgtgagcttcggcagccgggtgcgctcatcgctgccgcagctcgtcgaaatcgagcacggcctcgaggcgaccaagcgcccgttcatctgggtgggactgggctccgcagaaggcgatcctgtcgcacctggcaacgggagcctttgtcacgcactacggcggaactccgtgctcgagtgcgtcacggcgggcctgccgatggtgtcgtgcccgcacttcgccgagcagttcatgaacgagaagctcgtggtggatgtgctgcgggtcggcgtgcctgtcggcgtcaagggtgccgcgcagtggggcgtggaggcggagggtgtgctggcgacgaggcaggacgtggagagggcggtggctgcggtgatggactgcggggaggagggctccgcgcgccgggcaagggccgccgagctcggcaggaaggctcgggaagccgtg

SEQ ID NO: 28249 - DNA, 159 bp, Zea mays
  Peptide Sequence Number=SeqID_71624
atggactcgacggcggcggcggttgctagttcgggaagaagggaagaggttgaccatttgctagtgacggttgacgaagtcgaggactcaaaacgttatcagttccagcaaaacactgaaagaaagatagatgtagctttggccaacgacaacccttga

SEQ ID NO: 28250 - DNA, 270 bp, Zea mays
  Peptide Sequence Number=SeqID_71625
atggaggaactcgatgaaaatcctttcctaaatgcatgtaggagaaaatatgagaacaacgaataccaagttaagatcgagatactgaaaatcaactttcatgagaggaagaagaacgcttgggaagattcaagctcagatgacatttctggtgttatcacacgctttgatggtgttgaccttcaggtttatgaaaccctcactcagtcactctctattatctctatatatgaaacagacaatttggtgctcagtcccagtgatggttag

SEQ ID NO: 28251 - DNA, 168 bp, Zea mays
  Peptide Sequence Number=SeqID_71626
atgaagccaaacaaccgcatgaagttggactctagtgagcgattcgatgacaagaaacatgaaaacaagtatctagaactgcgcaaggttctaactaattctcgttcgtgcccctacgcaaaggaaagcgaacgcgagggccaagcgcccagaaaggtaactctgtag

SEQ ID NO: 28252 - DNA, 828 bp, Zea mays
  Peptide Sequence Number=SeqID_71627
atggtgggccgcctccagttcgtgtccgtgggcgcgtccaacttcgccaccgagatggacttcatcggctctctgctgcccaggttccgctacatcgcgatagacgccgagtaccctggcactgtgcacggcgcgcccgcgggggccgggctgtccccggccgcgcgctactacgcggtcgtgaaggccaacgtggaggagctccccgtcctgcagctcgggctcaccatctgcgacgaggagggcaacctccccgtcgtcatggacgtggacggcctcccgctgcagatcgcgtgggagttccacttctccgacttcgacgtcgcccgcgacccgcactccgtcgagtccgtcaacttcctgagggcgcagggcttcgacttcgtccgcgcgcgcgcgcacggcgtcgcgtccgcggacttcgcgggcaagctcgccgccctgctggcgtcggtgccgcgctggtgccagccgccggcgtgggtggcgttcggcggcgccttcgacttcgcgttcatggtcaagatgctgtccggcggccagccactgcccgagaacccacaggacatggtggcgcgggcgagcgacctgctccgtggccccgtgttcgacgccaagtacatggcggagcactgcggccgcccggagctgtgcgttggcgggctcaggaccgtggctgccatcctcggcgtgccccagctcgacccggcgccgccgagccttgcgggccccaagagccacaccgcctgccgcatctactacaacgtgatgaggatgctcgagcacgatggcgccggctatgacggcctcatcgatggcctctactga

SEQ ID NO: 28253 - DNA, 234 bp, Zea mays
  Peptide Sequence Number=SeqID_71628
atggataatattgatgaggtgaccgacagaagggtgatagctttgggagcaatagaaaaggacaagatcatggtagccaaggcctacaacaagaaggtcaatgcaaagttatttcaagtaggctccaccaaaaggcagggggcatatgttgggcaccaaaaagagggcggacggtccggccttggggtcggatggtccgcggtccggacggtccgcgcacgcagaacagattag

SEQ ID NO: 28254 - DNA, 249 bp, Zea mays
  Peptide Sequence Number=SeqID_71629
atgcggcatggctccgtgcggagtgacaaccatggagagcaattgcccacggttcaggctttctctccccttaacatggactcaccattatttggcatattctcccgaagctcctcagctgctcgcttaggcccaaacgtcggtgttcacatggaacagttatggtggcgtgctctctcgcttctcgacgtcggtgctctccacgctcggcgacatcttctcggcgtggcactacgacttttagattag

SEQ ID NO: 28255 - DNA, 198 bp, Zea mays
  Peptide Sequence Number=SeqID_71630
atggagcgcagccagcgcggccaccagctcgcgcaaccacccgagctcgcccctagtcgcaggcagcagggcgcccgcgcacaaccccgcctgcccagccccgtgttggaacttgctctcagttgcaaggggatccaacaagggtatctttgcgcccagcgtcttgtgtcaaggacgcatgtgccctcagacacctag

SEQ ID NO: 28256 - DNA, 582 bp, Zea mays
  Peptide Sequence Number=SeqID_71631
atgggatctccggccacggcggtttccatgcctggggaggggccatgctcacctacgcgccacaaagggcctcctggccacgccctaggggctcgccgatggggtgtgctcggctgctgggcacactgggagcagcagccaagggacgacgttggcaggggcgagacgaccattggtgcgatcgcgcggagtgcctggaggcagggcgtcggcaatgcgggcgtgcaggaggacgggtggagtagcggcgttgctcgactagggagctgggggcaccggggtgttggggcgaaggcaaagacgccacccttcgctcgaggccttcgctccagtcgttggtccgacggagacaaaacgggcagggacacccttcgctcgatacgacatcagacgaaggcctgcgacgaggtcatcctactgtgcggcctcgtccagctcggaggcccacgtacgatccggcccattgtaacgggccctgcgtggtcgctgcgtgttacgggcctaaattgtaaaggcattcctgtaattacagtctgtaaccctgctttatgggaatattctggggataacctaggtgtctga

SEQ ID NO: 28257 - DNA, 249 bp, Zea mays
  Peptide Sequence Number=SeqID_71632
atgtcggccgcgccgcgcaaaggagaagacgagggggcaagggggccgtcgccaggggaggggcgagctcgggtggttgcgcgagccggtggccgcgctggctgcgctccatggcctcctggtcgcgctgccgcgccgcgcgccaggaggagcacaggggcaagggatgaagacaccgtcggggtcgtcctgcctacgtgcgcaaagatgaacgcagggagagaaggcgaaaaggagcatacctggtaa

SEQ ID NO: 28258 - DNA, 426 bp, Zea mays
  Peptide Sequence Number=SeqID_71633
atggtgccttcgccaccgcgtgccgttgaggtggcgacgacagagactggaggggcctaccaggagttgtccgtggaagactacctgttaggggacattgccatgttcgatgcccagacggggctgccacctgctggtgaggggagtattggtgcaggtactgaaactgggcagttggtggtggcaccggtgaagcccactgataagggcctacgtggaagagcggagcggaaacgactggaggacaagatagaacacctccggatgcagcacaccgaagccatcagagacaagtccacgatcgagaacaagagtcggaaccttctagataaggttgctatgcttgaaaaagagaatgaatatcacagtcgtcggcttaatgaggagaaggataccgctgctgaggcgaagacagaggccgcctga

SEQ ID NO: 28259 - DNA, 681 bp, Zea mays
  Peptide Sequence Number=SeqID_71634
atggcagtcggggtcagtgaggcattgtacgccaaggtgaacaagggagataggggtgaagaggcccttcgacacgtagctaggatgagcagcgaccgagatttggttgaggaattcgttgcgtgcggcatgtggccgctggctcacggatgggatctaggcgaagtcaagctttgcccgatgcccttcttaggtaatcagctagtacaaagccccaccttcgccattgagctgcgagggcaggatgtggccgcttttggcaaggaagttgagtcggaggctgtgaaaattgttggtaaatactcaacaaagatagagttaacaaaaagttgggatatacggggttctaacgtcaggttgaaccaagtttttgagttgaatgttctacggtacggtccttacctggaggggggttctgccgatgccggggatgaccgaggaaagaaagtgaagacccggtcagacgaatgctccttgaaggggaaggtggtaattgcggtgactcagaagagtagaattgaggtcaaaggtacgaagaggacattggtggggccgagggtctttaggtgttctgctgacgagttggcggagacatgcgctgggcctagggaggttataactttgcccgatctttgggaattatcttcacgaatgctgaaggtgaccgggggtcaggcatag

SEQ ID NO: 28260 - DNA, 321 bp, Zea mays
  Peptide Sequence Number=SeqID_71635
atggtcagttggcgtggcgatctggccaaggttgcttctctgcgaagactaggccttgggcgagccgaagatgacaactcaattaaaggactaacaagtgtgctaagtgttgaacaggtgcttaatgcaaagctaacagggttcaacacaaagacaaccgatcaagccaaggatggaggcaagaagagcttcgaggtatcgagtgcacgggagaaggtcaaggagaccaggaacccaaagccaggggtgaagaagaagacttgcaaagtcaaggttgatcgagttaagaagagttatgctgcatcaaggatcactacataa

SEQ ID NO: 28261 - DNA, 1071 bp, Zea mays
  Peptide Sequence Number=SeqID_71636
atgggcgaggaggagaaggcgaaggaggcggcgcccccggccgacaaagtaaaggaggcggaggagaagaagggcgaggggggaggaggggaggagaagaagaacgaggccccgtctcttccaccgccgccgccggaggaggtggtcatgcgggtcttcatgcactgcgagggttgtgcgcgcaaggtcaagaagattctcaagggatttgatggtgttgaagatgttattgcagatacgaaggcacacaaggtggtcgttaaggggaaaaaggcagctgctgacccaatgaaggtggtggaacgggtgcagaagaagacaggccgcaaggtagagcttctctcaccaatgccaccaccgaaagaagagaagaaggaagaggagaaaaaggaagaacctgagccaccaaaaaccgagaagaaagaggaggcaacggtgctcgctgtggtgctcaaggtgcatatgcattgtgaggcttgcacacaagtgatcaagaagagaatcctcaagatgaaaggcgtgcaatctgtagaggcagacctcaaggcttctcaagtcactgtgaagggtgtgttcgaggaggccaagctgtctgattatgtgtataggcgcactggcaagcacgctgctatcgtcaagtctgagccggttgcagctgagaatgttgatgatggaaatgccaaggatgacaagaaggcagccgaaggtggggaggagaagaaggatgatggcaaggaggaaaagaaagatgaagacaagaaagaagcggataatcagaaggatgatggcaatgctggtgatgaagggaaagacaaagaccctggcgccgttgctaacatgtatatgcactacccgaggtccaatcatctgagcgaatacggatatgcctaccagtaccctcctcagctcttcagcgacgagaacccgaatgccttctggcctagttcagcggcattctttcaacagatgccaattgacagcattcattacccagttggcaatggcacttctcatgtctgtgcctcggttgtggaactgaaaattaagggtcatgctcgttgcaaaggctag

SEQ ID NO: 28262 - DNA, 978 bp, Zea mays
  Peptide Sequence Number=SeqID_71637
atggacgagtctggggattttgttataatactgaaaaacttcctgctccttttggagaggatgcgctttgcaaaaaaaaaggagatcggaagtcagatggaggtccgttgccaaaccagcttttgccagaatgaagatggtttccccaagttactgagagcatgcacagttcgcctcggaatcaggagccagccagagtatgatggtcgtgaattcgtcgagcatggcacagagaagatgcgtgcattggaagagcagcagctgcttgaggacgaccccacagtcgtgtacctcactgcatacctgctcacccttgatgcacagtatgatttcttggctcggcaccaccgtcagatgattgcccgagcagaagatgcagagaagcgcaaccgtcaactccatgtggatctcaccacagctcaagcccgtgtagctgccttggaaagtcgtgaagtcattgttgtggaagccctgaagcaagccaaggatgagcacgtccagaagttgatggaggcctacttggtaacccataaccaacgtagagccctgcggatccaagagcctgctccatccaaccctgttcaacccatcaaagctgaagacccccagattcttgaaggtcacccggtctctatcagaggagagaagaaggcttgggaactcccggaaggagccatagtcttggaaggaattccagtctcccctaaggctatggataagcaagagcaccctgaatcctcccaagatcccccgccagagttgtttgagcccctcgccatgaagaagattctagcaccgtcccttgaggtcaaggaagaagctgcaagcaccccgccagcaccaccgccctctgaggagctacaagagccagtccagcttgaagaagagttcgaccgcgtcttgccatctcagtcgccgccagaagaagtcatcaacatcagctccctgttgacccatccaggagatatctcagattga

SEQ ID NO: 28263 - DNA, 120 bp, Zea mays
  Peptide Sequence Number=SeqID_71638
gtggttatgagattgatggttctggttaagactatggtgctgcattgcaaccactgctcgggcgaagatgaagctgtggaaggagacttccaggagttccaagactacgacgagttctag

SEQ ID NO: 28264 - DNA, 504 bp, Zea mays
  Peptide Sequence Number=SeqID_71639
atgaggtcgtttgaaaaactcgaaaaattaaggataaaaatgatttctagtgacgcggcggcggcggttccctcgggcgtgcgaggaggcgcccgtgagcaggagagcctcggccgccgcggcgctctccagccggcggattggcggtcgtggagggggcgcgaggaggagcctcagcgtccgcgtcggtacagcttcaggaggcaccggtcgggcgcggctgaaagctctcttgtgggttttggtggtttggatgacaacccaattaaaggactaacaagtgtgctaagtgttgaacatgtgcttaatgcaaagctaacagggttcaacacaaagacaaccgatcaagccaaggatggaggcaagaagagcttcgaggtatcgagtgcacgggagaaggtcaaggagaccaggaacccaaagccaggggtgaagaagaagacttgcaaagtcaaggttgatcgagttaagaagacttatggtgcatcaaggatcactacataa

SEQ ID NO: 28265 - DNA, 372 bp, Zea mays
  Peptide Sequence Number=SeqID_71640
atggagggtaggggcatgagcataataaaggatggagctaaagcaaggattggaatcgacaagggagaaaatgccaccaagggaagggtagacaaaacttgcaaggtgtcaaagaagggggagcaatcaatggtgaagtgggtgaggcattaccatcgaaacaaggacagaaaagacgaggcttttaaaaggtggaagagaggagatctttggagagcaggaattaagatgagcgtcaaagcaaggttgatgggtggcaaggtagaaggcctcaatatcacaagggtcaaggcgataacagacaagggcataagggaaaagacgaaagcacagaagagccagtggtataagtacaataaagaatggaggtag

SEQ ID NO: 28266 - DNA, 540 bp, Zea mays
  Peptide Sequence Number=SeqID_71641
atggcgcggacgcccggccccctcgcgtccccctccctggtgcagcctgacacgactcgccatgcatcagccggcccgcggtgtgcagctcgcacggccagcgcgcgcacagccggcacggctcgcagcctggcacggccaaccatccagcggctcgcccgtgccctgcgcagccgccctgtgcgccccgtgcgccagtggcctagccggccatggccaccgtggccgagtcgccgtcgtcttcatcgcgccgatgtcttcgccaacagttcgtcatgttctgtgtccacgcctcaacgtcgtgcgtctgcgccccaccgttcgccgtcgtctgagatcgcgattcgtttccgagcttcgaggaatcgacggtcaagctttggcaaccaagagatcaaactcttcgagttctacgaggatgaagaccctgagcatctgtttggtggtgacaaggatgatgtttatgactatggtaatggtaaagaaggcgtcgaggtggatctccaggagttccaggacgtcgacgagttcgaggattag

SEQ ID NO: 28267 - DNA, 225 bp, Zea mays
  Peptide Sequence Number=SeqID_71642
atggccgataaaggcaaaggcaaggacatcgtcattggcgatcgccgcacgtcagataaatcacaaaaggagattgctcgaaaggcttcggacgagaaggctaaaaagtccgaagacggttctctggaggacatggttgctggagtgacttggccgtccatcttgccaccgggttggactgtcgagtgggaccccgcctcggccggggaggagcatgaggagtga

SEQ ID NO: 28268 - DNA, 642 bp, Zea mays
  Peptide Sequence Number=SeqID_71643
atggcccgcgcccgcgcctataaagcacccagggacttcgaccgtaccctttcgcacgcgctcgacctcaccggagcccaaaaccaccggcgtttgcccgtacacggcgtgtctgcggccgcccgatccccctgccaccgtagaccggccaacaggacccttcccaaccacgtccaaccctcggaggagactgtgcacacctcggtgaagctccccgagcgaggaatcggagtttgcttcgccggagaggccagtccacggtcgccggactccacccgaccaccggtgagcgtagaccggctcccgccgccgacgagagcacccgcctgcgcacgtggaccggacgattctggccacccccgccgtcgagccgtacaccgttgtgaccgccaggacctcctggagccaaccccgcccctcgccggacctctctcgccgccggtgcaagagaagcaggatggtcaggcaagaaaacaagtgccagtgtacttcgtctccaaagtacttagtgcatcaaagaaaaattatacagagttagagaaggggctcaagaagaagagaaaacaaatgatgccgaagcctggacaatattttgtgatgggtcctggggaaccttcggcgcaggagcagctgctattctaa

SEQ ID NO: 28269 - DNA, 184 bp, Zea mays
  Peptide Sequence Number=SeqID_71644
atgagcagctcgaggagtgaggattcagtttttcaaggcacaggttctaccatgagcagacgcagagcgctggcagaacatttgcctccacacgatgatgctggaatcgagcgacagtcgagagaagatgctccatttggggccgtggtagaggaccatgcgagagatgatgatgaagatgatg

SEQ ID NO: 28270 - DNA, 330 bp, Zea mays
  Peptide Sequence Number=SeqID_71645
atgaggaatagggcaaggcctagcccactactcctcctgctcctctcctgctggagcagcatcccacttgaccgtccaacccggtggcagggtggtaggccaagccacaccggcaaccatatcctgaagcgtacctgtaaaaattgtgccacaagcaaggctgagtatactaatactcagctagacttacccggtttccacacattaatccttagtttctttttctcgtctcatggacaaggcatccaccctggatccaagtccatagaccatcatagatcccgttatcaagatgaatacaatcaattcctgacctcgcgcgagtgctag

SEQ ID NO: 28271 - DNA, 441 bp, Zea mays
  Peptide Sequence Number=SeqID_71646
atggcctcaaatgagccccttggcaccatctcggacatcactgaaggtgctagtgcatctaaagaaccatgtcttgttggtactgctggttctggttctgctggtgccagcccttctcatagtgactatggtgctgctagttcctctggatcctctggaaagagaaggagactcagtggtgaagagctggggattatgataggacttactggagctgtgaacaaattggttgaagctgtccaagcacctgttgtggtccagaccaccgatgtccaccttgatctgtatcaaatttgcatgagtattccagatttcactgatgaggacttgatgacttgccttacctatctattggacaacaaaagactaggtgatggctttgtgaagatggagcctaaacattgtgtgctttggctatggcggcaccttgcaaggatttga

SEQ ID NO: 28272 - DNA, 327 bp, Zea mays
  Peptide Sequence Number=SeqID_71647
atggccatgatggattcaacatcggaaaagatgtacctctgccagacaaggacaactgtaggtgggcctaattacttgggaggttccgtcacaatagacatagaggttgaaggatcgctctatgtcatcatggcagaagcttattcttctcatcagcttccaaggttttcaaacgaagcccataacagctcaggccttgttctagtgtgcccaagaatagccttcaagcttatgttcgaaggtttcttttggctttgggctcaagcaccatgtgtaccagatgatattgtcatcgaaacaatgatcaagggcttcttcttggcctag

SEQ ID NO: 28273 - DNA, 315 bp, Zea mays
  Peptide Sequence Number=SeqID_71648
atgggtctctggtggcgaactacagctggcgaactacagctccgcgctgcgtggctctggttctggtctcagggagttacttgggagggatattcttctgagtactggaataaggtccagaacatctgcactagaacacctaaaaagaagtcctacaaagatttgctggttacagtaacaaggaaccaccattttgatgcaaaggacaggaaggaaacgaaaaagcaggagccagggctgttcaacaacatgaccgagtcgctgaggcgaggaagaattgttttgaaaggaaatggaatggataaagcaaattaa

SEQ ID NO: 28274 - DNA, 156 bp, Zea mays
  Peptide Sequence Number=SeqID_71649
atggcagattgtggtgctggctcaggcgagcgcgtactgcggggcaatgctcggtcaatcacaggcggacataggttccgagcgacgacaaaacgtggttttcaaacgctccttagtctggctatccctccatatctgcccgagatcacaatataa

SEQ ID NO: 28275 - DNA, 903 bp, Zea mays
  Peptide Sequence Number=SeqID_71650
atgggacagaggacacttgccttcaccaaactgctgatcagggacttcctctgcaacctcctcgggaaacacagactgctcgttgtctacgtaaagattagatcctgcgggcgggcgcgcgagcgcgctgcggcctgggcggctgacaggcgggaccgggcgggcagcgcggggcgcgggcaggctgacaggcggggcccaaccggcagggaggcagggtgtgggggaagcgggcctgggccgctggatctccggcggacggccaggattgggcttggcctaattaagacggggccgcccgatctgggacggacggtggggatcaggtggccggcctgggcttctcttacggctagctggggcggcggcgctcgtccccgcggcggaggactcgccggagacgaggggcgcgggcgtttggcggggctccgaggcgacctgatcggccgtgaaggttggggagggcacggtgaatcctctggtggggtctgggtcggggcaggggcaccggaggggggcggttcacggcggagcggctcggcggcggcattaatctactccggcgaggaattaagcgcaacagaaggcaatacacgggtcgataggggcgggagaggttctttacctcaaggcgggctccggggactccctcggcggcggcaatggcgcgacggtggcccggggcgacggtggcggacctccgcggctgcacggggaacggcgggtgagcgtgggcagagagaaatagggagggggagagggaattggggcgcgtcccgggttgcggacgccggggcgaagctcaccgtggcaatggacacggcggagctccaacggcggccgggaaacgagctcgggacggcggggatttgtggcggcggtgctctggcgtgcgcgcagtga

SEQ ID NO: 28276 - DNA, 117 bp, Zea mays
  Peptide Sequence Number=SeqID_71651
atggcttcagggtcggcgtgggtggtgagggtctgcctgattgcttgcaatgcttgggtctacatgaagaacatctactccactcacattgggggtggtggtggaggcaacggctag

SEQ ID NO: 28277 - DNA, 390 bp, Zea mays
  Peptide Sequence Number=SeqID_71652
atgcatgatgctgcacggcgtgcactttcgcagtaccgttcgttgttcagtagggtggctgacggtcttgacctaaagtactaccctcgctgttcaactgacagtaccgggagtttgattctgtcacccgttggtaagggcaatcccaggttaagcagcatggtcaacctggtcgccgtgctcaacaccgagctggaccacgcccttgacgagtcgcgcaaggctcatgtggagatcgaggaactgcgtgctgagcacgcggagggccgccatcaaaaggatggttcccccgcccctgctaggactcagcacccttaccgctcgctgcctcgtggtcatcatgcttatggcacccctaactggaggaccaagatagacttggagccttag

SEQ ID NO: 28278 - DNA, 369 bp, Zea mays
  Peptide Sequence Number=SeqID_71653
atgtcccagctcaaagtcgcgccactcgagttgagtcggctgcagcctcgaccagtggcccgacccgaggacggtcgagactacacaccatcggctcccctccctgggaccgagctcatgaacgccgacgggaagacacatgcggggtctccgcgcttactccgcgtctccgggccatccaatggccccccaacttcaaagtctccaacgtcaacaaaggtacgaaacctgctcaacccgtgccacggcacgacgcgaaccagcaacctgacaggcgctgggagaagaggcctcgtgaggaggtacacgctgtcaaaccacctgtcgctcgagcccatggtgcgccgcgcggaggtgtacgaacactag

SEQ ID NO: 28279 - DNA, 411 bp, Zea mays
  Peptide Sequence Number=SeqID_71654
atggcgcgacggtggcccggggcgacggtggcggacctccgcggctgcacggggaacggcggccctgggtcgggcgagacggtggctcctccgaggtcgaggtcgagtctgtcctctgaggtcgaggtcgagtccgagccctggggtcgggcgaggcggagttcgtcgtcttccggggccgaggccgagtccgagccctggggtcgggcgaggcggagttcgtcgtctgccggggccaaggccgagtccgagccctgggtcgggcgaggcggatttcgttccggggccgagcccgagtctgagccctggggtcgggcgaggcggagttcgtcgtcttccggggccaaggccgagtccgagcactgggggtcgggcgaggcagagttcgtcgtcttccagggccgagcctga

SEQ ID NO: 28280 - DNA, 120 bp, Zea mays
  Peptide Sequence Number=SeqID_71655
atggcgggggagaggcggaaagcgaccgaacacgacggggtccagggcagcaggggacagctccagcagtttctagaggaatctccaagggatcagcttgtgctcatgagtgactgctga

SEQ ID NO: 28281 - DNA, 1674 bp, Zea mays
  Peptide Sequence Number=SeqID_71656
atgcatgaggggagcgcgaagacatggttgcctttcaagggggtcaccctccttggcaactctccccacttgcgtcctcagccattgcaggctgagtcttctccaacgcgctccaaggtcctccccctacgacatgggggctgggccccacgcgtcatgcaaattggcccgggacagaaggagccaaaaccgccgcgcgcggtgcgcgcaactgcccagcggttacgagcattcctccgctttcgcccaggacagcgggtgaaagggcggaccgccatgcaggcggcatgcaaccgcaccaagggggcgcacccttttgacttcgacgcgtccagcatggaggcccaggcccgcactggttactacgtgcgagaaactgcaccaccacttgcgccagtaccgcgccttctcgactgcggaaccggtaccgcgactcgaggcgaccctgcgcgtgacccaacagtgccaaccggcacatcggtcacaggtcagtcagccgcgggagaaggcgcgacggtcgatacagccagaaatgggccggcagtaatggcggtggcaggcgggcggaagcagcggtcaagtcgtcagcaagataggcggcacctttggcaggcgaagcaggcgacgcttcgcttccgccataatgaccgcgtcaaaaaagggaccaggaaaggggataccctgaaagggatccttctccacgaaggaagcgggccccgagcccccctactgatcagaggtccgaaggctggcccctcggaagggttcaacagccgcctcagagcactcgggctccgcgcccactactggtcaaaggttcgaaggccggcccctcgaaagggttcaacagccgcctcaggccactcgggctccgcgcccactactggtcagaggctggccctcgaagggttcgacagccgccaaagacgcagagcgagggatgaccctgggtacgttcgatacataaccaaggctcgggctacgctcccgagctcactggagacaccgtgttcggcgccctccgagggcaacatggcgctttcccccctcctccttgcggaaaggcgacgcaggggccctcgggcaagggcggccgaccccagaggattcacgtctcgcccgaggaccccctcaagcaacggacacaccttcggctcgcccgaggcccagtcttcgccgagaagcaaccttgaccagatcgccacgccaaccgaccgtatcgcaggagcatttaatgcaaagcggccaagtctggcctcgggcgccataggaagctccgcctcgcccgaccctagggctcggactcaggctcggccctggaagacgacgaactctgcctcgcccgacccccagtgctcggactcggccttggccccggaagacgacgaactccgcctcgcccgaccccagggctcagactcgggctcggccccggaacgaaatccgcctcgcccgacccagggctcggactcggccttggccccggcagacgacgaactccgcctcgcccgaccccagggctcggactcggcctcggccccggaagacgacgaactccgcctcgcccgaccccagggctcggactcgacctcgacctcagaggacagactcgacctcgacctcggaggagccaccgtctcgcccgacccagggctcggaccgaccacgtcatag

SEQ ID NO: 28282 - DNA, 657 bp, Zea mays
  Peptide Sequence Number=SeqID_71657
atgctggaggaggcgatacccgcgctgctgagcgccgtccacgggtggttcacccccgccgtgctcttcgtcgtcctaaacatcgtcatcggcaccatcgcggtcacctccaaggccgccgcctcggcgaccggcggcgacgaggaggaagtcgccgctgctggcgcgggatgggagccgcaccggcggctggcccgcgtgccgtccatggcgttcgagcgtctcaagtcgttcaacggccgcttcgccacggccgagccccgtgcccgccgagacaggagtggtggatctgggaggcgaagctgccgttgctcccgtcgcgtctgcacaaagtccgccagcgacaagtcggcgttcgcgcacttcggcgccgaggaggtggaggagaccgtgcgcgcggtggaggcgcggcgccccgcgacgacgagggagaaccgcggtcggcggctccccgtggcggagccggagccggcatctgagtcgtcggagtccgagtccgagtcagaggaggaggaggccagcggcggcgaggtggacgcgcgcgcggacgacttcatcaaccagttccgtcaccagctgaagctgcagcgcatcgactccttcatacgccacagggagacggtccgccgcggccaggcggcggcccagggcgtgtag

SEQ ID NO: 28283 - DNA, 420 bp, Zea mays
  Peptide Sequence Number=SeqID_71658
atggccatgatgggttcaacatcggaaaagatgtacctctgtcagactgggacttcgccctcgagcttggaagtggcttatgtgttcattggagcgttgcaatccttcatcggcatcaaatatggcgaaccagccgacaacctcccaccactgtcgtccaccgcgtgcctcgtccagtccacgaccatcaccaagaacttgcacgacatgctgccgcccagcgtaaagttgtccaccgtgaatgccatggacatgctggcgagctccgacccgccctcctccgacccgctggtggcgttcttgagcaagatcggttcgccattcctcatcaacccatacccctacttcgcgtacctcggcgacccgcggccagagacgctggccttctgtggcagaaccacccgaattattccagcttaa

SEQ ID NO: 28284 - DNA, 267 bp, Zea mays
  Peptide Sequence Number=SeqID_71659
atgaaggacagaagcgacgatgagcagaaggatggatgtgaacggccgaggtcgaggacgtcaggcggggctcggcacagcagtagaggaagtcgtcagcgccgtgtcggctcctgggcgctcatcgccggcttcgaacggtggtgggctcggctctggtcgatggcggatggttccagacgggctaggcaccggctgcaaacagtggacgacaagcaatggcggctcacgagcagggtgccggcggcggtcttcacgcgtgtatag

SEQ ID NO: 28285 - DNA, 777 bp, Zea mays
  Peptide Sequence Number=SeqID_71660
atgaacgtatgtgagctcactcttgctgtctcacacacccccacaggtcaagatcaggtaccgcaggatgaggcgcatggaggatgctgtgatgtgttcgtgagagaactcctattatatagtaaagatgtgacattcgatcctgtgccactatacatcatatgtgtgagacttggtcccagcacacctggtgtttatgttcgcgcccgggtcttgatgccccgaaacccgggtgtgacacctcggccattcatccccgcgcgctctcaagacttgcccaagtcagagatcaccggaaatcgccccgagcacgccgtgccaccgcccgccaagctttcagagcttcggccaccgtggccagcccactccagccacccccaagtcgagccagtgcttcggctagctccgccagtggcccatgaagctttccaagccctcggaccaggccagacttcaccggaggcccgagatcgaccttaccggacttctgtcttccgccgccgcgcgtggacagaactaaccagtgagtctccgtccaattccttgcacccatatcttctctggcatcccgccggactcctcgccgccgacgagcatcccccgcctgtgcacgtggaccggccaactccgaccatccccgacggcgacccgcaccaccgttgtgatccccaagacctcccctacgtcctcgaccacttcaccggagcaatctcgccgccgggactgatccgtgaagaaaacttaaaacaccccgccagggaccccagtgcaaagtag

SEQ ID NO: 28286 - DNA, 360 bp, Zea mays
  Peptide Sequence Number=SeqID_71661
atgcagtacaaggggtcaagcagtctcattagctgcgagaagcagacgattcgaatcgagtttttaaccttgcaagtgaccgcacttgtacccaccatagctagcatgggagacccagtctcaggtcgcatgagggataaagtccgcgcccggcttcactcaggtgctttagatattacaactttgacggtgtatgatctacttgagttaaacaaggttaactttacttatgtaagacctttgggtggtatacttggtaaattgggtcaaacttcgtctaagggcagaaggggtgctttgaactacaactattatttaaccgtgggtaattctctaaaacttatttttgctggcttttag

SEQ ID NO: 28287 - DNA, 762 bp, Zea mays
  Peptide Sequence Number=SeqID_71662
atggagggctccggttttatacccatggggagagcgaagtccgtgcaggcgaggatcacgcagccgaggaaccagggcacggcctgcaagctcgccgcggatctcgctgcagtccgatgcggcagggaagattctgagccacagcccaacgacggccgcccggacgccgggttcggcctcatgtacaccaacatgttcgacacgcaagtcgatgtcgtgcgcgccgagctggacggcaaggggtacaaggacgtggacatcgtagtggtcaagactggctggccgcacaagggtgaccccgacgaggccgacgccacggtggagaacgcacgcgccttcgtgtcgggcctcgtgtcccacctccgttccctgtctggcatgctgcgcgcacccggcaagtcggtggagacgtacatcttcaccatgtacgacgaggacctcaagctcgacaaggcgtcggagcgatactttgggctgttccagaccagcctcgcagagacgtacccgacggggttgctgaggaacggcacggccagactgacaccagccacggcgccggcgccaacgacatccgctgcggcgctgaagccaacgctagggcagcagccacaagtggggttacagtacgatacagggtgttgtagctgcttctcactaccggaatttggctctttgccgagtgccatattctttgccgagtgttttttcgggcactcggcaaagaagctctttgccgagtgccacacaaaaaactctcggtaa

SEQ ID NO: 28288 - DNA, 1767 bp, Zea mays
  Peptide Sequence Number=SeqID_71663
atggccgtggtcgccgccggcgccgaggcctttgaccccgcggcgccttccccgccccgcgctccggcctcgcgccaggacgtgcaggcggccatcgccaaggccgtcgagctgcgccagctccgcgccaccctccttcagcgcggcgcgcccaatgcccgtgccagagcctgcgccagccgcagcccggccgtcatccgcctcccgccggtcgcgtcccccacgcgctccagagcagcggacgaggagtaccccgtgtttactccggtgacggcctacgacgacgaggagcgcgtagctacagttgcactgaaccacatttgccaggacaaccgaagccggtcggaaaactggaccggggtcgccctggatcacgacgacgcggccttgtccgactatgacggcctccacgccttctcgtcctccaacagcgaggtgttgctcccttactccaacgaccaccgtattcggaacagaggcacggtgtacaagatccaccccgccttcatgcactcggcgccatcggccgaccgcttcctcccgcccaccggtcgggcggcctacactaccgagttcaagctgccgccggcgacgtgcggtaacgcgttccgacccaccacgatcagcagcaccagggtgccactgccaccccaatcggcgcactcgcggacgaagcaaagagggccgccgcagatcctctcgtggctcttccccaagtcgaggaagaaagccaaaccgccggagatggcgtcgccgacggccatcgagcgcggcaacatgccgcagctgctgaccgagtggggggcgctttctctcgagtccctcaagaaagagctcgcagaggccaacgcgcaccgggacgccgctctgcgcgaagctgccgaggtgaggtcgtcgctgggggagctggccaccaagctggtgagcgtggaagcgtactgctcggagctcaagaaggcactgcggcaggccaccaactcgccgtccgtctcgcggagatcgacgagatcagtcgaagcaagacgagagctcccgacgccggtgagccacgaggtaatggtggaaggcttcttgcagatcgcgtcggaggcacggctctcggtgaagcagctctgcaaggcgctgatccagcaggggaacgaagaatcctgtgacggcctgtccgacaggctgaacctgctcctgcgcccgtaccagctcgcgctcagcggcagcactggcaagcactgctcgaaggccacgctgtaccatctcgaggcgatcatgaaccaggccatgttccaggacttcgagaaccccgcgttccagcggaacggctcgccaaggtgcctcgacccagcggaggaccgccagcagagcttcgccgccttcgtggcgctgcgcaaccttagctggaacgaggttctgcggaagggtaccaagtactacagcgaggacttcagccgtttctgcgaccggaagatgagcggcgtcgtggcgacgcttggctggtcccggccgtggcccgagcagctgctgcagagcttcttcgtcgccaccaagtgcgtctggctgctccatctgctggccttctccttcggcccgccgctgacgatcctgcgcatccaagacggccgcgcatttgatgagatgtacatggaagacatcctacatgacaggcagcaagtgcagggtccttgtcaagtgaagatcatggtgatgccggggttttacgtccaagatagagtgcttaaatgcagggtcctcacaaccagatcagcagcataa

SEQ ID NO: 28289 - DNA, 2904 bp, Zea mays
  Peptide Sequence Number=SeqID_71664
atggccaacgtggcttcgctcctaccctatataagaggtatccacgtgctcataaggaacgaccagacgaagtacctcttccagcacttcaccagtgcgccagccagcccccggcgcgccgcggccatatacgcgcacgtcgcagaggggagcggcagcgacgaccaggagtttcagccgcgccgccggctgtacgccacaggcggatcgtccgtgtcgttcgactgggaggagaggcctgggacgccgaagagggggctcggcgggggcgtgcccgccgcggacgtggcggcatgggacacgggattcgagttcggcaaggccgcgccggcagagacgcttacggcggccgacgagctctttgagaagggcaagatcaggcctttgaagccgaggcccaagaagacggccgacgacgagcccaagattcgtccgttgaagccgccgccggggctgctcgacggcgggagcgtcacgccgtcgccgcggtctccggtcgtggccagaggcgcaggcgccacgtggtcgccgcggcggaggagcagggtcggctccggcgtcgacttcgacccgttcgccgccgcgctcctagaggcaaccaaggcgccatcgccgctcggcggcaaggacgacgagggcggtgttgctgttgccccccatggctcgccgcccacgagaccggccacgcgtcccgcgtcgaggagcgccgggtggagacggtggcggctcagcgatctcctcctgttccggagctcgtccgacggcggccgcgtcaacagctcgacgtgcccgtcaagagggcgagcgcagcagccgccggtgatgacgatcaaagccagcgccgcaaagcgcgaggacatgggcaagggctggaagcacggcgacggggacgcggccgcggcggcggacagcgtcgccgggatgtcctcctccgacccggacgacgcccccgacgggggcgaggactcgcccctcttccgccgcagcggggggccgtcctccggcggcaccgttggcgacgtccccgtctcgcagtcgctcatcaaggcggcaagcaactcctcggccgccatcaccacctcgctctcccgcgtcctccccaactccaccttcctcgtccccgacgactcgctcctccccaccggcgaggatttcaactcctccaccgccgtcccagccccggtgcgggatgaagatgacgcggctgcggccgtcagcgccgcctccgccgcggccgcgggcaacaggacctgcgacccggacctgcgacccggattcgcggcgggggggagtgcttcgcgcgggcgcttcgtggcgggcggcgtgcgtgtggtaggtgaggagttcggtagcggctggcgtgcgggagtcgcggcggctggcgtgcggcgggcggttcgcgcaggcgggggcagtctacaaatgggtcttaatagttgtagagatatcaaatgctctgggtggtctcgcggtggctcctggctgtgtggtctccacgtcgtcatgtggaacgggccaggcgccgggccgcaggagagaaaattatttttagatacccgtcataaatatccctaccggctgcactgcactgttctgccccgcatggccgcgggcgcgtcgacgagcgccccagcgacgagggcgcttcgtttcttccgttggggaggcgggagtgtgtgtgtgatgtacggcgcgccggtgcccaaggacctcaacctaccagcagccctgccgcagccgaccagggccggtgcgaggacgccaccgcagcagcagcagcagatgagctccgcggggctgctgcgctacaggtcggcgccgagcacgctgctcggcgaggtgatgtgcggggatcaggacttccccgcgacggatggcggcggagggcacggaccaccggaccacgccgccacggacaacgtcctcgcgctctttctcgccgggcaccactcagaggcccgggactgcaagcctccccgccccgccgcggccgctcacttcatggacgaagctgccgcctcgcaacagcagcagctcatgtaccagtcgcagcagcagcagcagatggccgccatggaggggctgtaccacaacgtcagctccggtggcacggagcacggtgcgggcgttggcgctggtaataacagcctgatccgccagagcagctcccccgccggcttcctcaccaacgggtacggcggcatgctccgtgcgggcatgggcatggccggcggcttcaggaacggcgtcagcgacgcgcggctcaaggggcagctgagcttcccgtcccggcaggggtcggtgatgtcgcagatctcggaggtgggcagcgaggagctcgacggcggaggcggcggcagccccgaggcggccggcagcaacgccagcggcgcgccgcgcggctacgtcggcatcccggggtacccgatgggcggcggcacgtccggcgcctggtcggacgagccgtcgccgtcgccgacgtccggcgcgaagcgccgcccccgcgactccggtcccgcgccgcagaacgtgcagcagcaaccgctggcgccgcagctcagcctgcccagcggcggcaagccggcctcggcggagatggcggcgatcgagaagttcctgcagttccaggacgccgtcccctgcaagatccgcgccaagcgcgggtgcgccacccacccgcgcagcatcgccgagcgggtgaggaggacgaagatcagcgagcggatacggaagctgcaggagctcgtgcccaacatggaaaagcaaaccaacactgccgacatgctggatctggctgtggactacatcaaggatcttcagaagcaggtcaaggtgctgaacgacggccgcgccaactgcacctgctccggcggcggcaagctgcaggacccgttcaccagttag

SEQ ID NO: 28290 - DNA, 216 bp, Zea mays
  Peptide Sequence Number=SeqID_71665
atggattttgcagcggacgaatgctcgcttggtgtagaagccatggagctctttggaccaagctatgatggcatacttgtcaattctattgaggcaagaccagtattctcaaggcccccctcagaagcatttcaggttgacagctttattgctaaaagttatcatgaagatgtgaagattagcttgcatgtgaagatcagagtaaaaggactgtga

SEQ ID NO: 28291 - DNA, 165 bp, Zea mays
  Peptide Sequence Number=SeqID_71666
atggatgaagaaaatgatggctatacgaaggtaccgtgtaacttcattttctatcctgtcatgtccagtcacacacatggtgtcgagacaatagaggtggacagggaagagaacaaggtcacggtgacgggagcgccgccgatgtcggcgctaaggccgagctaa

SEQ ID NO: 28292 - DNA, 789 bp, Zea mays
  Peptide Sequence Number=SeqID_71667
atggttgtcggcgccttcggcgaggcgacaccgccaccggacctcccaccttcccgcgtgtccgtctcctcgccctcgccccacccccgccgacgctgcgccctcgcaagccgcttccaggagccggcggccccgcggcggcacgcatgggtttccctccagggtcgccttatcggtgccgacgaggcgtcgtgtgccgcttcagctgcaccgggcctcctcccggatgaagcggtagcgtgggagctcttcagcccgctccatcgcgtgcttctcgtcgccaccgtcgccgccgcatcctcccggtcccacgccgcccgccgcatcgaacagctacaacgctcgattcatcttagggatgaggtgctagaaagcatgcagcagaagctggatgatctgctcgtcgaaatgagctccctacaacagcagtacgtcaagtgcgatagttacatttccgaggaaagggaaattaatgagattgaaacaggtagcaaaacgataggatatggagaggaatctagatgttgtgtgtgcacgaagctagaggctgccactcctcagaaggcgaagctaagtttcctggcagcagatcaacaattgtacaatcttcagaaggaatgtgaagagaaagatgcaaccatcaaggaactagctgcagcagcacatgcatctagtacttctgatgcaaagagaattgcagagctgcaggaagttcttaaaaggaaaaacatggtgatctctaaattgaagaaagacatgtctgctctgaagcatatggcaaaacgttaa

SEQ ID NO: 28293 - DNA, 456 bp, Zea mays
  Peptide Sequence Number=SeqID_71668
atgcgggcggcatgcaactgcactaagggggcgcaccctttcgactttgatgcgtccagcatggaggcccaggcccacacgtcatgtaaccgacgcgccggttactacgtacgagaaacttcaccgccacttgcgccagtaccgcgccttctcgactgcggaaccggtgccgcgactcgaggcaaccctgcacatggcccaacagtgccaatcgagcacatcggtcacagggaccgggaaaggggatactccgaaagggatccttctccgcgaaggaagcgggccccgagccctcctactgatcagaggttcgaaggctggcccctcggaagggttcgacggccgcctcagagcactcgggctccgcgcccactactggttagaggttcgaaggctggcccctcggaagggttcgacagccgcctcaggccactcgggctccgtgcccactactga

SEQ ID NO: 28294 - DNA, 411 bp, Zea mays
  Peptide Sequence Number=SeqID_71669
atggcccaagggcacatttccctttcagggggaccagtgcagcttgctgtagatgtgagtgcgagctccacctctaatggcaagagatctagtgctagactggctgcaaagaaaaaattgaagattgggagaaatggaaatgccatagtcaaagcccaaggaattctagttgctaagttaaataactctgcatcaaagcactttcaaagctcaaatgcattaaattctaataaccaggtggatttgtttgagcagcttggaagacatttcacaaggcctcttactaaggatcaaatggaggcaattatggagctggcaaatctgggaaaggaaaaggaagggaccaagaagaagggcagcaaggtgacacctctcaagcctcctatcatcgaggctgctaagagaatctga

SEQ ID NO: 28295 - DNA, 408 bp, Zea mays
  Peptide Sequence Number=SeqID_71670
atggacggccacagcagtaataccgccgtgaccgtgccagaaagcttttcgatggtgtgcctggacggcgtcatggtgcgggtgcccgtcccggaggacagcgccagcctcatccccttggccggcggcggcttcaagttccccgcgcacgacgggcatcgcgcgatgatcaagacggcgaagcagatggatcactaccagcgggtgcggcgcaacgcgagggggatgccggaggtggcggcgcggctcggaggcgaggacgcgctcgtggaactgatgtacggtgacgtcgacgaggcctgcagcgtgtttcgggtccccccgatcgcgccaacgacaggcccggtgcggctgttccttgccatccctatccaactacatactcgctctgatactcatgttcaatga

SEQ ID NO: 28296 - DNA, 164 bp, Zea mays
  Peptide Sequence Number=SeqID_71671
ggcatactctatttattctggacctcaaatttataggacagactacagtgacaaaaagttctctggaggacatggttgctggagtgacttggccgtccatcttgccaccgggatggactgtcgagtgggaccctgcctcggctgaggaggaacatgaggagtga

SEQ ID NO: 28297 - DNA, 750 bp, Zea mays
  Peptide Sequence Number=SeqID_71672
atgacttctcacggatcctcggatgaagggaatgcacagtcccacactgacgggcttgcacgagagggtttcccttgtatcttgtgggaggtacttcagggagctggttacacgacgcctccccaggctgagggtactatggaggcaattgctcttcatggactgaccaccttctgcggattccaccccttggagttgtccactcaccccattggtttgttccctgcggaaaaggaggacgacccaatgtggaaggatcgagtggagcatgccaaggatatatgggctatctacccaggccagactgctcacttaacggtgcggtgcatgaatgccctgtatcgtctgcaagtgatgcgtggagaggcaatgtcccatctgatggcatttttggaggtgaccaagatcactttggataacagagaggaacttgtggttgacttgtccactgagatggtggaaaaagacctacaagtggaacaattgtcaaatgagatccaagagcttgaggagctagtgggaacgagggagaacaccatcgaggttctcgaggatcagcttatcaacactcagcagcaactcgcagaggctaaccaacatctggatatgcaccaccaggagatccaggacatggaggccaacgaggatgtcgacatcgagggaggagaggagcctgcctccagtttggacactgctggctcagggagaccaccttcccctgagtcgagcgttgcctcgtttgctcactag

SEQ ID NO: 28298 - DNA, 675 bp, Zea mays
  Peptide Sequence Number=SeqID_71673
atggggcagtcggtttggtccactgacgctacatgcctcgacaactcttacaggggggctacgctgtcacccgcctcgccgagtcattactttgtcacctcggtggctgcaccatcgtgcacctcgctgactcgttactttgtcgcctcgagggctgcatcgccgtgcgcctcgctgactcgctgcttcgtcggctcgtgggctaggccatcgcctgccacgctgactcgctgcttcaccggctcgggggttgggccactgcccgcctcgccgactcgttgcttctctagcttgggggttgggctatcgccccgcctcaccgagtcattacttcgtcgcctcaagggctgcaccaccatgtgcctcgttgacttgctgcttcaccagctcgggggctgcactattgtgtgcctcataggctctctactccatcgccttgggggctgcacggcggcgcgcatcgccgactctctacttcatcggctcgaggctgggtcatcgcctgtctcgccaacttgctgctttgtcgactctaggaggctacgccaccgcctcgtcaactcgggggctcaaacctttcagctgattgtttctcaagtcaacttgaagctcgggggctacacccaatggatgcaaaggcggaacaaaattgcactcaaaagcataaaacaataa

SEQ ID NO: 28299 - DNA, 441 bp, Zea mays
  Peptide Sequence Number=SeqID_71674
atgaccggatcatccgggtacaaccccggacaattcggcaccatcacggaccgtccggtatattacgccggaccatctggatatgccgcggaccgtccggtaccttatgtcgggccatccggatatgtcgcggaccgtccgatatcttacgccggatcgtccggatatggcatgaaccgaccgacgtattacgtcgagccgtccgactctacacgagtccacgcgcagactatccaagtcgcgccatatatgaccgaaccgtccgggtacaaccttggaccattcagcccgatcgtggaccgtccagcccattgcgacggacggtccggggctgaatactgttcggccactagagagcctgagaggtataaggcaggagctggtgacattaataggacgcctaacacacacctcaaacatccctgggaggaaagccgatag

SEQ ID NO: 28300 - DNA, 228 bp, Zea mays
  Peptide Sequence Number=SeqID_71675
atggatgactccgaccacgagtccgacaggaagcctagcaacagcagtgacatgaaggagattgtcatgctgccaaagcacatcaaggacaatgcaaacaaggacagaggaagatcgaacatgccatttccaggatataatgcacatgggttagttcatctctttttcttttgcacccagacccgtggatccagttgcttttgcaagggaaagagatatgccttctga

SEQ ID NO: 28301 - DNA, 297 bp, Zea mays
  Peptide Sequence Number=SeqID_71676
atgagcttatacccaatgattctgagaatccacctcgaccccaagcccgaggatccacctatgtcggaggttgagaaagagatcacaaatgagaagaagtgtgcaatatgtggcggggcgagatccgtagatgttgtaaatgaggatggccgacgcgagcctgttcacgagcgtgcttcgaaccaatcaagcggtgatggcgtcaccgtggtgagtatgccgctacggtggctgggcgtcggtgatagggaagaaagcatgtggaccatgggattcgatttgagcggctgcgattag

SEQ ID NO: 28302 - DNA, 900 bp, Zea mays
  Peptide Sequence Number=SeqID_71677
atggacttctcctacctcttctcgtcgtcgtcctcggagaagaagtcatcgaagcgcctgcagcagcagcagctgctgcagcaacaggacaacaacagcaacgagacaaggtacctcggggtgaggcggcgaccgtggggccggtacgcagcggagatccgggacccggccaccaaggagcggcactggctcggcacgttcgacaccgcggaggaggccgccatcgcctacgaccgcgccgcccgcaacatccgcggcgcaaacgcccgcaccaacttcgcctaccccgacctgccgccgggctcctccgtcaccccatacctctccccggacctctccgccgaccagctccagcactactattacgccaataacgaccccgtagcgcccgccgctgatcagccgccaacgccggcgtgcgatcagtccgcacatggcggcgccgccggcaccgaggcctatcagtactaccaccacgtgccagtggagatgatgtcgtcctacggcgctgccgagggtgcgtcggtaatggactacggcgggaaccccgagatgggcatgtacttcgaaggaaacggctctggtggtgacgacgacagagcgtggtgcgaggcgtcgtcggagctgttgttcggtggttacagcgacgatgcggcggcggcgccggccaacgcgtcgcacgggatgtacttcgaggaaggtgcagtgttatcgtttggtcgtctctctgctgctttggtcaacggcggcttggcgcccgccggagggggctacattgcctccggcgtgtctgcgcttgatacgtgcaggcaaccaaacacaaactcagataaagtcaacgcacatagtgacgcgggacgagacggtgcagctaaccaatcacatgatgtgcttcaataa

SEQ ID NO: 28303 - DNA, 2244 bp, Zea mays
  Peptide Sequence Number=SeqID_71678
atggctgcggggagcgcgggcgccgtggtgcacggcgccgctatgccggtcttcttcctcctcttctgcgagctcgtcaacggcttcggcaagaaccagcacaacctccgccgcatgacggacgagtattcgctctacttcgtctacctcggcctcgtcgtctgcgcctcgtcgtacctagagatcgcgtgctggatgtacacgggcgagcggcaggtgggcgcgctgcggaggcggtacctcgaggccgtgctgcggcaggacgtgggcttcttcgacaccgacgcgcgtaccggcgacgtcgtcttcagcgtctctaccgatacgctcctcgtgcaggacgccattggcgagaaggtcggcaacttcatccactacctcgcgacgttcctggccgggctggtcgtcgggttcgtctcggcgtggcggctggcgctgctcagcatcgccgtcatccccggcatcgccttcgccggcgggctgtacgcgtacacgctcactggcctgacctccaagagccgggactcgtacgccaacgccggaatcatagccgagcaggccattgcccaggtgaggactgtctactcctatgtgggtgagaccaaggccctgaattcctactcggaggcgattcagaacaccctgaagctgggttacaaggccgggatggccaaggggcttggcatcggctgcacctatggaatcgcctgtatgtcatgggcgctggtgttctggagcctggggcagtcgttttcgaaccttggagcgttcagcaaagggaagattgccggctacaagctgctggaagtgataaggcagaggccaacgatagttcaggacacggcagacgggaggtgcctcgacgaagtgcatggcaacatagagttcaaggaagtggccttcagctacccttcccgcccggacgtcatgattttccgagacttctccctcttcttccccgctgggaagaccgcggccgtcgtcggaggcagcgggtctgggaagagcacggttgttgctctcattgagcggttctacgatcctaatcaggggcaagttttactcgacaatgtggacatcaagacgctgcaattgaagtggcttagggaccagattggcttggtgggagatagggggcttcagctctccggtggtcagaagcaacgcatcgccatcgcccgcgcgatgctgaagaacccgaagctcctgctactagacgaggccaccagcgcactcgacgctggttcggagagcatcgtccaagaagccctcgaccggttgatggtcggcaggaccaccgtcgtggttgcccacaggctatcgaccataaggtgtgtcgacatgatcgcggtgatccagcaaggccaggtcgtggagactggcactcacgacgaactcctcgccaaaggaagctcgggagcgtacgccgcgctcatcaggttccaggagaccgccaggaaccgcgcgtgcccgtcgacccgcaagtccaggtcgtcccgtctgagcaactccctctccacccggtcgctgagcctcaggtcggggagcctgaggaacctgagctactcgtacagcaccggcgccgacggccgcatcgagatggtttccaacgccgacaacgaccgcaagtacccggcgccgaggggctacttcttcaagctcctgaaactgaacgcgccggagtggccctacaccatactgggcgctgtcgggtccgtcctgtccgggttcatcggccccacgttcgccatcgtgatgagcaacatgatcgaggtgttctactaccggaaccccagcaagatggagagcaagaccagggagtacgtgttcatctacatcggcaccgggctgtacgccgtcgtcgcctacctcgtccagcactacttcttcagcatcatgggcgaaaacctcacaaccagggtgcggaggatgatgctcgccgtgattttgaggaacgatgttgggtggttcgatcaggaggagaacaactcgaaccttgtcgccgctcgcctctccacagacgccgccgatgtgaagtcggccattgccgagcggatatcggtgatcctgcagaacatgacgtccctgctcgtgtccttcgtggtgggcttcatcattgaatggcgggtcgccctcctcatcctcgtcaccttccctctcctcgtgctcgccaactttgcccagagcgacgaggaaggagaaggacccaaggacgcggtgcacggcgccctggtccatggatag

SEQ ID NO: 28304 - DNA, 273 bp, Zea mays
  Peptide Sequence Number=SeqID_71679
atgaagcgcagcgtttacggcggatcaagtgggcttggtcctcgtgctctcacgcagtacgcgtacgcctaccgcctacgccacagattctctggagatggtcataaggataggaactacttgcacgtgctactagggatcagtagagatgtcaatggggacccgatacccgataacccatggggaattcccctattagggtacgggtatgggacaaaaattatccccatgggtatggatatgggacaaaatttctactcattgggtaaacgg

SEQ ID NO: 28305 - DNA, 843 bp, Zea mays
  Peptide Sequence Number=SeqID_71680
atgtccccaagtactggcattgatagatcagtagaaactgttgagaactacgttaccacggatcatcttgtctttcctgttcacaatgtcaggcacaaggatttactgaatctttttaatagaatggagagttatataaggttgctacgcctacggaagaggatggctaaatttaataatattgccacccaggtggaaatactcgcaaaaaggaagttatcgtactgtcatttggcccaaatgaagtatttgtttcgagaagcaatccagattaagagggtacttctacatgacgagaaaagcctgtgcatgtatgctgatatggaaatcatacttgtaatggatgttgtggaatacacaagtcctgatcactctccatccatggcaatttgtgatgctttttactcgaagcttttgacatttttggatgctcatcaaaaggtcccagccaaagagcaagttgatgcactatcaacggaattgtttgcgctttcaactgtcacaggtccattcaagatcaatggagtaccgatccgtcgtgtcaaccagacctatgtcattgctacatcaaccaaggttgacatctctggtgttgatgtctcgaagtttgatgacaagtactttgccagggagaaaaagcagaaggtgaagaagaccggtggtgagctttttgagacagagaaggaggcgtccaagtcgctgcctgatttcaaaaaggatgaccagaaggccgtggatgctgctctgatcaaggctattaaggctgtcccagagctgaaggcctatcttggcgctcggttctcccttagggatggtgacaagccccacgagatggtcttctaa

SEQ ID NO: 28306 - DNA, 168 bp, Zea mays
  Peptide Sequence Number=SeqID_71681
atgcagatatgtatatgcagaactaagaaaggatggttccctactggttctgtatataggaaggcggtcggacttgggtacaaatctgtagcacactttctaattgccaagcataataacaaacaattgcccactgatatagtgaacaacgcggaggagctccaataa

SEQ ID NO: 28307 - DNA, 228 bp, Zea mays
  Peptide Sequence Number=SeqID_71682
atgggtagaggtttctgcccaattgtgtacctgtgggtaagagattgcttccacacccggctctatatcggggttgtcaaattagccttaaaaaccatggaggaaaaccactctatcccatatccccaccatgtcctaggaacaaacatggataatcggtttttggaagaggctgatggttggtttgtgaacaccacctactgtttctgtgcttaccgatcaacataa

SEQ ID NO: 28308 - DNA, 606 bp, Zea mays
  Peptide Sequence Number=SeqID_71683
atggggtccttggccggcccagccgccccttggccggcccaagccccctgcgcgccccccctcttgggccatggcaggcccagccgcccccccacctcccctttttttgacgataatctctccctctttctctccctctcatttttccctcttctcgctaaaccgccgcaattccactctgcaaaaaccgccgccgcccctgaaagccgcagcctcgccgtcggcgcccatcgccgtcgtgctcgcggttatgaacggccaagggagctccagagattagtgatacttgatcagagatactttggtacaggtgacaatgagattgatggttctgattacgattatggtattgctagtccactacagccaaacaggatacttgctgagtatgttgatgtgtactcacccttgctctacacaccaaaccccccccaggttgtcagcattgcaaccactgctcaggcgaagatgaagctgtggaaggagacttccaggagttccaagactacgacgagttctaggtgtgggttagcggcaaccccccagtcggctgcctgtgaaggccgcgttatctacgtttcttttccgcactttgatttattgtaa

SEQ ID NO: 28309 - DNA, 465 bp, Zea mays
  Peptide Sequence Number=SeqID_71684
atgacggtggcaggcgcgcgggagcagcggtcacgtcgtcagccaagctcacgtcccatccgggggcagcaagagaaccccctctcacggcgtgaagacaacgcgcccgtgatccgttcctcgaacggctcgcgcacgcgcaacgtccgccctaccaacaactcaccccgtcgcattaactccgcggcgggacaggcggcgatttggcaggagaagcgggcgacgcttcgcctttcgccggaccgggaaagggggataccccgaaaaggatccttccccgtgaaggaaccgggctccgagccccccctactgatcagaggttcgaaggctggccctccgaggggttcaacagtcgcctcagatcgcgtgggccctacacccactactggtcagaggttcgaaggccggccccccgaagggctccacggccgcctcaggctactcgggctccgcgcccattactga

SEQ ID NO: 28310 - DNA, 489 bp, Zea mays
  Peptide Sequence Number=SeqID_71685
atgtcgtcgattccgccgccggcgggtgggttgtcggccgccattgtcgttgtcgcgcggcggtggaaggagtatcatgtcgtagctgccgtcgagggacatgaactcaagactcccgaaacggagcaccgtcccgggttggagaggttgttggagactgcccatctggagcttgacgggaagctgctcgtcaacacgcagcagccccctacctggcgcgccaactgtcggcgtctcgagaccggggggtccctaagccgacgagtcgggcgacgtggaggctcctccgaagtcgaggtcgagtctgtcttccatggccgaggccgagtccgagtccctgggtcgggcgaggcggaggtcgtcggcaaaggccagggcggtgtccgagccctagggtcgggcggagcggagttcgccgtcttccggggcctagcccgagtccgagccctgggtcgggcggagcggagttcgccgtcttccgaggcctag

SEQ ID NO: 28311 - DNA, 1458 bp, Zea mays
  Peptide Sequence Number=SeqID_71686
atgaaggggtatattaagagcaacttccctctcggagctttgactgttaaagacgagatattgcgtcaagggttgaagcctgatagattgacctacaataccatcatttctgcctgtgtaaaatcagcagagaatgataaagctatccaatttcttgaagatatgaaggaagaagctaatacagaaagtaaccctgaacttcttccagatgctgttacctacacaacattactcaagggtttaggaaatagccgtgacctttattcagtcgtgaagattgttgtggagatgaaatcttcactaatttcaatcgacaggactgcatacactgctatggtagatgctttgctagcttgtgggtccatcgacggggccctttgcatttttggtgatataataaagcatgctggcaagaacaatgatttgagacctaaacctcatctttatctttcaatcatgagagcttttgctaccagaggtgatgttgatatggtcatgagatttaacaagcgcatgtggctggattcagttggatcaattagccgtgccgccaaagaagagacacatgagctattaatggaagctgccataaataataatcagaacaacccgagagtcgccggcgttgacgacgactatgaggtcccccgtttgaatatggacagcggtgtagccgctctggaccgcgtccaagcgacggctgcaccggagcttgccgaacatagcgacgcatgcggccaagtaggactgctttcagaggtcgaactggcagtcgccaagcttcttctcatcgtcgatgagcaacgccaacgcaagcgtctcctgccagtggtgtttgtttggggtttccaaagatctcccccgaagcacctggtagccaacggaaagcatcaggtactccaggctgcaactgaatatatggtcgcagttaaagttgaaagcttatctggattcaccaactctcttctaaggccccacattatcttgaatgatccagttgagaagtatatggttccatttcaagaatctcgaccattacccgccgacttaatattgcggaaggttgtgatgcgtttgttgaaagagcgtgcagttcctcttgtggatgattggggaggatgcattggcatagttcaccgcgatgattgtaccaagctggacgcacctcttatttcaatgtctagagggccacctctgtgcgtacctacttcaaccaccgtggagcacgtcattgacctcctcctgagaaacaagtccgagatggtgatcgtggtgaagagtggtaacatgtacgaaggcagctacacatccagctcaagacccttgggcgttttctccctcgccatactatggagcttcaccggcgactactcgtcaggatcagatgatgtccccgacgcaggcatctcccgggcagcaaaacccaaaccagacgccgaggcctgcaaccacagctag

SEQ ID NO: 28312 - DNA, 480 bp, Zea mays
  Peptide Sequence Number=SeqID_71687
atgtggacaagggaggcaacttttcaagaatcggaagatgcagctgggaacgcaagcacgtacaaaggaattaacatcccttactaccgagcgacgtccacgcagcacagcgatctgcaggcgggggcggaggcaggtgaacgcgaaatcctaggtggcgtgatcgcttataaaaccgtctcaggcgtcactaacgtggagtgtgtcagtgtcctcgtcgttgtcgcgcgctgcgagctgcggcgacgcattgcgccccgtccgtccgttgtagggaaaggccggaaagacgatggagttggacgagcatcattcatcagtcatcacactgtccagctgataaatgccccgccgagtcctgctcctacacgggctggactacaggaacaggatcagggacgctgcgggatgttcaattcaaatgcgtgcatgattctgccatgccacgagagcacgccgcggcgcccacagcagaggtag

SEQ ID NO: 28313 - DNA, 297 bp, Zea mays
  Peptide Sequence Number=SeqID_71688
atgggtagatcaaacgtctaccacgagctacccacaggccacagcattgcctacggtatggccacctgttcagaaatcctgatcggatccatccatctttttggccccgcgcgggaacggctacgcctgctgctactatgcactcagcggctgtcaggcactgtagccccgctccagtctccagcctccggttacaccctggctggccggtcaaagatcgctgaccctgctatcgtgctcctcctcctactcacaacaagtcacaccagcaagcaacccggctacgccgaacagtga

SEQ ID NO: 28314 - DNA, 471 bp, Zea mays
  Peptide Sequence Number=SeqID_71689
atggaaattctcataccagtcatcttcgttgaagaagccctcctgatgaagctctctgtgctgaggccttcggttctactcatcttgagtaagatggcgaacttcttcagagacttcgtctatctgcctttgcaggcctcccgaagagagagggtctcctggttggggtccagcggttgcagagctgcagcccctgttgctgaagttttcttcggcggcatgacgaaggtctatgcttgccgagggtgttcgaaactcaaaaagtggaatggaataggaactgagggagctggtgggagattttataggcgagcggtatgcaaggtggtgctcaagtgcggagtggcggtgatggagcaggtgacacgaggcagcaggcacgtgtgccggggggcacgggtgagtggtggggtcaatgaccctgagtttgtggtctctggttccaagaatctttgtctctctgtatggtaa

SEQ ID NO: 28315 - DNA, 409 bp, Zea mays
  Peptide Sequence Number=SeqID_71690
gccggacccctcgccgccgacgagcatccccgcctgcgcgcgtggaccgaccgactccggccatctccgacggccacccgcacctcgttgtgatccccgagacctcccctacgtcctcgaccacttcaccggagcaatctcgccgctgatgggacgccggtctggttccctgttgcctgagtcagctcagggtagggtgatgatggcgcctcctgttgacatggctggcctgcgccctaggttgggcgatgcggaggctcctccgaagccgaggtcgagtctgtcttccgtggccgaggccgagtccgagcccctgggtcgggcgaggcggaggtcgtcggctgaggccagggcggagtccgagccctggggtcgggcgaagcagagttcgtcgtcttctgggacttag

SEQ ID NO: 28316 - DNA, 555 bp, Zea mays
  Peptide Sequence Number=SeqID_71691
atgattgatgatgtcattcgactcaggtcacaggttcaaggatcccaacaacgagacacccaaacagaacaacctacccagtctgatgccaacattcccaatgacgtgcacacagatgatcttaatgcaactgatcattgcagtgatgagatgcacagcatgcttgaagacatctctatcaaaatcgatcaaactcatgttcctccaccgcccgactcacctataaaacccaaggaatacccaatgaaagccgatggtgacctagtatcgaccatcaataagatagttgatctgcttggccaagacaaagttccagagacatacaaagattgtagcccacaatttgatacaaccccaaaaatcaacgtttcaactacgaaattcttggttgaagtcccaccgaaggaccttcctatttttgacaagacacctatcaacgagggtttcatcgactgcgttcggtcagagcatgcttcgcacactcctgatcctatcacggacgttgtaattctcgatgtcaatgttgggttaatgataccaatgctatgttggtga

SEQ ID NO: 28317 - DNA, 699 bp, Zea mays
  Peptide Sequence Number=SeqID_71692
atgccgccgcgtacaagaaagaccgcgcgcaagtctaccgggccgattggcgtaccccttcatcaacttgccccacgtcatgaagatagcagtagtggtagcaacaatccaattggggatctggaagcccaagtggatcagcttcgaacagaactccatcgcaggaacgacatatgggtcgcggatggcgaaagaataaatgaattaagagccgacatccgctacctgcaagatcagctcgcggaacgagatctagcgctcaactgggcggttaactctcgttcgcttgcttgggctaaggaggcaaaagctcgagccggcgtggaggagcttagctcagccatagataacttgcagatgccttccaagactcattctcaggatggagcagggacctccagtggaagggaagcaaccccaaatccacctctagtacctcccacgttagccgaggctatcgctgccctggttaacgctacgaccgacaatacctgcttcctgcgggagatggcaggtaaacaattacaacaacaaggcggacaggcatatccgcaaggcccccgtgaaacatcctatctggatttctccgagacacgccctccattgtttgtcaaagcagaggaccctctagaagcagatgagtggatccgcgttattgaacagaagttcgggctccttcgatgttcagagattcaatag

SEQ ID NO: 28318 - DNA, 291 bp, Zea mays
  Peptide Sequence Number=SeqID_71693
atggtcggatgggagcaccggactgtccggtgtgcactggacagtgtccggtgcgccaacggctccaagtcttcaacggtcgattgtgccagaataggaaagaaatccgcaccggacaatgtccggtggtgcaccggactgtctgggcgagagactccaagttgtggagattcctcgcaaacgggaaagagtaaagaaaagaagaacaccgtggtattcaagttgatcattggatcacttcagaggattaagtgcaactctcgtccattgggacgccacaacgtggagtag

SEQ ID NO: 28319 - DNA, 438 bp, Zea mays
  Peptide Sequence Number=SeqID_71694
atgggcaagaacaacaagcgcaagcgtgagccgactcctccatcggaggatttcggcgactcggaatactcggaggaggagttctcctccgagtccgagggatctccagctcccgtctctcccccggcgtcgtctgatgattcagacgactcccaggggattgccgcagaggtctggacgtacatccgggccgtcgagcgctccgggctcgagggctcggatgagtctgagttctcctcggacgaggaggactcggacggcggcgaggacgaggatgacgacgacgacgacgacgacgacgacggtggcgacagcgacggtgatggcggcaacggcggcagaggcagcagcggcaagggcggcaccaagggcggcagcagcgtgggcagtaccgggggcggcggcggcaagggcagtggcggcagggccagtggctaa

SEQ ID NO: 28320 - DNA, 465 bp, Zea mays
  Peptide Sequence Number=SeqID_71695
atgggcatcacaagtaagatggacattgcaaaagtgatactcgggtgcgtagctcagagacaactgatcaagccaaggacggaggcaagaagagcttcgaggtaccaagtgcacgggagaaggtcaaggaggctgaggaacccaaagccaagggtgaagaagaaggcttgcaaagtcaagggtgatcgagttgagaacagctacggcacattaaggatcactacaaaaggacgtgacttacaaccaatgagctcagtctggcacaccggactgtccggtggtgcaccggacagtgtccggtgcgcctggctgaactccggtgaacaggccgctctcgggagaagtttggcggcatacggctataattcaccggactgtccggacattttgagacaggatcttctattccgctgcaacctactcgaagagtcttctcactccactgcgtactatgtcttcgagtag

SEQ ID NO: 28321 - DNA, 654 bp, Zea mays
  Peptide Sequence Number=SeqID_71696
atggcgctcgccgcttcccaccacggcctcctgcccttcgcccccgctgccacgcctaccccgtcacggtggcacctgcgcttccgcgccgcgcgccctctgccccgccccgcccggagaatttgttgccaatctatcaactcagctaatgtgttgggagtttcttcaacgacatctgatgaggcagtcccagtcccagttgtccagatagatcaggactcagaccgtgatgcgaccattgtgcagctaagttttggagatcgcttgggggcactacttgacacgatgaaagcactcaaggaccttggccttgatgtcacaaaaggaagtgtgacaactgactcagctgtcacacaaacaaagttccacatcatgcgatttgggcgcaaggttgaggaccctgacatgttagaaaggattcggctaaccatcatcaacaaccttctccagtaccatcctgaatcaagtgagaagttagccatgggtgaattttttgggataaaacctcctgagaagaaggcaagtgcaatactcctgaatttgcattctttgatttatgaactgggtttggttgcgaaggacaagtttcatgcgctgaccaattgcctgcgttattacctccgaaggcctgagacagatgaagacagctattga

SEQ ID NO: 28322 - DNA, 402 bp, Zea mays
  Peptide Sequence Number=SeqID_71697
atggcgcctctgctcctcccatacagggcgtctgaccccctgctcctatctccagccccctcctctctgttccttgcgcagaggaatttcttctcctttgccaacgtttgtttcccccgcttcatctcctccgcgtggcaaggcagtagacaagcccctgcatcttgctcgacctccacctccggtcgtcgtcctcgcgcagcagcagccccgtccgcgacgtcgtcgaccccgcagccgtcgacctcgcgcagtagcagcgacgccctccactgcgtcgcgctcgccaagtcggaccactcgccgtcgatctgcgcagccctgtgtgccgtcgtcaaaacccgcgatataattgttaatgtgacgaatagtttagacaatgctaatttgcgtggaggatga

SEQ ID NO: 28323 - DNA, 219 bp, Zea mays
  Peptide Sequence Number=SeqID_71698
atgtccaaaccagacaaaactttccccctccttatcctcccggtgctccccaaccttcttaaccctagggttggaccgcacgagttcggattgagtgactgcccacacagtctcaagtggttgtacgacaaaggagtacagatctacttccgggagatcgggctccggcccttcttccggggctacgggttccggatcaacggtccccgcttcttctag

SEQ ID NO: 28324 - DNA, 387 bp, Zea mays
  Peptide Sequence Number=SeqID_71699
atgggggcggggatggaaaaccataatccattacattctcatattgctgaagtgaaaatggacatctcagcatcaacttctgttgcagtagggaacaaattttgcaagggtgctgcctgttatttctctgattctagtaactcctcgaaagatgccatggagagatccacgtccatgaggaagcttataatcgcagttatcctttgcatcatattcacgacggtagaagtgatcgggggcatcaaagcaaacagtcttgccatcttaactgatgcgacacaccttctttctgatgtggcagcatttgccatatctttattctctctctgggctgctggatgctcatatggctacttgctggcatactgttatatgaggctattgtaa

SEQ ID NO: 28325 - DNA, 258 bp, Zea mays
  Peptide Sequence Number=SeqID_71700
atggagagtcatgatctccaggcagaatgggaatcacggcttgtgggtggttatgagattgatggttatgatcatgcttatggtaatgctagtccactacagccaaacaggatacttgctgagtatgttgatgtgtactcacccttgctctacacaccaaacccccccctaggttgtcagcattgcaaccactgctcaggcgaagatgaagctgtggaaggagacttccaggagttccaagactacgacgagttctag

SEQ ID NO: 28326 - DNA, 216 bp, Zea mays
  Peptide Sequence Number=SeqID_71701
atgtccggtggtgcaccggacagtccggtgcgccagaccagaggaactgtggttgaccaaaagattttccatcctaccgagtttgatttctacttgtgtagtcatgctggcattcagggaacaagtcgcccgacccattaccatgtgctctatgatgagaacgaatttactgctgatgcactgcagtcactgaccaacaatctttgctacacgtga

SEQ ID NO: 28327 - DNA, 780 bp, Zea mays
  Peptide Sequence Number=SeqID_71702
atggcgctccctgttgacatggcgggtctatgccctaggcagggtgacgtgggggctcctctgaagtcgaggttgagtctgtcttctgttgccgaggccgagtccgagccatggggtcgggcgaggcggaggtcgttcggccgaggccagggcggagtccgagcccttgggtcgggcgaggcggagttttgtcgtcttccgggttttagcccgagtccgagccctggggtcgggcggagcggagttcgccgtcttccgggtcttagcccgagtccgagccctggggtcgggcggagcggagttcgccgtcttccgggtcttagcccgagtccgagccctgggtcgggcggagcgaagttcgccgtcttccgggtcttagcccgagtccgagccctggggtcgggcggagcggagttcgccgtcttccaggtcttagcccgagtccgagccctggggtcgggcggagcggagttcgccgtcttccgggtcttagcccgagtccgagccctggggtcgggcggagcggagttcgtcgtggcgcctttggcaaggcctgactgcctgtcagattcactctgtcgagtggcaccgcagtcggagtggcgcaggcggcgctgtccttctgtcagactgctttatgctgatgggggttaccagctgagaattaggcgtcttgaggcccccgaggcctcagaggagtggttacactccttcgaggtcttaataccttgtgtaatgcttcggctggtctggtcgttccctcatgcgaactggccgtag

SEQ ID NO: 28328 - DNA, 279 bp, Zea mays
  Peptide Sequence Number=SeqID_71703
atggcccactttacccccccctctcggtccgcccctgggaagttattatgtcaatcttatgtttgtcattgtattgaggtaccacatgtgttttcatcgaggtatcacatgtttttaatcgaggtatcacatgttttcagggttctagaagagcattttgtgctggaggtttctcttcttgctggaattgtcatgggtggaggcgctggtgtttctttacatggaaaatttcgagttgccactgatgacacggtagatgctaaaaacaaatttaagtga

SEQ ID NO: 28329 - DNA, 231 bp, Zea mays
  Peptide Sequence Number=SeqID_71704
atggatgaagtgcaaatcaacaagaagggcgagaggctccaagttgtggagattcctcgcgaacgggagatagtaaaagaaaggaaaacaccgtggtatcttcgaactcgtatcacaaagggagaagctcaaaagatacgaaggttggcacagcgccgaagctgtgaagcaggaaagcttcggcatgttcgcagaaaagggaaccgacttaaagatgaaaaggccatctag

SEQ ID NO: 28330 - DNA, 1221 bp, Zea mays
  Peptide Sequence Number=SeqID_71705
atgtccccgctcaaggggcgcgaaccatatatcaaagccaaagagccggaggtcggtccacaggtggcgctgacagtctcgtcggcggagaagctttctcccgctgccaccacctcagcaccgacagtagcttccacctgtccaccagcaccgcaccaacgagcgccggccgcctcaaagcgcaccggcagcaacagtttgccttccccggcatggctggaggacgcctcctccacagagctgggggatggtttccacccccggaagctgaaggagaaggtcgcccacgagcccgtgcgggaggtggagctccggctcagcccgccctccgccccagcaaggatgatgaagatccttgaagctaagggcggggcggaggccgcagcccggcttgcttctccccaccatcgagctggtggtcaccgtcttggggcagaaggagccaaaccgccgcgcgcggagcgcgtaaccgcccggcggttacaagcgctcctccactttcgcccagaccagcgggtgaaagggcggaccgccatgcaggcaacatgcaaccacacccagggggcgcaccctttcgacttcgacgcgtccagcatggaggcccagtcccacacgtcatataaccgacgcgccggttactatgtgcaagaagctacaccgctactcacgccagtaccgcgccttctcgactgcggaaccaataccacgactcaaggcaaccctgcgcatggcccaacagtgacaaccgagcagatcggtcacagggtaggcgacaccttcggcaggcgaagcaggcgacgcttcacctccgccataatgaccgcgtcaaaaaaagggaccgggaaaggggatgctccgaaagggatccttctccgcgaaggaaacgggccccgagccctcctactgatcagaggttcgaaggctggcccctcggaagggttcgacagccgcctcagagcactcgggctccgcacccattactggtcagaggttcgaaggctggcccctcagaagggttccacagccgcctcaggccactcgggctccgcgcccattactgatcaggggttcgcaggctggccccccgaagggttcacagccgcctcagagcacgcagagcgagggatgactctgggctcgggggctgctctcgcaaacccggctccggccaaaccgctgacagcgtcaacataccagcccaagaacttggaacctgactaa

SEQ ID NO: 28331 - DNA, 903 bp, Zea mays
  Peptide Sequence Number=SeqID_71706
atgggggccctggtccttccttttatagatgtaaggaggaggcccagtccgtcgtcttccggagtcgaggctgagtccgagccctggggtcgggcgagacggagctcgtcgtcttccggagtcgaggttgagtccgagccctggggttgggcgaggcggagtccgtcgtcttccagagtcgaggctgagtccgagccctggggtcgggcgaggcggagtccgtcgtcttccggagtcgaggctgagtccgagccctggggtcaggcgaggcggagtctgtcttcttctagagtcgaggctgagtccaagccctggggtcgggcgaggcggagtccgtcgtcttctggagtcgaggctgagtccgagccctggggtcgggcaaggcggagtccgtcgtcttccggaatcgagacgggggcgagccctgggttgggcgaggcggagcttcctatggcgcccgaggctggactcagctactgttggcctcactctggtgagtggcacagcagtcggagcagggcaggcggcgctgttttccagtcaggctggtcagtggagcagcgaagtgactacggtcacttcggctccgtcgacttagcgcgcgtcaggatacggtgtcaggcgacccttgcattaaatgctcctgcgatacggtcggttggtgtggcgatctggccaaggttgcttctccgcgaagcctgtccgagttgggcctcgggcgagtcgaaggtgcgcccattgcttgaggggaccctcaggcgagatgtgaatcctccggggtcggctgtctttgcccgaggccgggctcgggcgaggcgggatcgtgtcccttgggcggagccttggcccgaatcgcccccatcaggccttcgcagctttgtgctgatggggtttaccagctga

SEQ ID NO: 28332 - DNA, 471 bp, Zea mays
  Peptide Sequence Number=SeqID_71707
atggcggaaaaaggaaccgacttaaaggggaaaaggctatctagtcctcatagatttgtctataagtcaatagtaaatataaagggcatgaatggactaaaccgcaaatttgccttcttctaccttggagctctttctcaagcgcagggccaatggaggtcgacgaacagggggctcagcggtcggtcacggcaagggagcaagggcgcggacggggtggttggctggtatggtcgagctccggcatgggcgagctccagtgacgaacggcgatgtgcgcgatggcaagctccggcgacgaactcacggcgatggaggaagagaatggcgggttcggctgtaggggagggagagcacgtgggcgcggctgtcctatttatagaggagagggaaggggagagggctccggggagggagaacaaacagtcggtcggcttcaaagccattaatggcggccgttacctcctttga

SEQ ID NO: 28333 - DNA, 429 bp, Zea mays
  Peptide Sequence Number=SeqID_71708
atggactccgggcgacagcgcggacgagactctcgtgacagatctatggtggcggcggtccgagccccgaggttccaaacgacgagagagcggaggctgggatgggttcgaaggataggccctgcgtctttattcagctacgcggagagaaaatcgggcgggtttgctcctgtccgcgcgaagaccacggcgattctgttgtggtgcgcgctcgactcggcgaggaagacggggatgacaccgacccaacggccccacccagcagtgagacagagcaggcgcgcacgcgagagtaaagagactggcaacgcgggcccaagccgtaagctacaggatatggttgatggtgtgacttggccttccaccctgccactaggttggatggttgagtgggatgctacctcgataggagaggaccatgaggagtag

SEQ ID NO: 28334 - DNA, 474 bp, Zea mays
  Peptide Sequence Number=SeqID_71709
atgaaggcgttatggtgtggtctgtccacggaaggaggcggacgcgcgacagtgaccctgctccgacgagcgattcagcccacgccgaccgatctccaccgcacacaaggtcacggtcgagtccggcgatgtatggcgcgtgtaccacacacccggtcgaagctctcccaggtcacagatggactccgggcgacagcgcggacgagactctcgcgacagatctatggtggcggcggtccgagccccgaggttccaaacgacgagagagcggaggctgggatgggttcgaaggataggccctgcgtctttattcagctacgcggagagaaaatcgggcgggtttgctcctgtccgcgcgaagaccacggcgattctgttgtggtgcgcgctcgactcggcgaggaagacggggatgacaccgacccaacggccccacccagcagtgagacagagcaggcgcgcacgcgagagtaa

SEQ ID NO: 28335 - DNA, 882 bp, Zea mays
  Peptide Sequence Number=SeqID_71710
atgacacttacatctaaccctctttcacatatgatttcacccacccccatcaatagaggagacacttgtttcagttttgactacctttcccacgagtgttttccctccatcttatgggaggtgctctgctccgccggttaccctacacctcctatgtacacggtgcagttgtacgaggagcatcgggtgccacattgtcgggtttggctaaccctggagtctcaccctctgcagccgagttggcgttcccttgactccgagactgtcggattcagagcggacgacaccactgaggccgcagcactaaaggccctgacaaccttctgcgggtatcattccttggagatggtgatgcacccactgggactcttccccgccgagaagagggatgaccccatgtggtgcaacagagccttgcagagcgacgccatagcacacctcactaatcttgctcaggctactaagatcactctcgacagtcgagaggacttcgtggtcgacttgtcttcagagttggtggagaaagacctacaggtggaacagctaagccagcgcatcgcgaccttagagcagcaggtggaaatccaggataacactatcgatatcctggaaatacagctccatgatatgcaggaggaacttgaggaagccaatgaccacctggagatgcaccaccaggatatgttggcaaatgaggcaggaagcgaggaagaggaggatcccgaggaattagagccatctctaggtccaaatgcgactccctccggagtacccccttcacccgcatccaatgttgcctctaccactcagatgccagccaggcagcgtcgcaggcagaatgagcagattcccccgccacctcctccagctcccacgatgtag

SEQ ID NO: 28336 - DNA, 411 bp, Zea mays
  Peptide Sequence Number=SeqID_71711
atggggacgtattcttggctaagaggcgacgacccggacgactctggggacgatgatgaagatgacgacgacgaggatgacgaggaaaacgtcaacgaagaggccaacgatgttcagcaggactacttatggggaagccagaccaacatcgttccaggtggaggtggagaagatcgcctcaacaccctagctggtgtagtggcaggtcttaacactgacctggacagtgccaccctggatctctctacggtgcacttggagctggagaatgcccacaccaggattgtagccctggaagctcaacttcaaggacagaatccccctgaagcccaagtccccgccatggcgttgtcccctccccgcaagaggatttgctatggggaacccggatccatcaccaggctgctttga

SEQ ID NO: 28337 - DNA, 609 bp, Zea mays
  Peptide Sequence Number=SeqID_71712
atggcactaaaggccttgacgaccttctatggataccacccacttgagatgatgatgcacccacttggactcttccccgcgaagaagagggatgatccgatgtggtgcaatagagtgagccacgtcaaggatgtgtgggccatgcatcccgaccaggttgggagaatcaccgtccagtgcatgagtgcactgtaccggctgcaggccatgcaaagcgatgccatgacgcacctcactgggctcgctcaaactgcaaaggtcaccctcgatgatagggaaaactttgtggtcgacctgtcttcagaattggtggagaaggatctacaggttgaacagatgagcaaccgcatccaagcattagagcagcaggtggaaatctgggacaacaccattgaggtcctggaaaatcagctccatgacgtgcaagaggaacttgaggaggccaacgttgacatagagatgcatcaccaagacatgaacgcaatggaggcaggcagtgaagaggaggaggatcccgaggagattgagtcagcttccagtttggacacagcctactccggagtaccccctacacctggggccagtgttgcctctgccactcagggttag

SEQ ID NO: 28338 - DNA, 432 bp, Zea mays
  Peptide Sequence Number=SeqID_71713
atggacctgaaacgagccagccacggcaaggtcactttgcgtggtgtttcggaccgatttgggggaaatctaaaattggggctctctgtcggagagaagggggtgcactggcgcaagcgattggtggctttcaccgtggcaagctcaccggcgatcaccagatatgcataccacgagctattgcgatgtgcggaggagtccaaatttctgctcaatggcccgaacccattcatcggcttcgagagggtcttcggctttgatgaaaaaaagcgggtgttttcagcagtcgcagtgaccaaggcagcgatagcctcagccaacgtgggcggtaccggcggtggattgggggacctttcgtcagccaggttcatagaaggagggggcttgaaaaggtccaagtccccacgagatcgtgggttcgagaaccgctaa

SEQ ID NO: 28339 - DNA, 786 bp, Zea mays
  Peptide Sequence Number=SeqID_71714
actcccccggcgacccgcccgaccgcgccctcccttaccccgcgcccgcccgcccccggcgtcccgcccgaccgcgccccgcccgactcggcccccggctcggccgtcccggcgagctcggcccggcctcggacacccgcgccgcccgcgcccggctgcgctcgcgcccgctccggcgagccgcgcccgcgccggccccgccttgcccccggcgagctcgcgcccggccgcgccctcgtccggcgagcccgcgccgcccgccagctcggcccggctccctggccggcacctgcgccccgcccctcggctcgaccggccgtggtggcccggcgtcctaccgcggcgcggcgagccccgctcgcccgagcgcgcccgcccccggctcggccgcccgcctcctggcgagctcggccgcccccccatcggttcaaccgcccccgtgccccggctcggccgcccgtcctcgcgctcggcctcgtccggccgtatcctcgctcgcccgcactcgctttccccgacgtgcttgcccgttcgccccgccgtgccttgctcgcgtcgtgtcggccctcggcgtggcctcgagctcggcccagcgtgccttcggcgcgtggcctcgagctcggccagcgcacggccccgacgcgtgcgcgactcgttcgcagcacgttaagtgtggctttgcgcgtgcgcgtgttcgcgcagcgttccggcgtagctcgtcgtgcccgcgacacgaccgtctaccccctaacccccgtctacccccccgtctcctatatgcgctaa

SEQ ID NO: 28340 - DNA, 348 bp, Zea mays
  Peptide Sequence Number=SeqID_71715
atggcaggaatgtactgcaacgcccgcgactgcctcaacaagagaatgcagccgccggcccgcaccgctgcgcggatcctcctctcccccgtcgacaaggcaaaaggctcggcgaagaagaaggaccggggaagggggataccccgaaagggatccttctccgcgaaggaaccgggctccgagccccccattactgatcaggggttcgaaggctggccccccaagggttcaacagccgcctcagatcgcgtgggcccgacacccaatactggtcaggggttcgaaggccagccccccgaagggctccatggccgcctcaggctactcgggctccgcgcccattactga

SEQ ID NO: 28341 - DNA, 843 bp, Zea mays
  Peptide Sequence Number=SeqID_71716
atggctggtgactgggtaaccacctattgtctcgaggaggatggtttcccgaaggttctctatgccacaattgtccgcctcggcatcatggatcatccggagtatgtgggcagagaatacatggagcgtggaaccgaagcctgccagatctccgtccacatcggcgccagcgacaagtatccagaagtgaggccctggagcgtcactatgaccggtcaccgcctaaaggacacctaccagctaaccgcacgcaaggctctttggtacttgtgccagttgtttgaatggcacttgggttccacacccatgaagtactttccaccgctggatcgcaatcgtcccgcttgggcggcccggattcgcaacttggggagtctgggaagcctcgaagcagctaagaaagaccccacgattgtcgctatgtcgggctatttgctcagcctcgatgacctgtgcaaccaattgtgccagcgtgcgagagccctaactcagcgtgctgaggaagcagaagtccgttggaggaagtcgaggttggacttggcccagtcagaagctcgtgtggctaacgccgaaagtcgtgttgcccttgcagaagagaaactttgggagcaagctgaccaccatagcaagctcctgagggacatatccttggtggaccgtgtcaagcgcaaagaccctcacccccagaactctgatggaaccaacatgcttgaaggaaccccggtgtacctgttccaaccccgtagaaggatttgtggaccggcatcacccacacctcctgcatcgcctcggacagatgatgaagaaggccctagagagaccatcgtagggaccaatgtttaa

SEQ ID NO: 28342 - DNA, 414 bp, Zea mays
  Peptide Sequence Number=SeqID_71717
atggataccccggctgaagagccaccgctggtaccggctctgggcacagccaccgtgggaggcctgctcgacatgagtaacattatttatggcactagcagattatgtctgtgtcgtcgactctccagcacacatgatccggcacatagattaaatcgagtttggaatggtcttctagatgccattagaaagatgcaagtctctgccgatgatttgaggagattgagtagacgcaaccatgtgcctgaatatgtagagcatgttcacaagaatagcctggttaatgccatgagtgttgttaatgaaattgcagaaggtctagacactgtgagcatggatctagaggaagttcttattagtccacaacctctacttgaagattatgaagcccttggattgtacgatgatttctaa

SEQ ID NO: 28343 - DNA, 300 bp, Zea mays
  Peptide Sequence Number=SeqID_71718
atggcgaggggaacgacaatagagctgggggaggtcatcgcagtagtggaggtggcgctgacttgcggctcgacttgcctccgaaggtcatcactctggtgttgcgacatgggtggagtcaagtgggaaagaatcacgatgttgagtcgtgtccgatggtcaagtcgcgtgtggcgtggtgtcagcggaggtgccggcattgaccacggcgaggtgcacggaattcagacggagacacgtggaaaagtctgctacagtgtagtcatggcagatactctgttgcttgctctaggaaaatag

SEQ ID NO: 28344 - DNA, 525 bp, Zea mays
  Peptide Sequence Number=SeqID_71719
atggcgggtggaggtgggactccttcggctggaaggaggacgagaggagtgggttggaggataagtcactgcagaaagtcaaaaaagaacaaaaagaagacaagcaaactcaagcccttgaaaagagtgtgtttgtcgcctaaattagaagtcatactagaggaaacctctatagataatgcaccctcaactgagattaaagtgatgaatcgccacaccattgttctaacaagcacgggtccttgtatacgggaagatatcatcatccttgtgcattgttgtgagagatacaaagaattgttctgcaaacatggaatgtcagcaacagataattccaagagtgaaaatgttccttctaggattggaaaggctatacttagagtgcctgagttggtacaacagactaaaataacacataaatttgaaggtttgaatttgcctaagtatatctgggagctgtctctgcggtttttaggagaaattgattctgttaatcacgtggagaatttgggaattgtcttttga

SEQ ID NO: 28345 - DNA, 390 bp, Zea mays
  Peptide Sequence Number=SeqID_71720
atggtcaagagtaacaaacgcaagcgcgagccgactcctccatcggaggacttcggcgactcggaatactcggaggaggagttctcttccgagtccgaggggtctccggctcccacttatattcgggccgtcgagcgctccgggctcgagggcttagatgagtcggagtactcctcgggcgaggaggactcttcggactcgtccgaggagggcggtggcggcgatggcggagatgacgacgacgacgatgacggaggcgacgatgacgatggcgacgatggcggtggcggcggcagcgggggcgacaacggcggtagcaagggtggcaacggcggcagcaggggtggcaacggcggcagcagcaagggcagcaacagggccagtggctag

SEQ ID NO: 28346 - DNA, 489 bp, Zea mays
  Peptide Sequence Number=SeqID_71721
atgggagaagctggagccggggcgagctcggacgcgcgtgggagctggagcaaggagccggtgcgcagaaagctggatgccaagcgccatggcgagcaggaagcagaggctggtgcgagctcgtgtgaaggaagacgagggagaaagatccgagttggagcttggagctcggcagcgtacggccatggcaagggagatccaagcgagcaagcgcaggggcgccgagcagacaagaagcaggcgtccaggggtgtggcgagcttgcgatggccggaaccagagtacggcgagctatttgaagaatcccagaggcggcagataagaacggccagggatgaggccgacggtcaacacagtgaaagaaaatccgagaacaacccagaatttctagcgatagcaaaagagtcgacggtaattgtgacagttgattcgattcaaaaatctgataaatttaactgcgatctgaacatctggttccacagccagtga

SEQ ID NO: 28347 - DNA, 489 bp, Zea mays
  Peptide Sequence Number=SeqID_71722
atgggagaagctggagccggggcgagctcggacgcgcgtgggagctggagcaaggagccggtgcgcagaaagctggatgccaagcgccatggcgagcaggaagcagaggctggtgcgagctcgtgtgaaggaagacgagggagaaagatccgagttggagcttggagctcggcagcgtacggccatggcaagggagatccaagcgagcaagcgcaggggcgccgagcagacaagaagcaggcgtccaggggtgtggcgagcttgcgatggccggaaccagagtacggcgagctatttgaagaatcccagaggcggcagataagaacggccagggatgaggccgacggtcaacacagtgaaagaaaatccgagaacaacccagaatttctagcgatagcaaaagagtcgacggtaattgtgacagttgattcgattcaaaaatctgataaatttaactgcggtctgaacatctggttccacagcaagtga

SEQ ID NO: 28348 - DNA, 267 bp, Zea mays
  Peptide Sequence Number=SeqID_71723
atgaagagcccaaaccacaacgtcgcttgtacctctggtcgcaggtcgagcttgaggactccgccagctcctccgtccttgctcgccgacgagaagaatcagagacctagtgggtggacatctcaggagtacatgtctgcattccaagcccgatacctctccttagggatatgcccaggaggtgtctgccccaagacggcaaacttcccctcaatctctatggcgatgaccacatcgggtcttaatgggaaagacgaacatggttaa

SEQ ID NO: 28349 - DNA, 585 bp, Zea mays
  Peptide Sequence Number=SeqID_71724
atgtcgcggtgtcctcgaccctccatcttcctcccccatgttgccgcccctaacatcgcccctcccttctcgccttcgtggacgcgcggagatggcctactggtgccgctgcgatccctagcacgtgctcgttttcctcgtgatgtgactggcaccctctccaccgccgccaaaaccacaagtgacgctgtgcgcaacgtcttcaccggtagcagggccacctcaagcacaatgtcaacctcttcatgtgtcgctctccctgttcggatcttacatccgagggttcagttcggtctcacgcaggggcgctatgcagctggtgctcgtatcaatcatcgcttgggccatgctcaagcttgtcgctctcgctttctacctctggccatgcagcccccctatcgcattcctctcagatcttgcgtgtctgctggaacagtcaaggccaacggtgtcactcacacgtctcaggctatcaggcagcggcggcctctcggcggcactagagccagggcacggggcgatgacgcgacgtcgcagtctcccggcgttcaccatctcggctgtggcggcgcttatggacagtga

SEQ ID NO: 28350 - DNA, 456 bp, Zea mays
  Peptide Sequence Number=SeqID_71725
atggtgaggctggaggccgccttcgccgtcgtcagcgtgctggccgtggtcaccgtggccgccctgctccgcgcgtgctcccgccgcgccgcgcccgcgcgcctgagggacgacgacgaggcccgccgcgcacaccgccgcacggtcaccgccgtgttcgtgggcggcgtggaggacgtcgaggcggggctcgacgaggccgcgctccgggcgctgcccaaggtggtgtacggcgacgaggaggcggccaccagggcgtgctgcgcggtgtgcctgggcgagtacgcccccggggacgtgctccgcgtgctgccccagtgcgcgcacgccttccaccagcgctgcgtcgaccggtggctgcggctgcacccgacgtgccccgtgtgccgctcgccgccggtgaccacccccgtcgccgccgccgccaagcctttggccgttgccccgctgtcctga

SEQ ID NO: 28351 - DNA, 615 bp, Zea mays
  Peptide Sequence Number=SeqID_71726
atggctccagcctgtttgggggcctcgcggcgctggtcgtcggaggaggcggccaagctgggcacgaagaggccgtgcgcgggcgggttcggcggcgggccgctctcggtggctggaagcaaggaggtgggcggtgtggagagcaagatccaggagtttggtggcagctttggtgttggtcaacgtcgaaccgccatcgtgaagaggctgagaaggtcgacgccggcgaagaaggttggtgcagagaaacgcaagcgtagctcgtcgccgccatcgacattgtcttccattcggtcggctgctccagatccgaagagaacaagagtagttgaaattaaaaatgcattaatgtatgtgttcatgaacatgtttggttaccaagagttgttgaacaactgtttgtgttctttgctgaccatggattcagagaacaaaaagctccaaaaagcactcgctcatttaatcagagttgtggagcagcgttatgccgacatcgtcgatgtcatccacgaggatgagcttctgattgactatgatttagagttgaacaatgatgatatagtcggctacgacgatggacgtgactactctaccgataacacctatccctactag

SEQ ID NO: 28352 - DNA, 822 bp, Zea mays
  Peptide Sequence Number=SeqID_71727
atgtccggtgcaccagggggactcagactcaaactcgccaccttcgggaatttccagaggcactcgcgctataattcaccggactgtccggtgtataccggacagtgtccggtgcgccaagggaggtcggcctcaggaactcgccagcttcgggaaacaccaacggctagtccgctatatttcaccggacagtccggtgtgcaccggaccgtccggtgcgactccggagcaacggctatctccgcgccaacggctctctgccgcgcatttaatgcgcgctctgcacgcgcagagggcaggctcgcccatgctggcacaccggacagcaaacagtacctgtccgtgattggcgcccgaaaagatgtgttcgatggtgagcagacgcgatgcaaatcagagcagaatagacacagcaatgaccgtgcagatagcacgtcgatgtcgtggggcgtgaggagcagatgcatactgttgctgggcgtcgagcagagaagactggtaggctcggagaggtgcccagttttggtcatggcgacggtggcatggaaatcgagcaagcagaattccggcgaggtggcacagcatgctgaggagacagagaggcgagcgagggaggagagcatggagatggggacgaggcgggcgctggtgggcaggatgcagcgtgccgacagctggcgcgggagccgggcgcagtcagcacggcagccagatgcacgagcagcgcgagcttttgaggtagaagatgttgacagaagggccccacacgtaagagaaatagggagagatagagaggagctcgtctgggcctcaaatggctga

SEQ ID NO: 28353 - DNA, 380 bp, Zea mays
  Peptide Sequence Number=SeqID_71728
aagcagagactgataatccccagtctgagctaaagcctggaattgatctacttggttctgtagatgagattttctatgatatctatgacagatatgaaccagtgaatgaaccatctcttgataattgctttgtctcgacaagctatgatgccaccacacattttgagacaactgtaacagatgttctgaacatgtatacaatcatcaccggaaagtgtttccttgcatttgtttatggtggtgatccactgacggacctatcacttcttgctctccttgacaaattcatggaaaataaaccaaaagggagccgcatagctgaaggaagatggcacggtggatcacaaattgccccagctaaaaagttgttaatatcttga

SEQ ID NO: 28354 - DNA, 312 bp, Zea mays
  Peptide Sequence Number=SeqID_71729
atgaccatattgactagcctgggcttcctccattattggaagcccagggctcttaatatatatatactaggtatgtgcccgtgcgttgcaacggaaacatataactgtggacgcccatggcaggccatgaaggcgctcgaggctgccctacaggtggcctcggtcgccatcgtcgggttccttgccgtcgccaagggaacggtcctcacgtcgactgttcagagggccgcggttatgtcggcggacgtgctgtgcttcgctgcctcccgctggcttgccaacttcatccagaacttctacttccaagactaa

SEQ ID NO: 28355 - DNA, 975 bp, Zea mays
  Peptide Sequence Number=SeqID_71730
atgggtaaccttgattggtttggacgctgtcgtatgacagaatttggctcatcctaccatgaaagttgccaccctgcaaaactgtacaggcgttatgttgtgaagaggaatcaacgcaaacgccagagagaggaagatctaaagaaagaagagaagaaatcctcagagaagcgatccaagaccatgcatgagactataattgaaagtgttgataacctaggaggcagcgttgaagtgacaaaagaggatgaagaaaagatgagcaaagatcaatcagcaaatgttcatgctgaactgccaaaagagggtcagataaaacttggcacagatcatccaattgttaaccatggcgaaccagcaaaagagggtgatgaaaatatgaacactgatcattcagaagctgttctcgataaacctgcagctgatgcaaatatggcagaggaagatcctgaatacgaggaagatcctgaagaaatagaaatatatgaagatgatgaggacatggatgatgctcatgctggagcacagaatggagaacagaatgagaacacaaatgacagagatgttaagccagaagtagcgacagcagatggtggaaataacagaagttcaacacaacctgaagtaggaaatattactaatacccatgaaagagctgcttcaatggaggacaaactgtctgtggcagagaaaggagattctgtggaaggtggagaaaaggtagttagtaaggaggttaagccagcaaaagatgaggtggtcgacaaggacctgttgcaggcctttaggtactttgacataaatagagcaggatatctcaagatggatgatttaaaatgtattcttcacaacttgggcaagtttttatcaagcagggacgtgaaggacttggttcaagttgctcttgttgagagcaattctgcaagggacactcgcataatctatcctaagcttgtgaagatagttgacctgtaa

SEQ ID NO: 28356 - DNA, 1242 bp, Zea mays
  Peptide Sequence Number=SeqID_71731
atggagagtcatgatctccgggcagaaagggaatcacggcttgtgggtggcaatgagactgatggttttggttatgactatggtgctggtaagtggtattctttccgtttggaaagggttgtcagcattgcaaccactgctcaggcgaagatgaagctgtggaaggagacttccaggaattccaagactacgacgagttctaggcgtgggttagcggcaacccccagtcggctgcctgtgaaggccgcggttatctacgtttcttttccgcactatgatttattatttattcagtgtttaatcatgaagtctgttggtcgcccgccaagtaatccaaaaagattaaccattgaatccagtcaggagaaattgaatatccgctgcatttcctatgatgttattgtctcatcttggataatgagcgatcggcagctcgatgttgtcgctaggttgggattttctagtatatttgatttgcgaactgatgccttagagagcagatcactcatcaggtggttgatggataaattggatccacgtgacatgaccatacgcccagggactggcaaggaaatgaagataacaaaagatacggttcgtctgattttgggtttgccatgtgctggaggaggcagggagtttactgattggtatggtgaagtggatgctgctgcaaaactgagacgtgatctcaatgttggtaaagaagaatttgatgttgtcaagcttcaaggcaagatagtgcttggcaatgatgatgagctatcaatcagatgcttttttctgattctattcaatcgacttctttttccttctgcttcatggggcattacaaacaatgaggtactaatgacttcaaacatggcccgaatggctgatattgactggtgtcaactagtttacacggatttttgtgatgctgccacacgttggcataaaaggaacaaaacaaacatcacagcaacaatatatggatgttcactcattgttctaatttactatcttgatcacttacatcaccctgcatctcctgataacaaatatggtactcctcgcattaagttttttgataatgagaccataagggagttggctaggggtgacaaacgtccccccgtaaaactggtgaaccattcggctatgcagagtttcgtagccgttcagaaacgtgttacgtcattgctccagaacggcctgtttctgccgttttcaacatatatgtgccacgtatcaagcatttga

SEQ ID NO: 28357 - DNA, 138 bp, Zea mays
  Peptide Sequence Number=SeqID_71732
atggccccgtacaactttaaggaccacgtgatatgcttcctcatttatcctaaggttggaaaggtgctggtgctcgactccttgaactatgaaccttcaacctatgcaaatttaaaattcctcagtatcttagagtag

SEQ ID NO: 28358 - DNA, 201 bp, Zea mays
  Peptide Sequence Number=SeqID_71733
atggagagtcatgatttccgagcagaatgggaatcacggcttgtgggtgaagtgtgcgacctctgcagagggttagaaacggatatatcagtcgtgctcacggttgcctttggtgcaatctatgctcaggtaaagaagaaggagaaagatgttgaggcagatctccaggagttccaggacttcgacgagttcgtggtttag

SEQ ID NO: 28359 - DNA, 273 bp, Zea mays
  Peptide Sequence Number=SeqID_71734
atggggtgggagagaagagggctaggggttggcagctctacgagcgtgcgtgtcgtgggcgctgaaggatcgacccagtggttgggggaagacgtgggcaaaaggaaagaaaatcatggaaaagagaggataacacctgaatttggtggatatttgaaaagaaattttatacccccaaattcagggtgttacagatctaacccccttaacagaaatctcacccccgagattcaagaagaagctagcaagaaaacaaggttggtcgttggctga

SEQ ID NO: 28360 - DNA, 393 bp, Zea mays
  Peptide Sequence Number=SeqID_71735
atgctcaccgtgccctcggattgcaccagttcgccttggtttggccggtatactcgccgccgacgaggacacccgcctgcacgcgtggaccgggcgattccgaccacctccgacgccgagccgtacctcgacgtgaccgccagagtctccccgagccaaccccacccttcgccggacctccctcgccgtcgttttggccaaaagctaaataatatgaaacttagaaaaactctacaaaaacaaccccaagactgtaatcttgctgacggagagtacatcctcgtgccggagcaaggagctgctcaggaggtagccccagatccagcacccgagcctgcaccagaggacctgcctgccactgctttggaaggcaagccccggttttatgcataa

SEQ ID NO: 28361 - DNA, 552 bp, Zea mays
  Peptide Sequence Number=SeqID_71736
atggcgcctcctgttgacatggctggtctgcgccctaggttgggcgatgtggaagctcctccgaagccgaggtcgagtctgtcttccgtggccgaggtcgagtccgagcccctgggtcgggcgaggcggagttcatcgtcttctggggctgagcccaagtccgagccctgggtcgggcggagcggagttcgtcgtcttctagggctgagcccaagtccgagccctgggtcgggcggagcggagctgagctcgtgtccgagccctgggtcgggcggagcggagtttgccgtcttccggggcttagcccgtgtccgagccctgggtcgggcggagcggagttcgccgtcttccggggctaagcccgagtccgagccctgggtcgggcgaagcggagcttcctatggccggtcagtggagcggcaaagtgacggcggtcacttcggctctgccggctggggggcgcgcgtcaagataaagctttatgctgatgggggttaccagctgagaattaggagccttgagggtacccctaattatggtccccgacagtag

SEQ ID NO: 28362 - DNA, 351 bp, Zea mays
  Peptide Sequence Number=SeqID_71737
atggaggtggttggggttgtatttatagcctccaaccacttcctagccattgctcctttcctgctgaccgtggacgtgttcctgtccgaggctcaccctagtgtcgcgaacggtctgccgcaagggcccagacggtccgcgcataggtgtttttccattccagacagtcgacttagaatagttgtagatgaacttatgcacctgagaaatgatcaactaggcaaacagaagcaatgcttagctttagccatcctctttggtaagccttacactttacatgagcttttacctttggtcaagaacaggtaccacaggatgaggcacatggaggatgctgtgacgagtccgtga

SEQ ID NO: 28363 - DNA, 360 bp, Zea mays
  Peptide Sequence Number=SeqID_71738
atgacagcgctagcgcggcatgacaacctgggcagtgggtcccagctggcggtgtcgcaaacaagcgcatgctcagctgagcgtgcacaaaatcgtgtacaggccagcgaggacgctgatgggtggggtccacccatcgacgccacttccacaggtagcttcatcctctatgtgatgactccactgcaccttgcacatctccgccacttcgtttctggtgactcgagtcaagatttcaatgatctttataggattctccgtttaggtacacatgatcgccttcctcaacctccaactgtcttcttcgggtgccagcataacttttctgccataattgtgttgtcctcaagttctccctga

SEQ ID NO: 28364 - DNA, 411 bp, Zea mays
  Peptide Sequence Number=SeqID_71739
atgcccccgcgccaccgtcaggttttcctctgtccctttatttactctttccctttcccctctgccaccgccgccgccgtcatcagccgcgccgatcgccgtgctcgccgctggtccctcaaaatggacccaatggatgccattgcagcgcatctcaaggcacgtacactagcgaagcggctagcaacggcgcggctcatgcatcgccgccaccttgagctccagcgccagtcgaggctcaatcatcaagacatcgtacgcgccgttgtgggctcctcggcttcgacgactgcacgtgaggttgtctccacgcccgtgcatgtggagccgatagtgctagtcatcatcctctccgacgatgaagatgaggagatcgattgcacgacactgatggacgacgtcgacgagtag

SEQ ID NO: 28365 - DNA, 126 bp, Zea mays
  Peptide Sequence Number=SeqID_71740
atggccagaccaactccgatcaccatcgatgctgacccgtacctcgacgtgaccgccagaggctccccattctcgcccgacccttcgccggagctctaccatcgccaaatttttggaaaattctaa

SEQ ID NO: 28366 - DNA, 609 bp, Zea mays
  Peptide Sequence Number=SeqID_71741
atggcctcacccacacccatcgtgggaggagacgcaccttgccacactgacagccttgctcaaagagggctttcccctcattctgtgggaagtactacaggaaagcaggataccacacacctccatggtacactgtgcagctattcgaggaacatggagtgcctccttgtaaaggtgtggctagccttagagccccaccccttgcatctaggatggcgttcattagactccgagacccttggttttcgagcccatgacaccacagaggtcgcagccatgcacacgctgactaccttctgtggatttcacccgttggagatggcaactcaccccatcggtctattctccactgaaaaggaggatgacctgatgtggagagaccgggttgaccacgttaaggaggtcctacagtgcgaggccatgccacatttgatgggcttggctcaggatgcaaaggtcaccatcctcgaccggaaagatcttgtggtggatctatctaccgagttggtggagaaggatctccagactgagcagatgggtacccaaatccatgagcttgaagagcaagtgcaagaaaggaaccacaccattgaggttctagaaaactag

SEQ ID NO: 28367 - DNA, 159 bp, Zea mays
  Peptide Sequence Number=SeqID_71742
atggcgcaatgctcagctctaaccatcctcattggtaagccttacacttcacgtaccattcaggaaatggttgatggtgtgacttggcctaccaccttgccaccgggttggacggtcgagtgggatgttgctccggcaggagaggagcacgaggagtag

SEQ ID NO: 28368 - DNA, 189 bp, Zea mays
  Peptide Sequence Number=SeqID_71743
atgggggaagatccgacaggaatccggatgcaggcggcgcaggtggagggaatcccgatttcatcggggttgttgcgccatcggaggggagcccacggcggtgacggcgagatgtccggcaacaaagtccagaacgtctatgggataaagtcggggctgtccacagggtcccatgtgtcagtgaggtga

SEQ ID NO: 28369 - DNA, 450 bp, Zea mays
  Peptide Sequence Number=SeqID_71744
atgccccccggcgtcgacgtccagcggtctaagtccggcgagatctactccctgcgacaccggtcgtccctggcctccaaaaccgatgtccacgcatccagcgccccggggaagggcgagtccgtgcagagggaaattcattggcgaggaagggaagaccccgagatctccggcgacggccatggcggcaatcattctcaccctcacagtttctccgttcgttctcagctatcagcatggggggcggattcgtggcttgagtcctgtttattctgtgaaggaatccggatgcgggcggcgcaagtggagggaatcccgatttcatcggggttgttgcgccatcggaggggagcccactgcggtgacggcgagatgtccggcaacaaagtccagaacgtctatgggataaagtcggggctgtacacagggtcccatgtgttagtgaggtga

SEQ ID NO: 28370 - DNA, 243 bp, Zea mays
  Peptide Sequence Number=SeqID_71745
atggcgggtggaattgagctcgccggagctaaggagaggtggttggccggtgaagttaatttgatgctcatgcttactttggttcacaacaaaataatggttcttggtttggcatttttaagagaaaccctaggtgacactggggtgtcacagccttccccccttaaaggaatctcgtcccgagattcgggccagagtcctcccagggtgaagcgaagggtgagacttataggaaatgggtga

SEQ ID NO: 28371 - DNA, 390 bp, Zea mays
  Peptide Sequence Number=SeqID_71746
atggcgtcctccccttctccccctcggctacagctgctcgacgcccactactccttctccctcacgcagcagcagccggcgcccctttttcttcttccctggtctccacggcaaccagcagggagctcggtttcttctccatggcgctccctccctgcaggtcgccagcggcctctccccggccggcgctccctatcctccccccggcgcgtgcccctacggacctccccagtagggagcctttccccctgcgcgcagaagctccctagcccgctctcggcgtgctccatgtccatggcgctgcagcagctcggggtgctcgacgaaatgtgcagcagccccgacggctccgcgcgctgccggcttgttgttttgttgcgcagtgagtag

SEQ ID NO: 28372 - DNA, 357 bp, Zea mays
  Peptide Sequence Number=SeqID_71747
atgccgccgcgcacaaggagaactacgcgcaagcgtactgacccaattggtgtgccatgtcatcaactggccccaagacacgaggatagcagtagcgggagtaatgatccgaccggggatcttgaagagcaagtgaatcggcttcaaacagaactccgacgcaggactgacatatgggtcacagatggcgacagaatcaatgaattgagaagtgacatccgccgcctgcgagatccgctcgcggtccgagatttagcgctcgactgggtagttcaatctcgttcgcttgcctgggctaaggaggcaaaggctcaagctcgagtagaagagctcagctcggccattgatgacctgtag

SEQ ID NO: 28373 - DNA, 198 bp, Zea mays
  Peptide Sequence Number=SeqID_71748
atggcgggcggaattgagctcgccggagctaaggagaggtggctggccggtgaaggattcgagctagggatcaaggtgaacatccctgatctttggctcaaggtgaggaagcgacaaacttttgttgcttctgttctaaggtggtaccaaaggaagaacaccaagaatgaagttgcgggaggaaaggatcctccataa

SEQ ID NO: 28374 - DNA, 627 bp, Zea mays
  Peptide Sequence Number=SeqID_71749
atggtggggagaagcaagccgggctgcggcctctgccccgccctcaacttcaaggatcttcatcatccttgctggggcgaggggcgagccaggggcctaccttcgcgtgggctggcgtcccgcttcttcctccggcatctgggggtggaaaccatcctccagctctgcggaggaggcgtcctccagccatgcggggggaaggcgaactgctgctgccaggccagggtgcagcattctgtcctctgtccgggcgactgtggccggccgcaccggagggtctcacaacacgtcgtacgccgcgggggcggtactcgtgttctgggacgatcccgttctcgtggcaaggacggtggtgaggacctgtcggtgcgctttcgggcggccggcgctcgctggtgcggtgttggtgggcaggtggacgccgccgtcggtgctgaggtggtggcaaccggagaaggtttctccgccgacaagatcgtcgacgccatctgcgccccgggccttcggctctttggctttaatatctggggacagctggctgaggctacggagcggtcggtcaagccgtctgctcgggccgggttcctggaggagaccctggcggcgatggcccaggcgtggtgctga

SEQ ID NO: 28375 - DNA, 69 bp, Zea mays
  Peptide Sequence Number=SeqID_71750
atggtcgaggcggcagctttccttttcttcccatgctttcgcgaggggcacgggatgcagcccatgtaa

SEQ ID NO: 28376 - DNA, 1590 bp, Zea mays
  Peptide Sequence Number=SeqID_71751
atggggtgcgctggtgttctctggagggatccgcgtcaaggtcgtcccttccagcaacttcgccattggagagcgtgcgctcgtggtggtgtcgccgatcttgtcttcttccttctgctgttggaggggtgcaaccccatgggggttggcatccttccaccaccattcggcttcaaggattttcatcatgcagcccggtcgcaacctccggccggtggtcatccacaaggaggactaccagccttgtggtggagagaagcgagccgggctgcagcctcccctgccctcagcttcaaggatgttcatcatctgcgctggggagggggcgagccgagtgggagcttcgccttccgtgtgggctggcagtccgcttcttcctccagcattcgggggagaagggcattcaccgtctgtggcgctgtcagctgccgcgtgtctggctccgcggcctgggcggctctagtgccgcctctggtgctgcctcctgccgctggggcggagcgtggctgcccgtccaccgcacgggcgacggtcgcgccccgctgcccatcggtgcagaggtggtcgctgccactggtggagctggtgtggccgcttccgctggtgaggctgcccattgtagaggtggttgcctccgctggcgagactgtcagtgccacctgccaccagactcccggccctttggctttaatggcctcgctgttaccccccgtaggaggacgggggcgaggacctattcgcagcagcgctcacccagaggtgatcgctgctgctggcgagccgctcggagcagaggtcgttgtcgctgctggtgcagaggtggtcgccgtcgttggtggggctgtccggagctcaaggtacgggaccaggctgagcggctacatggctcccggacccacccaggagacaagtgcccgttcttcagagccggacctccagggcggtggagcgtgcaggcccacggtacgggaccaagctgagcagctgcacgggctccggaccaccccaggagaccaatgcccacagtgcaggacctggctgagcggctacacgggctccggaccaccctatggaacagggtcccgttctctagagccggcccccaggctgtcggacctccctactttcgtgtcaggggccctaaactgcgagcctggctgttcaattcgggtgtcaccatgtcagatagatggaaaccgtacgggtgggatagctgaaaggtattatctgaaagactgcaagaccaataggtcgggtttatgggggcagaccccaccgggttgttgtacacgtatgcgttttctagctacaaagaagatggttggccctaggtcggcgcactcccgttacttcgaagggtcgttcccagctggggagagttgcagggccctccttggtatggaacttgccgtggggctaggtcccgacccagggttctcgtctgcatttgacacgagagccctcgtctctggttgtggtctcttctgcatgtacctgtctacagcccggacccgtgggggtctggaagggcctccgaaggaaggcgtgcttcatctccgtaggccggggaacatggggtccctccgatga

SEQ ID NO: 28377 - DNA, 258 bp, Zea mays
  Peptide Sequence Number=SeqID_71752
atggtgggcggtttcctgaggaggaggagggggaggaggagtaggacggcggacgatgcagagcaggcagcgcagcagcacgaggcagagcaggcagcgcagcagcaggcggtgcctcaggacgacgacgaccagcagcaggacgcctcaggtcttggatggttttggattatgctgggggtcatcgtcgccccccaacaacatcctcggtctgctgtgcagggaacacttccctggacttgtgagtacgcagagtga

SEQ ID NO: 28378 - DNA, 1116 bp, Zea mays
  Peptide Sequence Number=SeqID_71753
atgccgatctgtagctgtgaagaaactatccatgagttcgagatgttaacacgcgatgctgggcgtgtacagaaggatacactgaaaaagatcctcgagttgaatgctgatgctgaatatctgaacaagttcggcctcaatggcaggactgatgtagagagctacaaatcctgcatcccgctgtgtgtgcacagtgatcttgagccatacatccataagattgctgatggtgatagctccccactcctcactgggaagcccgtcacctccctttccctcagttctggtacaacgcagggaaggcctaagttcttgccgtttactgatgaattgcttgagaccacacttcaaatattccagacttcatatgcatttaggaaccgggtttcatctcacagtgtgcaacataaggtgacatacgctgttctccctcagaccggttattttgagttcattcctttggaggtggagaatagtgcctcctccattcactacttagaatcagaaccagttggcctgactgaagttgaggttggcaaaacctacgaagtcgtgataactaccttcggaggtctataccgctaccggctaggagatatcgtgaaggtaacgggcttccacaacgcaacaccggagctccggttcatctgccgcagaagcctagtcctgagcatcaacatcgacaagaacaccgagcaagacctccagctggccgtcgaggaggcagcgaagctcctggacgcggagaagctggagatcgtcgatttcaccagcttcgtggagaagtcaagcgaccccggtcgctacgtcatcttctgggagctgagctccgacgcgagcgaggacgtcctgcgaggctgcgcgaactgcctggacctagccttcgtcgatgctgggtatgtgggctcgaggaagatcagagccatcggcccgctggagctgcggattctgaagaggggaaccttcaaggagatcctggatcacttcctgagcctcggtggcgccgtgagccagttcaagacgcctcggttcgtcaacccgttgaacgtcaaggttctgcagatactcagtaggaacaccaccagaagctacttcagtaccgcctatgggctctga

SEQ ID NO: 28379 - DNA, 1257 bp, Zea mays
  Peptide Sequence Number=SeqID_71754
atggacaaagagcagcaggagagtcacctcgacagcttcgcgccgctggacggcgccgcggcgccggaggaccagcagcaccagcccgcctgcggcggggggcccgagatggtcgactacatgcttggccgccaccacgtgaacgcgcacgcgccgccgtcgccgacgcagagccaagcggtgtcgttcgacaagctcagcttctccgacgtgctgcagtttgccgacttcggccccaagctcgcgctcaaccatccggtggccgcgtccgtcggcggcggcgaggacgcggacgcggacgacgacgacgacgggtacttcttcaggttccagtcgctgccccagcgccatgcggaccgtgaggcggcgggaagcaagacgacggccgaggacggtggaggaaccggcgtcgtcgtctccgagggcaccacgctggtgcagcagcaggccgatcacggccgggcggacaaagccggggaccaggggaagagcggccgccggaagcgcccgcggaccgtgaagaccagcgaggaggtggagagccagcggatgacgcacatcgccgtcgagcgcaaccgccggcgccagatgaacgagtacctcaggatcctcaggtcactcatgccaggatcctacgtccagaggggagaccaggcatccatcataggaggcgccatcgagttcataagagagctagagcagctgatccagtgcctggagtcgcagaagcggcggcgcctgtacggcgggtccggggacgcgccacggccgccggtggtggacgcggcagcgggctccggcggcgcgctaataacgtcctccactcagccgctggcgctgcagccgccgcacctgttccctccgaccccgagccaccctttcccggtggcgggcgccgacgccaagatcacgctggacctggaggcggcggggggcgccgtggtcgacgacgccggcggcgggctccgggaggaggtggcggagaacaagtcgtgcctggcggacatcgaggtgcgcgcgctgggcgccgatgccatgatcaagatcctatcccggcgccggccaggccagctgatcaagaccatcgccgccctggaggacatgcagatgtccatcctgcacaccaacatcaccaccatcgagcagaccgtcctctactccttcaacatcgtcggcgaggcaaggtactcggcggaggacatcgccggcgccgtgcaccagatcctcagcttcatcgacgtcaactacagcctgtga

SEQ ID NO: 28380 - DNA, 1396 bp, Zea mays
  Peptide Sequence Number=SeqID_71755
atggcgagcgaggcgaaggagatgaagtacaggaggaggggcagggttcccgggccgccggagcacgggcaacgcagcgaccggagcggcgcgctggactgggccgcgctcaagcacgaccccgcggagctgctccggaagctcgacgaggtacgggaccagatcacccgctcctgcgagctcatggggccgccgccgccggaccgccaccgcgcgatgagccgccgcacggtctcgctgcgcccctcgtacgccgagccgccgcacgcggcaggccgggcccccgaccactaccgctcgcgctacgccgaccgcaacaggactagcttgccgccgagctcgtatgaccaccggtcgcagcgctccgtacccgacgacgaggcgtactccaggcagccgttccggcagcagtactaccatgagaggcagcgggagagccacggctttggccacgggaggcgccaccatagctcctgccagtgcgcgcactgcctccagagccagcgggcgccggtggtggcgccgccgaaggaccacgtcccgatggccaggtacttcgcgggtcaggggtcctttcggttcgatagatcccagccaatctcgtcggagcttgaccggaggtctgtggcttcgtctctctactcgcacctttccgtgtccaagaggagggtggagtatttcaggaaaaaggctgagaagttctgccggccgacgaggggcgccgcgccttttctcgtgtgcacctcctgttcccatctcctgcagctgccgcaggggaagttcgcaggccggaagaaggatcaggtccagtgcggttcttgttcagagatcattgctttggagcctaagcaagtgaaagttcatccggtgatcacgccaccgtctttcccagtatcaaaaggtgtcagaagtaaaggttccagtcaccgggacaccaagagttccgggtggtatcaacatcaggatgatgacaacttcaatttctataagccgcaagcacagaagaaggattttgctgacaatatgtcaccgtcttctaccgccagttatggtagaacagacagtgagcatgggtcaaacaggagcgttcagttaaaatcagtgcctgccagcaggtctagattttcaaatgacccaaaggatatattatgtcaaggagatacaggcggtcaagtggaagcttcaggacagtgtacagtcagtccacaaggtccaattttagtggacaaacaaatggatccgttctccagtcaatggaaagagaaagactatagtggtggaaaccaaatcataagaaaagaatgtgacataaataccaaatcagattatgaagccaacgctagaggtgaaagtctcggtaggaaatgcatacagaagagtaaagaaggtcgtaagg

SEQ ID NO: 28381 - DNA, 843 bp, Zea mays
  Peptide Sequence Number=SeqID_71756
atgtcttcgcgctcccttatacatcgtgtctttccaccttccaagcccccggatgggggatacccgccgtcttttcgcctcatcgttggaggaacgcaactccgtgggagttggtacctttcagccatcgttcggcttcaaggattttcatcatgcagcccggctgcacccctccgccggtggtcacccaagatggtgacctccagcttgatggtgggggaaagcgagccgggctgcgccctctgcccctccctcagcctcaaggattttcatcaccagggctggggaggggagtgtgccgagttgggctgcaccgtgcctggctctcggacgcgagtggcttcggagccgctcgcggcgccggcgtctgccacggcagctggaagaggttcctccgccggcgagatagccagggccggccatggaccgacctccaactctacggccttctgcccgtccttgcctcacgagtttgggcatgggcgggggcctcctggcagcaacatccgccctgaggtcagtgctgccgctgttcggcccctcggagcagaagtcgtcgtcgtcgctgctgctggagcgagtgacggcgtgccgttcgtcggtcttctgttgctccgcaggccctcccctatcgagtggggttactcgcctgttgattatctgaaccgcttcaccaagcatgagtcgccccgtgtcaaggtgacgagtgagagtggagatcctcggaccgcgtcgccgtccgaggctaggtcggacctcgctgaaggtgtcgtcgatgccgagggtgctactgcccccttccagcgtcaagacccgagcctgcaggatcagagtgtcttgtag

SEQ ID NO: 28382 - DNA, 309 bp, Zea mays
  Peptide Sequence Number=SeqID_71757
atgccgtccgtcatgcacggcaaggagcccgaccaagcgattcgatcaagcaggggagaacgggtcgcatgctacatgaaggctgcgcgtgagctcgggcgttcggctgcaggccgtagctgccagggagcttgggttgagagggagggctcaagaccggtgatcgtgcagcttggtaacggggttaccaccccgcgggtggtgcttgtcatcaacgtcttggggctctatataggtgccttttggttcacaaaatgtaacctaaatgggaatggtaacgatccgcgctcgaatgtcggcggcaactaa

SEQ ID NO: 28383 - DNA, 237 bp, Zea mays
  Peptide Sequence Number=SeqID_71758
atggcatcagaggacatggtggggaagagcaggggcgacatggctgtcaccaccaccatcaacctggcaaaggaggccaagctcgcacgcgagggggtcaaggcgcccggccaccagatcctcaccatctgcaagttgctcatcgtcgtcaccctcctcctcctccttgccttagttttgtcctcacctacatggctccatctaccattgtgttggtctatgtgggagtttcactga

SEQ ID NO: 28384 - DNA, 243 bp, Zea mays
  Peptide Sequence Number=SeqID_71759
atgccgagaaatatggtaaatcgactttacccctcacgcgacctgagacgtggtctcccattccgattatggtgggtacaagtgcggtcactgcatgacgacagtcggggtcagggaggcattgtacgccaaggcggttctctggaggacatggttgctggagtgacttggccgtccatcttgccaccaggttggacagtcgagtgggatcctacctcagcagaggaggagcatgaggagtga

SEQ ID NO: 28385 - DNA, 3477 bp, Zea mays
  Peptide Sequence Number=SeqID_71760
atggcgagcaagcagtcgccgaagtgcaataccattgtgcaagggtccgacgcgccttctgtcacgccgaagtgcaataccattgtgcaagggtccgacgcgccttctgtcacgcgcatgtgtgcctctactgtgtggggtcagctatgccttgctgctgtgaaagaggatcgatccttggcatccgtcatggcaccttcctcttcatcggattcctcactcgccctggctttggaaatccagactcgcttgctcctcgccgagttggacaagcgattccaagccttcgacaacaagtgggactccagagtgtggacgctgtactcctccgacaacgacgactcggtcgccggccccgtcaatgcgctcgctgacattgagcttgctgacacgcccatacccgggagctgcctcatctccatcgactctgacgtgccgctcgatgtcaacctcaccagaggcgggccgccctccatcgatggccactccgcctccctcgccccgttcgtccacgacgtcgccgcccagttctgttaccaggaagttgaggcacacctcactgcattagacgacggcgacagatcagacatccgcgagaccgacgtcagggcccccgcgcccgacgaccggctgttggtgtcgctcgagggcatctgccaggaggggaaccaaagcgaggaaaccgcaccggtggccgacatggacctccccgcggcacacgccaacgcatcagccggcgccatgacttccacggtttccacggggaccgcatcgttcggcgcctgctccgtgcgaaggggtcacattgcgagcgagtctctggcgtccgcgctcaagttgctcgaccgaatgtctaacccaggcttgtacagctgctcgaacacatctgctacgacttcaactttggcgctggagcaccagactcgtgccatcctcgtcgatgcccaggcgttcgaccgactcgtccacaacctctcctgtttctctgtgatcggtcccgacgaggccgagtccgtgtaccagatcctaggcatcctcctgcagcacggccccgccaatcaaaagcgcttcgaccagatcaatggagtcgatgccccgcttcaggtggttgctgtgtacacatctagggacccaaagacccccgatgaggtggagaagctcgagaacatctaccactgtctctgcgacgtgctcatgcccctggagaacaaggagaagtttgtcaatgctgaaggtattgagttcagcacgccgtccgtgctggtgaccaaggaggacgaggttctcaacgccttgcccaacaggtgttcgatgaattgcttcatcatcgtatatagctgtttcttgcctctattcagttgcaactgggatgctgtgccgcataggcaaccatggccaccacccgtacagtttgtgatactgggtgagggtgttccaagctgcctttcaccttggccatccttcatcttcgttgagttacctatagtgaggtatttctgtttgttacctgagcttccatgggcagtattagcttatcaatgtggcagcaatatgtttgttggtgtggtcgaagttgctgtacgacttgatttgttgaccttccatgaagttgcagatgatggagagcagcttggggagcgtgtggctgagctggatgtacctgtcagtggagttgaggacggactggcaaacacaatcctcatatggagctgtttctcacccactctgtgttggaaaatttcgtggccaccacccttttcgttggagagtttttatactggagatcatgcattgtttatcaaggaaatcgcagcaatcaattctctggagcatctcaactctctcctgaatgtgcttcaagcacgtggtgaacaagttgtttttcctggatttggaagaccttatgtgttcaatgcagagatgataaaaagagttaaacatacatcggaagccaaagattcagctcgagcagcactgaaatcaacatggtggacgcttggctgcagttacgaagaggatgctgaactaccttcattactggatagatgtctgctattgttgatttacgaagaggatgctgaactaatggacttggaagatctatatttcagcagatcagctaaaattggagcgttcatttgtctacagtgctatggtgttcacagaagcgttgggacacatgtttcaaaggtgctgtcagtcactccagatcaatggacagatgatgagattaactccatgatagaagttggtggaaactcttattccaatgctatatacgaagcacttctgccagaggactatgagaagccgcatccaaattctagccaagaagagagagctacaaaggaaccatctcagagctacaaacgaattcctgttatgccaagtgatgggctaccacaagttcttggtgagactgaaccatctcagagcacaaatgaaggcaacaattatccatatacatctcaacttacaattctagaggagcactatgctgttacgaaagaaggaaatataaaatgtattttggaacaagttcatgtgctagagattactagcagatcaggtggtgagtttcatcaaagaagtgcatctgcagctgatccacctacaattgaactggtgctagagaacgctcatcaaggttctttagaagatgcagaacagaaagataattgtggggactccatgagcaatgagaggcagcaccacagcttcctacaggtcagactagatgtgttgcagcatgagtacagcaaggctgattactggttgtttcatttcgttaggctactactcaagtttctagcagaccaaggtgtagaacttttccgtgtcatggtttgggatcccggtggaattgccatgtatcggcttgagggcaagccgaattttaagaaggggggaatgtcagtagtacaccatctgaaccaggaaccatggtcaccatctcgtcaagggagctggaccatggcgagcaagcagtcgccgaagtgcaataccattgtgcaagggtccgacgcgccttctgtcacgcgcatgtgtgcctctgctgtgtggggtcagctatgccttgttgctgtgaaaggtccaaatgtaagaatcaagacccaaatccaggtccacgtctatgatgaggaaaaaagcgcctcctgctgctgtcggtgtgtgcatgtttccgttaacctcctggcgcaacccgctaatcaacggctccgcggttcccacaccggcgtgcaagcccactcgtctgtcctgaggatgatcgtgtggtggagtgagggaaagggagacgaggactctccgctccggctctccaccacggagcatagggccaaagaaatgctccgcgtactcaccccaccgctcacccgtctcatgctcgatgggccagctccactaccattacttccataccccacccgcacgagtggtgtaggtctcgcccacgtggggctaaagctggaagggtag

SEQ ID NO: 28386 - DNA, 321 bp, Zea mays
  Peptide Sequence Number=SeqID_71761
atgggaagctccgcctcgcccgaccccagggctcggactcaacctcgaccccggaagacggactcagcctcgaccccggaagacggactccgcctcgcccgaccccagggctcggactcagcctcggcctcggaagacggtctccgcctcgcccgaccccagggctcggactcagcctcgacatcggaaggcaaactccgcctcgcccgaccccagggctcggactcagcctcgacctcggaggagcctccgcctcgcccgacctcgggctcggacccgccacgtcacaaggaaggccatcattaccctacccctagctag

SEQ ID NO: 28387 - DNA, 315 bp, Zea mays
  Peptide Sequence Number=SeqID_71762
atgccactcgacagagtgaggctaacagcagctaagtctagccttgggcgccatgggaagctccgcctcgcccgaccccagggctcgggctcaacctcgactccggaagacggactcagcctcgaccccagaagacggactccgcctcgcccgaccccagggctcggactcagcctcggcctgggaagacggtttccgcctcgcccgaccccagggctcggactcagcctcgacctcggaggagcctccgcctcgcccgacctcgggctcggacccaccacgtcacaaggaaggccatcattaccctaccgctag

SEQ ID NO: 28388 - DNA, 240 bp, Zea mays
  Peptide Sequence Number=SeqID_71763
atgggggggcgttatcgatcactattagttgccctggatgtttctggaatgttggatggcaggaacacaggggttggttcttactgttttcataaattggattgtgggttaagctatgaagctacttcatccaagcggagccgtagcctggcaaaggagatcacaacagcagctgttgcttctgttttactgggctttgggtctctgttcgtgctccttgcaagtggtgtttatgtttga

SEQ ID NO: 28389 - DNA, 723 bp, Zea mays
  Peptide Sequence Number=SeqID_71764
atgtcggggctcagtgcctttgtgcatgcccccttcagctataaaaggggaggcatgcgacggtcaggcccaactctaggcggacactctcaagttcatacaagctcccaagcaatacatcacacagtggagtatgcagcacacgccagcgcaggcgtcccagactccgttgagagcagcgcctacgacgctgtctgcggccagagagttgctacgccaccccctagctctacagcatcaccgggggccatgaagcagtggcgcgacgacgtcgaccgactgctcggcatggcacattctacttcgaccaggtcgaggcctcggtcatcccggcgcgaacgcgaggcgacgacgtctgcgcgctcgccctccataaggggtgcacagaccgacgacctccgggcggagctcaaccgtaggcgtacgggagaagaagctcgagtctctttggaaagggcgcgtgagcgccgacagaacgtcgagggtcgcaacctcgaccgagatttcgctgcggaggcaccgcagacaccagtgggcgcccggtcccaaacgggtgtccccttaaccggcgtgggctgtgccgccctcgctgaccatcttcgcacggcgttgtcacacccggtcttggaaggcaaaccgaatgcgaactatgtacgtgccaggatcagaactcacgtacacagcgattacataaatgaacatcatcacacaatgctcgagtaa

SEQ ID NO: 28390 - DNA, 840 bp, Zea mays
  Peptide Sequence Number=SeqID_71765
atggtgcgcacgaagaatgtgttggttccagggggaggagacgacgaagacactcctcgccccttcaagcaggtcaaggggaagactgtctacttggagcagcaggaaggccgcaagaagcggcgtttggatagagtagctcgggcagctctcgtagcagcagcagttgagcaggcagagagaggtggtcagctacagatttcttcaaatcagattgcttatcgagttcgtcgagtcgcctctcggcctcgctcctccgcaccttctactcccgccactactaccactcccgccactgctaccactccacctcacacttcgcccgctccagtcactcctacgccatccaccacctcagccatacctaccacctccaccacttcggcttccactgctcctcctcctgctcccttttccgctccacctatcccacttgcccgcttccgggagcgagatgagaccgaggtgcaaccactggctaccgatccccgattgattgatcttcagtgtgctacagcggcccggctgatctggccaccacagttccagggcactcttgaggcctctcgcctcctctttggctcctatcgtccaacccctgaggaccccatgccgacacctaatctagtgattgacactcaggcagaggatacaactttccatcagttcgagactcagggcacaacagttcctgatgatgatgatgattttgggattccgccaccgcctccgcctccctgctcacatgatcatgaggccgggagttccagtgttgttcctgctgcccctcctgcggttgaccctattgtggctgcaatccttcagactcttacgcagtag

SEQ ID NO: 28391 - DNA, 237 bp, Zea mays
  Peptide Sequence Number=SeqID_71766
atgagcgacttcaacggtaatgcgactctagtgaaggcggtgataaacatggagctcacggttagaggcaagaccaacaccacatccttcttcgtggtgaataatcaaggagtaaatgtgggcagcaagaccatcaatatgatgggtggagggggtataaatagccctcacccaccaactagcgttaccaggaatctactgtgcatgggcgcaccggacagtccgtttttgttctaa

SEQ ID NO: 28392 - DNA, 274 bp, Zea mays
  Peptide Sequence Number=SeqID_71767
atgcacattgcgctggccgggaacgaagtctctttctatgtttctggcaacatgttggtctgcatatatggtgattacaccctgggggcctgtgatcttcatgcacaggttgtgacttatgcccatgcggtcaaaggcgtgaaagaagatgatgtctgtctggctaccattatcaacgagtactttgtgcagatcacaccctgccactctacaatttatcaccagcgcatctgcatggggcacacttcggagatcgacatcccttgcatcaaag

SEQ ID NO: 28393 - DNA, 144 bp, Zea mays
  Peptide Sequence Number=SeqID_71768
atggtggataaagtacaaaccaaggataaaggaaaaatccaattggaattgtcttggctcgagcagccaagactctgctcagtctgggagcaccggactgtccggtggtgcaccggacagtgtccggtgcgccaggctggttga

SEQ ID NO: 28394 - DNA, 456 bp, Zea mays
  Peptide Sequence Number=SeqID_71769
atggtcgcctttcaagggggtcgccctccttttaaaggcgactctccctacttgcgtccccagccgtcgtgggctgagtcttctccaacacgctccaaggtcctccccctacggcacgggggctgggtcccacgcgtcatgcaagctggcccagagcagaagaagccaaaccgccgcgcgcggagaagcgagcaacgcttcgccttcgccataatgaccgcgtcaaaaaagactccgagccccctactgatcagaggttcgaaggctggcccctcggaggggtttaacagctgcctcagagtgcgtgggctccacacccactactggtcagaggttcgaaggccggcccctcggaagggttcaacggccgcctcaggccactcgggctccgcgcccactactgatcaggggttcgaaggctggccctcgaagggttcacagccgcctcagacatag

SEQ ID NO: 28395 - DNA, 201 bp, Zea mays
  Peptide Sequence Number=SeqID_71770
atgggagtcgactgggaacatacctactatcatgccgggggtctcctgaactgcttcagcctccaagtggaagacgaggtgcctgctgattctgcctctgaaactgacctcctgactgattgctctgacggttctggtactgatgctgaggatactgcctttggaactgctgatgctgaggtggacgctggttctgcctga

SEQ ID NO: 28396 - DNA, 417 bp, Zea mays
  Peptide Sequence Number=SeqID_71771
atgactcggccggacaggctggaggaagcggcggcctacatcaggcagacgacggagagagtggagaggctcaaggagaggaagcgggagctggtggcgtccgcgagggcttcgtcgtcgtcccagggctcccgctccggctccggctcctcctctgctggggccgcggaggtggaggtgcagcacctcgggtccggcctgcacgccatcctcgttactaccggcgcgccgccgagcgagggggcgccgttccaccgcgccgtgcgcgccgtggaggaggccggcggcgaggttcagaacgcgcacttctccgtcgtcggcgctagggctatctacaccatccacgcgctggtcgcagagggaggcattgagagggtggtgcatagattaaaggcagcactgcgtggagacgcatga

SEQ ID NO: 28397 - DNA, 471 bp, Zea mays
  Peptide Sequence Number=SeqID_71772
atggttaactattttgtgtataaacgcgcgcaattaatggtgaatgatatgatgtatgatgatgcagaaactacatgtaccggtggacccggcttgggaaccgccagtggaaacatattttcactggcggttatcttaacacaaccgccagtggaaataggaggcggttggtgtaacagaaccgacagggcatttaggttttataagctaccaggtggaaagtacgacacgtccaaaaaaggcgtgccactaggcatccattataactggccgcaatttcaacaaggaagcccgaagaacttgactgaaggtgcattgtatggcatagttgaggacctgtgcacatttatattaaaagaggtcattcccgcagaagggaaatatcacgatgcttccggaacattagctttgccagagtttagaatactaacagaaattagtagactatctcttagccgagatagttattag

SEQ ID NO: 28398 - DNA, 309 bp, Zea mays
  Peptide Sequence Number=SeqID_71773
atgggtaaaaacgactcccaggggattgccgcggaggtctggacctacatccaggtcgtcgagcgctccgggctcgaaggctcggatgagtcggagtactcctcagatgaggaggactcctcggactcgtccgaggaggacagcggcggcgatggtggtgatggcggcgacgatgggggcgacggtgatggcggcggcgacagcggcaggggcggcgacagcggcaggggcggcgacagcggcggcaagggcgaccacggcagcggcagcaagggcagcagcaaggacagcaacaaggccagtggctag

SEQ ID NO: 28399 - DNA, 297 bp, Zea mays
  Peptide Sequence Number=SeqID_71774
atggaaacggggtctttaaggcgcgtaggggtgcgatggttacgcgactccgaggtccccgaagagcttcccatgcgaggcagggcgcggtccgcgcggcgaagaccccgcgggttcggttacggcggagagggagcatctgacgtgccggggccacccatcagtgagacacggccgctaactctacggactggcaagcggcccccatgcgacagagagctggcgcgcgcgcggtctatggcagaaccgtactacatttgcattgttaggaagaggataatctcatcaaaggcatga

SEQ ID NO: 28400 - DNA, 60 bp, Zea mays
  Peptide Sequence Number=SeqID_71775
atggctgggaaaaagcgtcaatttctggaaaagtcaggggctctggcgcaagattactga

SEQ ID NO: 28401 - DNA, 90 bp, Zea mays
  Peptide Sequence Number=SeqID_71776
atgaataagaacaatattgaattacatttgtaccttcagcttgacagaaggcaaaggaccttcggcgatgaagcagacccccaacagtag

SEQ ID NO: 28402 - DNA, 183 bp, Zea mays
  Peptide Sequence Number=SeqID_71777
atggccagggagcgagttggggaagaaaagaaagtagagggacctgtccaacgtgaagaagagatagaagtcaccgaagacaggacaccaccaccttcggaatcccaggccgggaatagtttctacttcgatatctgtggatccgaacccgaatcacctgtaaacgaaggcaagccccggtga

SEQ ID NO: 28403 - DNA, 327 bp, Zea mays
  Peptide Sequence Number=SeqID_71778
atggaaggctcttgggtcattaggacatcctacttgttggaacttgctctctgctgcaagtgggccaacgggggtgaacaatggcgacaacagggttacgtgcacgggggcaatagctccgttgatctcgcccctcacgggcactgtgcgggggtcttcgtcaaggtgtcgagacctgcgaagggtgtccctgcccgctttgcctccgtcggaccagcggctgcagcgaaggcctggagcgaagggtggcgtctttgccttcgccccaacatttgccctccgagggaccagttcgacagagtcacctggtgccgaagacgtcgctag

SEQ ID NO: 28404 - DNA, 1497 bp, Zea mays
  Peptide Sequence Number=SeqID_71779
atgtcttcgcccgagctccgggagtcttcggcgcgaatgctggaggttaccgggggtcgatggcccaagaatgttccgatccccttcgcagctggcgaagacttctttacgtcccgcatggcacgtgacttgaaggtttttccttacgagcggaatattgctgctgttgtatcggcagtgatggagaaagaccgtcaagacgctgcgcagaaacgccgggcggtcgtcaggatcgcggatccaatgcgcgaggcgaaacgggcgcgggggagcgcgaaggctgctgcctctggcggtagcaagccggtgccgactgcgaaaacggccgcccccgggcacgacaaggtgccggcgagtacgaaggttgtcgcctctagcgggagcaagccacccccgggcggggtcgtgaaagggcgaaggccactttcgctggcgcgacgcattgccgacttcggcacggacatcagtgtcgacgattatcttgttggttcgggcgaggggcaactggctgttgtcccgcctccggtggtgaccacttcgccaatggcgatggtgggggtgaagggtgccgcgcgggaccctggcacgggcggaggacagtctcgcccgccaacgcgtcgaggagctggaggcaaggttcaacgccctgcgcgaccgctggacaaggccgagtcctcgactcgcgcggaggtcgagcggacgcacgtgcagtttgtggacacgtaccgcgagctgggtgcgcggactgctgacttcgaggtgcttggccaagaagcagaccttcgcttccttgaatggttgcaggaggagctggtggtgctcccgaccattgtgacgagcttcatgtccttcgcctccctcgtcacctatgagggggccatgaatgctttgtcccgcgaggggtgcaggcattatgaggtcttcgaccaagcggacgaaaactttgaacgtgaaatcttcaaggtcgaagaccctgtgacggctcatgccaaagacgttgagtaccttgttggtctggacggcgcgctgcccgaggccgcggaggttcttgggtctgggcctgcgcacgcaaccgctactgacaatgatatttttgtggcggcttcgaccatggctgctgatgacgattcgtttggctctgtgtctaagtgttttgagtctgatgattccgggagttcggttgtgtggacggaggagtcttcagatgaggacttggattattttgcggcgttggatgtggctgcagcggagccttcgccgcgcgcggagggttccgaaggactcccgggcacgagtactgggtataggcggcggagggcggtggcgaagcggagagtgagtgaattgtcgcgaagtggtaggcgttatcgtagcgagacggagagaggtcgtcttcgcgtggatgggactggtgagggggagctgcgaaatctgtttgagggtgaggaactgaggataatgttgttcaactacagggagatgggtatcagcccgaag

SEQ ID NO: 28405 - DNA, 1665 bp, Zea mays
  Peptide Sequence Number=SeqID_71780
atgcaggcggcatgcaaccgcgccaagtggatgcccttctccgactcccagcacgcccagcctggaggcccaggcccacgcgtcatgcaaccggcgcgccgaatgcttcgtgcatgcaactgcaccgccactcgcgccactaccgcgcctcctcgactgcgggaccaataccgcggctcgaggcgacccagcgcacgacccagcagcaccagcctggcgcgacgcgagagaaccctctctcacggcgtgaagacaatgcgcccgtgttctgttcctcgaacggctcgcacacgcgtaacggccgccccgccaaccactcgccccgtcgcattaactccgcggcgggacaggcggcgcctctggcacgagaagcaggcgacgtttcgccttcgccataatgaccgcgccaacaaagggaccgggaaagggggataccctgaaaaggatccttccccgggaaggaaccaggctccgagcctccctactgatcagaggttcgaaggctggccctccgaagggttcgacaaccgcctcagatcgtgtgggccctacacccactactggtcagaggctggcccccgaagggttcacagccgcctcagacgccgagcgagggatgaccatgggtacgttcgatacataaccaaggctcgggccgcgctcccgaggctcgggggctgctctcgcaaacccggctccggccgaaccgttgacagcgtcaacatatcagcccgagaacttgggccccgaccgtacacccgggctacgaccagctcgcatgagggaacaaccagaccagccgaagcattacgcgaggcattaagacctcgaaggagtgaaaccactcctccgaggcctcgggggctacacccggtgggtgcgctcgcgcgcacccaccggaacaaaatgccaccgagaaaggctggtccccttgcaaaaaagtgcgacgaaagcttccaagcgagtgctaacactcccttcgaggctcgggggctactgtcggggaccataattaggggtaccctcaagactcctaattctcagctggtaacccccatcagcataaagctgctaaggcctgatggggctcggactcgggctaagtcccggaagacggcgaactccgctccgcccgacctagggctcggactcgagctaagtctcggaagacggcgaactccgctccgcccgacccagggctcggcctcgggctcagccccagaagacgacgaactccgctccgcccgacccagggctcggactcgggctcagcctacaagacgacgaactccgcttcgcccaaccccagggctcggactccgccctggcctcagccgacgaactccgctccgcccgacccagggctcggactcgggctcagccccagaagacgacgaactccgcttcgcccgaccccagggctcggactctgccctggcctcagccgacggcctccgcctcgcccgacccaggggctcggactcggcctcggccacggaagacagactcgacctcggcttcggaggagcctccacatcgcccaacctagggcgcaggccagccacgtcaagaggaggcgccatcatcaccctaccccgagctgactcgggccgcagggaacaagaccggcgtcccatctggctagctccgccagataggcaatga

SEQ ID NO: 28406 - DNA, 177 bp, Zea mays
  Peptide Sequence Number=SeqID_71781
atggccagggagcgagttggggaagaaaagaaagtagagggacctgtccaacgtgaagaagagatagaagtcaccgaagacaggacaccaccaccttcggaatcccaggccgggaatagtttctacttcgatatctgtggatccgaacccgaatcacatgtgataggagttgcttga

SEQ ID NO: 28407 - DNA, 399 bp, Zea mays
  Peptide Sequence Number=SeqID_71782
atggcgcgggcgcacgagaagacggcgtcgtggtcatgggcccacacgccagggagagcaggaggggagacggtgtcagcgaccgacggggcaggggcgaaccggccgacccgcggggaaaacccggccgccggcgggttcaatggtgattcgccgccggtgacccggttcctggggatcggagaggggggaggaggagaaggagcttaccgaagcggagggaggggcggcggagctggtgcggcggagctggtgcggcggagctcggggagggggagaagagtggccgaggccggtgcaggtcatggaggagctcggggcagcccttttataggcgcccaaggggagggaagcagcggcgttaggtggacgctggtgaggtgcacagcgacggagtaa

SEQ ID NO: 28408 - DNA, 270 bp, Zea mays
  Peptide Sequence Number=SeqID_71783
atggcgcactctggctggcgcatcagtggagaaacagtggcgcgtgcaattcgtggctgtgtgcgacggcacctgctgaccgtactcggtgccacagttgcgtgttcctggctgtgcgccggccttcgctgtgtggcatgtgcagtgtgcagcgctgccggcgttacacacgtttctcggcaacagccgcggttgtcggcgctggcagagtcagtgacttcactgcggagatcaggcaatgcggatatgtccagtccagaccatcactga

SEQ ID NO: 28409 - DNA, 678 bp, Zea mays
  Peptide Sequence Number=SeqID_71784
atgtctagcggcaagctgaagcggagagggtctgcgcaggggtggcaactgctaggagcacacacaagagagccgctggggggagtggagtggaggggcgtcggtggcctaggagggttcggcgtgtcggcgacctgcgtaggggtggcagcgactgggagagggagggagagctttggccttggatgggctgttggatcacaacctctgttttgggctcttttcataagctttgttcttgggactgcatattcaatcaatctgccgtaccttcgatggaagagatttgctgttgttgcagcactgtgcatattagcagttcgtgcagtgattgttcagctggccttttttctccacattcagacttttgttttcaggagaccggcagtgttttctaggccattattatttgcaactggatttatgacgttcttctctgttgtaatagcactattcaaggatatacctgacatcgaaggggaccgcatattcgggatccgatccttcagcgtccggttagggcaaaagaagatcgctggccattccatacttgccgcgatcctatggagctgcgcgcgatcggtggacttgacgagcaaagccgcaataacgtccttctacatgttcatctggaagctgttctacgcggagtacctgctcatccctctggtgcggtga

SEQ ID NO: 28410 - DNA, 579 bp, Zea mays
  Peptide Sequence Number=SeqID_71785
atgacactcggcaaagaaggcaacctgggaaccggtaaagccatctttgccgagtgccgagtgctgacaatggcactcggcaaagaaggaaacctgggaaacggcaaagacatctttgccgagtgccattaccaaggcactcggcaaagggactggcaaaggggcccactggagggttctttgccgagtacctgtccaacagacactcagcaaagaagcctcctttgccgagtgcctactagagctctcggcacagggactggcagtggggcccactgggccaccacacgcactcagatttcagcccacggaaacgaacgcacaaaggtgtcgtgcgcgtgcgcaggctctcagcccgtggccgtgggtgattgggacgttcacctcaggtcggaggaggtcgctgaaggaacggtgcgggggagatccggcgccgtacgctggtgggatccggcgccgtacgcattgatggagccttccatttactgcagcctcgccgccgcagcggatggcccagcatgtcctgcggcccagtggccccgcccggcccggcagcggctggagctggatgcactttga

SEQ ID NO: 28411 - DNA, 2439 bp, Zea mays
  Peptide Sequence Number=SeqID_71786
atggaggtagttgagttagttccttgcgcccacaacaagtggggcaattggcatgagttttggttctacgtcgcggagggtaccgtcgaagaccatccggggctccccgtgtccgagatgtgctcgcatttttactcagcatacccgccttttgaagtggcggaggaggatgcgaacgaaggggcccttcggtgcgccgtcggcctgagcagtgggcgcgatttggttgaggaatttgtggcgtacggggtatggcctttggcgcatggctgggcgttgggcgaagtgtgccctcgccaaatgccttcccatggtgggaagctggtgcgaagtcctgtcttcgcgctggatccgcgtagccgcgatccggccgcctttatgcgtgaggcggaggatggggcggtgcggatcattggtcgggtttttgaattgaatcgactgccgtatggcggttatcccggccaagacgatgtggatcgtcgcgggaagaaaccggtggtagagtctggagacgaccccgcgccggcggtcgccccgtcctctaagaagaggaaactaggtactgctatgggagtacttggggtttccgatggttttgctagagaattgatgaggacatgcgcggccccgggaggaaggatgtctttgcccgagctccgggagtcttcggcgcggatgctgagggttaccgggggttggtggcctaggaatgttcctatcccccgcgcggccggcgaagacttttttacatctcgcatggttcgtgaatggaaagtgtttccttacgggcggaatattgctgctattgtgtcggcagtgatggacaaggatcaccaaggagctgcacagaagcgtcaggcggtcgtcaggcttcatgaagccaggccgaagaggcagcggggggctgcgaaggctgctgcccccgacggaggccaaccgccgctggcggcgaagtcggccgtccctgcatccagcagggcgccggaggctgcagctgccgccggtggttccaagtctacgaaggctgcaccggcgtccagcagggtgccggaggccgcgaaggcggcccgagggttgccgccgccgggcaagcgcgtcgccgacttcgccaccgacattagtgtggacgactatcttgttgggtcggacgaaggccaacttgtcgttgttccgcctgccgcggcgaccacggcggctgctgtggtgccaaaggcgaagagcggtgctcttagtgccggcggcgagatgccggcactcactgctgtgagggatgaggcgggtgctgtgtcccgccggctgaaggagatgaaggaggcgctaagtcaggcggctgacttcgcagaccgtgcggcgtcgggggccctcacggcagttgtgtctgccgaagtcgagagacttcggacgcaacatgctgacgccgtccgggagaagtcggccgccgacatgctggaccgagagcccggacttcgctgcctggagtgggtacaggaggagctgcaggcgctccccaccatcgtggaggggttcatgtcttatgcctccctggtcacctgcgagggggcgatgaacgcactctctcgcgaagggtgccggcactatgaggtcttcgaccaagctgatgaggatttcgagcgtgatatctacaaggcggcgcgtggcgagagggtggatgacttcggggctttgaacagcgcgctgcctgacccggagtcgaacccggcggaggctgtgtccgaggccgccctagagccgcccccggaaaccgccaaaggcgttcctgatgcccccgcagccgctacgaccggcggaggcccgcccccggagaccgccgaaggcgttcctgatgcccccgcagccgctgcggccggcggaggcctgccgccaattgctgcgccgagggctgaggatcctgtgacggtggcggcggaggcgacagcggaggctcccgcgatggctgggtcttcgcaggttcaagattttgggcctgcgcacgcaaccgccactactaattttttggcggcttcgaccgtggatgatggtaataaatcagatgggtctgcgtttaagttttctgattttggtgactctgggagctcggttgagtggactaaggagtcgtcggatgaggacttggactacttcacggccttggatgtggcagcggtggaggcttcatcgcacgctgcggatgcagaagatgtgcctggtcctagtactgggcgtaggcggcgaagggcggttgcaaagcgtagagtgagtggggcggacggcggtcggcttcgtgtgagtagggctggccggcaggaactgttgtccttgccggccgccatgagtacaggtgagggggaattgcgaagtctttttgcgggtgaggagcttaggataatgttatttaactatagggagatgggaattattccgaaggttgagccgatgtag

SEQ ID NO: 28412 - DNA, 417 bp, Zea mays
  Peptide Sequence Number=SeqID_71787
atgacgagagatgatgacacagtgagtgagaaggtcaaggcattggtgccccttgcggtcaggggagtaatcgaggaaaaggtagcgagtggagcgggggaagagcttgtgatgagcagcggcagaggtgttgggatagcaagcacaaccaaagactcaaaggtagtatttgtaaccagagaggctgaagacaggagaagtccagacattacaatgaacaagatcaaaggcctgagcagcccaggacgtggaagtggaaaacgaaagacgagaatgacggtcgagctggcaagcatgacgaggtgcttagaggagacccttttacaagagatattggagcgactggagagctgggattttttctcagtccagggtgatcgagacgacgatgccaaatggggaggtggggatctctag

SEQ ID NO: 28413 - DNA, 282 bp, Zea mays
  Peptide Sequence Number=SeqID_71788
atgaggtcttggtgcttaggaatgctcaagggatgcttggtgtgctccttcatgcgcctaggggtcctttttatagccccaaggtgggaaggtgaattatcaaggtcttccgcaccagataaacagccacctgcactcactgaacggtgggcaacagagtccgagaagcatttgagaacaagtccccaacaggcaccggacccctgcacacaccagggtccttctcgctccgggaccctgctggagttcgagaagggtgggcaacagagtctgagaaggtga

SEQ ID NO: 28414 - DNA, 429 bp, Zea mays
  Peptide Sequence Number=SeqID_71789
atggacgcgcttcgcctacggccgtccctcctccccgtgcggcccggcgcggcccgcccgcgagtgtttggcctagtattgaaatgtttgaatttccagatcattttctaccaccatgttgttccatacaacgaaatggtgaaggacgaatttgcttttctagccaaaggacccaaggcattaagcatagtctcagtttcccttctagctgtccagagcttgtctgatatatcacctttgttcctcactggtttgctggaggcagtggtagctgcccttttcatgaatatctatattgttggactgaaccagttattcgacattgagatagacaaggttaacaagccaactcttccattggcatctggggaatacacccttgcaactggggttgcaatagtttcggtctttgccgctatgatatgttga

SEQ ID NO: 28415 - DNA, 864 bp, Zea mays
  Peptide Sequence Number=SeqID_71790
atggcgggtgcaacaaacaagccgacagatctgaagatggacttgcgcgtctgctggactgatgtcggagggcgtcgatggcgattgatggggatcagcggtcggcagctctccctggtggagcagcggatctgggcggctgaaggtggccacgtcggcgagctgactggcgggacgaggcacagcggagagggccgcggcgcatttagcgagggcggtgaggccgggcggatctggccggtggcgttggaagcagaagaggttctcaaacgaaattactctgttagagaggatccatatggggagattcgaagagtgagaccaaagatcaatggaaattcatgggacatttcaaaattcaagcaagttgatattattcgaaatcatccagctgcaaattcacgtgaagagctcactgccaggaatccaaatgcttccagagatggaaagaaactattaaaggatattatgggagccagcaatttaacataccctaactttatttcaaaagctgaaaccgctgatgaaacatcagatgtccccgataaaccttcagctgtaaccccacaacaacatgattccagcttcccgcaagctggtaagaaacaaaaaggttttgctgctacaacacttaatcagtgttctaatgaggttaaaattccttcgaaagttaaaaataaaggattctgtaaacgtgtctttcagcctgccgacgggcattcaagtacagaatggctccaagaaccgcaggaggaggcagcccaacgtacagaagaccacggcgactccaacaaggtcgcctgcaaggggtcagcgtcgaaagaacaacgatgccatggtcaaatcggagatgggcttgattga

SEQ ID NO: 28416 - DNA, 606 bp, Zea mays
  Peptide Sequence Number=SeqID_71791
atggagtcatccgccgtgaggggcgacacccctcgccggccgtcggcgtttgccggggcctcgccgcctcctcccccgcccccgccgccgaggggttggctcgcgggtctcgtctccggcgccggccggatcctcgccgccgtgctcgggcccgagccctcctcttccggctccggctccattgcctcatctgcagcgtcggacggggactcgccgtcggcctcgtactcgccggcatggttcccgcctcctggcccgcacggcgagggttgcaatgacgccaccgataacaatgattccccagtctttcccctgagtaataatcagtcaaatcagggtaaaaaggagactgctctaaaagactacacggggtccctagcaattatctctgagattgaaccaaaggatgccataatgcaattgcttatgcaggaaacctattcaaggtccgagtgcagcaagtttataaagataattcaagagcgggttttagattcagattcaggtgatatagatgctggcaataggagaggatccaaggataatacaataacctgtaatagagtcgtgttcaattggatcactacccaagttgcatcagagtaa

SEQ ID NO: 28417 - DNA, 78 bp, Zea mays
  Peptide Sequence Number=SeqID_71792
atgaagctcggagtcatcttaagcaggatgacgaagccgacgaagctgaagagtaagaagacgaaagccgaagcttaa

SEQ ID NO: 28418 - DNA, 2394 bp, Zea mays
  Peptide Sequence Number=SeqID_71793
atgcaaatacaggaatcagacatccccttcctggctcaagtcaacaacaggtacggggaccataccgatggccatgctagctacgagggctcagacgcacttcctctaccatatgcgacaatcctcgatgcttctgagaaggggcagtacataagaacacacgaggatttagagtggttcgggccgccggagcgtaataccctactcgactgtgagatgcatactgttcaccagcagacccagcaggcgggctgtctgctggatgaccttgacgccgcctggcagcggatgggacgggacgcatttaatgctgagagggcacgtcgcccgtcagcgcagtggcaggcggcgcgtcttttcctcaataaatgcaggggctgcacgacttttcgtcagggtcggcccggtagcttatgtcatgggccacaagctgcgggtctccgcctgagcgggaagcggaggcgaggcccgcacacgtgtcggcgctggacccctgcacacaccagggtccttctcgctctggggccctgctggagttcggacttacccgaaggctccggactcgtgtataggggtccgatgtcctttcgtgggggtccggccttactggggtgtggtgtcttcccctgccacgtggcgtcctttggcctgcccatccgctggggtcaggtgtggtcctccgcgcggttaggggacgtcgcatgggtgcgatgccttcatgctgcaggagagggtacccctgatttaggatggggtgcgccggtgttctctggagggatccgcatcaatgtcgtctcttccggtgacttcaccgtcagagagcgtgcgcttgtggtgcctgactgcagtcccccgccggtcgtcatccagaaggatgactaccagccttgtggtggggagaagcaaatcgggttgcgtcctccctcctgccctcagcttcaaggatgttcatcatccgtgctggggagggggtgtgccgagttgaggctccacctccgcgtgggtagcgacccgcttcttccctcagtgtctgggggagaaaggcgttcgccgtctgtggcgctgtcagctgccgcgtgcctggcttctcggcctgggtggctctggcactgcctccggcgctgcatcctgccactagcgcagagcgtggctgctcgtccaccgcacgggcgatggtggcgctgcgcgcgggtcggccacatccacggcttctcccgctccttcggctgcactgggaggctgtacaagacgtcgtacgccgtgggggcggcgacaccgctgcccaccggtgctgaggtgaccaccgcccccagcggggctgatgtggtcgcttccgctgaccagcgggtgaaagggcggaccgccatgcaggcggcatgcaaccgcaccaagggggcgcaccctttcgacttcgacgcgtccagcatggaggcccaggcccacaagtcatgcgggcggaagcagcagtcaagtcgtcagcaggctcatgtcccctcctgggacagtgggagagccctctcccacgacgtgaagacgacgcgcctgtgttccgttcctcgaatggctcgcgcacgcacaacggctgccccgcgaaccactcatcccgtcgcattaactctgcggcaggacaggcagcaccgttggcaggcgaagcaggcgacgcttcacctccgtcatgacgaccgcgtcaaaaaagggaccgggaaaggggatactccaaaagggatccttctccgcgaaggaagcgggccccgagcccccctactgatcagaggttcaaaggctggcccctcggaagggttcaacagccgcctcagagcactcgggctccgcgcccattactggtcagagctgcctcagagcacgcagagcgagggatcaccatgggtacgttcgatacataaccaaggctcgggctacgctcccaagggctcggcccccgtctcggccttggaagatggacttcgcctcgcccgacccaagggctcggactcagccttggctccggaagacgacgaactccgcctcgcccgaccccagggctcagactcagcctcggctccagaagacgacgaactccgcctcgcccgaccccagggctcggactcagccttggctccggaagacgacgaactctgcctcacccaaccccagggctcggactcagcctcggctctggaagacgacgaactccgcctcgcccgaccccagggctcggactcagccttggcttcaaaagacgacgaactccgcctcgcccgaccccagggctcggactcagccttggctccggaagacgacgaactccgcctcgcccgacccagggctctgactcagcctcggaagacggactcgacctcggcctcggaggagcctccgcctcgcctgacctag

SEQ ID NO: 28419 - DNA, 773 bp, Zea mays
  Peptide Sequence Number=SeqID_71794
cccgagtccgagccctggggtcgggcggagcggagttcgtcgtcttccgggtcttagcccgagtccgagccctggggtcgggcggagcggagttcgccgtcttccgggtcttagcccgagtccgagccctggggtcgggcggagcggagttcgccgtcttccgggtcttagcccgagtccgagccctggggtcgggcggagcggagttcgccgtcttccgggtcttagcccgagtccgagccctggggtcgggcggagcggagttcgccgtcttccgggtcttagcccgagtccgagccctggggtcgggcggagcggagttcgccgtcttccgggtcttagcccgagtccgagccctggggtcgggcggagcggagttcgccgtcttccgggtcttagcccgagtccgagccctggggtcgggcggagcggagtttcccatggcgccttcggcagggcctgactgcctgtcagactcactctgtcgagtggcactgcagtcggagtggcgcaggcggcgctgtccttctgtcagactggccagtggagcgctttatgctgatgggggttaccagctgagaattaggcgtcttgagggtacccctaattatggtccccgacaattagattgtaatcttgccgacggagagtacgtgctcatccccgagcaaggacctgtccaagaggaggaccaggagcaggcttcagaggctgctatcgaggatctccccgcagccccagcaattgaaggcaagccccagttttatgcataa

SEQ ID NO: 28420 - DNA, 987 bp, Zea mays
  Peptide Sequence Number=SeqID_71795
atggggaggctagaacctcgggcagaaatggaatcacagcttatgggtaaagtgtgcaacctctgcagagtgttagaaactgatgacccgtatcaggtgcactgcaccgtccactgtgtcgcacggtgtcaggtcagtccagtcacttggagagactgcatcatcgcctgcacgagaagcaggagcaccgataccaggagcaaagaccaggagcagcaggactcttccccctcgcctcagcaggaggtggagtctgagaggccgccttcccctgcacctcagccagagatgccccctgcaccaccacagggcatcccgactgctggaggagaccctgacggagatggagatgacaacgacgtcggtggcagttcgagccacgacacggagcgctcggaggagccggagccggagggatggatcgctagacccatcactcgtgacgccgctcgcgagtgtcacttccacgacgctctcgataccctgttgcgtcgagcctttgagcaacacacttggtctattgagtaccgttgtgtagtctaccagcatcgtcgtgggttatacccggaccagtgggaggctacttgcttggtgcgccgtccggacgatgatctccggggcacaaaggccttctcagagcactattctattactgagagggacactgccaaggtagccatgcaggatgcaccacgacgagcactttctcagtatttctcgttgttcagtggggtagctgacgaccttgacctaaagtactaccctcgccgttcgaccgacagtgctggaggtgtgattgtctcgccagtctgtgagggcaatcccaggctgagcagcatggtgaacctggtcgccgtgctcaacacagagttggaccacacccttgacgagttgggcaaggttcgggtggaggttgcagaattgcgtgctaaatgcgcgacacgccacaatcttgatggtggttctcccgcccctgtcgggatttag

SEQ ID NO: 28421 - DNA, 318 bp, Zea mays
  Peptide Sequence Number=SeqID_71796
atggcgtcagttgtgcgcgcgaggcggctcggcgggcagcggctcggccgcttgcgtgtggtcgcggtggggccggctgcctggggcgtggacgtcggcgagtggggcagggcagggcgtggctcgcgcggcctgggttcctggcgtgcggcggctgcaggcagagtgcgcgggtggctggaggagctaccaggcgcgtgtgagcgggagagagaagcgagagaagagagcgagagagaaagggaagggagaggaagaacagcagggggcgggggcggcttggtggaggtagggaaagggcgcggccagggagactaa

SEQ ID NO: 28422 - DNA, 231 bp, Zea mays
  Peptide Sequence Number=SeqID_71797
atggcgaggtgtatggagtctgatcaactctgtggcaaatgggtaacacgacttgtgggtaaagatgcgcaacctctgcagagtgtaaaactggtgaggttgttacttttgttctactacttaattgggctgcaatgctcagctctaaccatcctctttggtaagccttacacttcacgtgagctcccacctttggcgagttcatgcacattattccccacaacttgttga

SEQ ID NO: 28423 - DNA, 276 bp, Zea mays
  Peptide Sequence Number=SeqID_71798
atgtcggggccaccagcgtcgatctccgacgccctcccggtgctggactccgccgccaaatgcctccgtcgcctagaccagatcctcggcgcccgcctagaggcagagggcagcaggctctaccgggcggtgggggattacgtgctgacgtgcttccggagccacgacccggccatgtccttggcgccggtgctcaacggtccggtggccgccacagaagacgccgcccgggagagcgtccaagatgttgtcgagacggtggtcgcgcgcttctag

SEQ ID NO: 28424 - DNA, 471 bp, Zea mays
  Peptide Sequence Number=SeqID_71799
atgctgtcgagtacatcgtcggcaacggcggaggaggtcccaactgcgcccacccccgccatcgagggtgacgcggggggcgcgtccaactccatcccactggccactttggaggagacggaagtggctcttcatgagactgaagcggcgatcctgtgggagagggaggcgcttgaggccgagcaccagcgcctcagcgactggcgcacacagctggaggagcgcaccaaggcagcatcccgccagttcgcctccgagcgacccgagctcgagcgggaccacaaggattacaaaagggacctccagaaggtgtttgccagggagctggaggcgtcgcgtcgggagaagaggctggccaagagggaggaggccctgagcaagagggaggccctcacaatagagctccgggccaagctgaaggccctagaccaaaccctggaggcccagcggtccagcaagtggaggccatag

SEQ ID NO: 28425 - DNA, 360 bp, Zea mays
  Peptide Sequence Number=SeqID_71800
atgggatccagatctctgatgtgccggctggaggcccccagcctgccggcgtggctcccagcgcccccgccgcggcccccgccccttggacaagggcaaaggggctgcaagcagttcctctaccccaggtggcaccgggggtcgaaggaagagaggcgacgccggctgcgccacgccgatgggtcatttgtttcataccccccctcagaagcgttagaggactaccggtggggccgaggaggccggctcccaggcctagggcgcgtagaggcacgtcagtcctccgccaccaccaccatcgggtccgccaccaccacaaccaccaccaccatcggtcccgccgccgccaccaccacctag

SEQ ID NO: 28426 - DNA, 99 bp, Zea mays
  Peptide Sequence Number=SeqID_71801
atggggaggctagaaccccgggtagaaagagaatcacggcttgtgggtaaagtgtgcaacctctacagagtgttagaaactgggagtgcctctgggtaa

SEQ ID NO: 28427 - DNA, 207 bp, Zea mays
  Peptide Sequence Number=SeqID_71802
atgccgagaaatatggtaaatcggttctctggaggatatggttgctggagtgacttgaccgtctaccttgccaccgggttggacagtcgactgggaccctaccttagcaggagaggagcaggaggagtgatgggccaggcttcctcatcatcctttatttatcagaacactgcttactacttttgcgaaactccggtgatgttgtaa

SEQ ID NO: 28428 - DNA, 513 bp, Zea mays
  Peptide Sequence Number=SeqID_71803
atgacggctctcgtctctcccgccccgccctctcggctcccaatgcccctccccgtccccagcaccagcatgcgccggttcccattccgaggccagcggccaactccgaggcggccatcgtcgcaactcgctctagccctggcgcatcggcttccatcccctccttgtctcctccagcgcgacgtcgctcgactcccggccttccttcaagcacgtgctagtgagaacagcgaatccttcgccgcccagccgtgtggcagcccaagagtcagcctcgacatctggaaagccctcggcgctgaggaaggtggtgcttcaactgcttgggctgcgatcaccaggctgcaggctgtggcagtgagccttggtgcttcctctgctctgagcttggccacaagtccttctcttgccccaaagccccagtgtggaagcggctcgggcgtcctagacctgcgaagtcagtctgggagcggctttcaccagcgattgaggggagggtccaacgatcggtag

SEQ ID NO: 28429 - DNA, 189 bp, Zea mays
  Peptide Sequence Number=SeqID_71804
atggcggacgacgccggtgccgctgggagcgggttcatggccaaaacccccttcccacctcacctctataaatgtgcactacatcgtgtaacaaggtttagatcgagctatgaggcaccggaggccaagaatcggtctctccggcggaagctccaccatgtggggtataaggatacacattattcatga

SEQ ID NO: 28430 - DNA, 370 bp, Zea mays
  Peptide Sequence Number=SeqID_71805
atggctcacctgatagctcggtctacacgtagtggcgggcggccgaagttcggcgacggtgatctcgttgttccggtgaggcagggcctcaatccttgcttagagaagcttcacggcttcccggggaagttgtccagaggctcgggtgaggctagggttctctggaaatggctggtcgtggtggccggcactcgggtggctcaagcgggtggcacagagctcgccagagctaaggacagggtctgggtgtgcgcggacgagcgccagtgcgtgctctggcgcatgggcacgacgtcgagcacgaggctgtgcagagagtggcttatgggttttgttgactggagccaaagatatggagtgatgaagtttg

SEQ ID NO: 28431 - DNA, 174 bp, Zea mays
  Peptide Sequence Number=SeqID_71806
atgcagatggaggcaaacgaggctgaaagcgagggagaagaggctcccgaggagttagtaccagcccctgaggatccattggacgccgatgtgtggctacgcatcgtggagtccaagtttcccctcctcacggaggactgccctgatgccaaggctcgcttcgccgcacaatag

SEQ ID NO: 28432 - DNA, 774 bp, Zea mays
  Peptide Sequence Number=SeqID_71807
atggcccgcgcccgcgcttataaaaccctcccagacttagattgtacccttccgcgcaccctcaaacctcaccggagtctagctcgtcgtcgtttgtccgtgcgcagcgagtccgcggccgcccaatccctctgccaccgtagaccggccagtggagccattcccaactccgtccagccctcggagaagactgtgcacacctccgtgaggctccccgagcgaggaatcggagtttgcttcgccggagaggccagtccacgctcgccggagctctcaaccccgccggagtacgtggaccgggtaaaccactccaccatccttcgattccttgtgcacacggtcgctacgttaccccgtgaagctcaccatgccctcggattgaaccagttcgccgtggtttggccggtatactcgccgccgacgaggacacccgcctgcacgcgtggaccgggcgattccggccatccccgacgtcaagtcgtacctcgacgtgaccgccagagtctccccgagccaaccccacccttcgtcggacctccctcgccgccgtggactttacccctcacgcgacctgagacgaggtctcccattccggttatggtgggtacaagtgcggtcactgcacgacggccagtcggggtcagtgaggcattgtacgccaaggtggtttctctggaggaaatggttgctggaataacttggccgtccaccttaccaccgggttggactgtcgagtgggaccctgcctcggctgaggaggagcatgaggagtga

SEQ ID NO: 28433 - DNA, 453 bp, Zea mays
  Peptide Sequence Number=SeqID_71808
atgtggaggctcctccgaagtcgaggtcgagtccgtcttccgaggccgaggtcgagtccgagcccccgggtcgggcgaggcggaggccgtcggctgaggccagcgctgagtccgagccctagggtcgggcgaagcggagttcatcgttcttccggggctgagcccgagtccgagccctggggtcgggcgaagcggagtttcccatggcgcctagggccggacttggctgctgtcagcctcactctgtcgagtggctcaacagtcggtgcggcgcaggcggcgctgtcctcttgtcagaccggtcagtggagcggtgaaattgactgcggtcacttcggctctgtcgactggagggcgtgcgtcaggataaaggtgtcaggccacctttgcattaaatgcccctgcgatttggtcggttggcatggcgatttggccaaggttgcttcttggtga

SEQ ID NO: 28434 - DNA, 231 bp, Zea mays
  Peptide Sequence Number=SeqID_71809
atggcgtcgagcttctccgtcgcacccttgtggcgtgcccagtgcgcccgccatccatccctgtgcacgacgcccttcctcccctctgctccagccatggtgcggcacatcctcagatccgagctcgagcacctctcggtgtcgcgcctcatgcaccccgtgtccaacgagacgcctaaaacatgcatgcatgcgcaactccactcgggttttagccagttgatggcatga

SEQ ID NO: 28435 - DNA, 1626 bp, Zea mays
  Peptide Sequence Number=SeqID_71810
atgatggtgtgtttgggcctcggcggccgcagaaaacagacactacaagataatccgatcctgcaggctcggatcttgacagttgaagggagcagcagcaccctcggcgtcaactacacctttggcgaggaacccagcttgagcagacggctcggccggccaccccgaagcctcggccagctgtcccccgaagacatcagcccggcccgaggcctcgacaactcaattccggcgtcggtcccgtcggtggacgacccggccaggctctggccgaccaagtcttcttttcgagccaactctgcctctgttcgagctgacaccgctacccccggcttcggctcatcgaagagcggccgaggggttcctttaactaagcaagagaagcctcggacagcaaggccgaccgagccgagggactcctacgcctccgggatacggatacctcactacctcgatggtggggaagcttcccccggctgccaccacatcaacaccgacgacggcgtccgcctctcccccaacgccgcaccggcgaacgcgggccgctgcaaagtgcaccggcaggacgcctcctccgcagagctgggggatggtttccaccaccagaagctggaagaggaggtggccagccgacccgtgcaggaggtagagccccggctcgcctcgctctccgccccagcaaggatggtgaccaccggtgagggggtgcagccgggccgcgtgatgaaaatccttgaagccgaacaatggctgaaaaggtaccaactcccacggagttgcgttcctccaacgacaaggcggaaggattgcgggtgtcccccatccgggggctcggaaggtggaaagacacgatgcataagggagcgcgaagacatggtcgcctttcaaggggatcaccctccttttaaaggcgactctccctacttgcgtccccagctgtcgtgggctaagtcttctccaacacactctaaggtcctcccctacggcgcgggggctgggtcccacgcgtcatgcgaaatggcccagggcataagaagccaaaccgccgcgcgcggtgcatgcaaccgcccagctgttacaagcattcctccgctttcgcccagaccagcgggtgaaagggcggacagccgcgcaggcagcatgcaaccgcgccaagtgggcgcgcccctccgacttccaacgcacccagcatggaggcccaggcccacgcgtcatgcaaccggcgcgccggttgctacgtgtgagcaactgcaccgccactcgcaccactaccacgcctcctcgaatgcggaaccagtaccgcggctcgaggcaaccctgcgtacgacccagcagtgccagccaggcgcgacggtcaatacggccaaaaatgggcctgcagtaatggcggtggcaggcgggcaggagcagcggtcacgtcgtcagccaagctcacgtcacctcgtgggagagcgagagaaccctctctcacggcgtgaagatagcgcgcccgtgttccgttcctcaaacggctcgcgcacgcgcaacggccgcctcacgaaccactcgccccgtcgcattaactccgcggcgggacaggcggcgcctctggcaggggaagcgagcgacgcttcgcctccgccataa

SEQ ID NO: 28436 - DNA, 351 bp, Zea mays
  Peptide Sequence Number=SeqID_71811
atgcggcagcacgccgagataagcttcgcaaaggtgaacgaaaatagagatttggagaatggaattagggttcaaatgagtcaggttgatgtgataaaaatcaaggaggccacggaaaaaaggagagatgggaaggccaaggccgcggagaaggaaaggagcacatatggttacctgcgaagggaacatactgttgggtcgattgcggggatcacggcagcagacgagttcgcagttttcctcttggtggccatcttgcttctcactggcaaacagagtagggaggcgagtggcggagaagattcagatgcggaaatgcaagaactaggccccgaaagcaaaggcggctaa

SEQ ID NO: 28437 - DNA, 270 bp, Zea mays
  Peptide Sequence Number=SeqID_71812
atgtgggccgtccgggtttgcaccaatctggtctcacgtcttctcttctttgttggttgtctttccccaggcccacgaaagaatgaccttacgaattattgggccctcgggcctttcgtgaggccttttacttctttagtggacccaggggatatctatcccccacaagcccccgatctttgggttgatttagagaggtcggcatttttggattataagattctggacttcatcgggtgcaccggaggtgcacccaatgggtgtagctaa

SEQ ID NO: 28438 - DNA, 375 bp, Zea mays
  Peptide Sequence Number=SeqID_71813
atggtaccgctcaagttcctccgtgcgcacaggaacaaggtgaaggaggtcatggcgatgctcagtttagttctagaagataatatattgggtgttcgttttattttagaccattggatgggtcatgtcatcgatgggataataagtgctaagttttttgtttgccttgttctagaaatgcagactgagttggcgagaagggagaaggcaaccaacatcaagccagatcatgatattgatgtctatataaagaaattaggcttggaggtctgtgctgatacactggtagggaatgagatgatgaggggtatttctggtggtcaacgaaagcgtgtcacaataggtacaagcaatgatcaaaatacaaacccatga

SEQ ID NO: 28439 - DNA, 213 bp, Zea mays
  Peptide Sequence Number=SeqID_71814
atgtcaactgagaaacgccacctagatcagatcatactcctcgccttgtggctcctcctgaaccacctgctcttctcctgtggggggtgtgagacagcaaggtttataggaagctccaatgcagggttcttgtctgaccgccatcgcagcaaaatcatccaaggacctccctacactggccacttccttactgcccttgcccctttcgggtaa

SEQ ID NO: 28440 - DNA, 90 bp, Zea mays
  Peptide Sequence Number=SeqID_71815
atggagaaaaagaagttggccacatctcttgtcttccatgtgctttccccatacgtggtgctcatgcagaaggattgggagacatgttag

SEQ ID NO: 28441 - DNA, 1098 bp, Zea mays
  Peptide Sequence Number=SeqID_71816
atgctgcgcggaagcgtcgggcggtcgttaggaggcgcgaagtctgccgccctcggcagtagcaaaccagcgccggctgcgaagccggccgcccctgggcctagtaagtccaaggctgttgcttctggcgtgggcaaacaacccttaggcaagcccgcgaaggggcgaaggttgccttcgccgctgcgtactgacgaggcggcagcgcatgttgccgacttcgacacagacatctgcgtgggggattatcttgttgggtcggatgtgggacagctggctgctgtcccgactctggtggtggccacttcgccgacggtgacggttggtgcgaagggtgcttcgcaggacccgtggtccgccttctgcgcgagcgacgcgatttcgtcggccgccgccgctaaggatgtggcgggctctgtgtcccatcaactgaggcatgcatcacagcagctgaagcatgcggccgaattcgccgaccatgttgcgtcgggcgctttgacttcagagtttgctgccaaaatcgagtgtctccgggcgcagcatacggatgcggttcgggagaagtctgctgcggaaaacaaaagccacaggctggtggagaggctgactgctgcggaggccgagagggtggatctccggcgtcagctggtggaggagaggagggacgcgaacaaggctattgccgatgcgcaggctgctcaggcagaggccaaacttgcacgggcagaggccagtctcgcccgccaacgcaccgaggagctggaggcaaggctcaacagcctgcgcaatcacgtggataaaaccgaggcatcgatgcgcgcggaggtcgagcagacgcatgcgcggctcgtggacgcgtaccaggagctgggtgcgcggaccgccgccttcgaagtgcccggccaagaggtgggcctccgcttcctcgagtggctacaggaggagctggaggtgctcccgacaatcgtgacgagcctcatgtcctttgcctccctcgtcacctgcgagggggtcgtgaattctttctccctcgaggggtgcgggcattttgaggtcttcgaccagtcggacgaaggctttgaacgcgaaatcttctag

SEQ ID NO: 28442 - DNA, 477 bp, Zea mays
  Peptide Sequence Number=SeqID_71817
atgcagtacaatggatcaagcagtctcattagctgcgagaagcagaagattcaaatcaagtttttcatccttgcaaggctctggtgctggatccagggctacctcctgagcagctccttgctccggcacgaggacgtactctccgtcagcaaggatacagtctatcgaaatgcaatgaacattgcccgcaagaaagaaaagggtggcgcggcttaccggcggtgggataggtccggcgaagggcagggttggctcggggaggctctggcggtcacagcgatgtacggctcgacgacggggatggccggaatcgctcggtccacagaccgtgtgcacaaggaatcggaaaatggttcagtggattacccggtccacgcactccggcggggttgtgaactccggcgaccgtggactggcctctccggcgaagcagacttcgattcctcgctcggggagcttcaccgagatatggcctag

SEQ ID NO: 28443 - DNA, 915 bp, Zea mays
  Peptide Sequence Number=SeqID_71818
atggcgtggagcggtggcgagagtagcgtgtaccctctgtggcagaggctggacggtggtgtatctgtgctctcggtgaggaagcgacaaatttttgttgcttttgctccaaggtggtatcaaatgaagaaatacaagagtgaagatgcgggaggacgtggtcctccatataagactttttgttttaaaactatcgggaggagtttttgcctcccttgcttccgcatttctttatcttcgatgttctgtaatgtctgcaagacgggtgaaacggtcctgatgaatcgacaagaagctcctacaggagttggagagtttctacgagattttggtgttccagtggtcctatggcgactacttcaagaagttggatacaccgaagcacccaagtaccagtggtcacgcactattcttagaggacaaccatggtatgaggtagtagtgcgtattccagagcgtgctagaaaaccatcttggccatattggatgttccatgctgaaggaatgactccttgggagggtgctcaggtagctgccttagaggtgctaacaaccatttgttaccagaaaagggaagaaatacaagccacatctatgaggttgttccctgcagttgccttaagtgacccattggtgtatcatcaccaggcccgattaatggaaagcattcctattgggcaggattctgttgaatcggcatctgctcgagttttgttggccgtgctagagttgcaacttactcgggggcacagtcgtcaaaagtggcagcagttgtacactgggagttatgcagcatttaagatgatggaaatggccaagaatagtgcttgtacccaagcacaagaacgacttgaggaaacaaaggttcaagcggaacaggttattggactagagcatcaggtgacagaactttag

SEQ ID NO: 28444 - DNA, 261 bp, Zea mays
  Peptide Sequence Number=SeqID_71819
atgacgcgagagcaagtacaatccagcatgaacaataatgtcttcatctcgaggaccttcagcgaggaagaagatcctcaacatcactttactaatggtatcttcgtcttgaggaccttcggtagagaagaagacccccaacacatccaagacgaagggtgtgagacagcaagggtgagctcacacatgttcatcgctcaacaacttgtgggaaataatatccatgaactcaccaaaggtgggagtttatatggagtgtaa

SEQ ID NO: 28445 - DNA, 1011 bp, Zea mays
  Peptide Sequence Number=SeqID_71820
atgaaggagattccaacaaacgggccccacctgtcggcgaacaagcagatgcgcgcgcgggtccgagagtgtgatcggggacaagccagatttggcgtccgcatatctccctacctagggcatatctgccatggggactcacatacaagagacagccctaggtgccaggaggaggcctgcgccggatttttgccaagattcacacgcttgcgatctcggcgagctgttgaacacgggcacaagaacacttccacgtgttcgacgcgctctgagcgcgccagagcacgcccgcgcccgacctcacgcgcccccgcgccgcgccgagtcatgcccgtgtcccctgctcgcgcccgcgcctataaagcctcctcaggcatcgaccacactcctccgcgcacgctcgacctcaccggagccagaaaccaccggcgtttgccctgcagacagcgtgcccgcggccacccgatcccccgccaccgtagaccggcctgcagagcccttcccagccaggccagaccctcggaagagatcgtgcatgcctcggtgaagctccccgagcaaggaatcggactttgcttcgccggagaagccagtccacggttgccgaacttcacccgaccgccagtgaatgtataccggatcgttgtggttaagccggagcactcgccgccgacgagatcacccgcctgcgcgcgtggaccggccgattccggccaccaccgccgtcgagccgtacctcgctgtgaccgccaggacctcccgaagccaaccccgcccctcgccgaacctctctcaccgccgcagattgcgctcctcacgcgacctgagacgtggtctcccattccggttatggtgggtacaagtgcggtcactgcacgacggcagtcggggtcagtgaggcattgttctctggaggacatggttgttggagtgacttggccgtccatcttgccaccgggttggactgtcgagtgggaccctacctcggctgaggaggagcatgaggagtga

SEQ ID NO: 28446 - DNA, 141 bp, Zea mays
  Peptide Sequence Number=SeqID_71821
atggcatccgccgcgaggggcatggcaccgtcgctctgcgtgatcggatggcagcgtgacgagaaagtgaccgaggacccaggtgttcagctggtggagactgctgagcgggagctcgttgaaggcaagttgtgcccttga

SEQ ID NO: 28447 - DNA, 258 bp, Zea mays
  Peptide Sequence Number=SeqID_71822
atggcagatgaagccataaggcaaaataaagaagagtctcatcttgtcttagaagaggcaagaaaagctgatgaggctgctaagcgcgaaagacatatagctgaaatgtctcctcctctggagccatacaaccctgacgccgatccagccctgaaggatactcttgatgaaatcagaatagtaaatgcagcaattgacgaagttgtggatagacttctaaacgaagctaatgagagagtcctaaaggaggatgattag

SEQ ID NO: 28448 - DNA, 180 bp, Zea mays
  Peptide Sequence Number=SeqID_71823
atggccttccttttttggcttcaggcctcacttaaaaggagcccttcttggttggtgtccagcagcgcaagggcagcccttggcgctactgccttcttcggcggcatggtgaaggtagctgttcaagctcttcctgtcgaatgtggtcgtttgagttcaccgaagcttagtagaaggtaa

SEQ ID NO: 28449 - DNA, 597 bp, Zea mays
  Peptide Sequence Number=SeqID_71824
atggcagtagcagccatcctcgtttctcaggcaattcaccccagcacttcaagcaaagtcaccctcaaggacaccagcaccaacagtagtatcagaggcatttccctcagtagcagcagcagcagtaccgccagaacaaccagacacctcgccttcctaccccagcaaccaatcagagcaaccaagcagctccagcacaaggaggaggccgcagatgtttccactgtgggaaacaagagcgagcactacaccctgacctccattgacggccctccgacaaagccaactacatccccaggttcatctaattattcagctaagggtgtcccattcaacccacatggtgcactattatcccgggtggtcactcaacgaacaagtccttacggagaggatcgcagatcaatgaccaggattagatctgagcgcgagcgcaagcggagggcatgggcgagcactgacaagcgggccaggggtgtcagcgactggggtgggagccgggctgaccagccgggcccagcactagggtgcacaggcactgactggcggggcccaggggcagagtgcacggacgcgaaccgatgtctgcagatctga

SEQ ID NO: 28450 - DNA, 342 bp, Zea mays
  Peptide Sequence Number=SeqID_71825
atgtgccaaccatgcaagtggaagaacctccacagcgtgaagcgtggcgacggaggaacagacgtcggaacgtgcgtcgacatcacgatgctggggaatgggacccggcacaccctgtatcccgggacgaagcttcaaatgtgggagaaactcccgacgagcgagtacaccaagaaagacggaattctcgccgccgtgattgtcgacaagctcaggatcgagagtgggagaaagccgagcaaggtaaatgaagtattatttgaggttggtattgtatttgaagatgatgtggttttatactttcagaggtgcttgttgctcatcaagggaagtgggaagtag

SEQ ID NO: 28451 - DNA, 237 bp, Zea mays
  Peptide Sequence Number=SeqID_71826
atggtgaatggcggcactgcggtcacgccaaacttcggtgaggaattcgtgcccccggggtggacacagcccccgattcgcccccgtagatggtcagtgcatcaaagggagcacctagggccacacgtcgaggttcttgcgatggcgtgcagcaagtttggccgcggcggcgttgatacggccacagggagtacaccctcgatacagccctttacccacacgcacgcgaattcttaa

SEQ ID NO: 28452 - DNA, 177 bp, Zea mays
  Peptide Sequence Number=SeqID_71827
atggatgaaccaagtgcaaatctagagcaaagccaaggggctgcttcggtctggggcaccggactgtccggtggtgcaccggacagtgtccggtggtgcaccggacagtgtccggtgcgccaggctgcctcggccgaagaggccgctctcgggtttttctccggcgacttcggctaa

SEQ ID NO: 28453 - DNA, 252 bp, Zea mays
  Peptide Sequence Number=SeqID_71828
atgtctatgcgaccacaaggtagtcgcacccagtcgggtaaatccaggatagcccgtgcaagggctctccacgaaaactctccggattggtcttccactcatgctaccgccatactcctgtacgtctgcaacctacagtttgctctcgtgtacgccatcggattgagctatgcgtttatcctctctggacaaatcccagatacccataaaccactcaacggaacggataaatttccaatgcttcatatttaa

SEQ ID NO: 28454 - DNA, 881 bp, Zea mays
  Peptide Sequence Number=SeqID_71829
gcccgagggtcggtcgtcctcatggcggggatcctggcgtgggcggctgacgtggtcggcggggccggcggcagcgacgacgaggcggacgacgacgcgcgcgccgcggcgtcggccgccatgaccccggcccagcggctccgcgccgccgacctggacgcgcgggcggcctcgctgcgccgcgccatccaggacctccgcctccgggtgcccccgccgcacgtcgcgcagcgcctgccccacctccacgccgactcactcgcgtcgtccgccgcgctcgcgctccagctcaacgcgcactcctccaccaaggagcaggaaatggaagtaacagagcataatttaaagacacagcttgaaaatgctctgaaggagctagaggctgctcaacataaagcatcaacagcaacctctggaacagctgaaaatgctctactggaagctaagtcagtgactgaccttaaatctaaagatttggaggagaagaaaagggagcttgaactattggataacaaggtgcaaacattagagaaagagtggtctgtggttgaagaagaatctttaaagaaacccactcctgcacaaagggagaaggtcctggagaggcaactgcatagcctcatcgagcagttgacagctaagcaagctcaagctgaaattctggccactgatgtgcattccaaagaaaaggagctggaacggctgaaccatctgcatagaaacctctacggcggtgccaacgaaactggcgcaccccggagccgcctcagcagaggcctcttgagcggccctgaagattactattacgaccctaaagcgggccggaaaccgtaccaggctggcgctagaacagaaggccagaaccggctgatgatccttag

SEQ ID NO: 28455 - DNA, 828 bp, Zea mays
  Peptide Sequence Number=SeqID_71830
atgaagtcatattcaattcatgcggcaaccatgcttatgtatcctattatcatctctggttcattcagtcatacaatttctctgaagttacatctctttcttcatgactatagtgataatgcagaactgggcttagcacgagtaggagtgtgcgctcgcgacggcggcttgcacaggaatcactggaccaagataaagtcggcggtgaaccagattgagacgcacccttacttccagcgcgactctcttgtcaagttctgccagaagcacgggatctgcgtgaccgcgcacaccccgctgggtggctccaccaccaacgccgagtggttcgggagggtgtcgtgcctggacgaccctgtcatcaagagctcggctgagaagtacggcaagacgccggcgcagctcgtcctccgctggggtctgcagcgggacacagtggtgatccccaagacctctaaggtggagaggctgcaggagaactttgacgtcttcggtttcgacatctccggcgaggacatggagaggatgaaggccgtcgaccggaagtaccagactaaccagcctgccaagctctgggcatcgacctgtgaaggcaattgtaaggatctgagaaccttgagtggtcgcatgaaaaaggttggacagtacctcttgcgcaggcgaacacattatatgtctcagtttgagaaattagctatggagctcatgccaaaattgggagaacactttgttgaagaaatgataaacccaagcatgtatggaagccggtggtttatcacagttttctcgtgttccttcccatttcatctaactcttagagttttgtaa

SEQ ID NO: 28456 - DNA, 684 bp, Zea mays
  Peptide Sequence Number=SeqID_71831
atgaccgaggaccctttaactggtcacatgcctcgtcatgggatccactttagtaagcatttctgcaaaacagagtctttgattattgagaagccttaccttgactcccttataaccagcatacccttgagagtcttttctttagtcgggtggtaccaaaggaagaacgcaaggaatgaagtgcgggaggaaaggatcctccatttaggacttttgtgtaaaaacttatcgggaggagtttttgcctcccttggtgggcctaattacttgggaggttccgtcacagctggtatcagagcgaagcccttctctgcagatattataaggaatgatctatgggtcgtggatggtgaaagaataaacgaattgagagcagccatccgctacttgcaaaaccaactcgtgaaacgagatctagcgctcgattgggcggttaactctcgtccactcgcctgggctaaggaagccaaagctcgagcccgcgtggaggagcttagctcagccatggataacttgcaggtcaatacactacatgaagaagttcatgtgttgtattcacaactgcacccgaacgtccctgcggatcttgtcgggatggaagccggaccttctagagtagcgggagaagcacttggtggtgaactgaaccttttcaggaccccctccctctacgaagttggttga

SEQ ID NO: 28457 - DNA, 564 bp, Zea mays
  Peptide Sequence Number=SeqID_71832
atggcgggcgactctccctacgtgcgcccccaaacgccacgggccgagtcttctccaacacgctccaaggccctcccctgcggcgcgggggctgggtcccgcatgtcatgcaaaccagctcagaagcagaagaagccaaaccgccgcgcgcggtgcacacaaccgcccagcggttacaagcgattccccactttcgcccagaccaacgagcggaaggggcaggcagccatgcaggcggcatgcaaccgcgccaggtggacgcgcttctccgacttccgacacgccggcttggaggcccagacccacgcgtcgcgcaaccagcgcgccagtcgctgcatgcaagcaaccgcaccgccacttgtgccaccgtcgcacctcttcggtcgcggagcctgtgccgcgactcgaggcaacccagcagcgccagcctggcgcgacggtcaaagcggccgaaagtgggccggcagtaatggcggtggcaggcaggcgggcgcagaagtcacgtcgtcggccaggctcacgtcccatcctgggacagcaagagagcctcctcccacggcgtga

SEQ ID NO: 28458 - DNA, 1029 bp, Zea mays
  Peptide Sequence Number=SeqID_71833
atggggggtacccgccatctttccgtctcctcgttggaggaacgcaactccgtgggagttggtacctttcagccatcgttcggcttcaaggattttcatcagccggcccggctgcacccccacgccggtggtcacccaagatggtcaccctctcccgcggcgttcgagggaggaggcgctcactgccctgcgggcggcgcggacttggacaacgtggggctgatcgacggcgggcgtcgtcacctccagcgtgtcggagtcgtcggcttgggctcccggcggcccctcctgccggggggcggctgccgcgccgtgagcacgggaggaccacccacgatgccgcgcgctgctagggcggcgttcgtgttctggggtggccctgcttttgcacctggatggcgcccttcggcagaggccggcgccccactcgtctgggaggatttgagtggggatctgccggggggccggcggcccccgctatcagcgccgaggcggaggcggcccgagaagtccccgtcgccgacgggatcactgccaccatccacgccctgggcctccggttcttcgtacttgtcctcgcccctcgagcgtcggcgtgggcgagggcaagattgcagcagtgcccaccctgaggcctgcactgtcgtggctcggccatctgggaccccttggccgctcttcgatgagccgaggccaggggtagcgatatcagtacgaacagaggcggagttggctcgaaaatgggaacctggttggccggagcctagccaggttgcccgtcagcgggggtcgacgtcggagtcgatcagccgaggcctcgggtcgggctggcgcccttggaagaggcttggccgaggccccaggggtaaccggccgagccgcctgctcgggccggattcccagagaagtccctggaccgcgtcgtcgtccgaggctgggtcggacctcgctgaaggcgtcgtcgatgccgagggtgctaccccccttcagcgtgaagacccgagcctgcaggatcagatcgtcttgtag

SEQ ID NO: 28459 - DNA, 1140 bp, Zea mays
  Peptide Sequence Number=SeqID_71834
atggcgtccaccgatgcgcgcttggcggggatcgcctcctccatccgcgtcatccctgacgtccccaagccagatcctcttggagttcaaggaagaaaaattttaggacaaggaaaatatggatgccgtgagtgcatcaagtgggcacagaggcaaaacgagtaccgagccactaggcttgtgctgtcctcgctcgacccgccgtcgtcgcgcgtcgccgtcttcggcttctgcaggctctttggcggcgacgacaagggcaggaatggcagttgcgccaaagccaagggatgtgccactgatctcgttcgtacctcctgctccagagctttggtggagagcaagctacttagtggaactactctcattgtagaccgctactcctattcgggagtggccttttcagctgctaagggccttgacattgagtggtgcaaggctccagaaaatggacttattgctccagaccttgtaatatatcttgatgtacaaccagagaaagcggctgaaagaggaggctatgggggtgagcgatatgaaaagatagagttccaaaagaaagttgcagagcattaccattcactccgtgattcgacatggaagtttgcactttgcagtgatattagtggaatgtcagagctaatgtttctaaaatgttccaaagctaagaaaaaacaagaacaccaaaagaaagtgaaatgcaggaatgcgtccaagcaagtgcatgctctcgaagtagctggaagagaaactgcacctcctgtgcctcgagaaaagtttgagaagagatttgggcagtcagatgcatttttggcttcaacattgcaagataatggtgaaggttgtcgcttcgacatgctcaaaagccttgatgattgcatccatgtgctaagttgtgggtacgagaataagacacaatgggggaaagaggttggttggatttatggatctgtcactgaggatatcctcacgggcttcaagatgcactgccatggttggcgatctgtgtactgcatgcccaagagaccagcattcaagggatctgcacctatcaatctcactaatcgtctccatcaagttctaagatgggcacttggctctgtggagatcttccttagcaagcactgcccaatatgttga

SEQ ID NO: 28460 - DNA, 104 bp, Zea mays
  Peptide Sequence Number=SeqID_71835
atggccttggaccgcgctgtgacggctgcagcctgtggggatggggcgggcgcgctcgcccgcgagatgtgggcgagggagcgcgaggcgatgggcggagcatt

SEQ ID NO: 28461 - DNA, 954 bp, Zea mays
  Peptide Sequence Number=SeqID_71836
atggcgtgggaaaataaaatcataggggattgggagcgtcgccgcctgcggaatatgcgcaatggagagttgggtacagtttacggtcgggaggagggtatggcggtggtgggcgtcctcgcgctgcagggatcctacaacgagcacatggccgcgctgaggaggatcggggtgaagggggtggaggtgcgcaagccagagcagctcctcggcatcgactcgctcatcatccccggtggcgagagcaccaccatggccaagctcgccaactaccacaatctggtgggtgggtccttcttcttctttgtctccgcttctcccgtggccgacgcctctgcagggcagcctcccctccaggctctagggctgccaccacccttgttgcgtcgcaggccccccaccctagggagggtactaggatcagatggacaacatcgccgtctgctggatcctggcaccatctcccctgagctgcgccagatcgacaggagcataatgttccctgcacttcgagagttcgtcggaggtggaaagcctgtctggggaacctgtgctgggctcatctttcttgcaaacaaagcagtagggcaaaaaacaggggggcaggaacttgttggaggattagattgtacagtccaccgaaacttttttgggagtcagcttcaaagctttgagacagagctttccgtgccaaagctttcggagaaggaaggagggaatgatacatgccgcggtgtatttatacgggcacctgctatattggaagtaggtccagatgttgaaatattggcggattgccctgttcctgttgacagacccagcattacaatatcatttggggagggtactgaggaagaagagtattcaaaagatcgggtaattgttgcagtgcggcaagggaacatcctcgcaactgctttccacccagaattgacatcagactccagatggtaa

SEQ ID NO: 28462 - DNA, 156 bp, Zea mays
  Peptide Sequence Number=SeqID_71837
atgggtacccccgaaacccgaatatccgacgggttttacccgatacgaaggcggcttgcgtctcccttgtgcaggcaaccaaataggagcttagacagagtcaacgcatacggtagtccaagacgagacggtgcgggtaaccaaacagatggatag

SEQ ID NO: 28463 - DNA, 534 bp, Zea mays
  Peptide Sequence Number=SeqID_71838
atgggcgtggactatgggcgtgcgctggagcagaacccggcgctccgcgacgcggcgccggagtccatccacgcggtggtgtcgttcctccagtcccgcgggctccagttcaaggacctgggccgcgtcttcggcatgtgctcgtccgtgctgaccgccagcgtccgcgccgacctccgccccatgttcgccttcctctccgcggacctgggcgtgccggagtcggcgcaccggcgcgtggtgatcaagtgcccgcgcgtgctggcctgcagcgtccgcgaccagctccgccccgcgctcatctacctccgccgcctgggcttccgggttgggcggagactcgggtggacggcacgttactcaaaaatgggcagatcaaacggcttattctttggcaggccttcagtgtctcttgacgatgacgacagggagagcgcagaaaacgcctttgctggggattctttatccatgtccaagaagaaacgatgcctagcacaacgagcttttcagagtcagcgacaagagggcggctaa

SEQ ID NO: 28464 - DNA, 1326 bp, Zea mays
  Peptide Sequence Number=SeqID_71839
aaaaatgaatgcaccgcgctgaaaaaggacagaacaaagaaagatcttcaaatcaaagctaaagaagcggagattcaaaatctgaaaaaagctaatgtcagctccatgaaagatgtttgcagtgcagggatgaacattgatcagtcctttcacgcccctgcaaatgaggctttgcatactggggtttcttctaggcgaacagacaagatgagtggcaaagataaggatgcccattcattgcgagacgatctctatctaaagcaagggcatcaaactgatttacttgaggctttagaactgaggcgtcgcaccatgattgataacggaatgagtacatctggagtagtgtctctggaggaggacacccattttgaaccaagaaacgctacatgcaaggaaattaaggcgataggagtccagacagataacacatctgacaatgaacatcttgactgcaagaaattattggttgagcgtatatctggtaacctacgtgcaatgtggggcatgtcacctaacagtttatcaagcaggaatttgatatcaaagatcaatgtttcttgttcagaagaaattttgtcacttctccagcatacgagattgtcagacaactgtgaaccctcttctcaagcaatctcctccatgaatgaagctatttcccaactgtatgacacgttcattaagttcattaagatgaatagtgggaagatgtcaatacaaactttccttgaagcattgctaaatctatgtgcttttgatgatgctgctatagtcagtagaactttgagggtattcctcaaagttttacagcacttactgcaacatggagccaagtctagtgaaaggaacaatgtttctgttgaaccatatgttaacgtactcatggagaacaaccacaaagactgttcgaccttgttgagaccagtggatgcagaagattcattgagactgcataatatgtttcttccttttactttctggagttcacttttcactggcatgcttcaaattggggtcaagtactcacaagagacaattcgtactgatgcattatccataatgattctcattgtaaggacaacagatcccatagaggaacgccagaaattcggatttacttcagtaatgacgagattgcatctgctattgcagaaagagaacggattgcttgttaagaagcattctgtgcgtctacttttcttgcttctgaattgtgaacactacaatgtgcgcaccacattctgtggactagctacttggtgcccttggttttgtctttttgatgatgtttttgcctggttcttggggacatcccatcctgcataa

SEQ ID NO: 28465 - DNA, 783 bp, Zea mays
  Peptide Sequence Number=SeqID_71840
atggcgcttcctgttgatgtggcgggcctgtgccctaggtcgggcgacgtgggggctcctccgaagccggggtcgagtctgtcttccgtggccgaggccgagcccccgggtcgggcgaggcggagatcgttcgaccgaggccagggcggagtccgagccctggggtcgggcgaggcggagtttcgtcgtcttctggggctgagcccgagtccgagccctggggtcgggcggagcggagttcgccgtcttccgggtcttagcccgagtccgagccctggggtcgggcggagcggagttcgccgtcttccaggtcttagcccgagtccgagccctggggtcgggcggagcgagttcgccgtcttccgggtcttagcccgagtccgagccctggggtcgggcggagcggagttcgccgtcttccgggtcttagcccgagtccgagccctggggtcgggcggagcggagttcgccgtcttccgggtcttagcccgagtccgagccctggggtcgggcggagcggagtttcctatggcgcctttggccaggcctgactgcctgtcagactcattctgtcgagtggcactgcagtcggagtggcgcaggtggcgctgtccttctgtcagactgctttatgctgatgggggttaccagctgagaattaggcgtcttgagggtacccctaattatggtccccgacacccgggcgccctgataagaagagaacaagttaatgtcagaacacacatgaacattagcaccagtatcaagccaccagctaggtga

SEQ ID NO: 28466 - DNA, 792 bp, Zea mays
  Peptide Sequence Number=SeqID_71841
atggtcccaatcacagcaactggagaccacacagcctctaattggatacctgctacaatcagcaatggcaacggcactggtggcatgttcactgtcgcaagcagaaagtcgaggaatgggttccaattttgtgctgtcactggagacccaggctctcgcaatgtgtctgatgtaaacttcccaagtgattacacagaacttctgacgcaggaaatcgagttccctacagctggactacaaaccgtaccaggtgatggcgaagggggaaatgagatgactggaagcatgcttctcattagagaattttgtgatcgcttcgtacctgcagagaaagcaactcgaaccagagtattcttccctgaggcgaatgaggtttcttttgcaagacagtcagcctttgaaggatgttcgctgaagctagattatcttacgaaaccatccttgttcgaagattttggtttcacaacgaaagtgaaaatggcagatcgtgtgaaaccacaagacgagacattcctcgtggcttatccttacttcaatgtcaatgcaaaagattatccggcgttcttctacccaaaacttgcagagctttccaaaacattcctcccgaagctggatacggtttactatatccacaatttcaagggagctaaagggggaacgcttttcaggtgttaccctgagccttggaaggtcctgaggaaggcgtcgtctgggaactacgtctgcctgcatcaacaagaggagatgccttcgttgaaggaagtggccctcgacatccttccttctgtatag

SEQ ID NO: 28467 - DNA, 1134 bp, Zea mays
  Peptide Sequence Number=SeqID_71842
atgaagcacccgctgcaccgcgacggggagtcgtacccgtcacctccgccgcagcggcggccgcgcgggttcgcctccgctcccgctcccgcggcgggggcttcgccgcggaggcgaggtgtgcaggagcgggagcgggagcgggagaaggagcggacgaagctgcgggagcggcaccggcgcgccatcactggccgcatgctggccgggctccggcagcacggcaacttcccgctccccgcgcgcgccgacatgaacgacgtcctcgccgccctcgcccgcgccgccggctggaccgtgcaacccgatggcaccaccttccgctcctccaaccaaccactcctgcctcctcctccccagctggaaagctttagcgttgctatcctaacagattgtagttggtgctacttgcagcacggagcattccaggttgcttctgtggaaaccccagctttgatcaacactctgagcagttatgccatcgggacaccattagattctcaggcatcagccctacaaacagatgacagtctgtcaccatcatcactggactcagttgtggcagaccgacgcataaagactgagaaccacgggaattccagttcagtcagctctctcaactgtatggacaatgatcagcagttaacgagatcagtattattccccgatgattacacgaaaactccatatataccagtttatgcttctttgcctatgggtattattaatagtcactgtcaattagtggacccagagagtgtacgcgctgagctaaggcaactgaagtctctgaacgtggacggggttgttgttgactgttggtgggggattgtagaagcctggactcctcggaaatatgaatggtctggttacagggacctttttggtataattaaagagttcaagctgaaagttcaggttgtattgtcatttcatgggtctggagagactggatctggtgatgtgttaatctctctcccaaagtggatcatggaaattgcaaaagagaaccaggatatattttttacagaccgcgaaggtagaagaaacacagaatgcctttcctgggggattgacaaagaacgagtccttcgtgggagaactggcattgaggtattgggtcacacttggtaa

SEQ ID NO: 28468 - DNA, 807 bp, Zea mays
  Peptide Sequence Number=SeqID_71843
atggaggtactaagtgatccagagaagcgtgcaatttatgatcagtatggtgaggagggcttaaaggggatgcctccacctggttcccagagccggtcctccacaactgctggcccaagtggtccgagtaatttccattacaatcctagtgacccagatgatttctttgctgagttcatggcaagcaacaagacttactcctttgaccatgaccggaggcgattccagccaaggtcacattggacttcagccaggaacagtagaagtgaagctccttctggttcacagaaagagaatggtgccagtacaagcaatatagaaaagccaccacctgtggagaaaacattactttgtactcttgaagagttgtataatggaacaaaaaggaaaatgaagatcactaggaatgttgcaaagccagatggggaaccaagattacattccccaacaaaaggcgataagctacatggccagttagcacaagacctgacctttgtcctcgattcgaagccccatgatgtgtacaatcttgaagggaacaaccttcttgtaaagcaggtgatccctctggtagatgccctcgctggggcagagataaacctcacaacccttgatggtcggaatctgcctgtgagggtggaggaagtggtgcgccctggatacgaagttgtgctggagaacgaagggtggccgatcaggaaggaacctgggaagaagggaaagctggtaatcaagtttgatgtgaccttcccgatgaggttatcgccgtcacagcgggcagccatcaggcgaatcatgggcagctaa

SEQ ID NO: 28469 - DNA, 381 bp, Zea mays
  Peptide Sequence Number=SeqID_71844
atgggcaagaacaacaaacgcaagcgcgagccgactcctccatcagaggactttagcgactcggaatactcagaggaggagttctcctctgagtccgaggggtctctagctcccgtctctcccccagcgtcgtccgatgactcgggcgactctcaggggattgccgcggaggtctggacttacatccgggctgtcgagcgctccgggctcgagggctcggatgagtcggagtactcctcggacgaggaggactcgcccgaggaggacggcaaaggtgacgacgacgacgacgacggaggcgacggcagcgacgacggtgacggcggtagcaggggcggcgacggcggcagcagcaagggcagcaacaaggccagtggctaa

SEQ ID NO: 28470 - DNA, 204 bp, Zea mays
  Peptide Sequence Number=SeqID_71845
atgaaggcgtggggggtcatgcgcgagcgcgcctacgcgttcgaccttgtcctcaccgaggtcgccatgccctccctctccggcatccagctgctctccaggatcgtcgccgccgacgagtgcaagaacatccccgtcgtcaataaatattgcgaaaatatgtatgcgacattggatttgtggccatacaagagatcgggtccg

SEQ ID NO: 28471 - DNA, 246 bp, Zea mays
  Peptide Sequence Number=SeqID_71846
atgagggcgtgggcgcgctgggggccccagggcaccgagaagggctcagggagggataagcctccatggcgaggtcactcgtgtgtcatgggtgataaccaatggagcagtggtgtagtgattgcgaggagtcgtttgttcggagccttggatcatcaacgtcgagatctccacccagtcaagttatcatacctcacgaaagatcgggcctcgtactctatcaagaagcatgaaggcaagacttag

SEQ ID NO: 28472 - DNA, 255 bp, Zea mays
  Peptide Sequence Number=SeqID_71847
atgaccggagtagagctgtcctcgacactaggcaacgtggccacgcgcatggaacaccggcgagaaattgctggagcaccggccacgaaacttcccctgtgtggccacgttcatcatcctggcgacatctcgaagtgcccaggccgagctcgtaccctgatcggcaacaaaggcgtgggccctcgacacacggtggctccgtggcggagggtagccccacttatcgccaaaccccagcctcttatgttcaggtga

SEQ ID NO: 28473 - DNA, 396 bp, Zea mays
  Peptide Sequence Number=SeqID_71848
atggctgaaaggtaccaactcccacggagttgcgttcctccaacgatgaggcggaaagacggcgggtatcccccatccgggggcttggaaagtggaaagacacgatgcataagggagcgcgaagacatggtcgccttccaaagggggcagcgcctttggcaggagaagcgggcgacgcttcgccttcgccataatgaccgcgtcagtaaagggaccgggaaagggggataccccgaaaaggaaaggccggcccctcggaagggttccacggccgcctcaggctactcgggctccgcgcccattactgatcaggggttcgaaggctggcccccgaagggttcacagccgcctcagacgccgagcgaggggatgaccatgggtacgttcaatacataa

SEQ ID NO: 28474 - DNA, 264 bp, Zea mays
  Peptide Sequence Number=SeqID_71849
atggcgcctcctgttgacgtggctggtctgcaccctaggttgggtgatgtggaagctcttccgaagccgaggtcgagtctgtcttctgtggccgaggtcgagtccgagcccctgggtcgggcgaggcggagttcgtcgtcttctgggactgagcccaagtccgagccctgggtcgggcggagcggagttcgccgtcttccagggctgagcccgagtccgagccctgggtcgggcggagcggagatcgcagtcttccggggctga

SEQ ID NO: 28475 - DNA, 315 bp, Zea mays
  Peptide Sequence Number=SeqID_71850
atggagcctggcggagggacagctgttggagcggtcgagtccttgctgacgtcctcttgcttccgtaagggggctgagagccaccgtcgtcacagagtatgcggggcgccatcattgcctatctggcggagcgagccagatgggacaccggtcttgttccctgcggcccgagtcagctcggggttgggtgatgtggaagctccttcgaagccgaggtcgagtctgtcttccgtggccgaggtcgagtccgagcccctgggtcgggcgaggcggagttcttcgtcttctggggctgagcccaagtccgagccctag

SEQ ID NO: 28476 - DNA, 327 bp, Zea mays
  Peptide Sequence Number=SeqID_71851
atggggacggctgcagctcccggcctgtggtccaccaatcttgcgcttacggtcttccatctcccggcgcttcctctcagtcattattgctctatcaatcaggtgctaaaaggtaggaaagctcccgctctgtgcgcaaccagtcttcggcgtctatggggtttgcagagtgggcaaacacagggatataacctctcaagaactccgcacgcttgtctcttggcatctgcggcatctgcacttgcggttgaggctgaggttgttgttgcacttgctgcaaggctgccagggtctgaccaattgcttgaactgcctaagtctgcatga

SEQ ID NO: 28477 - DNA, 522 bp, Zea mays
  Peptide Sequence Number=SeqID_71852
atgccaaagctcaagcttaccaggaaagtcctaaacgaatggtctaaagtttgtgctcaagctgcaaacgatctattgacaacaaagggtactgttgagcaccatatgtgccacctgaaaaagcccgggccacggacacttcgtcctttggcgtggacgtcgaatgaagatcatcaggaatttgaggaacacaaggagcagctgatcaaggaggccaaggcgaagtacctagccaatttcaaggtgtggacaggggttatgcaaaatgattataaaaggctaggatgtgcgtttgataaatttgttgtgaccaattttccattgcacgatgttgagactaaagaaaacacacaaaattcatcggttgcaaatgggcatgcccaaactcatccactttatgagatgtcgatgaactcttacacgagacagccaaatcctccaccacttgcatgggaaaaacttgtgcccctgagtatggccgcacaatccgggtgtaacacactgaatttggggtggatttga

SEQ ID NO: 28478 - DNA, 192 bp, Zea mays
  Peptide Sequence Number=SeqID_71853
atgtccggtgcaccaccggacagtccggtgcccccttccgaccgttggctcggccacgtgtcccgcgcagatcgcgcggccgaccgttggctcaccggacagtccggtgcacactggacattccgggacgacgacaagaaggggaataagatggagaagaagaagtactaccccaataagaagggtggcgag

SEQ ID NO: 28479 - DNA, 600 bp, Zea mays
  Peptide Sequence Number=SeqID_71854
atggaatcggagaacgaaaagctccgtaaagcactggctactctgctcagagttgttcaaaagcgtagttgtgacatcgttgatgtcgtcaaatcagccttccagcctttcaactcacctttggtggacgaattgaaccgagcactagttgagattgacgacctcgccaaggatcttgaagacgtagcagtgcaaactcagtggaaggtagaaaatatgtctaattgtgaagtaaacgaacatccacgacaagaggaagtagtagaggagcttctgatagaagatggttcagaagacgagctactgatagacgaagagtcaccaattaactatgaagaccttgtgggctacgacgatggtctcctgttcatttatatcatgtttgatatgcctctgttgcatagaatggggagtgattggaaccaggtgatgtctcaatatggaagcttccttagccagattgacgagcagcctatcggaactcaacattctgaatttccagtggatgggcaagccgagggctcaagaacaccagctgttcctaaaaagccaactcaaagaacaaagctagcaaacttcactactaatgaggacactagg

SEQ ID NO: 28480 - DNA, 1110 bp, Zea mays
  Peptide Sequence Number=SeqID_71855
atgctgcggtccaccggcgaccgcgtcgtcgtcgtgggcggcggcatcgccggcgccctcctcgccaagacgctccagaaccacgccgacgtcgtcctcatcgacccgaaggagtacttcgagatcccgtgggccaacctgcgcgccaaggtggacccggcggcggtggagcgcacggtgatcgcgcactccgactacctgacgcacgccaaggtggtcaccgcctccgccgtcggcctggacgactccgtggtgctcacctccatcggccgcgccgtggcgtacgacttcctcgtggtcgcgacggggcgcacgtgcaaccggccgcagaagcggtcggaccggctggagatgttccagcgcgacaaggaccggatcgacgcggcggagtcggtgctgatcgtcggcggcgggcccatcggcgtggagctggcggcggagatcgtgatgaagagccccgagaagcgcgtcaccatcgtccacggcgcgccgcggctgctcaaggtcatgggcgcccgggcgtcggccaaggcgctcgagtggctgcggtccaagaacgtcaccgtgctgctggaccagacggtggacctggcgtcggccaccccggacacccggacgttcaccacgtcggcgggggagacgctggaggccgactgccacttcgtgtgcacgggccggcccgtggcgtccggctggctcggcgggacgatcctcggggagcacgtggacgaggagggccacctccgggtggacgaccacctgcgcgtcggcgggctgcggaacgtgttcgccgtcggcgacatcacggacgtgccggaggccaagcagggcaacctggcgcagcggcaggcgatggtggtgtcccggaacctccgcctgctggtcaagggtgccccccgggaggagaagctgcaccggtacaagccgtccccgaggacgtccatgaccgtgacgctcggccagcgcgacgcgctggcggagctgccgttcatgacgctcatcgggcacatccccggtgccgtcaagccacgggacctcttcatcacgaggacgcgcaggatgatggggatcaagagcaaaccctacggcacgatgccgcacgtcatgtga

SEQ ID NO: 28481 - DNA, 222 bp, Zea mays
  Peptide Sequence Number=SeqID_71856
atggtggagatgcttgtatggaggatgatggttgatcttgtgcttgtgaaggctcttcgggttgcaccggactggtctagtggtgcatcggaccagacaaccgatcaagccaaggatggaggcaagaagagcttcgaggtaccgagtgcacgagagaaggtcaaggagaccgaggaacccaaagccaggggtgaagaagaagacttgcaaagtcaaggttga

SEQ ID NO: 28482 - DNA, 579 bp, Zea mays
  Peptide Sequence Number=SeqID_71857
atggtcggtccgagccctgggtcgggcgaggcggaggctcctccgaggtcgaggtcgagtctgtcttccatggtcgaggtcgagccctggggtcgggcgaggtggagttcgtcgtcttccggggccgaggccgagtccgagccctggggtcgggcgaggcggagttcgtcgtcttccggggccgaggccgagtctgagacctggggtcgggcgaggcggagcttcctatggcgcccgaggccggacttggctgctgtcagcctcactttgtcgagtggcacaacaatcggagcggcgcaggcggcgttgtcttctcgtcaggccggtcagtggagcggcgaagccatcctcgcattaaatgcttctgcggtgcagtcggtcggtgtggcgatctggccaaggttgcttcttggcgaagactgggcctcgggcgagtcgaaggcgcgtgcgacatgtggtggttcgccgagagcgcgtgtggcggcggacccctggggcgcactcggcggaggcggcatgcacggtggcgaacctttgaggcgcccgctgtgggggatggatatcccccgggtccactag

SEQ ID NO: 28483 - DNA, 420 bp, Zea mays
  Peptide Sequence Number=SeqID_71858
atgggcaagaacaacaagcgcaagcgtgagccaactcctccatcggaggagtttggtgactcggagtactcagaggaggagttctcctctgagtctgaggagtatccggctcccgtccccctgcgtgagtcgtctgacgactcagacgactcccaggggctcgcggcggaggtctggacgtacatccgggccgtcgagcgctccgggctcgaaggctcggatgagttggagtactcctcggatgaggaggactcggacggtggcggcgaggacggggatgatgacgacgacgacgacgacgatggcgacggtgacggcagcggcaggggcggcggcgacggcaccaaggacggtgacgacagcggcaagggcagcaaccggggcggcagcggcaggggcagcgacagggccagtggctag

SEQ ID NO: 28484 - DNA, 423 bp, Zea mays
  Peptide Sequence Number=SeqID_71859
atgcttccgggtcggggagccctcgccgtcgcgcctccaaatcaaggaactgtcgtcgccgccgtcgcgggtgtcggtgtttggagccagaccgcgcacccggggcggaagcgcgaaccaagtcttccatcggaggacttcggtgactctgagtactcagaggaggaggtttcctccgggtccgagaggtcgccgcgtggcaggctcgagggctcggatgagtcggaggtctcctcggacgaggagaactcttccgactcatccgaggaagggaacggcgacgacgacgaaggcgacagcagtggcgacgacagcggtggaggtggcggcgacgacgatggccaagacggcgacgagggcggcggtggaggcagtggcgatggcagcggcagcaaggccagtggcaaagcgccactggcttaa

SEQ ID NO: 28485 - DNA, 876 bp, Zea mays
  Peptide Sequence Number=SeqID_71860
atggcgtcatcggcggcgcgatccctcgcgctcgtcgcgtctgcctcggcatcgctcggcgtcgggcagcggtcgtgggctcgcttggctgtctcttcctcttcggctgggtcggccctccccaagctccgcgggctccgctcgttcgccgcctccgcagggggcgccgtgatggggaagccaggccccggggtcgttgacgccgacgccgggatggacgccgtccagcggcggctcatgtttgaggacgagtgcattttagtggatgaacaagacaatgtcatcggccacgagtccaaccgtgctcagtatgataagtatcccaatagcttgggccacagttctagtggagacaaagatattgtaaaatcatatcctttacagcaaaggtctgcaacaaaagtgacatttccacttgtctggacaaacacctgctgtagccatcctctctaccgcgagtcagagttgattgaggaaaattgtgcaggggtgagaaatgcagcccagcgcaaactatttgatgagctgggaatagtggctgacgaattacctgtcgaccagttcattccgcttgggaggatgctttacaaggctccttcagatggaaaatggggcgaacacgagttggattacctcttgttcatggttcgtgacgtgaagctcgacccgaatcctgaagaggtggccgatgtcaagtacatgaaccggcatcagctgaaggagctgctcaggaaagccgatgccggggaagatggcgttaagctctccccttggttcaggctggtggtggacaactttctcatgggctggtgggatcatgtcgagcaagggactctgcagggggcagcagacatgaaaaccatccataaattgtaa

SEQ ID NO: 28486 - DNA, 720 bp, Zea mays
  Peptide Sequence Number=SeqID_71861
tgggcgaaggggcggaccggcatgcaggcggcatgcaatcgcaccacgaggatgcaccccttcgactttgacgcgtccagcatggagtcccaggcccacacgtcatgtaaccgggaccgggaaaggggatactccgaaagggatccttctccgcgaaggaagcgggcctcgagcccccctactgatcagaggttcgaaggctggcccctcggaagggttcgacagccgcctcagagcactcgggcttcgagccctcctactgatcagaggttcgaaggctggcccctcggaagggttcgacagccgcctcaggccactcgggctccgcgcccactactgatcaggggttcgaaggctgaccccccgaagggttcgacaactgcctcagaacacgcagagcgagggatgactctgggtacgtccgataaatggccgaggctcgggctacgctcccgagcagccaagtccagtctcgggcgccataggaagctccgcctcgcccgatcccagggctcggccccccgcctcgacctcggacgacggtctccgcctcgcccgaccctagggctcggactcaacctcgacctcggaagacggtctccgcctcgcccgaccccagggctcggactcagcctcgacctcggaggagtcaccgcctcgcccgaccttgggctcggaccgaccacgttacagaggggaccatcattaccctacccctag

SEQ ID NO: 28487 - DNA, 1245 bp, Zea mays
  Peptide Sequence Number=SeqID_71862
atggggaacactcgcagtccttccgccttgtcgttggaggaacgcaacttcgcggaagttggtaccttttcagccatcgtttggcttcaaggattttcatcaggcagcccggccgcatcccctcgtcggtggtcacccaagacggtgaccaccagttcgatggtggggagaagcgatccgggctgcgatcttggtcccgccctcggcttcaaggatcttcatcatcctggctggggcggaggccgggctgagccggagctctacctcccgcgcgggttcgtgggtcaccttctccctcagcattcaagggagagggcgctcaccggcctagcgggagggtcggacttcgacaacgcggggctggtcggcggcgagcgtcgtcagcttcagcgcgttgggctcgctggcttagttggctctggctcggctcccggtgccccctcctgccgcaagagcggttgccgcgccgtgcgcaccggaggaacgcccaagacgtcacgcgctgctagggcgacgttcgtgttttggggctgtcctgcctttgccccggtacggcgcctctgcgcggaggtcgatgctccgctcgtccgggaggatccaagtggggatctgccggtgggcagatggcttccgtcgtcggcgctgaggtggtggcggctgaagaagtcctcgtcaccgacgggatcaccgccaccatccgcgctccgggcctctggctctttggctttgatatcttgtcctcgcccctcgagcggagacgtgggcgagggcattgttgcagcggcgtccgccctgaggccatcgccgctgcagtttggccatctggagcgaagctcattgtcgctgctgctggagcgggcgtcggtgagccacctggagccttatcgccccgcgggccctccaatagttggctcgaaaagaagacttcgttggccggagcctggccgggccgtccactggcgggaccagcgccggagtcgagttgccgaggccatgagccgggctgatgtccttgggggacaactggctgaggcttcgggagatcctcagaccgcgttgccgttcgaggctcgatcggacttcgccgaaggtgtagttgacgccgagggtgctgctgctccccctccatcaagaatcgtttgtccgagcgagagttacttttcacggaaggtgatgagtgaggatcccactttcgaagtagtcaaaaagcacgaaagacgttctggcagaaaagatcttttctaa

SEQ ID NO: 28488 - DNA, 1053 bp, Zea mays
  Peptide Sequence Number=SeqID_71863
atgggggacttgtggaccaacataagagctgatctcgcaaagatgcaagccacgctacagaagacgtcggcggttgtgggcatacaagctggtgctcgtggcttccctgcacgacggagagtgcgggagatgcgccagcagatgctcgagtcagccttggtgacggttgacctcggcacacgggggcgcgacctcgccctgtcggacggccatcagcagcggcaccgggccgctatctccaagtgcgagcatggtacgtgtcccgcgggcgacaaacttcaactctacggcaacggcggtagggaaggcactcccctcgtcatcggcaagggcgcactatttagcgccaccacattccgctaccggccgccacgagggctctacgacaacggcggtagggaaggcactcccctcgtcatcggcaagggcgcactatttagcgccaccccattccgctaccggccgccacgagggcgcctccgctggttattgttgcgacctactccaggtcgagcccgagccctggggtcgggcgaggcggagttcgtcgtcttccggggccgaggccgagtccgagccctggggtcgagagaggcggagttcgtcgtcttccggggccgaggccgagtccgagccctggggtcgggcgaggcggagcttcctatggcgcccgaggccggacttggctgctgtcagcctcactctgtcgagtggcacagcagtcggagcggcacaggcggcgttgtcttctcgtcaggccggtcagtggagcggcgaagtgactgcggtcacttcgactctgtcgatcggagggcgcgcgtcaggataaggtgtcaggccatcctcgcattaaatgcttctgcggtgcggtcggtcggtgtggcgatctggccaaggttgcttcttggcgaagactgggcctcgggcgagccaaagctttgtgctgatgggggttaccagctgagattaggagtcttggggggcgccgaacatggtgtctccaatgagctgctaacgggtaatccgagtggacgcccgtgccccatttgttag

SEQ ID NO: 28489 - DNA, 522 bp, Zea mays
  Peptide Sequence Number=SeqID_71864
atggcgcagtggcttacccggtctacgctcgccggcggtcggagggagtccggcgaccgtggactggcctctccggcgaagcagacttcgattcctcgctcggggagcttcaccgaggtgtgctcagtcctctccgagggtcggacggagttgggaagggcttggttggctagtctacagtggcaggggttcgggtggccgcggactcaccgtgcacgggcaaatgctgggaccgggaaaggggataccccaaaagggatccttctccacgaaggaagcgggccccgagcccccttactaatcagaggttcaaaggctggcccctcggaagggttcaacagccgcctcagagcactcgggctccgcgccactactggtcagaggttcgaaaggccggcccctcaaaagggttcaacggccgcctcaagccactcgggctccgcgcccactactgatcaggggttcgtaggctggccctcgaaggggttcgacagccgccctcagacacagagcgagggatga

SEQ ID NO: 28490 - DNA, 1089 bp, Zea mays
  Peptide Sequence Number=SeqID_71865
atgccggctgccaaccagcagccaccacgcacaccagtcagattgacaaggcaaagtgcagtcatgccttcgcctggaggctgcccgccacctaagccaagacatcccttgcctcctaagaccacttcgaaagccacccctaaaagaaatgccatttccagtagtacccaacaacaggtccaggccagtacaacaactactgagaccactgaaactacaaacccagtgtcttttcctccaaaaatgaccaggtccactcaagcaatgtcttcaccagttcgaaacacaatgcctggacctactagacacaccatgcatagtcctcctagattcactagggctagtgcagccatgtcttctcctggtgcaaaccctcaccatagtcctcctagattcactagggctagtgcagccatgtcttctcctggtgcaaaccctcaccatagtcctcctagattcactagggctagtgcagccatgtcttctcctagtgcaaaacctcaccatagtactcctgcagccactgctatcgtatctcatcaacctagtcccacaactagtgttaacaaaatagttcctacggacaactcaccaggtgggcacagctctaggcaaagcaatgccatcattgagtcagctaagcaatttgatgttgctacttcagagggtaatccgaatgaaggagaaccagttggtgacttagttccagcccttttagcgcccaaaaagaatgtccgcaagaaaaccatgggtcatggcttagagaagatgcttaataggggaaaccggttggctatccacgaggctgaagggaagaaaagaccggagtcaaggttggatgtcgatgttaagaatgagggaccaagcaaagatgcatgcacagatatcataaagaggggagtgaggcagacgatgtataacctgaaaaggaagtacttcgacgagtcacttacaaaagaacagttgttggccatgcaacctccacctaaaatgaataaagaggattggactgggctggtagagtattggtgtgacccaaagaatcaggaaaaatctgctaagaacaaagcaaaccgaggcaacgtgtag

SEQ ID NO: 28491 - DNA, 174 bp, Zea mays
  Peptide Sequence Number=SeqID_71866
atgaagaccaaccgggggtcctcgcggtcattcaaactccatcgcgtgacagggaactccgtggtaggaggcttctgcggcgtcaccgctgaagacccctccgggatttctaaaaataacccgccgtccggggctgtgggaagagtcgtgcggtttagtcctaaattttattag

SEQ ID NO: 28492 - DNA, 300 bp, Zea mays
  Peptide Sequence Number=SeqID_71867
atggcgccggcttggctttggcgcgacgcggggcacgcgggggcgcgcgcgggcgtgctctggcgagctcagagcgcgtcgaacacgtggctctttgcttctgcccgtgtttttccctctgctgagcgaccaaaacagagatatgggggtggggaagtcggctatgtcagatatttccaaaccgaggcaaaaatggtgccaggtcgtgtcaaacgtcttaggccctgggtggacaccctgagtaacacctggggtgttacaataactgtgaagaggttgatgaatacaaagaattactag

SEQ ID NO: 28493 - DNA, 360 bp, Zea mays
  Peptide Sequence Number=SeqID_71868
atggcgcagtggcttacccggtctacgctcgccggcggtcggatggagtccggcgaccgtggactggcctctctggtgaagcagacttcgattcctcgctcggggagcttcaccgaggtgtgctcagtcttctccgagggtcgaacggggttgggaaaggcttggttggccgcgcagacctcttcctggcacctatggctatctctcatatgtgagttccaagggaagataagccctaggtcagaagatatgcggatgccaaatctggcttgtccccctgcccgctgcgcgacaaaagtgatgccaagccatgacaaacgtcaaggtctcggtctcaactttttccagggggtgccctag

SEQ ID NO: 28494 - DNA, 264 bp, Zea mays
  Peptide Sequence Number=SeqID_71869
atggagaagttcctgcacgcaggggagaagggttccctgctgccggacgccacggagaagagggaaagcttcctgcgccatggagagaggagagctggggggctgctgctcggcccacaccatttgagccgaggaggaagggcgccatgggggctagccttgctccctgcgctggctgctgctgccgtgagcagcgaggaagaaggcagggagtacggctggtggcggctaaggaaaaaaatggagggtgggagtgcaaaatag

SEQ ID NO: 28495 - DNA, 2197 bp, Zea mays
  Peptide Sequence Number=SeqID_71870
atggccgaagctctggcggcaatggcgggcggaaaggagctcaccggagctaaggaggggtgtctggccggcgatgccactaagaagagaaaactaggtactgcagtgggggaactaggggtcttcgatagttttgctgtggagttgatggggacgtgcgcagccctcgagggagggatgtcttcgcccgagctccgggagtcttcagcgcggatgttggaggttaccgggggtcgatggcccaagaatgttccgatcccctgcgcggctagcaaagacttctttatgtctcgcatggctcatgacttgaaattttttccttacggacggaatattgctgttgttgtgtcggcagtgatggacaaggaccgtcaagacgctgcgcagaagcgccaggcattcgtcaggatcgcggatcctatgcgtgaggcgaagagggcacgggggagcacgaaggctgctgcctctggcagtagcaagctggtgccggctgcgaaactagtcgcccccggacacagcaaggcgtcagcgagtgcgaaggctgccgccactggtgggagcaagccacccccgggcggacccgcgaaaggacgagagctgccttcgccggggcgacgtgttgtcgacttcggcacgaacatcagtgtcgaggattattttgttgggtcgggtgaggggcaattggttgttgtcctgccttcggtggcaaccacgtcgccaacggtggtggttggggcgaagggtgccgcgcgggacccgtgggccgctttctgcgtgagcggcgagattctatcggccactgccgctaaggacgtggtgggctccatgtcccagcgactgtgggaagcatcgcagcagctgtcgcagcagctgaagcaagcggccgacttcgccgaccgcgtcgcgtcgggtgtcttgactgcggacgtggctgcagaggtcgagagtcactgggtgcagcatgtggatgctgtccgggagaagtcggctgcggaaagcaaaaaccgcaggctggtggagaaagccaaagtggcgcgggcggagagcagtctcgccagccaatgcgccgaggagctggaggtgaggttcaatgccctgcgtagctgcgtggacaaggccgaggcctcgacacgctcggaagtcgagcggacgcactcgcagttcatggacgtgtaccgcgagctgggtgtgcagactgctgacttcgaagtacccgaccaagaagcaggccttcgcttcctcgaatggttgcaggagaagctactggtgctcccgaccattgtgacgggtttcatgtccttcgcctccctcgtcacctgcgagggggccatgaatgcattgtcccgcgaggggtgcaggcactatgaggtcttcgaccaagcagacgagaactttgaacgtgaaatcttcaaggccgaagaccctgtggtgaagcagtcagcgggggcactcttcgataggatgtggggtccgcacggtcaggaggcagtcagggagcggtccgaccgggcgatagagcagatggcgcatgccgaagacgtcgaggaccttggtggtctggacggcgcgccgcccgaggctgcggaggtcaatccggtgcctccctcggatgccggtgaaggctcctcggctgtacccgtgcccactgcggccggtgaagaccctgcatcagcccctgcgccgacgggcgaagatgccttgagggtggtggccgagccagcagccaaagaccccacagccgcgaccgggccttcgcaggttctggggtttgggcctgcgcacgcaaccgctactaacaatgctatttttgtggcggcttcgaccgtggctgctgatgacgattcgtttggctctgtgtctaagtgttttgagtgtgatgattctgggagttcgattgtgtggacagaggagtcttcagatgaggacttggattattttgcagcattggatgtggctgcggcggagacttctccacgtgtgatgggtgctgaggatcttccgggtgcgagtactaggtgtaggcggcgaagggtggtggcgaagcagagagtgagtgaattgtcgcgaagtggtaggcgtcatcatggtgagatggagggtggtcgtcttcgtgtggacgggactggcaaacgggaattgttgtcctcgctggctggggcgagtgtaggtgagggggagctgcgaaatctttttaagg

SEQ ID NO: 28496 - DNA, 87 bp, Zea mays
  Peptide Sequence Number=SeqID_71871
atggcgggcggaaaggagctcgctggagctaaggaggggtgtctggccggcgatgattcgaagggtaggaggaggggttgggtgtga

SEQ ID NO: 28497 - DNA, 537 bp, Zea mays
  Peptide Sequence Number=SeqID_71872
atggagaaccaaagaattccagagtctctgaacggatgcagttttctggaaggcaagcttgatgaggctcttgaattgttaaagaaacatgagcaagtcacacctgtcaaagaaaggggagtggagccatcctgctcttcagaagatattaagaaggcataccggaaagcagcattgagacatcacccagacaaggctactcaattattaataaggaacgagaacgcagaagatggattttggagggatgttgtcaaggaagtctatgcagacgctgatcatctgttcaaaacaattggggaggcatataatgttctttctgacccggccaagcgtgaagagtacaactttgaagaggatctaagaaatgccaggaggagagtatctagttctaggagcatgcataggtcacctgaacagaactacagcaacagaggctttaatccacgccagcggcagtcaagcagagcatcacagggtgaaaatattaggattgatcaactggggatctgggatgattggttgacacttgattag

SEQ ID NO: 28498 - DNA, 678 bp, Zea mays
  Peptide Sequence Number=SeqID_71873
atggaccgcttctgcccggcccaacaacacataggtgtgtgccgactggtgacccccgaagatcagcctccacctcttcggcctagcagccccatacgcgcttgcacccacctcagacgtgttgatgggtggacccctcctactgcatgtgggccgccggtccgcaccaaacgcatcgccgccggtgtacgcagattttcgtatcacttcgaggtcaaggtcttcggttccaagatcatctgggattctaggacttcggttgcaacctccactcaagctaagagtatctcaatggatatggattcagcagactccatagccgacaaggcaattggaaggatgcaagagattgcggacaagattttttccgtagctcgtgaaacaatccgtccaggacgcgggttgacctcatttgaggctaccaaattacgtgtagcattggaggacattgcttgcatgcttgagcaagactctctggtgttgcaagaaaaattggacaacgtgaacaacgtaaacaaccctgctgacaggagctatgaaccgtctgccttgtcctcaccacccccagctgacgagtgccttagtccggattgggactttgttgagcactttgcaaacttctggggtgttgaatatgactccgaccagatgccatcgtttagtgacaatgaagtttaa

SEQ ID NO: 28499 - DNA, 351 bp, Zea mays
  Peptide Sequence Number=SeqID_71874
atgctcgagggcgccactgaagacatggacctcatgggccggctcctcgatgagctcgacctgctgcagcgccactccccggatgtggaccttgacatggtggacatggaccttcttaaacatattgtagttcacaaagaagtcatcagcattactaaatatcactgcaagcttggtcttactggcacaaaactgaacgtgtttgcttggacctccagtcctgagctgttctatgtcgatgtctctggtgtacaagatatctacaggtggcaacaaggtttatatgctggtgagtgtcgagcgaatctggacgtgtggtgttccatgtacatgtttctacgggacaactaa

SEQ ID NO: 28500 - DNA, 615 bp, Zea mays
  Peptide Sequence Number=SeqID_71875
atgccaccatccaccctagtggttgtcgccggccgacagccttcacccatcatcgacctactcgaggatgacttcaatcgcatctcaaccgaggctaactccgacgccgacgaggtgctagagagggcttgctttgtggcaactctgccacgaaacgataacgacgaaggagacaaggaggcccccaaccaagaggaggagtatcgtgccagcgccaagcacgcttcctcgctcgtgaagtcgccctccgccagcagcaagggaagctcaacaccctcatgcagaaaattgatcgcgcctacaaggatgtcgagcggagacgtcttgaggatgagagtccctggccaagaaaggtgcatgacctactcaccgaaagaagtgatgacgcacaatatttcctcagtctcagaacttggtcgctatgtcgagcaaatctgtggttgtcctcgtccttcctcgttcgagctcgtggatgaatgcctcgttagtggtgtcgtaggtgaaggcactcactatatcggcatcggtggcatcagggagctcatttctcttttaagagaacctctggatgtaatcccggaggctctccccattcttctgggtgcacgtctttag

SEQ ID NO: 28501 - DNA, 282 bp, Zea mays
  Peptide Sequence Number=SeqID_71876
atggagaattgtcccgggttggaaaggttgctggagactacccatctggagcttgacgggaagctgttcgtcaacacgcagcaggcccctacctggtgcgccaactgttggcgtttcgaccccggggggtccctggaccgacgagtaaattgtcgccgcgtgtcccagcccagatgggtcggcgcgagacgaagcatgaaggggggaaaaggagacaggaaaaagggggaaacccgcggccttcgtgttgtcctgcggctaggtcgggtgcgcttgcagtag

SEQ ID NO: 28502 - DNA, 702 bp, Zea mays
  Peptide Sequence Number=SeqID_71877
atgtcttcgcactcccttcatgcctcgtgtccttccaccttccgagcaccttccaccttccaccttccgagcacccgcggttcttccgccttgtcgtcgttggaggaacgcaacttcgcggaagttggtacctttcagccatcgttcggcttcaaggattttttcatcagacagcccggctgcttcccctcgccggtggtcacccaagacggtgaccaccagttccagggtggggagaagcaagccgggctgcggcctctgcccctccctcagcttcaaggatgttcatcatcagtgctgggaggggaggggaatggcgttcgccgttcgtggcgctggcagctgccgtgtgtacggctctccggcctaagcggcttcggcgctgcttccggtgccacctcccaccgaggcagccggaagagcagcgtccgccctgaggtcatcgctgctgctgttcggccgctcggagcggaggtcgttgtcgttgctgctcttcgggcggcggtgagccacctggggtttcgtcgccccgcaggccctccaacgaaccctcggccgctcttcgatgagccggagccggaggcagaagtgtcagtgtggacagaggcagagttggctcgagaagaagatttcgtcgaccggagcctggccgggccgtccactggcgggaccagcgccggagtcgagttgccgaggccatga

SEQ ID NO: 28503 - DNA, 144 bp, Zea mays
  Peptide Sequence Number=SeqID_71878
atggggaagcctgtcccatcactcctcatgctcctcctcagccgagtgagcgcacttgtacccaccataaccggaatgggagaccacgtcttaggtcgcgtgaggagggcaatctgctgccaggttcactcaggtagaacttag

SEQ ID NO: 28504 - DNA, 936 bp, Zea mays
  Peptide Sequence Number=SeqID_71879
atggcgcaccggacagtccggtgcgccaccggacactgttcgaggctcggcggcctcgagcgcctggtcctctcccgcaacaacttgtcgggccccatccccttcgcgctcaacagcctcactgcgctacgcgtgctcaggctcgacggcaaccgcctctccgggagcattcccagcatcagcatcgcgggtctcagctccttcgacgtctccgacaacaacctcaatggctccatccccaaattgctctcgcacttcccgcgagaatccttcgctgggaacttccagctctgcggggacccgcttccgccctgcagcagcccgttctttccccagcgccgtcgcacgtggtggggctcctcctcctcatcgccaccgtgctctgcgtggtgtccaaacgtcgtggcgccggctcccgtgacatccgcggtggccagggggcagcccccgccggcgtccggcgtgggcggcgtcttgacgtcctcgtccaaggaggacctcggaggcgacgcattcgggtcggccacggcagtcgcggcggcggccgccgccgccgtgggggagcagagtcgactggtgttcgttgggaagggcgccgggtacagcttcgacctagagaacctgctgcgcgcgtcggcggaggtgctgggcaaaggcagcgtggggacgtcgtacaaggcggtgctggaggaaggcacgacggtggtggtgaagcggctcaaggacgtggcggtgcagcggcgcgagttcgacgcgcacatggaggtgctcggcaaggtggagcaccggaacgtgctccccgtccgcgcctactacttctccaaggacgagaagctcctcgtctacgactacctccccaacggcagcctctctgccatgcaccacggtcagtgtccaacctcttttcatcctcacgcttgcattgcgtcgccgtag

SEQ ID NO: 28505 - DNA, 177 bp, Zea mays
  Peptide Sequence Number=SeqID_71880
atggcgctcctcgcatcccgcctgcccgccgcgctcgaccggctcaccaacctccgcacactctcgctccgctccaaccgcgtcctcggggccatccccaacgacgtatcttcggactcgtatcagaaagggagaagctcaaaagatacgaaggttgacacagcgccgaagctgtga

SEQ ID NO: 28506 - DNA, 750 bp, Zea mays
  Peptide Sequence Number=SeqID_71881
atgaaggggaggaaacaggcaaaggggaaacccgcggccttcgtgttgccctgcgcccaggtcgggtgcgcttgcagtaggggttacaagcgtccgcttggaagagccttatgcgtcggcccgtcctcccgcgcggccaaccttctcggtaatgatggcccctcctgcgacgaggtcggtccgagccctaggtcgggcgaggtggaggctcctccgaggccaaggtcgagcctgtcttccgaggccaaggctgagtccgagccctgggctcgggcgaggcggaccgaggctgagtccgagccctggggtcgggcgaggcggagttcgtcgtcttctagagccgaggctgagtccgagccctggggtcgggcgaggcgaagtccatcttccgaggccaagacgggggccgagccctggggtcgggcgaggcggagcttcctatggcgcccgaggccggacttggctgctgtcagcctcactctgtcgagtggcacaacagtcggagtgacgcaggcggcactgttttcttgtcaggccatccttgcattaactgctcctgcgatatggtcggttggcgtgacgatctggccaaggttgcttctctgcgaagactgggcctcgggcaagccgaggctttgtgctgatgggggttaccagctgacattaggagtcttggggggcgccgaacatggtgtctccagtgagttgctaatgggtgatccgagtggacgcccgtgccccattcgttag

SEQ ID NO: 28507 - DNA, 51 bp, Zea mays
  Peptide Sequence Number=SeqID_71882
atggcgccgagattttttatccggcgagcacaacagctgtatatgcagtaa

SEQ ID NO: 28508 - DNA, 150 bp, Zea mays
  Peptide Sequence Number=SeqID_71883
atggcgcttatcatcaagtgcttcaagtccgcattaaaaggacgcaaggagtaccccaacaagaataagacaaggggaaagcgctcctgcttcaaatacgggggaggctacgctaagacatgggaagaaggagaagaagaaaagctatag

SEQ ID NO: 28509 - DNA, 273 bp, Zea mays
  Peptide Sequence Number=SeqID_71884
atggcgctgtccgtgccccccggcccccagggcctactgcccctgtcggcatcctcgctcgctccgcccgcatgggtagacgacctccttgcactcacgctcgctgaggggcaggggcactcgccggctccagcgagggctatgccgtcgccatccacctcgacgccggcaaggtcatggcgctggaaaaggagatattcagatatagtccagttgcctacacataaatactttgaacaaaccaggttgagtataatcaacacatttaattga

SEQ ID NO: 28510 - DNA, 487 bp, Zea mays
  Peptide Sequence Number=SeqID_71885
atggaggacaagacaacgaagaagacggcaccagacaaatctgaagttcatcccttgaacatgatcaaaggcacgatggaagatcttacagaggcagacaggaaggagattgaagatgaaatcgcacgagagatggaagagaaacggaacgagaggttggctttcttccgaaaaaccaacaatggtgtgatcaaacagaccgttggggcaagcacgttcggcaagaagatacaatcggccctgactgatggacgattgacatttggagaagctaacaaaatgaagcttgataaagatccattccctatcaatatgcaaaagaaatggtctcctcacaacccagcggatgccaaagagctgtgtatgggtgttggtgggcaaaatgagccgctgggcaaaagcggctcaaaaatcatagtgggaacagtggagtgcgacatattaaatgctgcagaaagtctccaggcagagatggcgaagcaaaatg

SEQ ID NO: 28511 - DNA, 291 bp, Zea mays
  Peptide Sequence Number=SeqID_71886
atggaaatgatccttctcacatgccacggtttcctgatcttcgggcctccgacgtcgcatgaaggcgcaagaaatttctgggactcccgaatcacagaggcgagcacgaggaggagatcaggggcgtcgccccggaaatttcgactgacgagcacgtgcgcggaccgcggagtattcgccggcgtggagcgtgaaggcttctgccaccggcccaccgccgtgcgggactcccgaatcgcagaggcgcagacgtctgggcgttgcgtcgccaagctggacgcctggacctag

SEQ ID NO: 28512 - DNA, 582 bp, Zea mays
  Peptide Sequence Number=SeqID_71887
atgtggcccttcctcaatgccatccactccggcggcgccgtcacctccggctcgctcgccgctctccacgagtttaatgcgagagatggatatagagagagagttctaagatctgaagtcggagaaggtttcaagcgacagtcgcatcccacggagtgtcgtctcctctccctcctgggctgccggccttaccaaagtgaaagcgagacacagagaagccaatggcgctgtcccacatctagcctcgccttcctcaccaaatcctttggtggcaacgaactcacggaggtggaagtcgatgcagatgatactcctacatttttcaatgaaaacagagttggagcagcacatgtaccactcatatatactgttgtagctaaaactgaagatatcatcttatcaagagagttggaagatattgcttctatcgaagacaagataggaaggtcacttacaaccaaggagaaagatagaattagagtgggtaacttaagattatatttggaagagttgctgcagaggagggagtatggagtcgttgatctgaaagttgcgctaggctacgctaggccattttcataa

SEQ ID NO: 28513 - DNA, 579 bp, Zea mays
  Peptide Sequence Number=SeqID_71888
atgaggggagggattaacggcaacagcgtcttaagtaaggcgggggggggacactgggagggggaggctgggggtggcggggttacgatggaggagagggatgatccagcgatacaaactgttggtttggatgacagagacgtggatgagattatgccagatcagagtaggaccacgcgcagggacagggtacacactaagctatacaacgcgacgagcttcaacgagtacgtgctggaggggagcgcgccggtgctcccggagacgcagcggctgttcaagaagctcgtctcgctgggcatcaagccggtgttcctgacgggccgcaccgaggaccagagggccatcaccgtcaccaacctccgccgccaggggtactccggctggatgacgctgctgctcaagcccgtcggcctcaaggccaccgccatcgcctacaagtccggcgagcgccagaagctccaggacgccgggtacgtcatcgtcggcaacatcggcgaccagtggagcgacatcctcggcgcgccggagggcgcgcgcaccttcaagctgcctgaccccctctactacattggctaa

SEQ ID NO: 28514 - DNA, 219 bp, Zea mays
  Peptide Sequence Number=SeqID_71889
atggcggccgacagcccgcccgccggcggcggaatcaacgacgtcttccccacgtggcggaagaacaacattcgggtttgtcccgtcgcctcccccgccgacggaggaggaggcggggcaactgatagtcgcctagaggggggtagccgttggcgccgaagtagccgttgccccgcagttacaccggacagtccggtgtacaccggacatgtccggtga

SEQ ID NO: 28515 - DNA, 1194 bp, Zea mays
  Peptide Sequence Number=SeqID_71890
atgatgaccgcggaccgggaaaggggatactccgaaagggatccttctccgcaaaggaagcgggccccgagccccctactgatcagaggttcgaaggctggcccctcggaagggatcaacagccgcctcagaacactcgggctccgcgcccactactggctggcccctgaagggttcgacagccgcctcagagcacgcagagcgagggatgaccctgggtacgttcgatacataaccaaggctcgggctacgctcccgaggccaaggctccgctcaaaggacacgatcccgcctcgtccgagcccgacctcgggcaaagacagccgaccccagaagattcacgcctcgcccgaggcctcgggcgccataggaagctccgcctcgcccgaccctagggctcgggctcaacctcgatgctggacgacggactccgcctcgaccgaccccagggctcggacacagcctcggcctcggaagacggtctccgcctcgcccgaccctagggctcgggctcaacctcgacactggacgacggactccgcctcgcccgacccccagggctcggacacagcctcggcctcagaagacggctacggggaacaagactggtgtcccatctggctcgccccggacaacacgaaggccgcggtttccccttactgttctccctcctttgtgtcccgtctcgcgccgacccatctgggctgggacacgctgcgacaatttactcgtcggtccagggaccccccggggtcgaaacgccgacaacttcttttctctctcctttcatgtctccaccttcgcgccaccccattctcagcagagggcgtaggagcaggcgcctcctccccatattcgtccgacaccagcctcgacactgactcgcgctgtggctattgcacgtccacgaggaagtttcaaatcatgcacgcatcatcgttttcgccgttgtcggatgtcccgttcgtcttcccagccttcgccctgttcttcctccccaacctcttgtctccgtccatggtcgcagccgcgagccgaccgacgctcgtcgacgtgggtacggggcgagtcggtcatgctcctggactttctccgtgtgtgccgtcaaggaggacatggtgtcgtctaccacgcttagattatcttggcgatgaggagtccaggtctgagatattggacaaccaaggcccgtag

SEQ ID NO: 28516 - DNA, 615 bp, Zea mays
  Peptide Sequence Number=SeqID_71891
atgggtcggcgcgagacggagcacgaaggggggaaggagacaagcaaaaaggggaaacccgcggccttcgtgttgtcctgcgcccaggtcggaggctcctccgaggtcgaggtcgagtctgtcttccgaggtcgagtccgagccccgggtcgggcgaggcggagaccgtcgtccgaggccaaggctgaagccgaggctgagtccgagccctggggtcgggcgaggcggagtttgtcgtcttccggtgccgaggctgagtccgagccctggggtcgggcgaggcagagcttcctatggcgcccgaggccggacttagctgctatcagcctcactctatcgagtggcacaacagtcgaagcgacgcaggcggcgctgtcttcttgtcaggccatccttgcattaaatgctcctgcgatacggtcggtcggcgtggcgatctggccaaggttgcttctcggcaaagactgggcctcgggcgagccaaagctttgtgctgatgggggttaccagctgagattaggagtcttggggggcgccgaacatggtgtttccagtgagttgctaacgggtaatccgagtggacgcccgtgccccgttcgttttggggtcggctag

SEQ ID NO: 28517 - DNA, 498 bp, Zea mays
  Peptide Sequence Number=SeqID_71892
atggtgtccgcgtcctctccgatcgacggcgacacaacgcaatcaacgcggatgtcgcaggcacggccgaagacggcgcccaccgtcaccaccctctgtcggtccgcccactcctcaatcgctccaactcagctgcgattcttcgaccagaaccatttggatcacaatccattaccacccctagttaccccatatagggacggcactgtcgatcgtggagcaacggactccgcaggcgccggcgcgagtccgccattcgcggcaaggttgtttatcccgcggctgacagcttgggcccgtagtacagcgagacacaggacacacggacccagcggaagcgatggcgtgggggtggttgacctcgggggcccatccgtcagcgggatcgggtgtcctcaacatgtgacgttgcccagtgaccgacgagtaggccccgcctgtcggcgcgggcgtgactttgggctgggtgcgtgggtaaagtgctattgggccgaatag

SEQ ID NO: 28518 - DNA, 843 bp, Zea mays
  Peptide Sequence Number=SeqID_71893
atgacgacggcagctctcagcccccttacggaagcaaggagacgtcagcaaagactcgacagccccgacagttgtccttccgccaggctccagcgctcctccgacggccacgacatcacacgaaccgggtgccaaaatctctccggctgccacgacggcatggaccccccggggtcgaaacgccgacagctgtcgtgccgtcaatggggctcggtgtatgtgactcgctttgccgagggtgagcgtccgcttcatcgcctagtgactggtcagtccggccacttggagaggttgcaccaccgcctgcacaaggagcaggagcgtcggcgtcaggagctggagcagcagggctcttcctccttgcctcagcaggagctcgaggagaccctgacgacggagacggtgatgacaacatctcgagccacagcaccgacctttcagaggagcaggagccggagggatgggttgcttgacccatcactcgtgacgccgctcacgggtgtcacttccacgatgcgctcaacaccttactgcgccaggcactcgaccgacacacttggtccatcgagtatcactgtgttgtcttccagcacagttgcggggcatacccagaccgctgggaggcgactttcttggtgcgccatctggaggatagtctccgaggtgcggagtggggtggccgatggtcttgacctgaggtattacccccgccgttcatctggcagcacaagaggcgtggttgtctcaactgttgctgaggacaatcctaggttgagcagcacacgtgggcgccatgtctatggcaaccccgacttcaggacccagataaatttagaatcatag

SEQ ID NO: 28519 - DNA, 249 bp, Zea mays
  Peptide Sequence Number=SeqID_71894
atggccctgttctccataatggaagcatcctctgcctcctccttgcactggggctacttgactgctctagttggttgctggggcaggaagacgaggtgcctgttgattctgcctctggaactgacttcctcctggctaactgttctgacggtacaactgttgatgctgagggtactgcctctggaactgctgcagaggcaggcgctgattctgcttgaacagctaaggagcatagcaggacagctataa

SEQ ID NO: 28520 - DNA, 222 bp, Zea mays
  Peptide Sequence Number=SeqID_71895
atggcggcctctctaagagagagcccctcttgtttgatgtccagcgatgcaagggcagcccctggagctattgccttcttcggcggcatggcgaaggtggttgttcgagttcttggtgtcgaagttggtcatttgagttcaccagaggtgggcgccaatgttggtcacttgttcttaaatgctatgaatcaagaacaaggcaacaagattgttaaagattaa

SEQ ID NO: 28521 - DNA, 219 bp, Zea mays
  Peptide Sequence Number=SeqID_71896
atggatgagtacatcagagtcaacattgacttccgacaaataagggaagaagtctacaaatactttgagatgactaggggcttcggaggaagactccacccgaggcatgttaggacatccataatcttagctcaagccaagacaggggaaatcatacttaagggcatcaacaaagctcccaatcatcaagaacacagcaaagctcctttaggccactag

SEQ ID NO: 28522 - DNA, 960 bp, Zea mays
  Peptide Sequence Number=SeqID_71897
atggttgctcaactttattctggtttggtgaaggtaccacatgatgtcactggttgtatgataacagctagaaaaagaatgccggtaacagccagagatatgcacaaccgatacattcctcagcaagattacttctcagagggactctacacgttcgatattgggcagaatgaccttgctggtgagttctattcaagaacagaggaccaggtcatcatttccattccaactattttgttggaatttgagaatggtctcaaggctgttatctctagcagacggctgagtaattatttatctactccagagcatcactcatccgagttaaatgtctctgctaaccttttaaaccaccactttaagagatataccaaagtaactcataatccaatggccatcgtctttcagaatgtatcctgttcttggtctagcagttctgttgctgagctgaacatagttctcagagatatatctttgcagctacaaaaagggctctttattgcaattgtaggcgaggcaaaaaccccatgggatgtacaacgcgtggatctccgttgcgatggcgtctcactgaaaagttcgactggggtcttgaaaccagctacaaagcagaagttgcgttttgagggagattcgtacaagaaggcattggcggagttcctgcaggctatgccagcgtttctgggcggtaaatgcagctgcctgcgatgtgagagtcctcgtgatgattcagtgataccggcaggggaagggagcaagaagcagctccgcttggtcagcgttgatgacgggtcacctgtcacagacttggacttcgacttggatgaagaagagatcccatcaccttatagctgcgagaacgccatcagggctgcgataatcggcctgctgatggtgtgcatcttcgtcgcgtttctggctgggatgatcgaccctgcatccgttccagccagtgcctga

SEQ ID NO: 28523 - DNA, 804 bp, Zea mays
  Peptide Sequence Number=SeqID_71898
atgcggagttcgtcgtcttccggggctgagcccgagtccgagccctggggtcgggcgaagcggagttcgtcgtctttcggggctgagcccgagtccgagccctggggtcgggcgatgcggagtttcctatggcgcctgaggctggactgggctgctttcagcctcactctgtcgagtggcacagcagtcggagcggcgcaggtggcgctgtcctcttgtcaggccgactgggccttgggcgagccgaaggcgtgtccgttgctggagggggtcctcgggcgagacctttgtgctgatgggatttaccagctgagattaggagtcttgggagtacccctaattatggtccccgacaacggcgaagcaaactacacctcagtacctctagttattttgctaaggggctgcgtgcacggggttagggctgcgcgtgccggggccacgccggggcagaagccacgccgcggcgcctcgccggggcagaagccacgccgcggcgcctcgccaggccacgccgagcagggtcagccgcgccgggcagggccggccgcgtcgagggcaggctacgcggggggcaggccgtcgcgccagggccgcgccgggcagggccggccgcgtcgggggcactgcgcgcaggctgacctatcggacccaccagtcagtggcgtcgtgcgagttctcctccccactcaagctgttggtgccgacatgcggccccacccatcagccgcgcttaagcgtgccacgcaccacgccactacgccgacaacctggtcccacgactcagtcggctaccgcgcttag

SEQ ID NO: 28524 - DNA, 378 bp, Zea mays
  Peptide Sequence Number=SeqID_71899
atggacaacgagacacgaccgcgacaaggcgtgagcagcgggtcagagcgtggcattgagtgcgcgacagcagagtgcggcggcggcggagcagctaggtcaggcccgcgttttggcttggaggtcgaggcggggatgcagcgctgctatttatgctcctatggccaagaatcccaacgattcccccgagatgcggccaggccggtggagatttctccacaccccttgcctcggctgtttcgacgaccgctgtgcagggaagacgaccaggtctcacccgaggtggcaccacaagttagcgtgcacgattctaggttggccgcggaggaatcacgcgatttagttttgagattgccgagagctgagggatggatatga

SEQ ID NO: 28525 - DNA, 543 bp, Zea mays
  Peptide Sequence Number=SeqID_71900
atgcagagaccgtgtgcacaaggaatcaaagaaaggttgagtggattacccggtccacgtactccggcggggttgagaactccggcgaccgtggactggcctcttcggcgaagcaggcctcgattcctcgctcggggagcttcaccgaggtgtgcttacacgtctcagagggttggatggggctggggaaagctggactggccggtctacggcggcagtggctcgggtggccgcggacacgccgcgcacgggcaaacggcggtgaactgggctccggtgaggcttgagcgtgcgcggaagagtgtaaccgacgcttgggagggctttataggcgcggggcgcgggacagggcgccggctggccgttggcgcgacgcggggcacgcggggggcgcgcgcgggcgtgctctggcaagctcagggcgcgtcgaacacgtggctcgttgcttctgcccgtgttcttccctctgctgagcggccaaaacgtacgaatcttaccctatcgcctgtgggagatctcttccctgcacctagagctacctag

SEQ ID NO: 28526 - DNA, 468 bp, Zea mays
  Peptide Sequence Number=SeqID_71901
atggcgaaggcttggcacggcgggatcggcgaggcttggacggggttcgggcacgtcttcggtaaggccgatgcacagaatagaaaccagcagggctgggcgaacggtttggtcgacggcgcgctcgagaatggggagagcgagagagagctccgggaggagaagggaagagagtccgggcggctttatagagagaggaggggagagaaacagcggcgagcgggcgtcggggcgcgcgcggcaaggcgcgtgctgcgactcggatggggaggacatcgggcgcctgggctgctcgggtgcgcgggctcttggttgtctcaggcggctgctgctgtggtcgggcgcggtagtgagagaaacaaggggaggagagagagtgccgagtgggagagagaggttgggagaggaagaagcactggcggcggccacagggagcggtgggtgtgcagggttaggggcatggcgtga

SEQ ID NO: 28527 - DNA, 1668 bp, Zea mays
  Peptide Sequence Number=SeqID_71902
atgccggcgccagcgagcggcggcggtggcggggaccacctccgcggccacgcgcacctgaccaactgcatccacctgcgccaccaccacgcccacgcccacgcccacggcgcgtccgggcggaggcgcagccccacggggtcctcggcgtcggcgtcggccgcgctgatgcgggacctcctggccctgcagcgctcgcgctcgctgcgggacccatccacccgccgctccgtcgacgactccgcttccaacaaccgggtcgccgccgacccggacgacgccgaccactcccgcgccggcgcgatcaagacgctcctcgaccagctcacggagaacccgcaccccaagcccggccgccggccccggcgccggttcaggcgaagcgctacccgtcgcgtcgcccagcccgctgccgccccccgcgtctccgtcaactccagctcccaggaggccgtctgcggcaacaggtacctcttcggcggcaccggcggagccgacggcggtgtcgagctgatgcagcagcagcagcaggtgtcgcacgagtcgcacaacgtgtgcggcatcccgtggaactggtcgcgcatccaccaccgcggcaagtccatcctcgacatggccggccggagcctctcgtgcggcctgtccgaccccaagtcgacgtcggcggcgcggaggtccgaacccgccacctccgccgcctcgtgcggccacgtcaacgggtcacgctcgcacccgcatttcccggtcaccgcgaggctgacgtcctcgagcagttcagactccgactctctgcctctgcttgtcgacggcgtgcgcaacgccgtcggtggcatttccagcagcttctccggggagctcgggattttctccaagagcagcgagctggactccgacctcgcgtccgaggcacggtctgggcagaagtcgcggggctcgcaccgtgcccgacaccggagctttacgcagaagtatgctccaaggactttcaaagacgtcgtcggccagagcttggtggtgcaggcgctgtccaatgccattctgaagaagaagatcggactggtgtatgtcttctatgggccacatggcacgggcaagacctcgtgcgccagggtgttcgcaaaggctttgaattgccattccccggagcacccgaggccctgtgattcatgtgcctcttgtattgcacacaatctgggcaagagcaggagcttgctggagattggaccggttggtaatatagatctggatggcattgtggatatccttgacaatgtgatgctctcgccggtgaaatcccagcacagggtgtttataattgatgactgcaacacattgccgcctgatacatggagtgtcatatccaaggtcgtcgaacgtgcacctaggcgtgtggtttttattctcatcagccctaatcttgatctccctcatataatcgtgtcgaggtgccaaaagttctttttccccaaactgaaggagtgcgacattatcagcactttgcagtggatttctaccagcgaaggcctggatgttgatagagatgccttgaaacttattgcttcccggtcagacgggtcactgagggatgccgagatgactctggatcaactcagtctgcttgggcagacaatttcgatgtcccttgttcaagaacttaataactgctag

SEQ ID NO: 28528 - DNA, 261 bp, Zea mays
  Peptide Sequence Number=SeqID_71903
atgggggcggggggagtggagaactggagagtggagtggagccgtggtgaaggtgtgggggaaggacggaaggtggaggtgggcgcggcatcccaccctcgggccggggctcggccagatttcctgctttctcttctgaaagctggaatgctggatgcattctgcatttctgcttgcaaagttccactgttccagggatcaatccctcaatccattctcgcgatgccatttacggtcacgccattaaaacttgcatcctaa

SEQ ID NO: 28529 - DNA, 309 bp, Zea mays
  Peptide Sequence Number=SeqID_71904
atgcttgggagttgggcagcaagcaacgcacagtaccgcacggcacgggactgtagacttgcggtgtacgagcagcacgacgaccccatgtctcacgcgcggggcctgctgcccgcagatcgtcgtcgtcgtcttgcccgtcccagcccagacgcccacatgttccctgtctccttcctcccaaggcaatcggacggacgtcggaggctctccgcatctggcgcgcccagcaaccgtccgatcgtcgcccaacaacgttccaacccattgctggcgatcccgctgcgcggggcagtgaagagccagtga

SEQ ID NO: 28530 - DNA, 462 bp, Zea mays
  Peptide Sequence Number=SeqID_71905
atggctatattttctagcaggacaaaagctattttattttacgtaataaaaagcaaagagaacagcaagaaactgaaaaggcctaaggcttggaagcatacccaaccaattacaccggcacggctgaaacagatgcgtgatgagttctgggacacggctccgcactacggaggccaaaaagagatctgggatgctctgagggttgccgcggagtccgatctagcccttgcacagaccatcgtggacagtgctggaatcatcgtgtcgaaccctgacatgacgctctgctacgacgagagaggtgagcaaggacttgctaccccccattttcacgactctctttaccgtcctgttgtgcatgcaagaccaatgtcgaaaactgaagactccgttgcaggcgccaagtacgagctgcccaagtatgtcttgagcgagccagcgaacctgatccgcgacgggtga

SEQ ID NO: 28531 - DNA, 432 bp, Zea mays
  Peptide Sequence Number=SeqID_71906
atgaacgccttcaggttcctcggggacatgacccacctcttctcggtcctcgtcctcctcctcaagatctacgccaccaagtcctgctcaggggtgtcgaggaagacgcaggagctgtacatgttggtgttcgtggcgaggtacctggacctcttcacggattatgtctcgctctacaactcggtgatgaaggtggtgttcatcaccagctcggcggccatcgtgtggtgcatgcgccgccacccgcaggtacgaaggacgtacgacaaggagcaggacaccttccgccacacggtgctcgtcgccgccgcattcctgctcgcgctgatattccacgagcggttcaccttccgcgagattcatgtttatgtgtatctatgttacagtagagaacttgatgatgagttctctgaagggcaatgcaatgcctag

SEQ ID NO: 28532 - DNA, 2370 bp, Zea mays
  Peptide Sequence Number=SeqID_71907
atgcagagccggagcctggagagcggcgccgcacggaacggggctagtgacgaagatccggcagagactacggcgacggtcgacggtgaggcgacagacaagggggaaggagtgatgcgaggaggaggaggaccgggcgtcggcacgccggggcgcccgcgatggggctccggcgccacgacgccgcggtcgctgagcacgggctcctctccgcgcggctcggaccggagctccgacgacggggaggagctggtcgaggtcacgctggacctgctggaggacgataacattgtgctgcggagcgtcgagccggcggcggccgcggctgctccggctccgccccgccgccacccggaccctaccccgtcctcgtccgcggccccgtcgcgctcgcgctcgcccgcgatgcgccggacctcctcgcaccgcctgctgcagttctcgcaggagctcaaggccaccgccagccgcgccaagcagttctcgcaggacctcaccaagcgcttcacgcgcacccagagccgcgccaatctcgcgggggagccaccggctgccgcgccctcgggcatcgacgccgccctcgaggcccgcgcccagcgccgccgccgcgcgcagctcgaccgtaccaagtccggcgcgcagcgcgcgatccgcggcctccgcttcatcagcggcggcaacaaggccagcaacgcctggatcgaggtccaggccaacttcgaccgcctcgcgcgcgacggctatctctcccgcgccgacttccccaaatgcatagggatgacggagtcacaggagttcgcgatggagctcttcgacacgctgagccgccgccggcagatgcaggtggacaggatcaacaaggatgagttgcgcgagatctggcagcagatcaccgataacagcttcgactcgcgcctccagatcttctttgacatggtggataagaatgcagatggccatatcacggaggccgaggtgaaagagatcattatgctgagtgcttctgctaataaattgtcgaggcttaaggagcaagctgaggagtatgcagccttgatcatggaggaacttgatcctgaagggcttggctacattgagctttggcaactggagacattgctactgcaaaaggatacctatgtcaactacagccaggccttgagctacacaagccaagcactaagccagaaccttgctggtctaaggaaaagaagtccaatccgaaaaattagcagcacattgaactactatctggaggacaactggaaacgtgtttgggtgcttgcagtatggattggaataatggctggattgtttatttggaagttcattcagtaccgtaaccgttatgtctttgatgtgatgggctactgtgtcacaactgcgaaaggtgctgcagagactctcaaactgaacatggcacttattctcttgcctgtatgccgcaacactatcacctggctgcggaatacgaaagctgcacgggcattgccgtttgatgacaacattaacttccacaagactattgcagcagcaattgtggttggtgttgtccttcatgcagggaaccaccttgtatgtgattttccacggctcattagttcatcagaggtgaagtatgctccactgcgcaaatactttggggaaaataaaccaacatatctggatctggtaaaaggagtggagggcataacagggataatcatggttgtgtgcatgcttatcgcttttactctagcaacaaggtggttccgccgtagcctggtgaagcttccaaggccatttgacaaactaactggcttcaatgcattctggtactctcatcatttgttcatcattgtgtacatatcacttgttattcatggagagtgtctataccttatccacgactggtacaaaaggacgacatggatgtaccttgctgttcctgttggtctgtatgtaggggagaggactctgaggtttttcagatcgggcagttattctgtccggttattgaagatgtctaaacctcccacattccgttacaagagtgggcagtatatgtttgttcaatgccctgcagtttcaccttttgaatggcatcctttctcaattacttcagcacctggggatgactatctaagcattcatgttcgacaacttggtgactggacacgggagctcaaacggtgtacggtcgacgatgtgctcgccgaggtcgtggagagagtccgccatgcccttcatttggcggcagtattctcccacggagagatcccgccgagagaaccggtgaaactgggcgtcgaggtggagcgccagagcctgccggttcccgaggaactgtccctcgagcgcgaaccacgcctggcgagcaatgtccgctag

SEQ ID NO: 28533 - DNA, 327 bp, Zea mays
  Peptide Sequence Number=SeqID_71908
atggccacctcccccgtcggcggcggctcggcgccacaagccgtggcttgcctcttcctcgccgccgggcatggcggactctctccacgacctcggcgagcacatcgtcgaccgtacactgcgctgaaccttctgcgtggcctcaacccccgctacggccacctgaaggctctcatcaagaggattgtgcccttccacaccttctacgccgtccgcaacgagcttatcctcgaggagctcaccttggagaccgaggcccctactctagcgccggccacctacagtgctcctcccggcggtcacggacagggtttcccacaaaaatga

SEQ ID NO: 28534 - DNA, 1314 bp, Zea mays
  Peptide Sequence Number=SeqID_71909
atggccactgcccaggggatcgtttcccccttttataggcagacctcctcgcttgcaccccttagcgtcacgggcgaagtccccactgacaacctccaggaaaccggtggtcgaaagggtggactgccacgcgacaagcatccaactgcaccacaactgtgtgcccctttggctccatccacatccggtggaccaacgcgaaggaagcgggcccgcatgtcatgtaaccggcgcgccggttacgacgtgcaagaagctccaccgccactcacgccaatgctgcgcctcctcgactacgggaccaggaccgggaaaggggacgttgtggaaaggatccttcccggcgaaggaagcaggcccggagccctcctactaatcaggggtttgaaggctggcccctcggaaggagcatgcagagtgagggatgactttgggtacgttcgatacataaccaaggctcgggttacgctcccgagacgaattcacgcctcgcccgagggcctcctcagacggcaagcgccccctcagctctcccgaggcctggctcgggcaggcttcgttgtgaagcaaccttggccataccgcctcaccaaccgaccgcttcgcaggcgcattaaatgcgggggatgcctgacgacgtatcctgacacacgcgcctcagtcggccaggccgaagtgaccgcagtcacttcgcccctcctctttactgtccgatataataggaaaacagcgccactcactccgctccgactgtcgtgtcagccaccccgacaacgactgacaacaggtcacgatcaaccaccgagctcaagccctgggtgcaacaggaagctccacctcgcccgacctcagatgccggcctcaggaggaggtctccgcctcgcccgacccccggacttggcctcgaccccggtctcgggaggaatcgcgtcctcgcccgaccccgacctcggccacaagagaagtctccgcctcgaccaaccctgggctcggactgaccgtgctgataggggatgcatcattcccctactcctagcctgctcaggctacaaggaacaagaccagcgtcccatctggcttaccccggcgatgggtaatgatggactcaggcgctcctccgacggccacgccatcacatgtacagcgcccaagctctcccccgacggccacgttggcatgtacacagggcttaggcactccactgccggacacggaccccccggggtcgaaacaccgacaagtagtgggcacggagcccgagcggtctggggcggctgtcgaacccttctgaggggccagccttcgaacccctaa

SEQ ID NO: 28535 - DNA, 750 bp, Zea mays
  Peptide Sequence Number=SeqID_71910
atggaatccttcgaccaaatgagagcgcacgtaagcgacaaggctggccgagggactcctacgcctccgggatacggatacctcactcatcaccttccacaaaaagttcgggcatcggcagggggagcagcagcaccctcggcgttgtttccaccctcggcggaaccagtcccggcctcggacgaaaccggtggccgaaagggtggaccgccacacgacaggcatccaactgcaccgcaactgtgcgccccttcggctctgtccacatccggtggaccagcgcaaaggaatcgggcccgcatgtcatgtaaccggcgcgccggttatgacgtgcaagaagctacaccgccactcacgccaatgctgcgcctcctcgactgcggaaccagtatcgcgactcgaggtacccctgcgcatgatccaacagtgccaattaaaggcgacggccacgggtcagtcagccgcggggtaggcacgacggttggtatggtcaaaagtgggccggcagtgactgcagcggcagacgagcggaggcagcagtcaagtcgcctgcaggctcgtgtcccctcccgaagcgacgggagagccctctcccacggcgtgaagacgacgcgctcgtgccccgttcctcgaacagctcgcacgcgcaacggtcgccacgcaaatcgcccgtcccgtcgcattaactccccgacagagcaggcaacacctctggcaggcgaggcgggcgtcgcttcgccttcgccataa

SEQ ID NO: 28536 - DNA, 261 bp, Zea mays
  Peptide Sequence Number=SeqID_71911
atgccgcccccccacctccccttttcccccaaattctttctccctccctctcattttctctcattttctctccctcaccctaagccgccgccgcccctaccccctgccctagcgccgcccctaccccctgccctagcgccgcccctccccgtcgccgctcggccgccccgctcggccgccccgccccgccccgtccccgtcgccgttaattgtttatctcgtgcgatgttgatcaacttaaaacgattaggttcccactag

SEQ ID NO: 28537 - DNA, 156 bp, Zea mays
  Peptide Sequence Number=SeqID_71912
atgggtcggcgcgagacggagcgcgaaggggggaagaaagggcagccggagcgagagagggaggtggaaatcccgcggccttcgtgtttgtcccgcgcccaggtcgggcgcaaggagaggatccaggtgtacaacgagggtgtagcagagtgctaa

SEQ ID NO: 28538 - DNA, 372 bp, Zea mays
  Peptide Sequence Number=SeqID_71913
atgctgcttcccgatttcatatccatgttccggcctcagtgctgctcctcgatctgttcccgccagacaccattcctgacatcaagttgcagttcctccccccgcccggctgctgtgacctcttcctccctccgtgtgccacgggcctaccgtgcgttttacattctaaactgggatttatcgttatttcacggagggtcatcgcagcagatggatcccttggcttgctggtttggtgcaaacagctctgtatgcagatttcttttactattatttcttaagttggaagaacaatgtgaagctcgagttgcctgcttgagcatgcttcgttttgccagaaagcgtgcaagctacgtgactcaagttttatag

SEQ ID NO: 28539 - DNA, 786 bp, Zea mays
  Peptide Sequence Number=SeqID_71914
atgtgcaccctggagcagcgcggccgcgtcttcgtcctcacccttaccggcgacggcgagcaccgcctgggccacgccctcatctcctcgctccgatccgccgtcgcctccgcggcggctggtgcggccaaggcggggcccggggccgcgctcgtcaccgtcggcgagggccgcttcttctccaacggcctcgacatcgggtgggcgggaacctcccgcgcgcgcctaggcgagctcgtcgacgcgctccgcccgctcgttgccgacctcctcgcgctccccatgcccaccgtcgccgccgtcaccggccacgcctccgcgggcgggtgcctcctcgcgctctgccacgactaccgcatcatgcgcggggaccgcggagtgctctacatgagcgaggtcgacatcggcctccccctcccgccctacttcatggccgtgctccgcgccaagatcaccgccgccaacgcgctccgcgacgtcgtgctcaggggcaagaaggtcagggccgcggagggcaaggatatgggcatagtggatgccgtctacccctctgcgctcgagacggcggaccaggccttcaagtttgccgagcagctcgcggcgaggaagtgggacggaggcgtctacgcgtccataaggatgtccatgtaccctgaggcctgcagtaagaattgcttagtttgcgatccaattcagtcgaggttcatctatatccaagtggaacaattcctcaagaaagacccacaagtttggacagctactactgactactgtgatataaaataa

SEQ ID NO: 28540 - DNA, 294 bp, Zea mays
  Peptide Sequence Number=SeqID_71915
atggctcggctgtcacctcgggaagacttctgcattaaccaagcgaggactatgatctcgataagtgctgaagagaatctcgacgtcatcacgcgccaggacgatgacgcaccccgtaagcagcctttggcccatacccagcgctgttacaaccactacgacacaggcggcctctccctcgggagctcgagcaaaatcattctagagtttctagattttatatgccctacaaaacaaaagctacaccaaaattctgtacgactcagagttgtatcttctagtccaaattcgtaa

SEQ ID NO: 28541 - DNA, 972 bp, Zea mays
  Peptide Sequence Number=SeqID_71916
atgggagacaacaagtctccgctgagcctgagcccgatgggcgggcgcgaccgggaccgggagctcctcatcccggtctcgggcggcggctcggcgcccggcgacggggtcgaggacggggacagggcctcctccgcctccgccgcgctatcctcctccggccgcgaggctttccataaggttgtccgcagttgggcttcaaagaagttcatgactggatggaagtcatttaggcagagaaacaactcactgagggatcaggcacttactgcactatgcccaagaactgaaaatactgcattatgcccaagaactgaaaatatatgcccagagccccagacttggcgagaaaatacacagccaaccagtagtgtaattctcttccccatagcaataacgttctacatcacctggtggttcattcattttgttgatggattcttctctccaatctatgctcaactgggaatcaacatattcggtcttggctttgtcacatctgttactttcatatttttgatcggagtctttatgtcatcttggcttggggcatctgtccttagccttggcgagtggattattaagcgcatgcctcttgttcgtcatatctacaatgcatcgaagcaaattagtgctgcaatatcaccagatcagaacaaacaggcgttcaaggaagtggtcatcataaggcatcctcgtgttggagaatatgcgtttggtttcatcacatcgtcagtatccctccagagttattctggtcaagaagatctttactgcgtctatgtcccaacgaaccatctttacattggtgatatcttcatggtgaattcaaaggatgtcataaggccaaatctttctgtgcgtgaaggcatcgaaattgttgtatctggtggtatgtcgatgccccaaattctgtcaaccctcgacccgcagatgatccttggggacagaaccggaccaagcagaagctga

SEQ ID NO: 28542 - DNA, 360 bp, Zea mays
  Peptide Sequence Number=SeqID_71917
atggcgaccgccaacatcgacgcctacaagtacgagttcaaggtgctcggcgccttcgtcgtcagcctgaccgtcatcaccctgctcgccaagctgctacgtctctgtctccgctcgctcatcaaaggggcgacgagcaggaggcgggcgaccgccgcggacgacgagctccgactccgagcaacgctggcggtccccgccgcgtgccgtcggccgtggtcgacgttggccgcggcggcggccgcggcagccgggaggaaagagtcgtggtgcagccgccgccgccgcagctgccggcgcctgcggcagtggccgtggagatggtgcggtcgatgggcccgctggtgtgcacgtacctga

SEQ ID NO: 28543 - DNA, 738 bp, Zea mays
  Peptide Sequence Number=SeqID_71918
atgcagcaggcccctacttggcgcaccaactgtcggcgtttcgaccccgggggggtccctggaccgacgagtgaattgtcgccgcgtgtcccagcccagatgggtcggcgcgagacggagcacgaaggggggaagaaacaggcaaaggggaaacccgcggccttcgtgttgccctgcgcccaggtcgggtgcgcttgcagtagggtgttacaagcgtccgcgtgggagagagagccttatgcgccgacccgttcccccatgcggccaaccttctcgtacgagagccctggaccttccttttatagactcgaggctgagtccgagccctggggtcgggcgaggcggagttcatcgtcttccggagccgaggctgagttcgagccctggggtcggcctcactctattgagtggcacagcagtcggagcgacgcaggcggcgctgttttcttgttaggtcggtcagtggagcggcgaagtgactgcggttacttcggctctgtcgactggagagcgtgcttcaggataaggtgtcaggcgatcctttcattgaatgctcctgcgatacggtcggttggcgtggcgatctggccaaggttgcttctctgcgaagactgggcctcgggcgagccgaaggtgtgtccgttgcttgagggggccctcgggcgagacgtgaatcctctggggtcggctgcctttgcccgaggctgggctcgggcgaggcgagatcgtgtcccttga

SEQ ID NO: 28544 - DNA, 384 bp, Zea mays
  Peptide Sequence Number=SeqID_71919
atgaagtggctgctgcagtatgccgagccggccattatcgccgccaccggcatatgcttgcctcccatcgcgcccatcaatttgttctccggccttggagcaacagatcgtgatttcagctcaagggctctatggaagggagcattcgtcgatgctttcctggctagaataaagaagaacagagaaaacatgaatcggaagaagatttggtctcgtagatcttctattttgcctgaatttgttggttccactgtgctcatttacaatgggaaaagtcatgtccggtgcgagatcactgaagggaagggaagtggagaggaggagcatcacagtgcacttatcactcagcgaggcataggaacagtagtctgttataacatctga

SEQ ID NO: 28545 - DNA, 1200 bp, Zea mays
  Peptide Sequence Number=SeqID_71920
atgaagctcatgatcacagtactgacacaagggcagcaccctgaatttaaatacctgacacatatgcacctaggatcctttcgaaaaagaagatcatgcccaatgctcgagggcgccactgaagacatggacctcatgggccggctcctcgatgagctcgacctgctgcagcgccactccccggatgtggaccttgacatggtggacatggaccttcttaaacatattgtagttcacaaaaaattcatcagcattactaaatatcactgcaagcttggtcttactgttttgcttgcttgtgtcactatgaaatttaaaattctagaggaaccgaagctggggagagcatggaagtttttatcatcaatgtctgaaatagtcgacttgaagaagctctttgctccatcaaccattgcagtgtactttagtggagggatgccacccatatgcagaggatctgtggaaataagtaaagataaacaagttaacatttcaaggtgtgaagttatgtggacgttgcaaggtgtactttgggcaaatgtagtctgcaagcaatctctgacagtaaatggcgaagaaagtgtcaaggttgggtttgagatgattgatgctattgtggaagctaaggccatatctgttagcagtagaaatgaatttgttaggcaaaataaattttcaaagtcgtcaaaagatgaacttaatggttctgaagtgaagcatgaagatgctccagagtacgaggatgttcctctgcagaaagatccaccagaaggttcagaagagttcagtaaacaggttgatgaagcctttcttaattatgaggtggccaagaagaggatgtatgcttttagtacgacaacttatattggttttcaggctgtaatgaccgaggaaatgtcagaaaaatttcgtggtttgcctggagtagttttcattttgcctgattcatatctatatccagaaacaaaggagtacggagccacatggatggccacaaggactacagacgtaggggatccaacgttcttcttctccacttcccagttcctacgcacggacgattcttctttcctccttcaaccttcttctgtggacacacattgcagcaaagagaaggaagagagaggagcacatccatggaaaaaggaaaggcttcgtaggggcttgctggcttatggacacactgggagctgcgactag

SEQ ID NO: 28546 - DNA, 711 bp, Zea mays
  Peptide Sequence Number=SeqID_71921
atggttgccatccaagggggtcaccctccttttaaaggtgactctccccacttgtgtcctcagccgtcgcggaccgagtcttctccaacacgctccaaggtcctcctcctacgacacgggggctgggtcccacgcgtcatgcaagctggcccaggacagaaggagccaaaactgtcgcgcgcagtgcgcgcaactgcccagcggttacaagccttcctccactatcgcccggaccagcgggtgaaagggcggaccgccatgcaggcggcatgcaatcacccggacttcgacgcgtccagcatggaggcccaggcccacacgtcatggaccgggaaaggggatactccgaaagggatccttctccgcaaaggaagcgggccccgagcccccctactgatcagaggttcgaaggctggcccctcggaagggttcaacagccgcctcagagcactcgggctccgcgcccactactggtcagaggttcgaaggccggcccctcggaagggttcaacggccgcctcaggccactcgggctccgcgcccactactgatcaggggttcgtaggctggccccagaagggttccgacagccgccttagagcacgcagagcgagggatgaccctgggtacgttcgatacataaccaacgcttgggctacgctcccgaggtaccctaggacatttccgagaccaacgggaacgattttgtaa

SEQ ID NO: 28547 - DNA, 897 bp, Zea mays
  Peptide Sequence Number=SeqID_71922
atgccagtggttgagctgtggttgctgctgccttctgctgcacctccggtcgatctggtcgcttccaacgtctgcgcgcccaacgcttctcaccttccgtcgccttccctctcacacgcacccacccgccgccagtcacagctaccacgcagctgcaccgtgcacccacccgtgacctatatatcccgcggcgccggctctcttgacctctcgccgccggcgcgcgcgctgttcctgtcgatggaaaacttgccgctccttggaggcatccggcagcaaccaaacactcagctggctactgctacgtgcctcgctgcgccgcagccggagcaacatgcgtgcagggatgcgacgacgacgacgtctctcgtcgttccggccatgagtttcccgccggctgccgtggactgggcgtcgctgcttctcccgcgcagcacgtcggggggcgcgaacgaactggagagcggcggcggtatcgctgaaacggtggccgggagcagcgctagcgcgacgacggcaggagagggggataacaataagaccggaaaggccgggaggggcggcggcagggggaagaaaaaggcgagccgaccacggttcgcgttccagacgcggagcgaggacgacgtcctcgacgacggttaccggtggcggaagtacgggcagaaggccgtcaagaacagcgcgtttccaaggagctactaccggtgcacgcaccacacgtgcgaggtgaagaagcaggtgcagcggctggccaaggacacgagcatcgtggtgaccacgtacgagggcgtgcacaaccacccgtgcgagaagctcatggaggcgctcagccccatcctcaagcagctccagctcctctcgcagctccagtcctgcactaatcaactcctctga

SEQ ID NO: 28548 - DNA, 756 bp, Zea mays
  Peptide Sequence Number=SeqID_71923
atggacctggtcgtgccgtgcctatttgggccgtgtcgtgccgagcggcccgtttgctcatctataattgggaagaatggaattgacggcatgtacacccgaggccagttgcagggactgcgacgatctggcaaagcagagtctactgtagcgcgtgggcatgcgtgcgccaagccgggcactcctgggtcctggtccggcctggtcgcctccagctgctgcgctgccacgatgctcgagcacgattacgacagtgctcacgtctttccttttggccgtcaacccctcgtggctgcgctgcgtctgcgtctgcgtacgtcggctcccgagcgccccgccccgccccgcccatacggaaagccacccaccaccaccgtacccggccgttcgcttcgtcggttcggggcgcgcgcgcccgagcgatgtgttgtgtccgtcgaggtgggcgcacctaacgtgaccggacggacgacgacacactgtgtggcatttggcgagagtcgagttgtgacgcgcccaatgatgcagccgatgcctcccctaagagttagtttggaaacaacattttaccaggagatttctattttcccaaagaaaaatatactaatttcccttggaaaaattaaagacttaagtaaatcagataagtttagcatggcacaacaaagcagaggcaatgaaagtgatcacagtgctttccaccagaacaaaataggaaccgctcaaattatgtctgtacaggcaatgcctgactag

SEQ ID NO: 28549 - DNA, 330 bp, Zea mays
  Peptide Sequence Number=SeqID_71924
atggggttctgtcaccgacgcagtcgagaaggctcgaagaatcgcttcggcagaagagcttccgaacgtgaagacttgttcggtccgcggaatcacttatccgaacgtgagttacttatcgcagaaggatccactttcgaagtagtcgaaaagcacgaaagacattctggcagaaaagatcttttttcgaggaaaatttcgacgcagagggggttccccccttttagcccccgagggagggtcaggctttgccgaggcaaggctgacccttccttgatgactaaactttgcgtgggagcgaggtatatgaacaacttgaaaacatcttaa

SEQ ID NO: 28550 - DNA, 609 bp, Zea mays
  Peptide Sequence Number=SeqID_71925
atgaacaaaaacactggcattcgaagtgccattacaaacggaaccccggttccacctccgcaggtacgaacaaccccactcgatggggggcctgcggtgcaacagaagaccgacgaacggcgcgccgccgccagctccggcagtggcgacgacgatgacttctgctccggggggccgaacagcggcaacgatgacctcagggcggatgctgctgccaggaggcccccgcccatgcccaaactcgtgaggcaaggacgggcagaaggccgtagaattggaggtcggtccgtgggcggctctggctatctcgtcggcagaagaacctcttccagctgccgtggcggaagccggcgccgagaacggctccgaagccactcgggtctgagagccaggcacgcggcagctgccagcgccacggacgacaaccgcccttccccccgatcactgagggaaggagcgggccaccgcccacgcaggggccgaccccaactcggcacactcccctccccagccctggtgatgaaaatccttgaggctgagggaggggcagaggtcgtggcccggttcgctttcccccgccatcgaactggaggtcaccatcttgggtga

SEQ ID NO: 28551 - DNA, 279 bp, Zea mays
  Peptide Sequence Number=SeqID_71926
atggctgaaaggtaccaactcccgcagagttgcgttcctccaacgacgaggcggaaagacggcgggtatcccccatccgggggcttggaaggtggaaagacacgatgcataagggagcgcgaagacatggtcgccttccaggatggtcaccctccttttaaaggcgactctccctacttgcgcccccagccgtctttcgccctattcaccccccctctaggcgactatcaattggtatcagagcccggttcttcattagagcctaaccgctcgaagtga

SEQ ID NO: 28552 - DNA, 474 bp, Zea mays
  Peptide Sequence Number=SeqID_71927
atgcgcttccctcgtcgggctgccattccctcgtacggggaccggaggctcctccgaacccggggtcgagtctcttacagggccgaggccgattccgagcccctgggtcgggcgaggcggagggtcgtcagccgaggccgagtccgagcccccggggtcgggcgaggcggaggtccatcatcaaaaggccgagtccgagccccctgggttcgagcaaggcggaggtcgttcgcagaggcccgagtccgagcccccaaggtcgggggaagcggaggtcgtcagccgaggccgagtcccagccctgggtcgggcgaggcggaggtcgtttgcagaggccgagtccgaacccctgggtcgggcgaagcggagtcgtcagcagaggccgagtccgagcccctggtcgggcgagattgctccaagttgagcacgcttaactttgatgttccaaacccatcccagattgctctaagttga

SEQ ID NO: 28553 - DNA, 462 bp, Zea mays
  Peptide Sequence Number=SeqID_71928
atgggtggctacctgctttatgcctactcagagcattattctatcactaagcaggacaatgccgaggcagccttgcaggactctgcactttgtgtgctttcgcagtactgcttgttgctaagtggggtagctaacggcctcgacctgaagtattacccccaccgctcgacaggaagtacaggaggtgtgattgtctcaccagttggtgagggcaatcccagattgagcagcatggtcaacctggtcgccgtgctcaacaccgagctagaccacgcccttgacgagttgggtaaggctcgggctgagattgcggaactgcgtgctaagcgcgcggagcgccaccatcaggaggatggttcccctgcccctgttgggactcaacacccttatcgctccccgccccgtggtcatcatgcttatggcacccctgactgcaggaccaagatagacttggagccctag

SEQ ID NO: 28554 - DNA, 279 bp, Zea mays
  Peptide Sequence Number=SeqID_71929
atggttgagatcaaatgccaggggtcgacggctgcgggcagcgcttctcctgcccacaacggcgaagtcgccggagacagggcgggtgcagactccagggcatttgaggtcgccggagatggcctggactggcgaggagggccccgcgaactcactggtgggactccggccgcgagaacaggatcggaggcaagagaacggtggagggggtgctctaggcgggtcgagggaactttcgtgaggaatcctggctgtggggaggggaatcgggcgtgctaa

SEQ ID NO: 28555 - DNA, 1473 bp, Zea mays
  Peptide Sequence Number=SeqID_71930
atggacaagaatcaaaatctagcatatgctccttacattatggctctcatcaaatccaagacaagatttgagggctcatgcgagattgttcacaccccattcaggccttttaagaatgaaatagggtttctcaccaggccactcactcccttcccagatgatgaggaagaccctggctatgagggtggcgcagctcctaatgttgagggacagcagatgcctcctcctccacctcctcctcagcctcagcactattgggagcctgctccaggatactttgatccttattttcacaatatgcagcaagggcttgagactcatattgatactcgctttgagggcctgatgactcatgtggatcaccgcctcgatgacatgcagtctcgctttgacagtaactgggatgcgctcaactctgaattttctgagtttcgtgatcaaattcacactaatatcactgatcccagcatgtccaggttgaataatatgcaacagagttttcaagataacatgggtgctctctccagtcaatttgacaatctttctacaactgacaacatgcatgatataagtcagaggcagcagcagctccagcaggattttggccagttctcctccctgtttgacaccttcagcactcactactacaacatgcatcctccgccgaggagacaagccagatttggcgtccgcaaatctccctacctagggcatatctgccattggaactcacatacaagagacaaccctaggtgccaggaggaggcctacgccggatttttgccaagattcgcacgtttgcgatctcggcaagctgttgaacatgggcagaagaacacctccacgtgttcgacgtgccctgaacgcaccagagcacgcccagcgcccgaccccgcgcgccccgcgccgcgccaagccacgcccgtgttccttgcccgcgcccacgcctataaagccaaccaaggcttcagccgtacgcccccgcgcgctctcgacctcaccggagcacgagatcgccggtgttgcccctacacacgacgtgccagcggccgcctgagcacctgccaccgtagaccggccagcagagccatccccaactccgtccaaccctcgagagagactctacgtgcctcggtgaagctcccagagcgagcaattgagctctgcctcaccggacacgccggatcaaggtcaccgaacttcacccgaccgccggcgaacgtagaccgagctccacggccggagcactcgccgccgacgagctcgcccgcctgcgcacgtggaccggttgattccggccatcatcgtcgtcgagtcgtacctcgttgtgatcgcaacgacctcccgaagccaaccccacccttcgccggacctccctcgccgccggaggtagcccaggagccagcaccagagcctgccatcgaggatctgcctgccccagctttggaaggcaagccccggttttatgcataa

SEQ ID NO: 28556 - DNA, 765 bp, Zea mays
  Peptide Sequence Number=SeqID_71931
atgcagtacaatggatcaagcagtctcattagctgcgagaagcagatgattcgaatcgagtttttatccttgcaagtgaccgcacttgtaaccaccataaccggaatgggagaccacgtctcaggtcgcgtgaggggcaaagtctacgggcagatcctcgatggcaggctctggtgctggctcctgggctacctcctgagcaactccttgctccggcacgaggatgcgggcgagctcgtcggcggcgagtgcttcggcctatccaaggcgatacaggtcaatccaagggcatggggagcttcacggagtgctaatgagtcgacccgtgcaaggaatcaaagaataactcaccgtggagctcggtctacgttcgtcggcggtcgggtgaagtccagtgaccttgatccggcgaggcagagctcgattcctcgctatgggagcttcaccgaggcacgtagagtctctctcgagggttggacggggttggggatggctctgctggccggtctatggtggcgggagcgggcgcgggcagggaacacgggcgtggcttggcgcggcacggggcacgcggggtcgggcactgggcgtgctctggcgcgtttagggtgcgtcgaacacgtggaggtgttcttctacccatgttcaacagcttgccgagatcgcaaacgtgtgaatcttggcaaaaatccggcgcaggcctcctcctggcacctagggctgtctcttgtatgtgagttccaatggcagatatgccctaggtag

SEQ ID NO: 28557 - DNA, 495 bp, Zea mays
  Peptide Sequence Number=SeqID_71932
atggacagaggcggagtcggctcgaaaaggggcttcgtcggcctaggagcaggtggattcccaggccgaggaggtgcagcagcggcggccggagcctggccaggcacggtgctgacatcttccttcgaggtggagatccttccgcctgtgtcgccgtcagaggccgggccagatcccgccgaaggtggatacaacgccgagggtgctgctgctccctctgtcgatgacttgtttgtcggtagcagaatcacttatccgagcgagagttatttatcgcggaaggtgatgagtgaggattctgttatcgatatagtcgagaaggcacgaaaaattgttctggcagaaaagttttcgagcattaagacttgttcggtcagcagaatcgcttatccgagcgatcccgctatcgaagcagtcgaaaagcgcgaaagatgttctggcagaaagactttttccgaggaaaattttgatgcagaggaggttccccccttctag

SEQ ID NO: 28558 - DNA, 414 bp, Zea mays
  Peptide Sequence Number=SeqID_71933
atggagataattggccctaaagtttggctgtcagatactacagaaactgaatatggactatcaaaaaatgcctctgaagatcctcggttagaacaactgatgaagcttccaatgatacagtgcactgaaatatcccagggttcagtccccctcgccgccggtgatccacgcgcccggattcgcaccaatcgtcgtgattcgtgcctagcacgccgtggatattcgcagggagaaaacgaagaagtagaagttgaagaagcaagagctacaccaccaccacctgaagaacctcaggccgggaactgcttttattttgacatctgtggagcagagcccgactcacctataacacaaggcaagccccggtgcatttgccacctccttgctattttaaaatctttctcacttgcttga

SEQ ID NO: 28559 - DNA, 435 bp, Zea mays
  Peptide Sequence Number=SeqID_71934
atgcaggtgacatgcaactgcaccacggggacacaccctttcgacttcgacgcatccagcatggaggtccaggcccacacgtcatgtaaccggcgcgccggttactacgtacgaaaaactgcaccgccacttgcgccaatgccgcgccttctcgactacggaatcagtgccgtgactcgaggcaaccctgcgcatggcccaatagtgccaaccaagcacatcggtcacgggtcagtcagccgtgggagaaggcgcgacggtcgatatggccaaaagtgggccgaaaggaccgagaaaggggatattccgaaagggatccttctccgcgaaggaagcgggcctcgagccctactactgatgaggggttcgaaggctggcccctcggaagggttcgacagccgccctagagcactcgggcttcaggctcattactga

SEQ ID NO: 28560 - DNA, 816 bp, Zea mays
  Peptide Sequence Number=SeqID_71935
atggaatacctctttgatgaaccctgcagccaccagcttgtggatctcctcgcctatggctctgcacttttcttcgtcgaaacggagcagaggctgcctcacgggtcgggctccagctcagatatccagcgagtgctcggcgacatccctcggtatgccgggcatgttcgagggactccatgcaaacacctcagcgtttgcgcggagaaagtcgacgagcactgcttcctatttggggtcgagctcggagccgatccggacttgcttgcaggcgtcgttgctggggtcaagggggacggacttaaccgcctccgctggttcgaagttgccagcgtggcgcttcgcatcaggcacctccttggagaggcactccaggtcagcgatgagggcctcagattcggcgagggcctcagcgtactccatgcactccacgtcgcattcgtacgcgtgtcggtacgtggatccgacggtgatgaccccgttggggcccggcatcttgagattgaggtaggtgtagtttgggacggccatgaacttggcgtagcatggccttcccaacaccacatggtaggttcctcggaacccgaccacctcgaacgtgagggtttcctttcagaagttagagggagtcccgaagcagataggcagatcgagttgtccaaggggctggacacgcttcctgagaatgatcccgtgaaagggcgccgcaccggcccggatcatggacagatcgatctgcaacagcccgagggtctcggcgtagatgatgttgaggctactgccaggctggcgttcccgtccatttgtttaatttaa

SEQ ID NO: 28561 - DNA, 693 bp, Zea mays
  Peptide Sequence Number=SeqID_71936
atggagttcgacaattcctcccatagagtgcttggaacagtgatgtcggcgtttcgaccccggggggtccctggatcgacgagtaaattgtcgctgcgtgtcccagcccagatgggtcggcgcgagatggaacacaagggggaaagagaactgcggcttcgtgttgtcctgcgccagagtggatgcgtttgcagtagggggttacaagcgttcgcgagggagagagagagcctgttcgtcagcccgtcctcccacgcgaccaccctctcgtacgagggccctggaccttccttttatagatgtaaggagagggtccagcctgagctagctaggggtagggtaatgatgatcccccctgtggcgtggtcggtccgagcccaaggtcaggcgaggcggagactcctgaggctgaggccagggtcaggcgaggacgcgattccgcccgaggttgaggtagaggctgggccctggggtcgggcgatgcggagaccaccttccgaggtcgaggtcgaggccgagccctggggttgggcgaggcggagcccaccttccgaggccgaggcgggggccgagccctggggtcgggcgaggcggagaccgtcttctgaggccgaggcgggggccgagcccccggggtcgggcgagtcagtggtggggcgaagtgactgcggtcacttcggccctaccgactga

SEQ ID NO: 28562 - DNA, 285 bp, Zea mays
  Peptide Sequence Number=SeqID_71937
atgaggaaatgggcaaggcctagcccactactcctcatgctcctctcctgccggagcaacatcccactcgaccgtccaacccggtggcagggtggtaggccaagtcacaccatcaactacatcctgcatggtacctgcaaaaatggtgccacaagcaaggctgagtatactaatactcagctagacttaacctgttacaaggaatcaagcagtctcattagctgcgagaagcagacgattcgaatcgagtttttaaaccttgcaaggggaaaggaatcaagttga

SEQ ID NO: 28563 - DNA, 540 bp, Zea mays
  Peptide Sequence Number=SeqID_71938
atggcctccaaagataacattgatctcccggtcaatgcgtgggaaagcccagccaccgccctcgccctgctactgcagttgaccttgctcggcgggttctcatcacggtggaggacgcgcactgggggtgcttgttttgtgttccaaatgaggtttttgggtcgttcgtcggatggggtcttgggcttgttcgtcaacggtgatgtagacatccgcctcctggaacagttgttccgaggtggtaggtgccttctggatgatagccgggacgaaggccgagtcattggacccacggtagaaatcctcgatcacgactgcctctgtgacgtcggggatgcagttcctcattgtctggaaacacctaaggaacgagcgaagggtctcatcgccctggcgcttgatggacttgaggtgccatggttgtgccggtttgtcgggaagggactaaaagttcgcgacaaaccgacagctgaagtcatcccagttgtcgatgctgtgtcgtgggagatgtcggagccactgcagcgcatcttaccctag

SEQ ID NO: 28564 - DNA, 870 bp, Zea mays
  Peptide Sequence Number=SeqID_71939
atgaggctttcacaggatacacttaatacaaagcaacctgctaagatccctgatggtaatgatcttggtggtttgtgcgaggaagatcatggcttcttctgctctgctgaatcacttcgcccagacttttctgctggtgaagaagttgagaggctagctatgaccgagctaatagaggtcatttcagaagagaacaaatctggacctctgattgtgttacttaaggatgtagagaaatcattcattggagttaccgagtcactttcatctttgtggagcaaatttaatcgcttccatctgattggaagcagcagttggatcgtgatgttgaaacccttaaagccaaatcaaacattggtagcattcgcacggactgagattgatggatattgtgaaggtgaactaatcaaggtacctttggtaaggccttctattatattatctgagattgatggatatgatttgatggattttctgatagatgattacattggtggaccattcatcacagatgaatccctctatgaagttccaaacagctgcacaaatcttaagagagaggtaggaacaacaatggtcgttgttgctgcacaaacaaaggctattgctgaagacgaggcgcggtacgactggcgacggaggcgtttagcagcagagtcgacatctgacgagcatgggcaactccagatgctgattgttcgtgggaatcgcaggcgaggtcgtcatcggcctcccgcgaagagactcggcgagaagcagcatgacaacagcacaatctctggcgacgtcacgggaaggacaccggattttcggcgtcgaacatggatggcggtcgatgctgggcaggagagagcgaggcggagttgctga

SEQ ID NO: 28565 - DNA, 636 bp, Zea mays
  Peptide Sequence Number=SeqID_71940
atgaggccacttgggaaagagaagatgaactcagagcagaatttccccagttattctcagaagttccttaatatcgaggacgagattcttttagggggccgcgcgcggacgcgtcttcactgcgcgccgccgggcttgcagccgccaaggcgcctggtcgaccgcatccaggccgtttttcgtcgtcgtttcaccaccctgcgttatggagcatcaagtggcggtcgtttcttcctccccccattcctcctctgcccatttacgagcaggaaaccgtcggcgccattgatggcgcttgatggagccgtcggccgttttctctcccgctggcgccctgtcctctcccctgtgcctccctataaaatttggttgagcccctactcctctccctccctgcagccgagccccctccgtcttcttcctccccttgccgtaaagctcgccgtcggagctcgccgtcgtgcccttgtcgttcgtcgttcgatcgccggagccgtgccccgtccgagccccgtcgagcctagccacgcccacgcagtgccccagctgcgccggagccctcgcagtccgctgtcgaccgcgccatgcctcgtcgtcgtctgttcgtccaaggttgaagacaacccaaaattttga

SEQ ID NO: 28566 - DNA, 525 bp, Zea mays
  Peptide Sequence Number=SeqID_71941
atggcgcttcctgtcgacgtggctggcctgtgccctaggttgggcgacgtggaggctcctccgaagccggggtcgagtctgtcttccatggccgaggccaagtccgagcccctgggtcgggcgaggcggaggtcgccagcagaggccgagtccgagcccctaggtcgggcgaggcggaggtcgtcagcagaggctgagtccgagcccctgggtcgggcgaggcggaggtcgttcgcagaggccgagtccgagcccctggggtcgggcgaagcggaggtcaggccgagtccgagcccctggggtcgggcgaagcgaaggtcgtcagcagaggccgagtccgagcccctggggtcgggcgaggcgaaggtcatcgtcttccggggccttagcccgagtccgagccctgggtcgggcgagcggagttcgtcgtttccggggcttaccccaagtccgagcccctgggtcgggcagagcggaatcgccgtcttccggggtttacccaagttcgccgtcttcggggcttaa

SEQ ID NO: 28567 - DNA, 981 bp, Zea mays
  Peptide Sequence Number=SeqID_71942
atgaagaagaccttgatggagatttcgatgaatattgactctaacgatgcgccgatggttcgcacccttcaaaccacccgagtcaacaccaactacgtccctccaccacggcaagttcctgtctaccatgtggtagtcgaggaaattcctatggatctccctcgccttcgtgtggatattggagttatcctggatgacaactcggaggaacttctgcctacgcccactccgttggcagaatcactagccttcgcagctggatcgtcagcttcagcaccgcctgcaccagcagtccaagcccctgctcccgaaggcgatgacccggatgactctggggacgatgatgaagatgacaacgatgaagaagatgatgaggagaacgtcaacaaagaagccgacggtgtgcagcaggactactttatggggtcagggcctatcaccgaacattatacatcaatgttcgagacaggacacttccctaacctgctgcaggatgttctgcatacgttgggaacctacgtccgacccttgtacgagacaaggcgattgtgcgagcctcctcgggcttgctactacatcactcgcattcatgtcagggtgatggatgcaggggatagagggttcagaactctatcagctcatgagtctctgacaccgctatccacatacgctgcttcggtcagcgatactgctaggcggactttatggcctctcagccacacctaccagcagcagctgcatgacacgaagtacaggcatctttctctgtgtcttagtggagggagccagaccagcattatttcaggtggagctggagaggatcgcctcaacaccctagctggtgtagtggcaggtctttataccgacctagaaagtgctaccctggacctctctagggttcacttggagctggaggatgcccatgcaaggattgcaacgctggaagctcagctacaaggaagggatccccctaaagcctaa

SEQ ID NO: 28568 - DNA, 774 bp, Zea mays
  Peptide Sequence Number=SeqID_71943
atggtggacttagaagaattttttagcactggtcttcgactgcccattcaccgcttcgtggtcgaagtcctacagcgctttcggatttttgcaaagaattactacctccattggcaaaagaaggttgctgatggcaagattttgcagtttggcctgtgcacctttacgccgaggacggggaagacttcgaccgaagtcgtggagcatctgtcgtgtgtcaagaacaatggggggactggtggaacttttggttctatgttcatatggaggatggcgaaggggtccgaggcttccttagagtattttgtgctcgcattgttatgtagccttccccagattcaaggtgaagaaggggatggtgatgaagtcgctctttgccacgcgtctaagctgattagcgggcaggatttgattgaggagtttcttgcttgcagagtaaggcctttggggcatggatggggagtgggggaattgaatggtttcccttatgcccgctatccggaagaggcctctaaggacgttgatgacatagtcgagggcaataaaaacgcttgggatcgaaaggagtcctcaaagaagaggaagacctcgagggctccattgcatctgatggatcctcgtcgggagacaaaagctcttcgggcgacggctgctggtgggtcagggcctagggccatggccgccaaggctgccactgctgctaaggtgatgccacctccagctgcacctgctatcctaattgcgacagtgtcatccctggctaaggctgcctag

SEQ ID NO: 28569 - DNA, 450 bp, Zea mays
  Peptide Sequence Number=SeqID_71944
atgctgaaaggccacattgaggttttgaagaatgccaattacattagtgatacttccattgttaggcttggtggagaagatactacccttccgcctaagaaaaatgaggtgttcgaagctacaggctttgtctaccccgactaccctcgcccggcgcaaggcggagcaaagaagagaaagggtgtttcaaaactgctagcagacgccctgaagcaaaaaagggtaaaagttacaacgaagcgtcgcaaagtaaactttgaaggagaggctgttattgaatcaatgttggctttgaagattacttctattgaagaggttgttgccaagctgtcactgactaacgaaccaaaggtcggttcctttgaagtgacaaagggaatagaggagaagaatgaggaagaagtaatcgagctatccatcggggataaatttcctcttgctagcatgtag

SEQ ID NO: 28570 - DNA, 144 bp, Zea mays
  Peptide Sequence Number=SeqID_71945
atggcggggagcgtccgagagaagccagaagcggagcaccacttgcgtgtggagaaggctcatgactctctacggagttactcgaccaagttagattatttaggattgaaacttaggctctgcggtagagatagcaacacttag

SEQ ID NO: 28571 - DNA, 753 bp, Zea mays
  Peptide Sequence Number=SeqID_71946
atgggcgagttgcaacagcgcctgaacccaccacatgggcgtgtccggggccgccacgtgtccagagaaagtgatatactccaagacatcaacagtgagtccggaccccccatgggagagtgccggacccctgtatattcggtccaggcctccaagtttggcccaagacctccaccgggcgcgtgtgctattgaccggtgggtccgcacggatgggtctgtcttccacgcaaagctcacagctaacgaactgggcgccgccgcggaatccggctataccgccgcactcctcgcgactcaaccattggatagcccaaatttcttgtcgccattgacggagagagagaaccgggtggtgacagtgccaccattcgcgctgtgccgccgccgccaggcgcgcaattgctaccccctgggcctcggcggggagttcgcatggggaatctccgggactccactgctcgaggtcgacctggggatgggcgaatcgctcttcggtgtttcctccatccacagatccgggtgcgtcgtggatggagcacatcaactctcgtatgccggtaagaagtcgtccaacgagttctatttcacctcctccacatgtagagtagagcggagcaaggtttggggtccctgggcaccggattgcggactgcgaccatggcaccaccgcatacgctggagcaccgccgcgtctggtggcagcttggaggtgaagggccgctggccgaagattcgatcggggacggcgtag

SEQ ID NO: 28572 - DNA, 147 bp, Zea mays
  Peptide Sequence Number=SeqID_71947
atgcctgggatccccagggaggtgatcgagcaccatctaaagatccaccctgacgccaaacaggcacacagagttgtggtggtgacctccttcccgttaaaggccattctccacaactctaacgccatgggcaacatcgccaagtga

SEQ ID NO: 28573 - DNA, 1143 bp, Zea mays
  Peptide Sequence Number=SeqID_71948
atgctggcgatatctactacgtttgatgttgttgagcggacctcaaaggacaataacaagacactacagcgtacctcgaataacaccagatgcctcaacctaggctcctacaactaccttggctttgctgcagcagatgagtactgcacaacacgtgttattgagtctctcaagaaatactcagcaagtacctgcagtgttcgtgtcgatggcggtacgaccaagcttcacaatgagctggaggagttgcctgcgcgttttgttggaaagcctgctgctatcctatttggcatgtgttatgttacaaactctgccatcattccatgcctaattggaaagggcggactgataattagtgactctctgaatcataacttaattgtcaatcgcgtaagaggatccggtgcaactgttagggttttccaacataactcccctgctcatttggaagaggtcctgagagagcagatagctggtggtcaaccatggacacacagaccatggaagaatattattgtcattgttgagggtatctatagcatggaaggggagctgtgtaaactccctgagattatagttgtctccaagaaatacaaggcctacacatatctggatgaggcccatagcattggtgctgttgggcagtctagccgcggtgtttgtgagctccttggggttgaccgagctgatgagataattcagcaccttaaacatagttgtccgccccatctgtatgctacttccatgtcgccaccaggagtccaacatgttatttctgctattaaagttatccttggggaggatggctccaatagaggtgcccaaaaacttgctcgcatccgcgagaatagtaatttcttcaggtcagagctcaagaagatgggttttgaggttcttggtgacaatgactctcctgtcatgcccataatgctctacaatccagctaagattcctgcattctctagggagtgccttagacaaaagcaatctgcatgtagtccatatccatcattatttgcacccactggtttcgttcttcctatctgtcatggttatcagcagagttggcgaccttgtgggcatcaaatattccatgcagaaccaccaaagattgctggagctggtcatgataagttggagtag

SEQ ID NO: 28574 - DNA, 225 bp, Zea mays
  Peptide Sequence Number=SeqID_71949
atgagcgactggaaaggggaaaatgagcaaattgaatgcaagcaattcttgatgaagccaaggcacatatcaacatcaccatgcaacagttttacattcttacttgaggtcgcagcggttgccgggtggtgggctatgacggagtcgacgccgcagcggtctttggctaagccgccgtcggccttggtggcgacgatgccgtgcaagaagaggagcagcgggtga

SEQ ID NO: 28575 - DNA, 204 bp, Zea mays
  Peptide Sequence Number=SeqID_71950
atgacctacacattgcattcctatgcatacattgaagtgatatctgcagtccttcttgcttactttcacattagttatgggagctctaatgttcatgttgatgtcactaagacaaggcatacaaacatttgctctcttttgcaggaactatttcttaaaagtcttctatttagtttcatcctttggaaaacaagtctgctataa

SEQ ID NO: 28576 - DNA, 315 bp, Zea mays
  Peptide Sequence Number=SeqID_71951
atggaccgactccagcgccggaacacccacgacctccgtgagggccgaccttccaaccccccatcggcatcgaggcccctacaagagttggagccctcctccccagttttctttcgctctgagatcccagctaacgcggagcttgccttgacacctgtgggtcgcatcatggtgtcccctcagatctcccacaaaaccctcagcttcctactcctctccgccttagcagcggtcgtcttgccaaccaccaaagacgaggtgatgtccttgacaaaagtcgattttcagaaggaggtcagccaggaccatgtgtaa

SEQ ID NO: 28577 - DNA, 471 bp, Zea mays
  Peptide Sequence Number=SeqID_71952
atggttcagatcgtcgagcaccgtgacttgtctctcgaggacttcctgatggaggaaggggcagcatcttccatgccacgaggctcttaccgccctgcgtctggtgctgctgctatgcacgctgcgcagcaacacacgcccgcacagacatccagggctctgtcgagggctgctcatggtggggcgttgtctgcagctagggagttgctgcgtaacccaacaagttccatggcctcgccgagggccatgaggcagtggcgcgaagatgtcgactgtctccgcgggcgcatgagcgccgacaaaactttgaggggtcgcaacctcgaccaagacttcattgcaagggacgcccaaatccaggcgggttctctggaggacatggttgctgcagtgacttggccgtccatcttgccaccgggttggacagtcgagtgggaccctacctcggcagaggaggagcatgacgagtga

SEQ ID NO: 28578 - DNA, 159 bp, Zea mays
  Peptide Sequence Number=SeqID_71953
atggggaagcctgtcccatcactcgtcatgctcctcctctgccgagtgaccacacttgtacccaccataaccggaatgggagaccacgtctcaggtcgcgtgaggagtaaagtctgcgggcaggttcactcaggatttagaaatcattatgctaagtga

SEQ ID NO: 28579 - DNA, 366 bp, Zea mays
  Peptide Sequence Number=SeqID_71954
atggcggtcagacgagggattcttgcaagtgctcttcccataaactgtagcggatgcacccggctttgtcccttaaaaccgggtgtgacaccggacacatatgacagagagttcttccaagaagatgggctagaagggcgatttgggatagacttaaccgaagctatcgaaatggaagtagatattgaaatggttgttgatgaggaagatgatgaggtgcaaaatgagaatgacttagaaatacttgaaggcaatgacattaatgacgaacttgcgccttcagatggtgttggctatgaaatggttgacagtgatgatgagagttatgatccggctaaccccgacacatatgaagattatttttaa

SEQ ID NO: 28580 - DNA, 1131 bp, Zea mays
  Peptide Sequence Number=SeqID_71955
atgtccacctcgaccatgccaggcgtgcgcatgccttgcctcgccttgagccgcgcgcgctctgacgcggcgagcttgttccactcccccttccacgcgcagcagaccaccagcctcgccgtctcggtcagcccgtacccgtggctgacctcgaacccgatggactccgtgcggtgcagcacggcagccggcggtggcgcgccggcagttaggatgcgcaccctcgccctgctcgacatcgcgctcgaggacatcgcctggctcatccgcgtctcgtccctgcaggacaacgacggcgacggcaacctgcgggggctccccaacatcgcccagaacgagcccgtgcttggcatggtctgggacaacatcgcgcgcctccacaccggcggcctcgctgcgcgggacgacgcggccgccaccctcgcctccctcgccgtgggcaactcctacttcgccaagtacatcgtcgaggaggacgacgtcgctgtcctcgtcaagctgatcaaggaaggcaccgacgacgggcaggaggccgcggccatggcgctcggcctcctctgccgcgacgaggacagcctgcatatgctcctccactctggggcgtgctccgtgttcgccgctgcgctcaaggagccgctgatgcgcgtgcaggccgcggtcgcggatgccatcgcgtcgctggcgcgccacatccacaagtgccaggacctgttcgcacagagcaacgacgtccggcatcttgtcacccacctcgcttccaccccgtccataccaccgccctgcccgcacctcgccgcgcaccgcctgtcctcgcgcccgctgcgcttcctccgccgctacctgtgcgtccgcccgctcggccgccccgagatccggcgggacccgcgtgagctcccgtgctgctcgccctgcgccgtcgcgtccccgtcccccacctcccgcctctacgcctgcctctcctgcgccactgtcttctgcccctcccacgctgccacgcacacctccgcctccgcggggttagcggcgtttgcggagcggttcgcggcggttgggtgttcgtgccttgcggagcggtcgcggcgggcggttggcgggggcggggtcacagcgggatcgggcgggtggttgtga

SEQ ID NO: 28581 - DNA, 342 bp, Zea mays
  Peptide Sequence Number=SeqID_71956
atgggggagtggtcgaaggcgatgctggccaagcccatccagctcgcggaccaggtggcgcagcaggcgggctggcagtgcctcagggcagactgcacggagctacggtcccgtgccatgaagctcgccgatctcctgcggcaggaggcgtgggtcgagtcgtacgagcgccccgccgcgcgtcatggccgacacggagcaggcgctccacaaggccgcgggcatggccgcgcgctgcttccagagccactcacgcctccgccgcttcttcacgctcaacccagtgtccgggctcccgcgcaccctcaccctgctcaacccgcgctcgaggacatcgcctga

SEQ ID NO: 28582 - DNA, 426 bp, Zea mays
  Peptide Sequence Number=SeqID_71957
atggccggacctctgctcggccagcagcttgggcgcctgaagttccctatgctcggcgccccttcctgcgcagcgccgctgctccacccctcccccagcgccctctctctcccatggccgagcagcagctctgctcgccccccctcttttttccccttgtgcagcaacaccaacctcctcttttcctccacaaaacagcagccccgatcccctccgcatcgcgtgcttcgttcgacctgcgcagtcccaacccgcgccgtcgcgatggtgtttgagacagcccatgtcgtgtcgttgatctgcgcagttcgaccgtctacgcgtctcacttcgccggatctgcgcagccccaacatcgacgccgttcaccccgttatgagcattggtaggatcgcgattgcggttggagaacaagaagttgtttga

SEQ ID NO: 28583 - DNA, 612 bp, Zea mays
  Peptide Sequence Number=SeqID_71958
atggctgcctctaccatgcgcaagggagaccagagatggacgtcatgtgcaggagctcggctgcaagggggacgcgcccatggggaagaggaggagctgcagctcgcctacacccttggagccgaggagaggaagggcgccatggggggctctgtgtcctgctgcaagcgccatgggagaggcttgctgccgtggaggttgtcggctggagcagaggggcgagaggaactcgtctgcgccaaggaagggagcagggagcgccagggttgggtgctcggctgctcaagcctcgtcggtgccatgggaggaagggaaggaagctccctgcgcgttggggaagaaggcgtgggggagaaaaggctgatggcggctggaaaaacaataggggtgggaatgcaaaatgaccaagggcaagggagagggatccgtatttatagagaaaccctagggttagggtttcaaatgggcccaattgggctggtttgggctggcccaaacgcgcaaacgggctgcgctaaattatttttccgaataaaaatgctcccgcggaattcgtttctacagagaacagagcgaattagagtttcggcgaacggacgattgagcgattaa

SEQ ID NO: 28584 - DNA, 477 bp, Zea mays
  Peptide Sequence Number=SeqID_71959
atggtgcaaattgggtcaatgagcttccgtccgtattatgggggaaccgtaccacacctagccgagctaccggggagacctcattcttcctggtctacggggccgaagcgtgccttccctcggaaatcattatgggctccccaagagtccagtctttcgatgagtctatgtaggaacaactatggcatgaggacgtggacttcatcgacgaacgcagatggcaagcggcgatccgaaatgcacggtacaaccaagcactcaggcgctaccaccaacggttgcgcatatgtgtaccttagtccggtgaggtccaccctcgtaagcccggtcatcagcagggtcacgctggaagcgctcggccaccagctccacggcgtcttgtacgctctctcgggcggcgtcttcagtggcggccaccggaccagcgatcaccggctgtcacacccgtttccaaagggcacagagccgggtgcatag

SEQ ID NO: 28585 - DNA, 846 bp, Zea mays
  Peptide Sequence Number=SeqID_71960
atgacggagtccctggtgcggaacaagtcggggatggccagcatcaaggagatgccggtggtgcaggacgggccgccgccgggcggtttcgcacccgtgcgcttcgcccgccggatccccacctcggggcccagcgctaccgccatcttcctcaccaccttcggtgctttcgcatatggcatgtaccaggtcggccaggggaacaaggtccgccgccggcccttcagcggcgacaagtgcccaccgcccaccaggttgtgggtaatagatgcatccagccagatcgtgttcacttggggaagggttgggagcttccttggtcgcttcaagtccatacctagcattgttgagcttgacagcttgaaggtttctggtgatgtttggttcagttctggaattgtgctgaaggggaaagtgaccatcactgcaaaacctggcgtcaagctagaaatcccagacggagcagtgattgggaataaggttaaatatcctatttatgatcaaacagtgtaccttaacgattatcataagaagatgttgaaggatcaatatgagggactgaagacaatcgagcagattacaatggactcagctacggtcgagaccaatatgttcaagctctgcaaggtgaggtctattcagttttgccaaaaaggcatcccctacctgaacacctacgacggccgcaccatccgctaccccgacccgctcatcaaggccaacgacaccatcaagatcgatctagagaccaacaagatcatggacttcatcaagtttgacatcggcaacgtggtcatggtgactggcgggaggaacaccgggcgtgtaggagtcatcaagaactag

SEQ ID NO: 28586 - DNA, 189 bp, Zea mays
  Peptide Sequence Number=SeqID_71961
atggcaggtgccttatataatgtcagttacagtttgcacgtcataaggagtttgaggcgccgagggggaagggtgcaaagacttcaagaccaaacaatggaggaggatgccatgcgcttcatcatcgatagcagtccaacttctattgccaatgttgatgccacggttgggaatgtccgggatgcatag

SEQ ID NO: 28587 - DNA, 309 bp, Zea mays
  Peptide Sequence Number=SeqID_71962
atggaaggtgggttcaacaagagcggctcaccggaggcggaaggctcgcggcggacgcccgcgggggcctactacgagtgctccttctgcaagagggggttcaccaacgcgcaggcgctcggcggccacatgaacatccaccgcaaggaccgcggtggcggcagtaggtccgggaccgcgccgccgcagcaggacgacgctggcggctctcggacctacggcgccggggacgtgcacctgggcctctccctcggcaggaaggaggacgtggatttggagctcaggcttggcagctatccttataagtag

SEQ ID NO: 28588 - DNA, 1215 bp, Zea mays
  Peptide Sequence Number=SeqID_71963
atgcagctttacaacacggcgagggtgtgtttaggcctcggtggccgcaggaaacacacgctacaagacaatccgatcctgcaggctcggatcttgacggctgaagggagcagcagcacccttggcatcgacgacaccttcggcaagggccaacctagcctcggacggcaacgcggtccgaggatctccactctggaggacgacgtcatcaccacgcccgggccatcgccgctagggtcttctccgggaatccggcctgagcaggcggcttggccggtcaccccggggcctcggccagttaccttccaaggacgtcaatccggcccgagcaggtggcttggccggtcaccccggggcctcggccagctgccctccgaggacgtcagcccgacccgaggcctcggctggtcaattccggcgtcggtcccgctaacggacgacccggccaggctccggccaaccaggtttccttttcgagccaactctgcctctgtccatgttgacgccgctacccctggcctcggctcatcgaagagcggccggggggttcctttaactaagttagagaagcctcggacaacaaggccgaccgagccgaggaactcctacgcctccgggatacggatacctcactcgtcacttatacacggggcgactcacgcttggtacgaacaaccccactcgacgggggagaggcctgcggagcaacagaagatcgacgaatggcttgtcgtcgcccgccccagccgcggcgacgacgacgacttctgtcccggggggccgaacagcagcagcgatgaccttagggcggatgctgctgccaggaggcccccgcccgtgcccaaactcgagaggcaaggacaggcagaaggccgtagagttggaggtcggtccgcgggtggcgccggcgaactcggcggcggcggaacctcttccagctgccgtggcgggaggcggcaccgggagcggctccgaagccgctcggcccagcgagccgggcacggtgcagctgttagcgccacggacgactcccgcccttccccccgatcactgagggaaggagcgggccactgcccacgcaggggccgaccccaactcggcacactcccctccccagcactagtgatgaaaatccttgaggctgagggaggggcgggggccgcagcccggctcgctttcccccaccatcaaactggaggtcaccatcttgggtga

SEQ ID NO: 28589 - DNA, 618 bp, Zea mays
  Peptide Sequence Number=SeqID_71964
atgtcaggtcaattcacaactccactaagagtgatgatagaggaagtcaactgcaaaggccgcagtattcttcacaagcttcggggcagcaacaaagctctttccggtcgccagctccaagaggcagaggcgccagaggcttcggaggaagatatggggatcagcccaggaaaatctattgcctattttgtggcgaagataagggccacactacaagaatgtgtcaaatcaccatccaaaagcagaaggagatcgcagaagtcgaagcccggcaaagtcaaccgaagcaagtcctgcacactgcttcgtgtcactcaccctacataccagaatatgtgggtaatcatcctgcagcttctgttgcttcggctagtcagccacaggcttcttggccacagcttccacctccgccgccactacaacctacctattcacgaggtcagtggccagaagggagccatcagactcatcaccagcgagatctcagggaggaatccgaagctcgcacagtcaacagtactgtgccagaatcaaaacacatctattgagagatatcctacctctgaagcattttacatcattgtcattttcttttttagtaaggaacaatcaatgtaa

SEQ ID NO: 28590 - DNA, 375 bp, Zea mays
  Peptide Sequence Number=SeqID_71965
atgggcaacacgcagatggtcatggcggtgtcggtggtacatcccaaccacgacggtgaagtcttccccccttattcagctgctcggcatccgaagcacccaagcgaagccccaggggcaccccaccggtgtggaagggcagtaccggcgagcccagattcaccagcggcggtacttggatgggatgcagagaagaggtcacggtcgacctatatagccccaaggagacgagttgtgccctggatgccgatccggaaaaacgggggaggtggttgtaacgtccacgcggagctcggcgcaacaccagggacgcccacatcggacttcgttggagattcgctgaagcatgcgtccagtgaacagaacccgagatga

SEQ ID NO: 28591 - DNA, 552 bp, Zea mays
  Peptide Sequence Number=SeqID_71966
gggaacgattcgggacggaaggcactagtttttgtgcttccttggattccacggcaaagccccggctgcgacgtcggtgtcgtctccaccgcattctggctacggttcccaagcaaccttgctgtggtggggatggtgtcgcaggctcccgtggcgggggccggggcgggcgccagcctcgccgcgtcgctgtgcaagaagagcaaccgcgtcgcgcgggtgctcgcgtacgcgctgctcgagtggatcctcatcgcgctgctcctcgccaacggcgtcttctcctacctcatatccccggttcgccgccttcttcggcctcgcgccgccgtgcgcgctctgctcccgccttggcgtcgacagcctcttcgagacccgcccgccgcaccaccgaggcgccgagcccctgcgccgcttgctgtgcgacgcgcacgctgccgagctgtcgcgctcagattatggcctgacgcgcatgccgctgcttgcttctactcgccgcatggctcagattatggcctgacctgctcgaatggacgaacgctgtgttgttga

SEQ ID NO: 28592 - DNA, 396 bp, Zea mays
  Peptide Sequence Number=SeqID_71967
atggcgaggcacctggtggcggccttgctccgctccggtgagtggcgtgtccgggtcactgacctcgcccctactctagccctcggccatggagagacagaggggattctgagcgacgctctccgtgatggccgtgccgtctatgcctctgttgatgtctgcaaccttgaccagcttaccaaagcctttgaaggggtagacgttgttttccacacagctgctgcggatcctagcaagaacaacctgcaacttcactacaagaggttaacgtggaggatatgcaaggtgaagaggctgatccacaccagtactagtgctgttgtgtttgacggcgttcatggactttttgacgcggatgagtcattgccatacccagataaggttatactaccataa

SEQ ID NO: 28593 - DNA, 534 bp, Zea mays
  Peptide Sequence Number=SeqID_71968
atgcaagaattaatagttactattggtgaagggaagaactatgatgattttgtgtatgttgaaaatgttgtccatggtcatctttgtgctgataagactctttctactattgagggtgcaagaaccagtggaggaaaagcatactttataactaatatggagccaatgaatatgtgggacttcttatatcttgttcaagaagaacttggatacaaaagaatattcaagataagggtacctataattgttatcaagccagcaagctatttgatagagttggcatatagggctgttttctctcattttggaacttgccagcctcaaatactaacaccggcgaggattagatatgtaacgctcaatagaacatttagttgcaataaagctgttgaagaacttggctacaaacctattgtgacactacaggttctaaacctaaactcgttttctattatcttcattgtgttctctattggtgtagcctatttttatttgaaatgtccatacacttacaatttcttacttatggcctag

SEQ ID NO: 28594 - DNA, 369 bp, Zea mays
  Peptide Sequence Number=SeqID_71969
atggccacgctgtgcatggagcgcgtcggcctggtgctgcgactttccctcctaattggcggcgtgcaggcgatcaagcacgtcgtggatggatgccatctctatcttcactgcctctacctcctggaaggaaccacgcaagcgcccatccgtgacgtgccgatgcccctcgtcgtcaccgcccctagcctgccccacgccccctcgtcgttctcgccttcggcaactctagcctaccctgttgtcgatgccccttgttgtcaccgcccctggccccctctgcaacgcgcggtgcccccgtgccacctccgtggaaccgcatctacgacaaccatcatccccaagggcgaagccaggatccaaaattag

SEQ ID NO: 28595 - DNA, 354 bp, Zea mays
  Peptide Sequence Number=SeqID_71970
atgggtcgaggcgaggcaaggagtgccggtgactggctggcaaccaccggcgcgatcagagcaggcgctcggtgcggcttgtcgggcagacaccgacacagctgcggcgctgaccggagcgagttcgtggagggagagagaagtcgccacgggggagggaaagaggaagagcgggctcacctaagttccgtcgaaggtgctcggcgcgacggggcaccaggtgacgggcgacggcacggctgcagatgcagcacggcgcgaacgacggtggcagtggaggtgtgggcgcgtgtgagggagagggaaatggggtgctggggctccaaatggaaccagcgtgagggagggggttaa

SEQ ID NO: 28596 - DNA, 276 bp, Zea mays
  Peptide Sequence Number=SeqID_71971
atgccggggaaggcgaactgttgctgcccagctaggatgcaacattccgccctcttcctcgctttcgcggcgaggacggcagcgaggacctgccgctggttcgcgtcccttgagcgggaacacgaacgagagccctccggcggccgcgtccgtcctgggaccatggctgctgctgcagaggtcgctggcgggtcccccggtgttcgtcgccccgcaggctcccccgtgtggaggctgttcatacccgcggggacggaaccagagttccgtctgtaa

SEQ ID NO: 28597 - DNA, 384 bp, Zea mays
  Peptide Sequence Number=SeqID_71972
atgcaggcggcatgcaaccgcgccaagtgggcgcacttctccgactcccaacacgcccggcatgggggcccaggcccacgcgtcatgcaaccgggatcgggaaagggggataccccaaaaaggatccttccccgtgaaggaaccaggctccgagcctccctactgatcagaggttcgaaggctggcccctcggaagggttcgacggccgcctcagatcacgtgggccctacacccactactggtcagaggttcgaaggtcggcccctcggaagggttcaacgactgcctcaggctactcgggctccgcgcccactactgatctggggttcgaaggctggcccccgaagggttcacagccgcctcagacacagagcgagggatga

SEQ ID NO: 28598 - DNA, 261 bp, Zea mays
  Peptide Sequence Number=SeqID_71973
atgcggctttatacccttagagatgatgtggttttataccctcagaggtatgaagacagaggacctacacattgcattcctgtgcatgtatttgcacagagtgatatttgcaggtacttgattcatgttgagaatgagggaagtagcagcacgtccaccttcactattataataacgctgcccagttgcagccatgatttaattagaaactcgatgtcaaatgatgtttgtattttttttctagtcgtgggcactggttaa

SEQ ID NO: 28599 - DNA, 1266 bp, Zea mays
  Peptide Sequence Number=SeqID_71974
atgcaggcggcatgcaaccgcaccaagggggcgcaccctttcgacttcaacgcgtccagcatggtggcccaggcccacacgtcatgtaaccggtgcgccggttgctacgtgcaagaaactgcaccgccactcgcgccactaccgtgcctcctcgactgcggaaccagtaccgcgactcgaggcaaccctgcgcacgacccaacagtgccaaccaggcacatcggtcacgggtcagtcagccgcgggagaaggcgtgatggtcgatacggccagaaatgggccgacagtaatggcagtggcaggcgggcggaagcagcggacaggcggcgcctttggcaggcgaaccaggcgacgcttcacctccgccataatgacagcgtcaaaaaagggaccgggaaaggggataccccgaaagggatgcttctccgcgaaggaaacgggccccgagcccccctactaatcagaggttcgaagcctggcccctcggaggggttcaacagccgcctcagagcgctcggactccgtgcccgctactggtcagaggttcgaaggccggcccctcggaagggttcaacggccgcctcaggccactcgggctccgcgcccactactgatcagggctcactggagacaccatgttcggcgccctccaagggcaacatggcgcttttccccctcctccttgcggaaaggcgacgcaggggcggctcggactcgggctcggccccggaagacgacgaactccacctcgcccgacccagggctcggactcgggcttggccccggaagacgacgaactccgcctcgcccgacccagggctcggactcgggctcggccccggaagacgacgaactccgcctcgcctgaccctagggctcggactcggcctcggcctcagccgacggtctccgtctcgcccgacccaagggctcggactcgacctcgacctcggaagaaagactcaacctcggcctcagaggagcctccgcctcgcccaacctagggctcggaccgaccacgccacaggaggagccatcattaccctacccctagctagctctggctacagggaacaagaccggcgtcccatctggctcgccccggtaaaacaaataatgatggcgccccacatgctccatgacgacggcggctctcagcccccttacggaagcaaggagacgtcagcaaggactcgacagccccgacagctgtccttccgccaggctccaacgctcctccgatggccacgacaccacatgaacaag

SEQ ID NO: 28600 - DNA, 789 bp, Zea mays
  Peptide Sequence Number=SeqID_71975
atggacttccaggtcgtcgtcctcgccggaggcacctccgagaaactctcgcccctcgtttccaaggtggacgttcccaaggcgttgctcccggtcgccaatcgccccgtactctcttacgcgctggacctccttgaggccagcgacctcaaggacctcatcgtggtggttgaggggcaggaggcagcgcagcttgtcgacgcttgggtatccagtgcgtacctggatcggcttcgagtggaggtagttgtggtttctgaagaccttggaagtgctggtgcattacgagctatttcaaagcgactgatggcaaacgatattttggttataggggaagttagccacctgtctggttattcgttttctgcacaaaacaatattatccacccatcctctgttcttggatcaaagactacaataggaccacactgtattcttgctgagggttcacagcttggtgacaagtgtagtgtgaagcgatctgtgattggtcgtcattgccgaattggttccaatgtaaagatcgtcaactctgttgtgatgaatcatgttgttattgaagatggttgccacatccaaggttctgttgtatgtaataatgttcaactgcaagaacgggcagttctgaaagattgccaggttggagctggttatattgtgactgctggcagcgagcacaaagcagaatccctagcaagaaagcggcttgttagagcgaaaggtttggtcgcctatctatcctaccagctgcttgagcaagttgcatgctgtctgaggacgatgggttga

SEQ ID NO: 28601 - DNA, 433 bp, Zea mays
  Peptide Sequence Number=SeqID_71976
atggagaattacggatgcaaggttgatcttctaagtcatgctggtcttgttcaggttgctgttgaattgatcgaagggatgagcaccccacctgacctagttttctgggggtgggcggggtgggcgcagacggtccggccggcgagcacgagttctggcgaggcggtgtgggcgagctccggtggcaaggtctcggccaggaagaagggcgcgagaagagagcgagctcggcagtgggagaaagggagagggctcggctgggagggagagctccatgcgtcctggttcggcagcgcgcggtcggacggggtcgggcttgcgcgcggctctgggcgtcgaggcgggggcgaggttgcgcggcctctggctgcagctactgctcggccgggcggcgtgcacgcgcgggatgcgctcggctggggcgcgacggctg

SEQ ID NO: 28602 - DNA, 312 bp, Zea mays
  Peptide Sequence Number=SeqID_71977
atggagctctccctcccagccgagccctctccctttctcccactgccgagctcgctctcttctcgcgcccttcttcctggccgagaccttgccaccggagctcgcccacaccgcctcgccagaactcgtgctcgccggccggaccgtctgcgcccaccccgcccaccctggaccgcctcgccagattttactattcataataaattggttgatctagtagttaagaatcaagatctattcagatccgtggaagagtctcaagttttcaataagcaaggcaagtggacttctccctctgcatactctgtttga

SEQ ID NO: 28603 - DNA, 372 bp, Zea mays
  Peptide Sequence Number=SeqID_71978
atgaagagcaggcccgcgcctgcccctgtcttcatcagcgacccgtcgaaaaacatggtccagagttccggttggatcggagctgttgggagctggtacctcactgatgaagtagaccggtctctggatgggcaatgcatgcccttcttcccgtctctcaaccacgatcgcggcgctgaccacctgagtggtagcggcgacgtagatcaagagggcttctccgaccgcagggggcaccaagatgggcgcattcgtgaggagcgccttcaggttcccgagggcttcctcggcctcaggggtccaagtgaagcactcgaccttttcttaagaggcggtacagaggcaggcctctttcgccgaggcacgagatga

SEQ ID NO: 28604 - DNA, 666 bp, Zea mays
  Peptide Sequence Number=SeqID_71979
atggcggcggccgaggtgtgtatgcagcagcagctgagaaaccgatggatagatgtatgtgaaggacagcaggacaggatcctccgtgctctgatcccatctcccggcgtcttgctggacctgccacgccatgaggggagaaagggtaacacacggacgcagctgcagaggatccgagcatgtcagtgcggccgttttggcggggctctgggccgcggaaggacaggaggatgtgaatggataggaacaaaggcggaggaggatgacgtgccatcaaaaatacaagagtttgacgatgataacaagtccttgtattacaatttgaaaatatttggcgccgcgagcaataaagaaacaagcaaaaaagtcttcttgactcttgagaggtatttaggattctaccacatgaagaggaggctcaacatcgacctaaccgacctcttgattggtttcatctatccactatattctcgttgggatcacggttgtttgcaattgtgggctaaactcaatgtcgatctaaaagctttctttgaatgttgcactaaagatcggtgtgacaaggttactcagttttgtgaggccgactttggagattctattgcttctacatctacaatagatgtgaaagtcaatgaagatgtaacggtaaggaaaatagactga

SEQ ID NO: 28605 - DNA, 756 bp, Zea mays
  Peptide Sequence Number=SeqID_71980
atgagctgcaacggctgccgcgtcctgcgcaagggctgcagcgacgcctgcgtgctccgccccagcatcgactggatccacggcgcgcagccgcaggccaacgccaccgtcttcgtcgccaagttcttcggccgcgccggcctcgtcgcctccctcgccgcagtcccgctgcaccaccgcccagccctcttccggtccctgctgtacgaggcctgcgggcggaccatcaacccggtgagcggcgccatcgggctcatgtggacgggcaactgggacctgtgccaggccgccgcggacgccgtgctccgcggcgagtcgctgcgcgcgctctccgccgtccccgccgcgttcacggaccgcgacatggacgggctctacggcagcgtcggcggcctggtcgccgccgccgccgccgccgcgtcgcccgagaactcctcctcctccgcgccgtccacaacgaagcgcaggaacgcgaacggcggctccagcaacaacgccgtccctgcggccgcggcctctcaccaccgcccgccgccgccggctgctgccgctgctgggctgctgctgcagtcgtcgtgccaccagctcgacctctgcctgacgccagcgctgtcgccgccgggcgccgggccgcggggctgcgccgccggcgcgtccgacgagtactcggccacgaccacgtgcgaggaccagaccggtgatcacggacacggagagcccaggcctcccccgccgctgctaaacctcttcaactga

SEQ ID NO: 28606 - DNA, 1077 bp, Zea mays
  Peptide Sequence Number=SeqID_71981
atggccgccgacgatcacgtcttccgggccaccaacgaggcgtccgtcgccctcctgcgcggcctccgcgccggaaccgttgaccatagattcaaagccttcatccacaacgtagacgtctacaccgctgctcctgaggagctggtcgccggcctggagccggtgccgggcaccgacgtgacggaggacgggtacaacagacagtggtacatatactgtccgaagcgatacaagaacggcgagggaagggccagcgggcacaggctgcgcgcggtggagaccgccaggacgtgctggcactcggagactggcccgaagcccatggagggcttgcccggcgccacgttctgcagcttatcctacggccgcaaggagaacgagaacgaggggacgtcgggtcggcatcgccatcgcttccataggatgggatggcagatgaccgagtatgacgacacccagggcggcggcggcgaccacgtgctgtgcaaggtgcaccgttcgtcctcgtctctggccaagaagaaatacaataccaagaggacggcgacaggcgatcaccccgaggcgccgccaaccaaggtgatccacgacatgcaggtgcagcagatgcaggaccccgccggcgccatcttcaccggtgcttacccgacgatggatgatcccctgatggtcggaggcgcggaggcatcagaggcggagcacggtggcgagttgggcaagtccaacgtcgactacttgctcaacatcaacaatgtcgatggggagcagcagcagccgccatgcgctgagccggccgagcagagcagcgacgtgcaggtgcaggtggaccccgccgccaccttgacgccctgctatgttcatggtcatgaacaaggcgggaatcccctgatggccggaggcgaggaggaacagcgtcgacgcgttgagtcaccagagccggagctcgacttcgaccacttgctcaacaatatcgattggaaaggtctcctagagatactaggagacgacgaggagcaggggttgccgctgcagcagcagccatgcgttgaaccggccgagcagagcagcgacgtgtag

SEQ ID NO: 28607 - DNA, 249 bp, Zea mays
  Peptide Sequence Number=SeqID_71982
atgaccgaggaagggcctacgcaggaggctgccccggccactaagagaaaaataggctcggatgcggggcaactgcctcttgtcccgactccggtggtggccccttcgcctacgatggcaattggggcgaagggtgcttcgcgggacccgtggtccgccttgtgcgtgaacggcacgattttgtcggccgccgccgctaaggatgtggcgggctccgtgtcccagcagctgaggcgggcgtcgcagtag

SEQ ID NO: 28608 - DNA, 126 bp, Zea mays
  Peptide Sequence Number=SeqID_71983
atgtcgtgcgcgtttgacgactactatatcaaggcgctagaggtgtggcacgtgctcttcaatgatgagaccatgcaaatcgtggcatatatcgaagtctgcatgatactgatggttgtaatgtag

SEQ ID NO: 28609 - DNA, 652 bp, Zea mays
  Peptide Sequence Number=SeqID_71984
gcgatcccccgaggcgccgccaaccaaggtgatccacgacatgcaggtgcagcagatgcaggaccccgccggcgccatcttcaccggtgcttacccgacgatggatgatcccttgatggtcggaggcgaggaggcatcagaggcggagcacggtggcgagttgggcaagtccaacatcgactacttgctcaacatcaacaatgtcgatggggagcagcagcagcagccggccgagcagagcagcgacgtgcacgtgcaggtgcaggtggaccccgccgccaccttgacgccctgctatgttcatggtcatgaacaaggcggtgatcccctgatggccggaggcgaggaggaacagcgtcgacgcgttgagtcaccagagccggagctcgacttcgacgacttgctcaacaatatcgattggaaaggtctcctagagatactaggagacgatgaggagcagggattgccgctacagcagcagccatgcgttgaaccggccgagcagagcagcgacgtgcaagtgcaggtggaccccgcagccaccttgatgctgggagaccatgaggagcaggggctgccgcagcagcagcaaccatgcactgagccggcggccgagcagagccagagcagcagaaccgtgccgcccgtttaa

SEQ ID NO: 28610 - DNA, 559 bp, Zea mays
  Peptide Sequence Number=SeqID_71985
atgaggggggtaagcgggagacggcggggtgcggcatcaaggctgggaagcacgggccacacaggaggacatcaaagacagtggcggatgcgacgtgtacacaccgctgctcctgaggagctggtcgccggcctggagccggtgccgggcaccgacgtgacggaggacgggtacaacagacagtggtacatatactgtccgaagcgatacaagaacggcgagggaagggccagcgggcacaggctgcgcgcggtggagaccgccgggacgtgctggcactcggagactggcccgaagcccgtagagggcttgcccggcgccacgttctgcagcttatcctacggccgcaaagagaaggaggacgaggggacgtcgggtcggcatcgccatcgcttccacaggatgggatggcagatgaccgagtacgacgacacccagggcggcggcggcgaccacgtgctgtgcaaggtgcaccatcaagcctcttctctggccaagaagaaatacaataccaagaggacggcgacaggcgatcacccccgaggcgccgccaaccaag

SEQ ID NO: 28611 - DNA, 293 bp, Zea mays
  Peptide Sequence Number=SeqID_71986
atggattcagggcaagggggggtgacccctggggttcgctggagcatacgacctgctgcggatccgcctatcaacgtggaccagactctcttcgccaccctgttcggtaaggtttttcccatattcttcgtcatcctcttggctttgcgtagagtctggcggggttgttctagcgcatcgagatgtcgtatccccatgttgaagccatggcgccgccgcgccggtactattgtcaccgcgacggggcgtcatgaggacgacgatgtgagggccgttgatcgggccatgtacgg

SEQ ID NO: 28612 - DNA, 897 bp, Zea mays
  Peptide Sequence Number=SeqID_71987
atgaaggatttcaccatgaccgcagtattgcccccatatatgaggatatggttgcttcgtagctcatcaaaaattgcttcaggtccgagtgcccatcatacatggggagctatgacggtggccacgggggcagcccctggcactgttgtcttcttccacggcattacgaaagtcgatgcttgcagaaggtggtcgattgagttccccggagcccaagccagcccagccgcccgcgcgcgcgcccgcgcgccctcggtgcttgacaagtgggccccgcctgtcggcgccaactccagcgtgccctctctccctctctctctcgctgccccatgggcgaagtctgtcggcgccgtttctctcgcccgcgcgctcgcttccctctccgtacctccgaccccactgtcagccgtccctaacctcttgcccatgatcccccgccgtggacgcgcccacgtccgcgcgttctccggccacttcctcgcgcccgcgccccttttgagcctcgcgccctgctcgcccacctcccctcacttacttgcgccctcagccaaaccccctcaccctctctctcgctctgcgcgcgcgaccagagccccgccactgcccaccgatgtctgccgcccgttctacggtcgctgtggaactccccgccgcgtctgttgccccgagctccgtcaccatcgccccgtcgcgtccctgcgccactgccgttgccccgtgactccagcgcttccccacgagcgccctgtgcccacacgccggcgtgatacccatggccgagtccacaggaccgccctgaatgcgcccgagctagtccccaagcctctggagccccaccgtggccagcccccgccaccgagcggcgacaacgcgcctgtgtccgccctcagccgttag

SEQ ID NO: 28613 - DNA, 399 bp, Zea mays
  Peptide Sequence Number=SeqID_71988
atggcgaggaggagctgggcgcagggaagaatcggccatggcaagagcagtttggggaagggagatgctgctgttgggcgctgtgcagaggagggcacgagtaccatgggggcgtcggcatggagcaggggcgccctgcgcagagaagaagaaggatgcggcttcctgcgcttgagctctagggaaacagagaggagggagggcgcatccatggaagaagaaaagggtctactcgccatggaagagagggcacaggggaaggtggagctgctgttggaattcctgggcgccgtggacagggagcagggcggccagggagaagaacccgagctcgccgggggctggcggccatggctgctggcggccaaggggagagcaggggcaccggcgtgctcctag

SEQ ID NO: 28614 - DNA, 339 bp, Zea mays
  Peptide Sequence Number=SeqID_71989
atgcatgatgcagcacgacgtgcactttctcagtattgctcgttgttcagcggggtagctgacggccttgacctgaagtactaccctcgccgttcgatcggcagtgctggaggtgtgattgtctcgccagttggtgagggcaatcccaggctgaacaacatggtcaacctggccgccgtgctcaacacagagttggaccacgcccttgacgagttgggcaagatgtctgagaaccggcgtagaggtgcgaggcgtgctcagccggaacaacaggcaccccaggaggatgcagcccaacagcagcagttgcccccgccacccccgatgacagtcaagtag

SEQ ID NO: 28615 - DNA, 366 bp, Zea mays
  Peptide Sequence Number=SeqID_71990
atgctggtagactacacaatggtactcgatggatcaagtgtatcggtcgaaggcccgacgcaacagggtgtcgagagcgtcgtcgaagtgacacctgcgagcggcgtcacgagtgatgggtctagcgatccatccctccagctctggctcctccgagagctctgtgttgtggctcgaactgccaccggcgtcatcgttgtctccgttagggggacatctttggctgaggtgcaggggaaggcggcctctcggactccacctcctgctgaggcgagggggaagagtcctgctgctcctgctcctgctcctagcgtcggcgctcctgctcctcgtgcaggcgatgatgcagtctctccaggtgactag

SEQ ID NO: 28616 - DNA, 2493 bp, Zea mays
  Peptide Sequence Number=SeqID_71991
aattttcagacaagggacccgtcccagttgttgtggatcggtccggtgcctggtgacatcgcggagattgaggcctactgccgcatattccgtgctgccgagcagctccacaccgcagttatgtcagcactttgtgatccagagacaggagagtgtcctgtacgctatgatgtggaatcagaggatctgccaatcctggaagacaaggtcactgccgtccttggttgcatgctggcgttgctgaaccggggaaggaatgaggtgctctcagggagatcaggtgttgcaagtgctttccatggatctgtggacagcacctctgatatgatcccaccactcaccttgttccgtggagacatgaagcgttgctgtgagagtatgcagctggcacttgccagctaccttgtaccgagtgagcccagggggttgaatatatggaggaagctgcagagattgaagaacgcttgttacgatgcaggtttctcaaggcctgatggttatccatgtccgacattatttgcgaattggtttccggtgtacctttcgattgtgtcagatgattcaggaacagatgagcccgaggttgcattttggaggggagggcaagtcagtgaggaggggctggcatggctactagaaaagggattcaaaactattgttgatctccgggaagaagatgttaaagatgatttgtacctttcagcagttcaggaggctgtctcatctgggaagatagaggtggtgaatatgctggttgagatcggaactgcaccatcagctgaacaggttaaacaatttgcagctcttgtgtcagatggcgcaaagaagcccatttatctccatagcaaagaaggtgtttctaggacgtctgcaatggtctcaagatggaaacaatatgttactcgttcagagagattggctgtccaaaatcactatataaatgggaatggtaaggtcctgacaagtgacaagaccaagcagcacacgggcagcccaagctcctctatgaatcgaactgaaattggtatggtaacggaatctgataggaccatgaacaatggagaatcatgtgagatagacatagagacagctcgtcataatctggaggtcactaatgccctttccgatgaccaaagtactcaacaaggtgaaatgcttgggactgggacagaacccttgtcaaactttaaactggagagtaacccccttaaagcacaatttcctacttgtgatattttctctagaaaagagatgagcaagttttttagaagcaaaaaggtttatccaaaatctgttctgaactcaaggagacaatcaagtagcttgctggtctcaaggagaaaacaaaatttcagcacagagcgtaatggaaccattgactatgaagcagcagagttcacaattttagaaagttcaaatggaacatcatttgacaatgattatattctatcagtttcttcaggtatcactgatggaaaaccttccaacaatggagccttttcgttaattgagaaaaaggaaagggaagtttcagtcactacttttgatactagagcatcggcgagcagttctaatggaaaggttcaggttggatcacaaaaaactgctgaaaagaatggtaccccttatctggagagaaacaattcaaataatgttgatggaagtatgtgtgcatctgcaactggtgtcgttagactccagtcgagaagaaaagcagagatgtttctggttgcttcatttctgcatcatcaagaaaaaatgaatgttcttgtggaacctgatgttcatgatacatttgctagaattccaggttatggttttgtgcaaaccttctatactcaagataccagtgaccttcatgagagagttgattttgttacatgcttgggtggtgatggactcattttgcatgcatcaaacttatttagaacttctgtaccacctgttgtctccttcaatctcggatctcttgggttcttaacttcacataatttcaaagatttcagacaagactcgagagatttaatccatgggaacaacacacttggagtttatataacccttagaatgcgcctaagatgtgagatctttcgtagtggaaaagcaatgcctgataaagtgtttgatgtgctgaatgaagttgttgttgatcgaggttccaatccatacctatcaaaaattgagtgttatgagcataaccaccttatcactaaggtgcaaggtgatggggtgatagttgcaacaccaacaggcagcacggcatattctactgcagctgggggatcaatgataccagatgaggcaagaagcaatgcatgggtttcatttgatggcaaaaggcggcagcaactatcaagaggagactctgttcgtatatccatgagtcagcacccgctaccaactgttaataaatctgaccaaacgggtgattggttccgcagcctgatcaggtgcctcaactggaacgagagattagaccagaaggcactatag

SEQ ID NO: 28617 - DNA, 267 bp, Zea mays
  Peptide Sequence Number=SeqID_71992
atgtccgccgccctttctatggaccctatggaactccccgccgcgtctgttgccctgccggagctccgccaccatcgccccgtcgtgtctctgtgccaccgccgttgccccatgactccagcgcttcccctcgtgactgccctgaacgcacccgagctagtccccaagcctctggagcctcgccgtggccagccccctcgtctccagcgacctctcgccgcagaaccgagcggcgccaccgtgcctgtgtctgtccccagccgttag

SEQ ID NO: 28618 - DNA, 333 bp, Zea mays
  Peptide Sequence Number=SeqID_71993
atggcgaggctctggtcacgcgcgcagagcgagagagagggcgagggggttcggctgagggcgcaagtgagcgaggggaggtggctcaaaaggggtgcgggcgcggggatgtgctcggagaacgcgcggacgtgggcgtgtccactacgggggatcgtgggcgagaggttagggacgactgataggtggggtcggtgggacagagagggaagcgagagcgcgggcaagagaaacggcgccgacagacctagcccatggagttgcgagagagagagggagagagggcgcgctggagttggcgccgacagccggggcccgcctgtcaggcactga

SEQ ID NO: 28619 - DNA, 360 bp, Zea mays
  Peptide Sequence Number=SeqID_71994
atgccgtcgtggctgtcggagaggttttggcaccctgttcatgtgatgtcgtggccgtcggaggagtgcttgagccctgtggaagcgaggcggagcttcctatggctcctgaggctagacttaaaggagttcaccatcactctgtcgagtggcacagcagcggaagccgggcaggcggcgctgttttcgaggcaggtcggtcagttgagcggtgaagtgaaggcgctcacttcggccctgtcgactgaggagcgttccctggaggacatggttgccggagtgacttggccgtccatcttgccactgggttggacagtcgagtgggaccctacctcgactgaggagaagcatgaggagtga

SEQ ID NO: 28620 - DNA, 378 bp, Zea mays
  Peptide Sequence Number=SeqID_71995
atggtcgaggctgagtccgagccctggggtcgggcgaggcggagtccgtcttccgaggtcaaggctgagtccgagccctggggtcgggcgaggcggagtccgtctttcgaggtcgaggttgagtccgagccctggggtcgggcgaggcggagtccgtcgtccggcgtcgaggtcgagcttgagctctggggtcgggcgaggcggagcttcctatggcgcccgaggctggacttagctgctgtcagcctcactctgtcgagtggcacaacagccggagcggggcaggcggcgctgttttcctgtcaggtcggtcagtggagcggcgaagtgactgcggtcacttcggccctgttgactgaggagcgcgcgtcaagataa

SEQ ID NO: 28621 - DNA, 441 bp, Zea mays
  Peptide Sequence Number=SeqID_71996
atgaaccaagcgcacccgtggaagaacaaaaaaacagtagagagaggaagagagattttcgtcgtggtggccttgcaagcataccagcacctgggtctgggcgatgggttcgagtgcttcaccggggtgcggcgagggtggccatggattcagggcaaggggggggtgacccctggggttcgctggagcatacgacctgctgcggatccgcctatcaacgtggaccagactctcttcgccaccctgttcggtaaggtttttcccatattcttcgtcatcctcttggctttgcgtagagtctggcggggttgttctagcgcatcgagatgccgtatccccatgttgaagccatggcgccgccgcgccggtactattgtcaccgcgacggggcgtcatgaggacgacgatgtgagggccgttgatcgggccatgtacgggtaa

SEQ ID NO: 28622 - DNA, 231 bp, Zea mays
  Peptide Sequence Number=SeqID_71997
atgcagtaccgctgttcctgcagccccggcacctcccccggcttcctcgctgccagcgctgcgcgcgtgccacgtgctcgacaaactgtccaagtggggtgttgcgcagagaggaaccccgtgttttgcgtggagaaggcaagccactcgacgctcgtcaatgttcgtagcgatgcacaaatcggaatcgccatcgtcctcacaaacaccgattgggtttgtttatggtga

SEQ ID NO: 28623 - DNA, 306 bp, Zea mays
  Peptide Sequence Number=SeqID_71998
atggatccagggagacttggtctgccctgcgcgctcaggagcagggagagggagccgactaaagcaggggcatcgctggggaagaaatggagggcgccattggaggagctcggccagctaggcaccatggaaggagtgccgaggtgctgcacggcaggaggaggaaggagagcgtgggggagaaggaggctgttggtggcggctggaaaaatgataggggtgggagtgcaaaattgccaagtgcaaggggagagcacccctatttatagaaaatggctacgattggatacagagatactaagctga

SEQ ID NO: 28624 - DNA, 339 bp, Zea mays
  Peptide Sequence Number=SeqID_71999
atgtcgccatggttaggccggagcactcgccgccgacgagttcacccgcctgcgcacgtggaccggccgattccggccaccaccgtcgtcgagccatacctcgctgtgaccgccagaacctcccggagccaaccccgcccctcgccggacctccctcgccgccgcatacatgtttcttactctttgcattcgatagattgcaacctcgctgacggagaatacatcctcgtgccagagcaaggagttgctcaggaggtagccccggatccagcaccaaagcctgtcctagaggatctgcctgccccagctttggaaggcaagccccgattttatgcataa

SEQ ID NO: 28625 - DNA, 261 bp, Zea mays
  Peptide Sequence Number=SeqID_72000
atgacacagattatcatgggccaatcggtcttttcatctttaagtcggtgccacccttcgtctcaaggcgtgtcactgtgccgaagctccccggatgagggtgcctttgacgaaggtgcacctgctgccgaagctaaacaggctgacattgaagagggtgatggtgatgaagaagagatagattataacactgtcatgccatccaagcccagccacttggatttggaaagtctacagtctctgaggctgatatgctcatga

SEQ ID NO: 28626 - DNA, 144 bp, Zea mays
  Peptide Sequence Number=SeqID_72001
atggggaagcctgtcccatcactcctcatactcctcctcagccgaggtatcttcggactcgaatcggtaccacagtgggagaagcccaaagaatacgaaggtcgacacagcaccgaagctgtgagcaggaaagcttcggcgtaa

SEQ ID NO: 28627 - DNA, 198 bp, Zea mays
  Peptide Sequence Number=SeqID_72002
atggaggcggcgcggcagcagcaggaggagtgctcgtgcggcggggccgaggccgctgaccagttcgagcggctccacgacgcggtgctgctcgacgtcctcaatcgcatcgacgacgtcaaggcgctaggccgctgcgctctcgtcaaaactcagcttgttaccaggaagcattcgagcaaagatcctagttcctga

SEQ ID NO: 28628 - DNA, 501 bp, Zea mays
  Peptide Sequence Number=SeqID_72003
atggcgcacctgccgcagctgagattattgccatcatggaacacgacagtcctgtccgccttcaacttccgcccgccggcggcgctggacatcgggctcaccctcaccgtgcacgccaccaaccccaacgtcgtgcccgtgcgctacgggccctctaccgtctccatcctctacggtggcgcgcacctcggcaccgcccgcctcaacgccggcgagcagcccgccacctcctgccgcctgctccacctcccggcgcgcctcgacggcgtcgagctcgcgcagcgcgcccgcgccctcctcttcgacgtcgcgcgccgccacatggagctggacgcggccgtcgagatcgccggcgaggccgcggtgctgctctggtcccgccccttctccgtccgcatcgacagccacatcaccgtcgaccccgtcttcctggaagtcgtcgaccaggagaaccgcttggagatgcagctctacctcgcttcaattttttttaccaactag

SEQ ID NO: 28629 - DNA, 1176 bp, Zea mays
  Peptide Sequence Number=SeqID_72004
atggtgcaggactggcgtgggatcgtgtcctcctcctcgtacccggtgaaggtctgcgatgtccacctgctccgcttcttctcgccgtcgccggaccagacgctcgaccaccccaacatcaagcccgacaagccgctgcaggtgaacagcttcttccagcacatcaagggcatgttgtccaacaacagcgtcgtcgtcgccgagaagctcgggctcaccaacagccagcctgcatctacctcgagtgatgctcaagtggtgtttgataaaatgcagcaaagtgatacttcagttgacgtagcacaagataccttcagcacgttcttcagcaagactggttctgacaagcaggtgaccagggccatattcatcgatcttgagcccttagttcacagcaagagaacaatcaagcatatcctagcaactatcgctagcatcaacaatgctcaggttctcattttcaccaccatgtatgagcttgaggtggaaagaatggcatgtcagtttgcaaatacaagatcagatggccttgaggagcgaaatggagtgaagttgccaagctatagagggtatgaggtgggcgtgccactgttcacgacgctggtgcgagctttggcccgtgacgggcatgttgaggaagccctggcactagtggacgaggctgggaatgtggacatggcctggaagttcttccatgagttgaagtcccaagggtggaagccagatgatgtttggtacacgagcatgctttgggtgttgtgcaaggcagggaagctaagtgaggctgaggaattgtttggccagatggagacagaaagagttgtgccttgtgcgtacgcgtataatacaatgctcatggcattagcaaccggagggtacgctgcaatgcagagcgaaagacaatggaacctggatttcacagagcacaatgaacaaggcgacagatacctggagttggctcatcgagttgctggtgttggacttgttggcattggctttggcactggcctcgaactcattggttcagggattgttgttggcgctggcatggttacctctcatctgagtcctatcaacaatggagaaggcaatgtctctggctttctttgggaccctggtggtcatgcgaagaacagcttgggaacaagctgtatttcaaggagtggggaatgtcag

SEQ ID NO: 28630 - DNA, 249 bp, Zea mays
  Peptide Sequence Number=SeqID_72005
atggcctttctagacccttgcgagcgcttccagcccaaggtggcactcaacttggtgcgcaacccgctcggatggcgtgtgctggcatttgccgggaggacttgtgctggtgtctctcctctcggcgaccttgctgccaaagagtttgtgttctttgtttccaaactccccagcgggttggctctgccgatcccatctttcttcgtgcagcttgaaagggaattaggcttacacctagttcctatataa

SEQ ID NO: 28631 - DNA, 1272 bp, Zea mays
  Peptide Sequence Number=SeqID_72006
atggctacagcacgaggacgaggactccctcatcaaacacagatgggaacccagggtcgggacctagtcctacggcaggacctttttgcgaaagcaggagggcccgacagcctgggggccggttctaaagaacggaagcccgttccatggggtggtccggagcctgtgtggccacttagcctggtctcgtacccgaaagcccgcacactccaccactccgtgacgggtaccctagtatttgaagctacaagtcctatgggtccggcaacctggggtccggaactagagaatggacacttgtctcctggggtggtccggagcccgtgtagccgctcagcctggttccgtaccgtgggcctgcacgctccaccactctgcgacgggtgtcctagctcaggtcccagtcgaggctacctcctaggggccattgccaactctttctttggtatgctggtctgcagcctcgacaaactgaacctacatcccggggccaggtaccaaggaggaatcagttacaccacacacaacagggacaagtggttcacagataaagtgctaatactgcttgataaatactactcaaaaagtaccttacaaaaagcaaaagtattacatccgctttcaagcggagtcctagctccatctctactctccaggaatggactactctgcaccagcagggtcgcattggaagctagctccgggcagcctcgccagcgaaggcggccacctctacaccaacggctcaccagctgcggcggccacctctgcactggtggcttgccggcagcggtggccacctcagcgcgtgcgaagaggtcctcgcccctgtcctcctatggggatgaggacaagaccatcaagaacacggccgccacctccacggcgtacgacgtcttgtacgacccctcgggcagcgtcggagcagtgcggccggtggcgcaggggacgccacagatgcggtggacctgcgcacggcgcgaccgtcgcccgtgcagtggacggacaaccacgccccgcttggcggtgggaggcagcgttggaggcgacaccaaaaccatcaaagccaaagagatggagccgcagcacggctcgcttcccaccccaaagaactggggggcgcgtgggacagagtcgtggatcagcccgctgtccaccttcacgaggctggtgatcatcctttcccccaaatgctggtggaagaagcgggaaggagcgtcgcctccacggacatcccgtggaggtaggcaacgatggtcgcctgaaggatga

SEQ ID NO: 28632 - DNA, 636 bp, Zea mays
  Peptide Sequence Number=SeqID_72007
atggagctcctcgttcttggaccctttgaggttctcagatccgagcttcaccaggaaggagcgccagtggagcctctcctccgcgggaaccccatggaatctgcgcaagagagacgtgtgattgtctggcctcgtcgtcctctggacgacttttcccccgtcttccacaaccccgagtccccaacccaccacggcgttgcggaatccacctgcaactgcaagcccacgaaatcgagccgagccccgacgccaccaaatcgtgtggcctcggagatcgagcagggtctggaagaaccaggggagagaccgtcagaagaggaggaccagcagcaggcaggcggtggtggcgaagtcgtcggcgtcggcggccggggtatctacgatgataacccggtcgaagctggtggagcaactgcgcgactaccagatccgatcccagcacaagtaaatcccccgcccgtctccattcccctgaacctgaaaccccaaccggtaactccgcctagtaataatggggtagtcacggtcgcggtgtgctcagatctcgtgggcctggacgcgggtggtgctagatttggttccattagtctgtggttaggttttgtgtcggaacttcagtgggtcgagttgcattag

SEQ ID NO: 28633 - DNA, 1014 bp, Zea mays
  Peptide Sequence Number=SeqID_72008
atgggtcaagtggcagaaggtggaattgacagttcagtgcttgagtatgggcatgtcaagtaccaatactcccccgagtcgcgcagttgctccaccagcttcgaccgggttatcatcgtagataccccggccgccgacgccgacgacttcgccaccaccgcctgcctgctgctggtggattccgcaacgccgtggtgggttggggactcggggttgtggaagacgggggaaaagtcgtccagaggacgacgaggccagacaatcacacttcacacagacagatttcgctctggtcttgaagctttcaccctttggtccagtttacaagcgccgcagccgtcaccagcgcggtccaagcccaaagatccgcactccctcgccatgccaccgagctctgctgcctcgggccgccggcgccaatcagacctaaccacgcctagatggagtcgtcgccgccccaagctccacccaggtcgcgcgctcgcctgtcaggacgacctggacgagctcctccacagcgccggtggtcggcactggcagccgagctccttcagcggaggcgtggatcccccgctaatctcaccgtgcacgccctccctcacgtctacaactacgttactgctgaagatccagccggcacacacagacaccatctccgatggaaacatccttatcgagcgattccatggggttcccgcggaggagaggctccactggcgctccttcctggtgaagctcggatctgagaacctcaaagggtccaagaacgaggagctccatgttgcctcccacaagagctacaagaacgggttcgtgtggcacgacctttcggaggacgacctcgtcctcccggcaaccgacgacgagtacgtgctcaagggcttcgagctcgtggaccaatccccttcggtggacctgggagatatctgtcccccacaagcccccgatcttcgggctgattttgagataatcagcccaaagatcccaggtccagcttgcagtctttgtttatga

SEQ ID NO: 28634 - DNA, 423 bp, Zea mays
  Peptide Sequence Number=SeqID_72009
atgcctgcactagatctgcaaaacatccgccgctggcacactcctcagatccggatcccgccccccaaatcgcatatccgcatggaaggtccgcgcgtccgcagcccctacgccacctcctcctcctcctctccccctcactgcgccgccacctcctcctcggatgcgcggatggaaggtccgcggccctgcgcccccaaatcgcagaacgtgtgcaccatccggccgctggtgacggcgatgtgcttccaccagctctccgagggcatgggactcggcggctgcatcctgcaggcgaagtacgtcgcgaggatgaaggcggggctggtgttcttcttctccacgacgacggcgttcgggatcgcgctggagctggcgctcaccaagatgtacagggagaacagccccacgacgctcatcgtg

SEQ ID NO: 28635 - DNA, 390 bp, Zea mays
  Peptide Sequence Number=SeqID_72010
atgcaggtgggtctgattaattatttaaatgtagtttatcttagatactgtttgaacgtatgggatgttggaggacagaagacaatcaggtcttactggagaaattactttgagcagactgatgagttagtttggtttgctgatagttcagacataaggaggcttgatgattgtcgtactgaactccacaatctcttgaaagaagagagactagctggagcttcattgttgatttttgcaaataagaaagacatgcaaggagctctaaaaccaactggaatcgcgaagtcctcatggttgccaagattttacttagttcgatgtgggagcaaaaggatatgtcaaattgaatgtagtttcatcggttatgctcaattatggatgttctga

SEQ ID NO: 28636 - DNA, 2364 bp, Zea mays
  Peptide Sequence Number=SeqID_72011
atgtcgattgcggcggtcagatcctcgtccccgggcccgtcgccgaggccgtgctgcggcctcaggaggagcgctgattccagccccttcaggcccgccgtgtccccactcgattcgccgcagaggagctcctccgtctgcaagaacagcggccgcgcctcgccgcggacctggggcgcggagaaggagaacgacccgcgcgacgcggcgccggccgcgagcgcgaggacgcacaaggtgcgctccagcggcggcggcggcggcggcgccaaaagcttcatggcgcccactatctcggcctcctccaaggccgtcgcgccggctttcacgccaagaaagaaggtattcggcgagcgcaacaacgatgccgtcccttcgtcgccagtggaccttgcgcacagcagtaagcccagggctgcgcatccgctgctgccagaagaggctctgggcgtgccgaggcgtctgcggctctcactggacggcgcctctgcccttccttccgcggctgggcctgtcgtttcgcgcggcgccccgtcgttcggaggtgacgaggccgccgtgatggttgagaatcccgccgtctccgagagccaccacgacgtggctttggcggacgcggaggtcgtggcagccccgtacgatcccaagacgaactacctctccccgaggcctcggtacctccgctaccagcccaaccgccgcctcgagatttaccgtcatggcggcgggagcgtgcgggggctcgaggacatgttcgcttcccagagcagcagcgaggaggtcgacactgcgaccaccacggaggaggaagtatccggagaagggcagccagatgactcctcggaggaggagacctcggctatggcccctccaccggaggccagagctcagtctactgctccggccctggatcgcctcctgctgccgcagcccgcgctggattcgccactagctcgggtcctgacaccggagccgaaggagtctccgcgagctggtggcgtcttgatacctgagcgggaacgtgcagtgagccccgcgcgagctcgtcccaagaagaagaggtcaccagtgaggttcctgcttgcccctcttgctctggttctgttgatggctgcagcgtttgtctgtgttccaccgccgccgggttatccggtcatgctgaacacctccatgtcaaaggtgtcagtcttactttcagttcaagaattgcatcctgtggagttggctgctaggctgaagcaatggtctagcagttcgttggacttcgtcacgtcctactgggaggctattgcatcttaccaagaacgacctgtccttggtccgcacttggctgccaatgttactgctgctgctgcagaagtagatgcagattacgctgttggtttctactacagtgctgctcagacaagcccaacaagtttggagttggggactcatgatgttgtttcagaaaatgatactgagatgattgctgggcctgatgtggaggatccggtaacctgtgatgaccctgatgcagaacctattgatgatattgaaatggaacaggaagatttatctgaggtaccaagtgccatggaggaggtgaatgttgatgcagtagtagaggagttcgatgatgagatggccgaggaagtgtctggtggtagtagtggagaagagacggcagccttcattcagaattcagatattccttctcaatccactcccgagcctgaacaggcaaagggcattgacgaggtatccttgcagcaagatgttcagactgaggattctgaggatcatgctgatggcaaggaggatcagccagcgcagcatggtcaaaagttgggatcagatatgtggtcaagttacttggacaaagtatcggatcctgctgccattggtgctgctcttgctgccattattgttgcagctgttgtggcattcctttacatgaggcagaagcaaactcgtgttgcctccaatgaaccagctgagcaggtggagcaagttgagcaggttgaacgagttgagcaggttgaacaagttgatcaggttgaaactctttctgactcaggaagtagccaggggcatgttgttgccaagggttcactgtttcacagtcctggcgtagaagcctctggcccctcacagtatagcagcagcttgtcatctgggcttggcaggaggaggaataccaagggtgaaggccttgagccagtagtgtcgaggagagactcgacagctcaatccacatcatcttatggtagtttcaccacataccagaagatccctgccaagaaaggaaacaaggaggacgaagcgatgaccccagtccggcgctccagcaggctgaggaatgtgaaaactcctgaatcttaa

SEQ ID NO: 28637 - DNA, 936 bp, Zea mays
  Peptide Sequence Number=SeqID_72012
atggaaataagattcggacgacaattatatttgattcccagaactcttccctttatgcaactgaatgctatgtcctcattctcagctggtcatggacgccgacccaagaagaagccataccaccgtgaacctggtcttgacaaggccatggaccttcaaaagaagcctgcccttctccttcgtctgcgtgacctcattttggcacaaaagacagggtcactacttgtacgtgaccttgaaaaggaggttggctttgtccaaaaatgggattttctttcactcatcggacgccaccccaatatcttccatgtctctggtggaagtgcttcccgaaagccaatttctgttacacttacagagaaggccagaaagatatcctgtgaagatgctgacgcacgagaactaatggagccaatcttggtgagaaaccttaggaaattactgatgatgtcgatggactgccagattccaatggagaagatcgaactaatccaatttgaactgggattacctaagaacttcaagagcaacttgattccaaggtaccctgattttttttcaatccatgatgtgaagggactggaccgtttgtgtatggaacattgggattcttcactagcagtaacaatacgagaaaaaaagagttttgagggtttccagatatgctctagagggattcctaaagatggaaatgtcttgggtccttttgcttttaagttgaagtatccagcaggatttaggccaaactggaagtaccttgaggaggttgtcaggtggcagaagatggcatttccttcaccttatttgaatgttaggcgagtcgaatctgcaacaccacaggctcgaaagcgtgccattgctgttctgcatgagattttgagcctgacaatggagaggcgattgacatctgataagctagacatattttcacaatga

SEQ ID NO: 28638 - DNA, 402 bp, Zea mays
  Peptide Sequence Number=SeqID_72013
atgcggaaattgggcgcgagcgcaggtggtggttcaccaggggcagagcatggcgcaaccgatgaggcaaggcgacatggacgcaacagggcatgcaagcttcttccacctccagccatcaccatggaaatagagagaaacaacaatggggaaggggactgcgcgaggaagaaggggtccgagggtgttacaagaggtaagcccaagtatttgacaggaaaaacttccaatttaaaggcaatgtttgcttcgctacaaatgaagcagtcagtccatgacttcatcacatggtgccaggtcttaagcttcaagggatgccccaaaccattatctcagacaggggctgtattttcactagtagcccttggcaagcgttcttccattttgcaggcacacaactga

SEQ ID NO: 28639 - DNA, 282 bp, Zea mays
  Peptide Sequence Number=SeqID_72014
acgaggcagagccagattggcaacaccccagcggcggcgggcttcctcgccgcggcgcccatgggattcgtcaccctgtcagagcccagaagaaagggattggagaagattagggggaacgggtcgagcttcagcagaacgaggccaggccaaacggcgatcggagtcggatcgctggaccttggaggcgacggcgggtggaccggggtctgcgggtgcagtgggcgcttccactcacacccacctctgactccgacaaggctcgcagtcgccgaggagtag

SEQ ID NO: 28640 - DNA, 204 bp, Zea mays
  Peptide Sequence Number=SeqID_72015
atggaccgcctggcggggctctctgcggaggcacggacggtccgcgacacagggtcggacgatcaaggggtagtaattcggaaggtggctatggtttttgtaagtacgaggctcaagatcttgttcaaggaaggtggctatggtacttttgatcctctgtttctcaacttgattgcatctatgcaagcgctacaaccagattga

SEQ ID NO: 28641 - DNA, 1212 bp, Zea mays
  Peptide Sequence Number=SeqID_72016
gcagcactcggtaaagaatccatctttgccgagtgccacttgggacactcggcaaagagcccgccagagagggtccccatgtcagactctttgccgagtgccggcgacataacactcgacaaagaacctaagccgacgccaacgacgcatgtcctcggagcctgccgaggccaggatatagaggcgtcgccgggccgggccactgcacggtcggcggatatggctgtcgaagcgcacagcctcctcttagcaggagggcacaagcaactcaccagcgcgggatggccttggacgaccggcgacgaagctagatgcgcgacggcgcgaccgagccaccagcaggctttccagctccagcaggcctcgtgtgtgggcgtgggcgtgggcctgccggcggcggctccggtctcgtcggccgcggcggcgccaccagcgccgatgatagcgcagcagtacgctgctggcggacggctgttcgtgggagacgcggcggagagcggcgtcacgttcggaggaggaggtgcggtgcagcaggaggcgccccggaagcggaagcgcgccgagcaggggcagacgccgccgccggttcttgggaccggcgcggccgacgtggcggcgcagtttcaacagcagctcgtcgacgtcgaccgtctcgtcctccaacacaccgccaagatgtgggcggggctcaccgagcagcggcggcggcacgcccggcaggtcgtggccaccgtggaggccgccgcggccccgcggctgcgcgcaaaggaggaggagatccggcggatgcggcgcgtcaactgggcgctcgaggagcgggtgaagagcatgtacgtcgaggcgcacatgtggcgtgacttggcgcagtccaacgacgccgcggtcaccgcgctccgcggcgagctgcagcaggcgctcgacgcccagcagacgcgccgccgcgccgacgacgccgactcgtgctgctgcggggagaacgacgtcttcatcaccggagcaggcgcggcggagaacgaagaggaggccgggaccgggacgtcgtcgtcgggccacgtcaggggggcgtgcgccgtgtgcggcgacaacgcggccgacgtgctgctgctgccgtgccgccacctctgcgcgtgcgcgccgtgcgcggccgcggcgagggcgtgcccggcgtgcgggtgcgccaagaatggcagcgtctgcgtcaacttttcgtga

SEQ ID NO: 28642 - DNA, 1467 bp, Zea mays
  Peptide Sequence Number=SeqID_72017
atggggaaattgaattgtgccgatcatatggccgtggcgttgaggatcgcgtccacgctgtggcgttgccttctgcctctgcctcgtctgcgcgtcgagctttacccgcccgccgtaaagttcttctggaactggaatgggggagcgcagccgtacatcggcgtcaactacggcgaggtggcggacaacctgccgtcggcggacgagacggcgaggctgctcaggtcgacgtccatctccaaggtgcggctgtacggcgtggacgcggggctgatccgcgcgctggcggggtccggcatctccgtggtggtgggcgtggcgaacggcgacatcccgtcgctggccgcggacccggcggccgcgtcccggtggctggccgccaacgtgctgcccttcgtcccggcgaccaccatctccgccgtggccgtcggcaacgaggtgctggagtccggggacgccaccctgggcgccgcgctgctcccggccatgcagaacctccgcgccgccgccgcggcggcggggggcggcgccgcggggatcaggttctccaccgtgaacaccatgggcgtgatggcgcagtcggacccgccgtcgacgggcgcgttccacccggacgtggctccgcagctgcagcagatcctggggttcctcagcaggaccggcgcgccgttcatgatcaacccgtacccgtggttcgcgtaccagtcggacccgcggccggacacgctggccttctgcctgttccagcccaacgcggggcgcgtggacggcgggtccaagatcaggtacaccaacatgttcgacgcgcagctggacgccgtgaagtcggcgctggtgcgcgccgggtacggggacgtggacgtcgtggtggcggagacggggtggccgaccaggggcgacgccggggagcccggcgccacggcggagaacgccagggcgtacgtgtccaacctggtggcgcacctgcggtccggcgccggcacgccgctgatgcctgggaaggcggtggagacgtacctgttcgcgctgtacgacgaggacctcaagcccgggcccacgtcggagcgctcgttcgggctgtaccacacggacctcagcatggcctacgacgccgggctggcctcctccgcggcggcggggggtcggggcgggggcgggggcggcgcggcgcagcccaggggcggcgggtggtgcgtggcgcgggccggcgcctcggacgcggagctgcaggcggacctggactacgcgtgctcgcaggtgggcgtcgactgcagcgccatccagcccggcggcgcctgcttcgagcccaacacggtgcgcgcgcacgccgcgtacgccgtgaaccagctgtaccaggcggccgggcggcacccgtggaactgcgacttccgggcgtccgccacgctcacctccgacgacccaaatctcgcagcactgctcgagcatgacaatggtgacatgacatga

SEQ ID NO: 28643 - DNA, 174 bp, Zea mays
  Peptide Sequence Number=SeqID_72018
atgcaggttctattgaatattattggtgatctacacaagactgtagtgatcgtcgggggcggagttggtggtgctggggcggcaatggcggagccggggccggggacgggcgccggcggtggctgcctaggcgagggggctgtggcgcacgggaaggccacagtcgtgagctga

SEQ ID NO: 28644 - DNA, 390 bp, Zea mays
  Peptide Sequence Number=SeqID_72019
atggagtttgctccccccttctcaagtgcttatccagaactgaaggcctttgctgggaacggtttttatacaaggattttactggccgaaggcagcttcggatgcagtagatctggtccaaaagtgcgaaaattgtcaaaaatgtgcaagagaccaaaaacaaccttcgtcattaactcagttaatataaccaacctggccattgcaaagattgggcctgaattgttaggcccacttccaccagcacaagattggcacgaagattcattttgcatcagtcaggcacccggagtcaaacgagctggtcgaaagagcaaatggtattataatgacgggaataatgaagttaatcttcaatcaaccccagaggaaagtggccagatgagttga

SEQ ID NO: 28645 - DNA, 363 bp, Zea mays
  Peptide Sequence Number=SeqID_72020
atgtcgggagatcacgtcaagagggagatagtcaccggcgataagccagaagcctcgggaaggaagaacgagaaacagactccatcaaaggagtcaagcgacaagaatgtctttgaggagcttgcaaatcttctatcgaagagtgcttttcctatcaactgccccttgtcgtccatgcacattcttgctctagaaggttactaccgtacaaggagaatcttgccgatgaattactcaggtgcatactgtgagaacatcacacaggaggttgcacggctcgtcaaagcaaatgcagtcacagatgggttggagaacagtgatattgctgctctccattacagctcggcatccagatgcttctga

SEQ ID NO: 28646 - DNA, 582 bp, Zea mays
  Peptide Sequence Number=SeqID_72021
atggccggaatggctcaccggagttactctggcccgcccgagaccttctcaccgccgctctcccctctctgcccgtggattcatggcctcttccccgccatcgagttcgccgtggcgccctcttcctctctgctcaactccagcgaccccggagccaccctagcacgcgccagcctcaactccggcgacctcaccgccgcggagaggaacagcgccgcccgcagccgtctgtttcccccctggtctgtttcccctccgttcgattcagatcgaacggttcggaccccggttgcgtttgttttccccctggtccgatctccttcatccgattcagatcgaatggctcggaccccgggataccgcttcgtgcacgcgcgcctccatacctggcccgcctgtcagcgcccaatccccctggcgctgggcccgcgcggtcagtgcgctcttttccccctgtcgctgatgcccctggttcgcttgtcagcgctcgttcgcccaggcgtgcgcctctggctgttagatctcagccgttcgtccgtgatcgggtggtctgaaccccaacccgagtggatctggtcctag

SEQ ID NO: 28647 - DNA, 1446 bp, Zea mays
  Peptide Sequence Number=SeqID_72022
atggctcagctgaaggccgcgcgcgccaccgacgtcccgcccgccatgccggacccggacccggacgtcgtcgccgccgacctcggcgcgtgcgtacggcacgggcgcgttgacggtttggcagcaggaagcggcagggcggaggcgacggcgacggcgacgaccaccgcggcggcggccgatcagggacgacgacggccgccgctggtggtggtagggcaccgcggcaaggggatgaacgcgctggcgtcgccagacccgcggctgcgcggcgacatcagggagaacaccctccgcgccttcaacgccgccgccgccagccaccccgccgtcgcctacgtcgagttcgacgtccaggtgaccagggacggctgccctgtcatcttccatgacaacttcatctacacgcaacaagacggccaagtctcagcgaagcgtgttaccgagctgaacctggacgagttcctgtcctacgggccgcaaagagaccaggggaagcatcgatgccacaaggacatgaggatattgatgaagatgatagctatagaattaaagcaggccggcaagccacttctccggaaactcaaggacgggaggatcctcaagtgggacgtgcagtccgaggacgcgctctgcacgctccgtgaggtcttcgagggcgtccaccggcgtgtcggcttcaacgtggagctcaagttcgatgacgacctcttctacacggaggagaggcttacctgcatcctaaaatccgttctcaaggcatgtggtgtggcgaggccaaagagccccgagcagattccttgtgttgtcttcgagcacgccaacgacaggcccatcatcttctccagcttccaacccgatgccgcgcagctcatccgcaagctgcaagacaaataccctgtgctcttcctgaccaacggagggacgcaggtgtacgccgacccgcgtcggaactcgctggaggaggccgtcaagctgtgcgtcgccggcgggctgcaggggatcgtgtcggaggtccgggcgatactcaggcagccgtcggcggtggccaagatcaaggaggccaacaaactgtcgctgatgacctacggtcagctcaacctgcaacgccggccgccggcggataggaagtacttcataggaactgagggtgctctttgtttgcgccttgtgtctcggtctcgcagcaacgtggcggaggtggtgtacgtgcagcacctgatgggggtggacggcgtcatcgtcgacctggtgcaggagatcgcggaggccgtgtcggcgttcacggtcgttacggccgtgcaggcgtcgggctcccaggacggcggcggcatcgtggtcggcgagaggatggagacggctgccgtggcggtggcagggacgccgagcttctcgccgcgggaggtgtccttcctcctgaggctcattcccgagctagtgcaatag

SEQ ID NO: 28648 - DNA, 1011 bp, Zea mays
  Peptide Sequence Number=SeqID_72023
atgaacaagaacatcttcaagatgagggatgataagaagaagcaattacataagagaaaaagattctcttcttcgccaccatcacgatcattctctacacaccaatgccttacagctaaaggtgaacacatggtatatgatgatgatgatattagaaatagtgataatgatcttaagactccccttagagatgttagagagaaatatgacaaacttaatgaaacaaacatggagcttaatgctagacttttctctttgaaagaagattacactcaagttaatatcaatcttgataatcttagtattgcatatgagattttgtttattgaaacacataatattgatgtagcaacatcatatgatgacttgaatatgaacaatgaacaagtgaacaacaagaccggtgggagccattgggtaatagatagttgttgcactcaacgtatgataggagacccatcttcaatatgtgatctgttggtcaactatatgaacaacaccggggaagagtgggttttcacatcagagcctagcatcgtgctccgctcgttcccgctcacgttcctaggcgtggcaacgatcatggcgttgggaattgcgacgctcacggagcaccctgttgtcaggagtctctcctgctttagatgcctcatcccgagatacgagttgagtgagatctcgttctccagcctcatgatcacgtcgaacgttatgatgctcgttctgacgttggcgtgcctcatgctacgggagctcctcccccagtacagtggacttgtcgctggagacgggagcatcctctactctttcatagataaagaggacatccaggaagaaagagctcgtggctgtgtcccgtgttgcggccatctcccacatgagcggagcagccgggacagtcatcggtcttgttctcgcagcgacaccagtgccggggctgtccactcctttttgccgagtgatccgagtccacacttgggtaggcgacgtggacagaggagtccatcgtga

SEQ ID NO: 28649 - DNA, 57 bp, Zea mays
  Peptide Sequence Number=SeqID_72024
atggcggtggccattacaaccaaagacgaccatgtcgccagtctgacagatgtttga

SEQ ID NO: 28650 - DNA, 408 bp, Zea mays
  Peptide Sequence Number=SeqID_72025
atgactacaaacctctcgcatgctcaccaccgggggaggcccatgtgtgattcggcccatagtgatgggccacgtgaggacaagtgcgataagggacgtgtctgtaataaggcaggcaggttcccaacatttggcgcccaccgttcgtgctacgcaaaacaacccgcgatggcccccaagcgagctaattcgaaggctgccccatccattgacgacgcggcgaaggcagcgcttctggcgaataagaaaggcaaggccctcgcggacaccactccccaagaggcctttgaagacaacgctgtcaacagcaaaagacagcgccaaaccatcccaccccccgcggcactgtacgcacctgcagttccgaaggcgcaccacaagcactaccaccaggcttcgctccactag

SEQ ID NO: 28651 - DNA, 456 bp, Zea mays
  Peptide Sequence Number=SeqID_72026
atgtccggcagagaggagccagagccctatgtacatgctaacgtggccgtcggaggagcgtttgagccctgtgtacgcagtgtcgtggccgtcggaggagcgtttgagccttgtagaagcacagctgtcggggctgtcgggaccttgctgacgtctccttgctttccgtggtcggtccgagcccaaggtcgggcgaggcggagaatcctcctaaggccgaggccggggtcgggcgaggacgcgattccgcccgaggtcgaggccgggccctcgggtcggacgaggcggagaccaccttccgaggtcgaggtcgaggccgagccctggggtcgggcgaggcggagtccaccttccgaggtcaaggcgggggccgagccctggggtcgggcgaggcagagacttctcctgaggccgagtcccgaggtcgggcatggcggagcttcctgtggcgcctga

SEQ ID NO: 28652 - DNA, 312 bp, Zea mays
  Peptide Sequence Number=SeqID_72027
atggggattggttgtctacgaggtggaaattggaataaggattatggtgtggtacccagattgccctcctcacgcgacctgagacgtggtctcccattccggttatggtgggtacaagtgcggtcactgcatgacggcagtcgtgctagtgcttttggcaaccatactcatcagccaaacagttgcatttctagaggtagaggagtagactcctcacaccgggtttctctagaggacatggttgctggagtgacttggccgtccattcttgccaccgggttggacagtcgagtgggaccctgccttggctga

SEQ ID NO: 28653 - DNA, 351 bp, Zea mays
  Peptide Sequence Number=SeqID_72028
atgaacaaaaacactggcattcaaagtgccattacaaacggaactccggttccgtccccgcgggtgcgaacaaccccacaagattggggaacccgcggagcgatcgtgggccgacggatggcccaccgccgcccgatccggcaacagcggcagtcacccccgccccgggcggcgaagcagcttcggcagcggcttcggggcaggtgttacgacaggaggactctcacccgcagaggacaagagccagccattcaggccgggagacggagacccagggctactggcggagtcggcaatctcaacggtagagaagccatctccggctgccgacgcctcgaagggcgccggtag

SEQ ID NO: 28654 - DNA, 360 bp, Zea mays
  Peptide Sequence Number=SeqID_72029
atggataggccggagcacacgccgccgacgagcttgcccgcctgctcacgtggatcgggcgattccggccatccccgacgacgagccgtacctcgacgtgatcgccagaccctccccgagccaaccctacccttcgccggacctccctcgccgccggtaagccgcgccacccttttctttcccgcggctactgtttcagttgagggagggactgcggactgtaatcttgctgacggagagtacatcctcgtgccggagcaaggagctgctcaggaggtagccccagatccagcacccgagcctgcactagaggacctgcctgccactgctttggaaggcaagccccggttttatgcataa

SEQ ID NO: 28655 - DNA, 1215 bp, Zea mays
  Peptide Sequence Number=SeqID_72030
atggaggcccaggcccacgcgtcacgcaactggcgcgccagatgctgcatgcaagcaactgcactgccacttgcgccaccaccacgcctcttcggttgcggaaccaatactgcgactcgaggcggcccagcgcacgacccagcagcgccagcctggcgcgacggtcaatacggccgaaagagaagcgggcgacgcttcgccttcgccgtaataaccgtgccaaaaaagggaccgggaaagggggataccccgaaaaggatccttccctgtgaaggaaccgggctccgagccccccctactgatcagaggttcgaaggctggccctccgaggggttcaacagtcgcctcagatcgcgtgggccctacacccactactggtcagaggttcgaaggccggccccccgacgggctccacggtcgcctcaggctactcgggctccgcgcccattactgatcaggggttcgaaggctggcccccgaagggttcacagtcgcctcagacgccgagcgagggatgaccaggggtacgttcgatacataaccaaggctcgggctgcgctcccgagggctcggactcaggctcaaccccagaagacgacgaactccgcttcgcccgaccccagggctcggactccgccctggcctctgccgaacaacctccgcctcgcccgacccaggggctcgggctcggcctcggccatggaagacagactcgacctcggcttcggaggagcctccacgtcgcccgacctagggcacaggccagccacgtcaacaggaagcgccatcatcaccctaccccgagccgactcgggccgcagagaacaagaccggctccgttgctcctccgacagccacgacatcacaccagcagggtgccaagatctctccggctgccacattggcatggccttcttagagaaggttggccgcgcggggatgaggacgggacaggcgctctcttggggccgctcgcttccctcacccgcgtggacgcttgtaaccccctactgcaagcgcacccgacctgggcgcgggacgaacacgaaggccgtgggatttccacctctctcacgcccgtctccggccacctcgcttccccccttcgcgctcgcccacgcgctcgacccatctgggctggggcacgcggcacactcactcgtcggcttagggaccccccggtctcgagacgccgacaactacgttcgtggatag

SEQ ID NO: 28656 - DNA, 414 bp, Zea mays
  Peptide Sequence Number=SeqID_72031
atgacgcatttcctcagcggcctcaacaatcctcttctgaagatcggcgagacgaagcatcttttccttcttcctctgaaactgttgatggatggcttcgaggtccctgatttcttggtccaactcctcctcctgaatggctgcaatgcagcccctggccctgatgacttcttgggtggcatgacaaaggtcaaagcttgccgaaggtggccgagcataggacgcagcctgggtaaaattacatttatatccctgacatttactattagccaaaagatcacgctttttcataccatgcacgccttcttctcaaacccgaagcttcatgtgacagtatactattctggaaaacgtgttagtcgtgtttttgaggaccttcggaagatgaaggcccccaacagttggtcttcatga

SEQ ID NO: 28657 - DNA, 327 bp, Zea mays
  Peptide Sequence Number=SeqID_72032
atgggaggacgaccacaagggtattggggtcgtgctgcaaccctaggatgcgtccctaatggacctaacttgatacacgacccattgggccaaaatagggtgacgcagcaccatgggcagaaaaggcaggaaatgtctcgatgcatcagtagtgtggatgtcttcatcacagctgaactctcaccgctgcccaagccgtatgacccccaagctgatcccgtcatgaaggaagcgttggatgtaatgagcgtcgctaactccatcattgacgaagttgtcgataggctactgaatgaagccgtcgagaagatccttaaggaagattag

SEQ ID NO: 28658 - DNA, 999 bp, Zea mays
  Peptide Sequence Number=SeqID_72033
atgggaactcacatacaagagacagccctaggtgctaggaggaggcctgcgccagatttttgccaagattcgcacgcttgcgatctcggcgagctgttgaacaagggcagaagaacacttccacgtgttcgacgcgctctgaacgcgccagagcacgcccagcgcccgaccccgcacgccccgcgctacgccaagccgtgcccatgtgtcctgctcgtgcccgcgcctataaagcccaccgaagcttcaaccgtactcccccgcgtgctctcgacctcaccggagccagagatcaccggcgtttgccctgcaaacggttctctagaggacatggttgctggagtgacttggccgtccatcttgccaccgggttggacagtcgagtgggaccctgcctcggctgaggaggagcatgaggagtgctgggataggcttccccatctctttgtttatttgtcggctgaggatactatggaggcaattgctcttcatggactgaccaccttctgcggattccaccccttggagctgtccactcaccccattggcttgttccccgcggagaaggaggacgacccaatgtggaaggaccgagtggagcatgccaaggatatatgggctatctacccaggacagactgctcacttgacagtgcggtgcatgaatgccctgtatcgtctgcaagtgatgcgtggagaggcaatgtcccatctgatggcattgttggaggcgaccaagatcacttcggataacagagaggaacttgtggttgacttggagaacaccatcgaggttctcgaggatcagcttatcaacactcagcagcaactcgcggaagctaaccaacacttggatatgcactaccaggagatccaggacatggaggccaatgaggatgtccacatcgagggaggagaggagcctgcctccagcttggacactgctagctcagggagaccaccttcccccgagtcgagcgttgcctcgtttgctcactag

SEQ ID NO: 28659 - DNA, 168 bp, Zea mays
  Peptide Sequence Number=SeqID_72034
atggcgtcatgctcacctagcaacagtaggacggacaggatgagggaggcctcaaatccaagcacttcgggcgcaagaacgtcgaaccagacagttaggagagtggagagcaacgatgagcggcagtttgaggtctttcgggggcgaaaatggaagtttgctaaatag

SEQ ID NO: 28660 - DNA, 1353 bp, Zea mays
  Peptide Sequence Number=SeqID_72035
atggtgcctcctgttgacgtggtcggtccgtgccctaggttgggcgatgtggaggctcctccgaggtcgaggtcaagtctgtcttccgaggctgaggtcaagtccgagcccctgggtcgggcgaggcggagaccgtcggctgaggccagggctgagtccgagccctggggtcgggcgaagcggagttcatcgtcttccggggctgagcccgagtccgagcctaggggtcgggcggagcggagttcgtcgtcttcaggggctgagcccgagtccgagtccgagccctggggtcgggcgaagcggagttcgtcgtcttccggggctgagcccgagtccgagccctggggtcgggcgaagcggagttcgtcgtcttcaggggctgagcccgagtctgagccctggggtcgggcgaagcggagttcgtcgtcttcaggggctgagcccgagtccgagccctggggtcgggcgaagcggagttcgtcgtcttccggggctgagcacgagtccgagccctggggtcgggcgaagcggagttcgttgtcttcaggggttgagcccgagtccgagccctggtgtcgggcgaagcggagtttcctatggcgcctgaggtcgggcctggctgcttgtcagcctcactctttcgagtggcacaacagtcggagtggcgcaggcggcgctgtcctcttgtcagaccggtcagtggagcggcgaagtgactacggtcacttcggctctttcgactggagggcgtgcgtcaggataaagctttgtgctgatgggggttaccagctgagaattaggagtcttgagggggaccagcctttctcggttgcgttttgttccggtgggtgcgcgcgagcgcacccgccgggtgtagcccccgaggcctcggaggagtggtttgactcctccgaggtcttaatgcctcgcgcaatggctggtctggtcgttccctcatgcgagctggccgtagcccgggtgcacggtcgggtcccaagttctcgggctggtatgttgacgctgtcaacggtttggccagagccaggtttgcgagagcagcccccgagcctctgcacagggcgagaggacggtcaaggacagactcgacttttttacatacgcccctgcgtcgcctttccgcaaggaggaggggggaaagcgccatgttgccctcggagggcgacgaacatggtgtctccggtgagctgctggcgggtaatccgagtggacgcccgtgccccaattgttaggggtcggctagaggcccggaggcgcgctcaaaagtacctgcgggtgatctgccggacccggtcccctttcgacggggtccgagggctcgatgcctccctctga

SEQ ID NO: 28661 - DNA, 186 bp, Zea mays
  Peptide Sequence Number=SeqID_72036
atgcaggaggaaccgcccaactacgagatcgggtggaagcacacgaagaagctgccgctggagaagccccggggctgggccatcttcgacttcatggagaagctggaggtgctgctggcgcgggagcgcaatctagagaaatgtccagcgccgccggggaggaggtgcccagcgcccgtgggatga

SEQ ID NO: 28662 - DNA, 268 bp, Zea mays
  Peptide Sequence Number=SeqID_72037
atgaggggagcagataatggtcgtccgaatttccttcctgagaagtgccagattgcaggtttagtttgtcctgaagtttgccagaggggtgaaaaagttagcctatttgatgaagggctgatacatggtgttgatctaaccaatcatattgctcagtcacaattggtgccaagtggtgtcaaggaaacaccaatagtggatcaaaacaagagacctgcatccagtgacatgcttgacatagttgaatgcaaacgtctgaagcaggaag

SEQ ID NO: 28663 - DNA, 1578 bp, Zea mays
  Peptide Sequence Number=SeqID_72038
atgtcgacggcggcggccgcgaagactccgatcaaggccctgggctccgcggccgcgggtgccatgactccgaccaaatctcaggcccccgcggcggccaagacgccctgtacctctcgcgcgcggtcctcccacgcatccgagaattccaaccccaacatcccgggcacgccgcctcccccgcagtcgacgccgtccaagcccagcctcaagtccccggcgggcgcgggagccaggtccgccaccgcgaagaaaaagccctccacgcccgcgcccgccgcgccaccgctggagcgggagcgggagcggcgattcctcgtggcgaagaagggcgcgcggcggaggcgcaacgtcgggaccatgggaggcggcgggggcggccgcgggggagagatcgacttcgacaagtgccgcgaggccgctcgcgaggcgctgcgcgcgtcgcagggggagttcttccgcaaggaggtcgccgcatccacagccaccggagaggatcaattgggacaggaggaggaggggaagccgctggctgacgaggatgtgaaaggtggagcattcgaggagcggcaggaggaggagaccgacgcggagctggaggggagcagcaaggttagggcgatgaggacgaaggcgatggctaaggcgatgagcagcgttccgaatcctggctctggccgcgtcaagcatatggtgcaggccttcgagagcctgctcaacatctccggcgccacctccgatgctgaaagggccggtgagggctcatgggcgctgcccgggttgcagctatggaaggaggatgataagggtgatctggggttcccaccagtgtcggtgttctcttctgctgatttccagaatgcagggtctaatcgactctgctcgtcactagatggaaacaccgtcaggtcgagctgggacagcagaacatcgactggcgagtgcagcaggagaaattcatctgagtcactaaggagcagctggaacaaaaagctcaaggtcaccagccagcatccattcaagttgaggacagagcaaaggggaaagtttaaggaacagcagttcgtccaaaaggtgcaagagatgcttgcagaggaagagaagaagcgtattcatattgcgcaaggattgccatggactaccgatgaacccgagtgtttgataaagcctgcagtcaaagaaagaactgagccgatagaccttgttttgcatagcgatgtgcgtgctcttgaacgtgcagaatttgatcagcacgttttggataggaacaagtttgctgagcaacaaagattagaatgggaaaggcaacaggaattagacgaagaagaaaggataaggcaactgaggagaaccgagctgattcctaaagctcagcccatgccatactttgaccgcccattcatccccaaaaggtccacaaaacctcctacagttcccatggaaccgaaattctacctcaggccagaaaagttatcctgctttgcttggatcgccttgcctccaagttctgttaatcgctggctctgtgcttcagatgcaatcccaccgaggtttgaaatttgtcgttcaagaaactga

SEQ ID NO: 28664 - DNA, 1002 bp, Zea mays
  Peptide Sequence Number=SeqID_72039
atgggcgacagcgacaggagaaccaggttcaaaagagggccgtgggcctgcggcgccggatccttcacgacaggtttcctcaccatacgcttcaccgccgccgcatgggtttcctcaccatacgcttcgccgacggcggccttgcatggcaccggagagggcggcccctgcgcggacgtggcccccggcctcagccctgatggcagcgcgctgccccaccggccccccggcgcgagcgggcgcggcgcggcccccacccgacggcgcgggcgaggcacgcgggcctcccggcggggcggacgcggcccctggccacagcggcggcgggcggacccctggccccggcgtcggcgggcgcgctctcctctccaaatctcgccgtctgcgcgcgtccaaattgaggaatccgcctccgaaggagatcgcctccgctgcgccccgactctcggtcgacatcatcgtccgcgtccgatgcgccctggctctcggtccttcgcgcgcgcgcccttcatcgacctctctgccttctcccacctcgaggcccacacccacgtcggcagcgacgcccacggacacgcccaccaggaaacgccctatgcgctatgccccaagaaacatgcttccctggacgacgaccgagaagacccggcgagccccgcttggcaccttcatcttcgtgatgatgttgtccttcaggctgaagtgccacacagtgagaggcattttgggagggacatcatcatgcccaacttgaagtcgtccgtgaccacaacagcgagcgcggtggagtacagggatgaagtattgaaggcgctgccgccagctaaagctaaagaggccggtgtagatgggatcattgttcagggacgtgaggcagggggtcatgtaattggtcaggtggctttctctgtatttgctggtgttggagaacgtacccgtgaaggtaatgatctgtacaaggaaattattgaaagtgttgtcactaagctaggtgacaagcag

SEQ ID NO: 28665 - DNA, 771 bp, Zea mays
  Peptide Sequence Number=SeqID_72040
atggattcggccgtcccggtcgcccaccccactaccccagccgccactcccagtcgtcccagcctcccagccttccctggaggccaggaccccagcgccccacgcggccacgccggcacgcggcactgcggcagtcccaggcccccagccgcgcgcccccgcccaggctcccaggcggcggccaggcccccgccccgcgcccccgcccagcaggcagcagccagtccgcctccgcccgctaggacggctcctagtcggccagtcttcaggcttcagcccgctgccccgctgcgacgctgccccgagcggtcgagctacgcctgcgcggctgcgaccggcgaccgtccccaagctgcgactgcgactgcgaccggcgaccgtccccaacctgcggcgtccccgagccctaggcccgacccgctgccatccctaccgctgccacctgcgtcgtccgcaagggatccatcgccggcgaaggaagccctccgaaagccgcacgaagctcatttgatgacgcccgcacacgcgacgagctcgttcacctaccagcggtttaccggcggtgtgtactacgcggccgcatgcgtcgctttgttcggcaagctccggcatagccgccgcttggacgcggtccagagcggctgcaccgcgctgtccatcttcaaacagggggacctcatggtcgtcgccaacgccagcgactctcgggttgttctgggcatcgcatccgacaacgacgccgtcacgccgtccagctcatcatccacctga

SEQ ID NO: 28666 - DNA, 2334 bp, Zea mays
  Peptide Sequence Number=SeqID_72041
atgtccaaagatttggaaaaatgttcacctagtggcaccacacctacgacttcagtttcacctgtagagtcaaaaaagcatgagaagactgtaccaaattatctcagagctactagaggttcgtgccatgatttttgcaagtatggacataaaaacccttctgaagaggaggcgggtatttcaggaggaagaagaaagaaaattcctgctcatctgattaatttgacactacacagatcagctattttggatagatccaaggatataaaaaataggagtgtttcactaaccaagtcgagcatatctctgggtgaagctgaacggtttgcacccaagaaagcatcagcaagtcgaaaaggagttctatccagtgagcatatggttcccaggacagctacaccatctcaacataaatctctgaactctgatagaagaaagatgcattcaattgttgcacagaaggctccaacaaatctaaggtgttcaaatggagttccaaaaattgataaaaaagaaacaacgccagccaagggggctatatttcctgcgaaattgaagtttccagagaagaccttgctggagaaatctagaaatgtggatagagtcacaatggccaatcaatcattgcacaagaggccagcttcttctctcactaagctcaacatggttaaacaggggcctgttgcatctcaggcttctagtaagcatctactttcaaaacataaaaatactctggaggaacctgttgcagcaaatattacaagaatgcgtgctaaagctggacaaagtcctagaaggacgagcaatccttctaatataaatgggaaggaaggctcagatatgcccagatcacccctctctttgcaacccaagttgactgcttctatggaattacagatggatgattcacaaattacagggaattacaacgattcagcattggctgaactatctccagctattacagaatacagagacttttctcaaccagcactagaagaaacaagtaaaactatttcagaggacgatggggtgggaagaactgaaaagagcaaaatattaggaggtgaagccttcctggaaagcaccattgcccttcagctgcagcaatcattagatggaaaggaattcagcgttatcctagctgaatctgatctagaacagaaactatcagagcataatattgttcatagtcaagcttcaaaggattataatagccaaacagattatgcagctctttgtcaattaccagaacaagtaacaactgtggaaactgcagatgtgtttgactttatgtcaactcaaagtaattcaaaaactgaggatgatcaagttaaagtcaatgcgtctgtggagtctctaatccctgaaggtaaggaagaaatgagagttcatgaagattttgaaatatctccagaactactggtacttgacaaaaaacatgataaggagcctgagtcttgtcttgatcttgcttctggaaatatagcagagaatgataaggatggtaaagtttttgacagtaggatgaacaacagtgcttctcactgccaatcaatttcagaaacttcatcagatggtggactccttgaggaacctaagtccatgctaattgaacctagtgtttttgctggtgatgagttagcaagtatcagtaatgaaaatacctctgaacatggcggactgaaatcaaggatgtttattccccatcaatcaccagaagaactatcagataatgaattttatgaagagtatggttttgaattaagtgaatcagatgaatctggtacagaagatgaggagacaacaatcaagaaaaataggaatgaatcattgaagtctggtggccaaagatcaagaagaacctcagcacttgaattggatgatgctagtctcacaccttataagttaaagtttaagaggggtaaaattgtagaactcccactagacagcatgggcccaaggaggctgaaatttagaagaaagtctgcaaatgaagcttcaaatcgtgaaagccaaccagctagaaggatttatagaaggaacaacaccagtactgctgttcctactgatgtggaatctcctggtgtgaaactgagacatcaagatgcacaagagaagaaagatgcacaaggattgttcaataatgtaattgaagaaactgcaagcaagttagttgagtccaggaaaagcaaggtaaaagctttagttggcgcttttgaaacagtgatttctctccaggatggcaaacccacatcatcgacagcgcaagctggtaattcacaagatttaattcctgatgacgggggaaatgcacctgaggaaactggatag

SEQ ID NO: 28667 - DNA, 354 bp, Zea mays
  Peptide Sequence Number=SeqID_72042
atggcaatgggctttgcggggagggaaaatgagaaagacagtacgggaatggcagaacacaaaatgagagccgggaatgagagctttgcgggaggggagaatgagaaagacgggaatgagaatgacagaacacggaatggcagcctaccccttaccgccttaataagtagtagattacgaatacccgcggggaacccgtgggcaaaaactggaatccgtgctcgatccgattttatcacgggtcaacatttgtgcccgtacctgaactcgacgggtcagatatccgacggatatctaaactcgcgggttcttgtgctgcgatgcagggttacttttgccctcgaattgcaatag

SEQ ID NO: 28668 - DNA, 531 bp, Zea mays
  Peptide Sequence Number=SeqID_72043
atgtcgtgcgcgttcgacgactactatatcaaggattatggcgtcatcttggcgccagaggtgacgcagaggaggaccgacaacaatgaccactcgccatcgtcgggtttaaatgctctcagtggctgtacatgtaaaactatacccgcagatgagacacattaccaggaggggtacagaaatggctataatgatggtttggcatctggaaaggaagaggggaggcaggttggtttaaagatgggtttccaggtcggtgaagaactgggtttctttcagggctgtctggatgtgtggacgtctgcaattctcattgatcagaatgccttcacagctcgggtcaggaagaatatcgagcaactggctgcactggtgggcagttatccgctgtccgatccggagaatgaacaaattcaagacgtgatggagaagataaggctgaaattcagggtcatcactgcaagcttaggggtgaagttagagtatgaagggcaccccaaatcatctaaacaggatgctgaggatctgtag

SEQ ID NO: 28669 - DNA, 915 bp, Zea mays
  Peptide Sequence Number=SeqID_72044
atggacggcgactcgaagaagctgagggtgtggttttctggagtaggaaagggaggtggaggtggacgccagtcttcagcggcaccaccgcaagaaagcgcgcctattggaagagcggaaatgaacagcagcggggaatttgatgctgcattcgcagccacaattgcagcagcagcatttgcaattgctgcccgtgaagagaagcttgcagctcagaagaagtctgtccccatcgaggaggtgccacgagccctgtcgctagtcaagagagctggaagcaccaaaaaacctgcgggaggcaacaaaatctcaagatggtttagcggcaaggagcctctagaacacgacgacgacggtccagtgagcaggccactgaaaccagcacctggaaagcccgagggtatgcctgcagatcacaaggtggcacccaagattcttgagacttctctgagtgtgaggaagggttcagggtcctccggcaagacaacagacaggaaagggagcaagaagtttgagcaagaacatgttcagaaagcgccatcgatcatcaggccatctacatcataccattctagacggaatggagaagacgcagcaggagtagctgctattggcggcacgagatctaaggctgatgagtgggagaaggcaaagcttgcaaaagttagagaggagtacgaaaagatgatggagaccatagctgaatgggaaactgagaagaagactgtgctggacagaaagagagcaaaagcactagaagaatacaaccaggagatgacaaggatcagcaagattgctggaggagcaaggtcgatggcagaggaacgaaaatacaacgacgagaataagatcaaagagaaggcgcacaagatacgatccacaagaaagcctccccgcacatgtgcttgcttttga

SEQ ID NO: 28670 - DNA, 696 bp, Zea mays
  Peptide Sequence Number=SeqID_72045
atgacctggcccatccccccgggcttgtgtctgccccccactctaggcctgcgtggcaggaccgtggacgaagtcgggagaggcattcgccccatcgccatggacaccgcatccggtcctccccccgcgggctccaccagcaccacgaaccctctctggtcgtgctattgggctgcaactccgggtccccgacgggcgctggggaagaccgctggccctcctcacggccgccgctgcatcacgtcggaggcgaccgagcaacgctttctgcctggccgggtctaccgtaggcgcgcccgctctgccccaccagaaccggggcaacattcgcctgccaccatcacgagggatgcagcactggaggtagctgtgggttcggagacaacacttgtcaccgtcatggagaacgctcaacaagctatatctgctttcccagagctaggggagccggcccctaccactgtggcgtccttcatcagcaaccacacctgccctattgcaccaccgctgctccaggagctccatcaagcgccaccaaacctgaagacaaagaagaagcaagaagccaggccaacccgcaagagcatgcggctagcggcgatcgcatggccgcgtgggaacatccaggaacgtgcatgccaggtcctgctaaagcgcctgggcttgctgcctaaggaaggtcagccgtctgattag

SEQ ID NO: 28671 - DNA, 2544 bp, Zea mays
  Peptide Sequence Number=SeqID_72046
atgacgcgacggctcgaccccgagcgctgggcggtcgcggaggaccgcacggcggagttgatcgcgtgcatccaacccaacgtgtactccgaggggcggaggctggccgtgtaccactacgtgcagcggctcatcatgaactgcctctcctgccaggtagggtaccttgcttttgcgtatggggcgaaaaggctcggaaagttacttgaatgtccaaaagaagctttaattcctgaattaaaccagttcttcacaaatacatggataagacatgggagtggaagtcgtcctgatgtgcctatcccaagtctggttgatgtgcggcctatgaaggttgtttcttctgtagtgtcaagcagccagagaagtttagcggcattcaagaaaaaagttgaaaatcctaaacttcatgttaatcaggataatcttcgtccgaatcaagataatctcactggagttggtgacatacattaccgtaatctaccaagaacagttaatccttcagtttctcatgttcagcaccaaaaaagttatacaccacaaggcaatgctaaggtctctgaacagcttgaaagaaataactcagacggattgatgcaaagtgcaagggataagagagtgccaaatggtctctttgtcaatgacagaaatgggcagaacaggtccagatttgcaaggacccgatcaagtcctgaactcacagactcgtctactgaaggatttcgtggtaggcggactaatgcagttggtatggaaaaatcttttggtgttgattacagcagaagaaacatcttgattccagaagtgtctagcaaccacagcactaagtcttcacaagatgaatcagtgtcttccatgaatggttcatctcaccctagtgcattggcagcttctgactcaaatagcgtttcaagcagctttcgtgatgataatggttttgtgatgaatgaagaactcccttctgtttctgaatcatcggatatgcaccacgatgaacaagttctggctaatttaatggaatccatgaagttgcatggattcaacggacagattcaattgccaatgcaaataccttctcatttgtctgtagcgcatccccctttactggctccaacaacttattcacaaaagcatttggctggggttccaccagctaacttaattgggacaccatggttgcccaatatgcagttcctgcatggatttgttccacctatggcccattacatacacaatccaaattttgcaccaaacatcgaggatggtactgagactgaaaaacctaatacatcagatgtgaatcatgatgctggcaaaacttggcaagagtatggtgttgggttttctagacattttgatcctgaagcaagagatcctcacttctatggtattgatggcaaggagcattcctctttgcctaatggtgtaccaggtgctcccttggaaaggcagatgaaattcacagttgagaataatgttgtaggtgatgaaacttatactggcatgttccaaattcatacaggtagagaacctgctgtagattattctaagaggagtggttatgggaatgttccgtcttcacatgccagttcatccaaaggcaaaactctggattcgagttcatgggatgaaatgactgtaaatacaacaataccaccaagagaaaattggggaaaaagacctgcctttgtggcacctgccacgactacacatggcaatactgggtggcagatgggaaatatcactgagcatctcgcagctgaagttaatgatggccccagaaatgggacagtggtaccaatcatcactgaagcttctgagatagtaacagggtctgattctttttcatcaaaatcaagaactagtcaagtacccaatgagcttgatccatcacaagttggcatgcctaatccagtgtttacaccttttcttattggatcaccacagcataggcaagctgatagctctggacttacttttgttccaacaggtccaccagttccttttgttgtgctcccgtttgttccagggaataatgatggttctggcccccagtttgagagaagcgaaggaattgatcagcttcctgccaatactgtaggtcaattttttggttcacttaatgatgttcaccaacaagattccagtgctatctcaacagtatcgtccagtactatgactgagccatctggtgaacacaagcctgatatcttgcatagtgattttgtcagccattggcacaatttacagtatgggcgactctgtcagaatcctcgtcccatgggtcctgttctataccctgttccagtgccaccgatgtatttacagggccatgttccatgggatgggcctggaagaccagctgcaccaaatgttaactggacacaaatggtgggcggtcaacgagtatttcctgtgatgcctgtacaaccggctacagaaagaactggtgtttttcagcactacggtgaagatgcacccagataccgtggaggcacaggaacctacttgccaaatcctcattgcaatttaatacgtggttag

SEQ ID NO: 28672 - DNA, 1515 bp, Zea mays
  Peptide Sequence Number=SeqID_72047
atggcagtcggcggtctccagggagcgaagaagcgcaagcgcgagcacgcggaagggaaggcaaagcctcggaagcaagtcaagggaggcggggacggagcgaagcggaagagccactcggccgccggcggctacacggcccatggcggcgccggcgaagttgtggcgaggaagaagaccccggttacccccaaggagaagcgcctcgcggccaagacactctatgagttcgatgatctcgagagcatcattgataggacactaaagcgcgattttgacaccgaggaagcactctggttgcttaagataggtcttgtgtgcatcccggatagccctaagatcaagccctccatgtcaatggttgctaagatactgcaaggtccatttggaggtccaggatgtcaaaatcaagaacatgagaagcactttgagcattttacacctaatatgagcaaaacacgaaatgaatctgcatttcctcaggatgaaattgactcacatagagagcatatttataatgaactgacctcagattcaattgcttcaaagaagccaaaaataaggaagagagaaaataacaattctgtttcaagttctgctcccaacattcctaatactcaagattttatcactaccttctgtgaggtggtggaggatttctgtggaaaaaccgaaattcctgaagatggaaattgcggtgactggttgtcaatcccacttggtgatgttaaggttctcgtgaatgaaattacatctgttcgatccaaaaggatattgcatgaggttcctatggatacagttacaaggttattggatgtgattgatcgtcagattcgatattctcaagtcagcatgaacaaggtcgaggcattgtacaggttgttcaagaagattggcaacaccttcattgatgatgggctgattaacaaggctctttcaaatggcaagcccactgttgttgagttttatgcaaactgggaactagactctgagaaccctgttgctgatgtggagagcattgtagccaagggcataagagatggtgcaataaatgccaccatagatcaagcaaatggctggatggtgtactgtgtgctggcgttgaccagaagacacgtggtatgggagttgggcgcaagctcaagagccaccgcaggaaccagaggtgggctgacaaagcatacaaaaagccacttgggcaatgagtggaaaaaaccttttgctggatcatctcacgctaagggcatcattctggagaaaatgtatgccaaatatgggaatgatctgtgcttttgttatgttgtacttcttgttcttgggctaaggttcaaggttgttaaggtttctggtgtgtcgctgcttgcactcttcaaggagaagaagccaaggtcagtttggaagaaacattctcctttattcacaaactatgttgattttctgaccaagtgtccttccatacagatccatagaaaatatagtacaggtggcagcacggagaagacgtttgaaagataa

SEQ ID NO: 28673 - DNA, 1722 bp, Zea mays
  Peptide Sequence Number=SeqID_72048
atggagagggaccgtcaagacgctgcgcagaaacgccaggcggtcgtcaggatcgcggatcctatgcgcgaggcgaagaaggcgcgggggagcacgaaggctgctgcctctggcagtagcaaaccggtgccggctgcgaaatcggctgcccccaggcatagccacccccgggctagtgcgaaggctgccgcctctggcgggagcaagccacccccgggcgggctcgtgaaaggacgaaggccgccttcgctggcgcgacatattgccgacttcggcacggacatcagtgtcgatgattattttgttgggtcgggtgaggggcaactggctgttgtcccgcctccggtggcaaccacttcgccaacggcggtggtgggggcgaagggtgccgcgcgggacccgattcgggtcgcgtcgggtgccttgactgtggacgttgctgccgaggtcgagcgtctccgggcacagcatgcggatgctgtgcgggagaagtcggctgcggaaagcaaaaaccacaggctgtcggagaaggtggccgccatggaggccgagaagacggatctccgccgccagctggcggaggagaggagggaggtgaacaaggccatcgctgatgcgcaggctgcgcaggccgaagccaaagtggtgcgggcggagggcagtctcgcctgtcaacgtgccgaggagctggaggcgaggttcaacgccctgcgtagcttcatggacaaggccgaggccttgacgcgcgcggaggtcgagcggacgcacgcgcagtgcatggacgcgtaccgcaagttgggtgcgcggactgctgacttcgaagtgcccggccaagaagcgggccttcgcttccttgaatggttacaggaggagctgctggtgctcccgaccattgtgacgggtttcatgcattatgaggtcttcgaccaagcggacgaaaactttgaacgtgaaatcttcaaggtcgaagaccctgtgctgaagcagtcggtgggggcactcttcgataggatgtggggtccgcacggccgagaggcaatgagggagcggtccgaccgggcaatagagcagatggcgcatgccgaagacatcgaggaccttggtggtctggacggcgcgctgcccgaggctgcggaggtcgatccggtgccgccctcgaatgccggtgaaggcccctcgacgacccccgcgcccactgcggccggcgaagaccccgcatcagcccctgcgccgacgggcgaagacgccttgaaggttctggggtttgggcctgcgcacgcaaccgctactgacaatgctatttttgtggcggcttcgaccatggctgctgatgacgattcgtttggctctgtgtctaattgttttgagtctgatgattctgggagttcgattacgtggacagaggagtcttcatatgaggacttggattattttgtagtgttggatgtggctgcagcggagccttcgccgcgcgcggagggttccgaggagctcccgggcgcgagtactgggtataggcagcgaagggcggtggcgaaacagagagtgagtggattgtcgcgaagcggtaggcgtcatcgtagtgagatggagagtgggcgtcttcgcgtggacgggactggtgagggggagctgcgaaatatttttgagggtgaggaattgaggataatgctgttcaactacagggagatgggtatcatcccgaaggttgagccaatataa

SEQ ID NO: 28674 - DNA, 2883 bp, Zea mays
  Peptide Sequence Number=SeqID_72049
atggaccggggtcgaagcgagagcggcctgcggtcgcacgggtccggcaaggtctcctctcggccggggtcggggtcgcttgcgttcccagaggagcaaccgatactagccgatcgcgacggcggcgaccgccgagaggttgtcgtgaagatcgatgggagcgggaacgggcacgcgccgttctccttccatggagcggacgcaggtgctgacggtggcggggggaaggcggagaatgcgacctccagcacgaactccacagcgaccacgccgcaggccgagagcaggtcgatgtcgagcgagaccaactatcctatgccaccggccaatgtgtgccggcgggaggggagctacgagttctggaacaatgacggcggcagcgccgaggcgttcagcttccagaaccgtccgccgcaggggccgcactcgtcgtccccttcaatatcgccgccgctgccgccagaagggggcggcatggacccacccgcccggctcaacggcagcttccaccggaagcaggtggcgtccgacggcgagatgtcgctcgacctcgacctggagatggacgagctcgggaggacggccgcgcagctgcgctcgcacccatccttttccagctcgctcgaaagggacgaccgcgtctcgttgcaggagccacaaaagcggcactccgcgtcgtcctgctcattcgattccgacaccggcgacggccgaaagcgccgcggcgacgacggcgaggtcgttcggtgcacgtcctcctctagtgctgcgggagcggggccgttgctgcgagtcaacacgcgctcccggctcatggacccgccgccgcagtcgcagcgggcgccggcacctgccgcgtcttctgtcgtcgacgaggagcgaaaatcttcaggcttgcggactcctacaaagtcgggccgcctcttctccaggcttatgtccggcaacaagtccggtcccattgctggcaagtcaggtcccatggacgacgaggaggacgatccattcgtggacgaagacattcccgatgacttcaagcgtgggaagctggacgctttgacggtcttgcagtggctcggcttgttccttatcatcgcggccttggcatgcagtctcagcataaagatcttgtccacgaagaaggtgctgggtttgcacctctggaagtgggagctcctcgtgttcgtgctcatctgcggccgtctcgtctccggatgggtcatcaggattgccgtcttcggtgtcgaacgcaacttcttgctgaggaagcgcgtgctctactttgtgtatggagtgcgcagcgccgtgcagaacgcgctctggctcggcctggtgctcgcctcttggcacttcttgtttgacgagaatgtccagcaggagacgaactctccagtactgccctatgtgacgaaggtactattctgctttcttgttgccacgctcatccgccttgtcaagacattgctgctgaaggtactggcctcctccttccatgtctcgacgtactttgatcggattcaagaggcattgttcaatcaatacgtcatccagacactctctgggccgccactagtagaagaaaaccatgtgcttgaggaggttcatgagctccaacgtgcaggtgcaactataccaaaggagctgcgtgatgcagtaccaaccaaacatgtatctgagcagaggaacattcagttatcaggggtcatgcctgagggacaaggtagcaagcagctgtcgaaagagaaaagggacgggatctctattgatgcacttaacaagctcaaccagcgaaatgtctcagcttggaacatgaagaggctgatgaggattgttcaatttgggacattaacgactatggatgagcagatacaacaggcaagaggtaagggagatgaatcagcaacacagatacgaagtgaatatgaggcaaagatagctgccaagaagatctttagcaatgtagcaaagccaggttccaagtacatatacttgtcggacttgatgagattcatgaggcaggaagaggctgttaaagcaatggatctttttgaaggggcacaggagcacagcagggtcagcaagaggtctctcaagaactgggtggtgaatgcatttagagagcgcaaagctcttgcccttacactcaatgatacgaaaactgcagtaaacaagctgaaccagatggctaacgttattgtggggatcattgtgtttgctctctggcttcttatcctgggaatagcaacagcaaatttctttgtctttctcacttcacagattctcctggcagttttcgtgtttgggaatacgttgaagacgctctttgaggcaattgtcttcttgttcgtgatgcatccctttgatgtcggtgaccgctgtgaaattgaaggtgttcagttggttgttgaggaaatgaatctcatgacaacggtgtttctccgatctgataacctgaagatatattatccgaacagtgtactcgcaacaaaaccaattatgaatttctacagaagtcctgatatgggcgaagcaattgacttctccattcatgttgcaactcctgccgagaaactggccctgatgaaggaacggatactgcgctacattgacaacaagaaggaacattggtacccgggcgcgatggttgtactccgggacgtcgatgataccaacaaactgaaagtgtcaatatggctgcgacacacactcaacttccaggacatgggcacgcgtttcgtgaggcgagagctagtgctccaggagatgatcaaagtcctgaaggacctcgaggttgagtatcggatgcttccacttgatgtgaacgttcgcagtgcgcctccaatccagtccacaaggatgcctacaacatggagttattcgtga

SEQ ID NO: 28675 - DNA, 318 bp, Zea mays
  Peptide Sequence Number=SeqID_72050
atgaacgtatgtgagctcactcttgctgtctcacatacaccacaggtcaagaccagaactcctgtgatatataatgttgtgacattcgatcctgtgccactatacatcatatgtgtgagacttggtcccagcatacctggtgtttatgttaaccccgggttttggacccctaaaatccgggtgttacatgcatataccaaagtaggaccacaacatatgttccatacaaggttcaacaattcggtccatccatatgttacatcacacagacatgtttcacgtctaccggccatcaaagctggttgtcgatatgtctga

SEQ ID NO: 28676 - DNA, 708 bp, Zea mays
  Peptide Sequence Number=SeqID_72051
atgccagctcttcccactttccccctcacacgcctcccattcaatgccagacgttgcggttgcctcgtcctttccctcgtcgtcttcgttgttgtctccaccgctgcagccctcacctacatatctttcccctctgccgggcggacatcatccccggtggtccggatggaggccgactactgcatgggtatggagggcctcgagcttagggcccgacggtcaagtggggctcagaccaccgcctgccctccgtcgccgcctgcaaggccatgtgccctcaccccaaggacggggccggccgctgtgacaacagaggatgtcggggctcgtcgtcttcgttgctgtctccgcctccgtagccctcgcctacctatctttcccctctgtcgggcggacatcatccccggcggtccggacggagaccgactgctgcaggggtatggagggcctcgatctctagggcccgacggtcaagtggggctcagaccaccgtctgccctccgccgccgcctactgcctcgtctgcaaggccatgtgccctcaccccaaggacggggcctgccgctgcgacagcggaggatgttgggggtgagaggcagaaccgtgcaccacatcggtgtggacgcctacgctatgctcttaagaagtagtagagataattatcttttactacaaataaaattccctatcatttactacaaaacataa

SEQ ID NO: 28677 - DNA, 359 bp, Zea mays
  Peptide Sequence Number=SeqID_72052
cggagcagccgctgcccgttcccgaggctggcgagttccggaggccgcgctgccttggagcaccggacactgtctggtgtacaccggacagtccggtgaattatagcgcgccggctctggattttcccgaaggtggcgagttcgagttcgagtcctctggtgcaccggacactgtccggtggtgcaccggacagtgtccggtgtacaccggacagtccgaccatggtcgggagaggaggcggtatccgaagcgcgaggaggacgtctgggaccatgcagtttctgtcagaggctatggggatttacgcatgaagggtcaaatcaatggtgctcaggggattctggtgaagatcaactaa

SEQ ID NO: 28678 - DNA, 195 bp, Zea mays
  Peptide Sequence Number=SeqID_72053
atggcatgccacgtacgcgacctggccacccaatctgtggcctgtggcctgtggctgtgggcaaagcagaagatcgacatgcagaagatagccaaagtcgccaacaagtcacacaaggaccgcatgcaggacttcaaccagtacctggctaagctgagcgaccactacgacatccccaaagttggccctggctaa

SEQ ID NO: 28679 - DNA, 522 bp, Zea mays
  Peptide Sequence Number=SeqID_72054
atgcaggcggcatgcaaccgcgccaagtgggcgcacttctccgacttccagcacgcccagcatggaggcccaggcccacgcgtcatgcaaccggcgcgccggatgcttcgtgcaagcaactgcaccgccacttgcgccactaccgcgcctcctcgactgcggaaccgataccgcgactcgaggagaagcgagcgacgcttcgccttcgccataatgaccgcgtcaaaaaagggaccgggaaagggggataccccgaaaaggatccttccccgtgaaggaaccaggctccgagcctccctactaatcagaggttcgaaggctggcccctcggaagggttcaacagccgcctcagagcacgtgggctccacacccactactggtcagaggttcgaaggccggcccctcggaagggttcaacggccgcctcaggctacacgggctccgcgcccactactgatcaggggttcgaaggctggcccccgaagggttcacagccgcctcagacacagagcgagggatga

SEQ ID NO: 28680 - DNA, 690 bp, Zea mays
  Peptide Sequence Number=SeqID_72055
atggcggacccgaggcatgaggcgaagagagcgcgggggagcgcgaaggctgcgaagccggccgcgcctgggtccagcaagccgtcggtgggcgcgaagacagctaccgctggcatgaccatgtctcccccggtcgaagctgcgaagggacgagagctgccctcttcggggaagcgtgttaccgacttcggcacgaacatcagtgtggaggactattttgtcgggtccggcgagggacaaatggttgttgtcccgccttcggtggcaaccgctttgccatcggcggaggtaaaggtgagggggactgcgcaggacccgtgggccgccttctgcgcgagcggcgagattctaacaaccgctgctgctaaggacgtggcgggcaccatgtcccagcggctgtcgcagcagctaagtcaagcggctgacttcgccgaccgcgttgcgtctagcgtcctgactgcggacgtggctgccgaagtcgagagactttgggcacagcacgtggatgccgtctgggagaagtcggccgcggagagcaaaagccgccggctggcggagaaggtggctgccttggaggccgagaagacagaccttcggcgccagctggcagaagagaggagggaggcaaaccaggccgtcgctgaggcacaggctgcgcaggctgaggccaaggtggcgcgggcggagtga

SEQ ID NO: 28681 - DNA, 903 bp, Zea mays
  Peptide Sequence Number=SeqID_72056
atggctgcctcgggctggagcagtagtcccagacgagctcatgcctcgcccgagggcctcctcaggcagcgggcgccccctcagctctcccgaagctcggctcgggcaggcttcattgtgaagcaaccttggccagactgcctcaccaaccgaccacttcataggcgcattcaatgcaggggacgcctgacgccgtattctgacacacgcgcctcagttgggcaggccgaagcaaagactgacaacaagtcacgatcaaccaccgagtttggcctcgggcgcaacaggaagctccgcctcgcccgacctcaggctccggcctcgggaggagatttccgcctcgcccgacctcaggctctagcctcgggaggaggtctccgcctcgcccgacccccggactcggtctcgacctcgatctctggaggaatcgcgtcctcgcccgactccagcctcggcctcaagagaagtctccgcctcgcccgaccttgggctcggaccgaccgcgccaacaggggatacatcattaccctattcctagcctgctcaggctacaaggaacaagaccggcgtcccatctggcttaccccggcgacgggactcaggcgctcctccgacggccacgccatcacgtgtacagggcccaatctctcccccgacagccacgttggcatgtacgcagggcttaggcactcctctgccggacacggaccccccgggtccaaaacgccaacagttggcgcgccaggtaggggcctgctgcgtgttaacgaacaccttcccgttgagttccagatggggagtcttcagcaacatcttcagcccgggacggtgctccgcttcgggagtctcgagttcatgtccctcgactgtaacacccctggtgttactgtaactaaaacttga

SEQ ID NO: 28682 - DNA, 471 bp, Zea mays
  Peptide Sequence Number=SeqID_72057
atggtcaggagcatttgggtagccatccttgcaattgatgtgggggaaatgctcagggtaagactaatttggtgtccgctgctcggaaaccctagccgttgcccctttcggccggtgcaggcgctcgccggagctcggctgggcatggacgccgtcgaggatgtgtcggaacacgaagaagaagaggaagtcaccgaagaaaggacaccaccaccctcggattctcaagcaggcaactgcttctactttgatatttgcggatccgagccagactcacctgttaacaaaggcaagccccggcgtgctgatcgaggaccctttaactggtcacatgcctcgtcatggcatacccttgagagtcttttccttagtcgggtgaggaagcagcagacttctgttgcttctgtaccaaggtggttcctaatgaagataagcaagagtgaagtgcgggaggaaaggatcctccattaa

SEQ ID NO: 28683 - DNA, 165 bp, Zea mays
  Peptide Sequence Number=SeqID_72058
atgcaggcggcatgcatccgtgccaagtgggcgcgccccttcgactccaacaagcccagcatggaggtccaggcccacgcgtcatgcaaccgggaccgggaaagggggataccccgaaaaggacccttctctatgaaggaaacaggctccgagcctccctactga

SEQ ID NO: 28684 - DNA, 255 bp, Zea mays
  Peptide Sequence Number=SeqID_72059
atgccgatctgctttgctggttgtccctccccaggcccacgaaagaatgaccttacgatttattgggcccttgggcctttcgtgaggtcttttactcttttagtggacctgggggatatctatcccccacagctggtggctagggcagctccgaccacctctgacgccgacccgctcacagaagtgaccaccgtgaccgccccgatgtcactgaccaccccgccggagctctactgccgccgagatttgaattaa

SEQ ID NO: 28685 - DNA, 306 bp, Zea mays
  Peptide Sequence Number=SeqID_72060
atggggagatgtatgtccgctcgcatgggcatctcgtcaggagctttactctgggcttggttgatggtcgaggagagtctccagagcacaccgaacacgttcgcgacctcacatggcggtattgagggcttgtggagcatggggattgctcgccgacgtcgtgtagtccggggcattccgccgtgcgccgtggtcagggcaccagtgcgcataatccaagatcattatgttaattggaacatggagcgaccacccgggaaaacagtgctaccacaagggtttaatgggacgcccttggctgattaa

SEQ ID NO: 28686 - DNA, 699 bp, Zea mays
  Peptide Sequence Number=SeqID_72061
atgaacgaaaatggagatttgcaggatagaattggggttcagatgggtcaagttaagatgatagaaatcaaggaggccgcggaaaaagggagaaatgggaaggccaaggccgcggagaaggaaaggagcataaacaacggactcatgggtatcctcatttgggacagtaaccccatggcaaatccgccaagaacagagttcccacagaggaaaaaccccgatggacacgaggtggagaagtttgggctcaaagatgacgaacatgtggttacctgcgaaaggcaactggctgttggggtcgattggaggaatcaccacggcagacgaactcgagaccagtgccatctagccactggccctgttgctgccgccgccgctgccgcccctggtgctgcctctgctgctgccgccaccgccgctgccgccgccgtcaccgtccttgctgccgccgcccctgccgctgccgtcaccgtcaccgccgccaccgccttcgtcgtcgtcgtcgtcgtcgtcgtcgtcctcgtcctcgccgccgccgtccaactcctcctcatccgagagtactccgactcatctgagccctcgagcccggagcgctcgatggcccggatgtacgtccagacctccgccgcgagcccctgggagtcgtctgattcgtcggacaactctgcacggggatgggagttggcactcctctga

SEQ ID NO: 28687 - DNA, 213 bp, Zea mays
  Peptide Sequence Number=SeqID_72062
atggacaagcttgctacacagattcattgcgacgtgctaagcttccaagacgcgtggcacatgatcgttaagcggctaatgctggtgaggatcaccccggccagccacagtccaagtgggtatggcgggctcaacggcatagggatgtatggggtgtcctttttgcaaataagtccaaacttcatcatttggcttgcaagtcctcaaatgtga

SEQ ID NO: 28688 - DNA, 624 bp, Zea mays
  Peptide Sequence Number=SeqID_72063
atggcgagagtagcgtgtatcctccgtggcaagaggctggacggtggtgtatctgtgctatcggttggcgtaaacccgctagtatcggagcgaagcccatctcttcagatattacgaagcatttcaaaaagaattttcaaatacttatccaagaaatattctttcattcttaccttgccactttctggaagttctcattttataagaccagatatgccgcgtacgaggaaaaccacgcgcaagtccactggacctattggcattcctcatcatcagttggcttccagacatgaagggagcaggagcggcaacaacaatccaatcagagacttggaggccaaagtggaacagcttcatacggagctacgtcatcgaaacagtgtgtgggcacaagacggtcagcgtataaatgagttggcagctgacgtcagacgcttgcaagatgagctttctaaacgggatctagcggttgattgggctgtcaactcacgttcgattgcttgggaccacgaagccaaagctcatggtcatgtgactgaacttagtgcggccctcataacttgcaagtataatgcaatacttgacatgaggaagtgcatgtattgtatgcccgactacacttag

SEQ ID NO: 28689 - DNA, 273 bp, Zea mays
  Peptide Sequence Number=SeqID_72064
atggcgcttccggttgacgtggctggcctgcgccctaggttgggcgtcgtggaggctcctccgaagccgaggtcgagtctgtcttccatggccgaggccgagtccgagcccctaggaccttactgcctgtcagtctcactctgtcaagtggcactgcagtcggagtggcacaggcggcgctgtccttctgtcaggccgctttatgctgatgggggttaccagctgagaattaggcgtcttgagggtacccctaattatggtccccgacagtag

SEQ ID NO: 28690 - DNA, 966 bp, Zea mays
  Peptide Sequence Number=SeqID_72065
atggcaggggagaggacggggcgagctcgaatgttgctcttccaccacgcggggaagacgtcgttgatcccgccgccagcgggcgggctgtcggccgccattgtcgttgtcgcgcggcggtggaaggagtatcatgtcgtaactgccgtcgaaggacatgaactcaagactcccgaaacggagcaccgtcccgggccggagaggttgctggagactgcccatctggagcttgacgggaagctgttcgtcaacacgcagcaggcccctacctggcgcgccaactgtcggcgtttcgagaccggggggtccctaagccgacgagtgaatgtcgctgcgtgccccagccctgatgggtcgagcgcgtgggcgagcacgaaggggggaagcgaaggttgggcgtcgtggaggctcctccgaagccgaggtcgactctgtcttccgtggccgaggccgagtccgagcccctgggtcgggcgaggcggaggtcgttcggaagaggccagggcggagtccgagccctggggtcgggcgaagcggagttcgtcgtcttctggggctgagcccgagtccgagccctgggtcgggcggagtggagtccaccgtcttccgggacttagcccgagtccgagccctggggtcgggtggagcggagttcgccgtcttccgggacttagcccgagtccgagccctgggtcgggcggagcggagttcgccgtcttccgggacttagcccgagtccgagccctggggtcgggcggagcggagcttcctatggtgcctttggcaggacctgactgcctgtcagtctcactctgtcaagtggcactgcagtcggagtggcgcaggcggcgctgtccttctgtcaggccgctttatgctgatgggggttaccagctgagaattaggcgtcttgagggtacccctaattatggtccccgactatttttcgctgtaagcctcccttag

SEQ ID NO: 28691 - DNA, 450 bp, Zea mays
  Peptide Sequence Number=SeqID_72066
atgaggaaaagctccacgagctgtgcgcgagcgagcagagagagacgcgcggggaaggaggccgagctgggccaacgccagggctgggcgcgatgcagaggaaagcacagggagatgctcggctggagagcacgcatcagaggagcaccgctgggcgcgtccatgggagcagaatccgagcagggagggagcgtgacgctgagggagagagagaaaactgagcacggaggcgagctcggaggggatccgcgcgtgccggagatagggagccagcgcgccagccgtggagctcgacggggcgcgacacaggaaggtcagctgccagcagctgaaaccgccatggcgagcgcaggggagctcgcgactggccacaggaatccgagccaccgctgcagggaaggagaggatggctggggaagaaaagaacagggagctccggggagaagataa

SEQ ID NO: 28692 - DNA, 138 bp, Zea mays
  Peptide Sequence Number=SeqID_72067
atgacgtcaaccggaacccgtagtcgtgcttctgactatctcgtcgaattagtcaggattatctatattatactcgttatactcatgctcatacatgtgcatcgtgcatctcatgaggtgataggagttgattgctaa

SEQ ID NO: 28693 - DNA, 177 bp, Zea mays
  Peptide Sequence Number=SeqID_72068
atggcggagctaaccgaagcgctggcgcaacttggaggtgactggagtgggttggccatggtggccgaggctctggcggcaatggcgggcggaaaagagctcgccggagctaaggaggggtgtctggccggcgaagggatcaaggtgaacacgcttgatctttggctcaaggtctaa

SEQ ID NO: 28694 - DNA, 510 bp, Zea mays
  Peptide Sequence Number=SeqID_72069
atgaagctttccaagccctcggacctggcagaacttcaccggaaggcgaagatcaccctcgccggacttcggtcgcccgcccccgcgcgtagaccgagcactctggacctcccctacatcctcgaccacctcaccggagcaatctcgccgccggaagtgcttaactccgccggttaccctatgccccctttgtacacggtgcggttgtatgaggagcatcgggtacctcgttgtcgggtctggttgactttggaggctcatccccttcagccgggttggcgttctcttgattccgagacaattggactcaggacggacgacaccattgaagcggcagccatgaagactctgacgactttctacggctgccatcccctggagatggtgatgcaccccttgggactcttccctgctgagaagaaggatgacaccatgtggtgtaaccgcgtgagccatgtgaaggatatgtgggcaatgtatcctgacttggttgggagggtcaccgtttag

SEQ ID NO: 28695 - DNA, 528 bp, Zea mays
  Peptide Sequence Number=SeqID_72070
atggagactggtgctacacgcagagggtaccgagtaccaatgggaaaggggctagttgctgcgctgccccgcgaaggccgtcgccatcttcccatccgagcacaacggcgcaccggggcaggggatgccgtggccatggatttatacccaggatcgagcaggagcccaggcataagaatcgcgaggattcacagcactccagccagcgtagatcatgggttccgtttggtggtcggcgagtatatcgcgggtgcttccattggactcggccgcggagtccgcgaaggaggagatcccggcagcgttgactggagaattcaacacaggcgcgcgcagtgtgtgttggaaacaggatccgagctgctcgcgcggggtgaaaggaagatcggccatggcgtacttggcgcaacagaagcgcaacagaccattgaacgccccatgtctggccgaaacccgaaagagagacagggggaaaagggacaggcgagatccacgggcggaagatcggcgttaggagttccgagctag

SEQ ID NO: 28696 - DNA, 759 bp, Zea mays
  Peptide Sequence Number=SeqID_72071
atgacttctcacggatcctcggacgaagggtatgcacagtcccacacggacgggcttgcacgagagggtttcccccgtatcttatgggaggtacttcagggagctagttacacgacgcctccccagtacgcggtgcagctgtttgagaagcaccgagtaccccgctgtagggtgaggatgaccctagagcctcatcctctgcagccaggctggcgttcgctggactctaagtcttttggatactgggctgaggatactatggaggcaattgctcttcacggactgaccaccttctgcggattccaccccttggagctgtccactcacccaattggtttgttccccgtggagaaggaggacaacccgatgtggaaggaccgagtggagcatgccaaggatatctgggctatctacccaggggaggaacttgtggtagacttgtccactgatatggtggaaaaagacttacaagtggaacaattgtcaaatgagatccaagagcttgaggagctagtgggcaccagggagaacaccatcgaggttctcgaggatcagctaatcaacactcagcagcagctcgtggaggctaaccagcatctggatatgcaccacctggagatccaggacatggaggccaacgaggatgtcgacattgagggaggagaggagctgcctccagcttggacactgctggctctaggagaccaccttcccccgagtcgagtgttgcctcatttgctcactaggtcgcagggatag

SEQ ID NO: 28697 - DNA, 420 bp, Zea mays
  Peptide Sequence Number=SeqID_72072
atgacgctgccagcaggcttcctggacgccgccggccgcgcggagggaggaccggcagaggcagccgccctccgccgtggaggccccgcggggcggcgaccgatcctgcccgtggacgcccggctgcagaacgactcggtggacgcctccgacgcgcacgagacgctgagcgaagacgacactgctgctgcgccatggcgcagcagcgtggacgccgccgcggcgccccttgtcggggacggggccaacgacaacgtcggtagcagcctcctcctggccttgtcggccgccgccgcgggggcgttgtcctcgcgctggggtaggaggctccagcttgtccctgcccagcctccgggcggcgccgggcacgcggggagccgccgccgccggcatggagcgagcgaggtagcctacacctag

SEQ ID NO: 28698 - DNA, 1029 bp, Zea mays
  Peptide Sequence Number=SeqID_72073
atggcggattttgatacccatgagtattttattgggtcatttgttgtgcccatcgggtatggtgggcgtggtacttatttttgtgatttaaatgatcctgtctatcgtaatgttaatgggtatgggtacccgatgggtacccgctacccatgtgggtatgggtatggcttcatgtgcccactgggtaccttacccactgccatccctacctgctacgctgccttccatgaccaagagtggggagctccagtacacgacgacaagaaactgttcgaaatgctgactctgtctggtgcactggccgagatggcatggcctgcgatcctgagcaagagggacaccttccgctgtcctaatcctaaaacaaactcagaagcgattgcgctccacagggaagtgttcatgaactttgaccctctgctggtggcggagctgaacgagaagaaattcttggcgccgagcagccctgctagctccctgctgtcgcaacacaggctgcgcgtagtcattgaaaacgcacgtgagttgctgaaggtcatcgacgagtttggatcgttcgacagatactgctggagcttcatgagcggaaacaagccaacggtcggcagataccggcacacgcgggaggtgccgctgcggacggccaaggccgacgccatcagtcaggacctgatgcggcgggggttcctcggcgttgggccgacggtggtctacgccttcatgcaggccgtcggtatggccaacgaccacctcgttacctgctaccgcttcgaggagtgctgcgccgttgaatctttcgctgcgtctgatgagggctacgccggtgacaacggcaagaagccgccgccggcggtggcgagcgaccaggaggcaggagctttgataaatgtgtttgctcgagttggaaaaagccctataccaacactaatagtgttcatggcaatctccctggttggtgtagtcgtagcagactgcagacgtgatgaagttcaccgactgaagagcacgatcgatgctttagtggcttga

SEQ ID NO: 28699 - DNA, 768 bp, Zea mays
  Peptide Sequence Number=SeqID_72074
atggtggcgccggatgtgaaggcggagacgatgaagctgatggatcagcggggtgccctagaggcggagatggacgccatcatcgcccgcctcactgcggcaggcggaccgggcatcaccggcggcctcgtcgacgccgagggtttcccaaggtccgacatcgacataccgaacgtcctcgcccagcgccggaggcttgctgaattgcgaaatgaccacaaggatattacaaacaaaattggtaaaaatcttgaggttttacactcagcaaagttatcaaggaatgaacaatcaacctcaaggagatctgatacaacagatccttcacactttggatcatctcaaagtgaacctatggaagaggaccatgtgactggacttccttttgccatgattgatgaaatcgctgatggttctcctgcttctgtggatggtttgcaacttggagatgagattgtaaagtttgggaatgtggaagctggtgatcagttgcaggaaaggctcatgtctgaagctctttccaatgaggacagtcaagtatctttagtcatcattcgccagggatcagcggtcttccagttagtcatttcaccatttgatgctaatgtctcagcacctggaattaaagcaataatcgggggctggcaagtgccatttcagaatgctatgaagagtccgtcgttcttcagcaggatgcgttggtctatcatgcttgcactcgtggagagtggagacggctctagcgatgccatttcagccgcaaagtga

SEQ ID NO: 28700 - DNA, 333 bp, Zea mays
  Peptide Sequence Number=SeqID_72075
atgaccaccctcatcgcggccaccaagctcagggagatcgtcatggacaagtgcctcggcatcacctatgtcaggctcaccaaggtcttcgtcggatgccctgggctccagaggctcaacctcaagtggcggcacgagatcttcgacatcggcgtcgacatgctcgccaagaagtgcccccaactgcgtagcctcgacatctcctgcctcaagacgccatcgctggactcgcagcccaaggcgggggacgcaacacagcctgctgctgctgccaagaagcaaggtgtcgcgacgagccagccgttgagcgtggtacggatctatgtagtatag

SEQ ID NO: 28701 - DNA, 432 bp, Zea mays
  Peptide Sequence Number=SeqID_72076
atgacgtctagggttgcgcctggggcactgtcagcggccagagagttgctgcgccaccctcctagctccacggcctccccgggggccatgaagaagtggcgcgacgacgtcgatcgcctgcttggcatggcacactctgcctcaaccaggccaaggcctcggtcgtcctggcgccaacatgaggcgtcggcatcagtgcgctctccctcggtgagggccgcgccgattgaggacctgcgggcggagctcaaccgccgacgagcgggcgaggacgccccagtctatatggagaggtctaatgacctgcgggcggaactcaactgcaggcgtgcgggcgaggatgcccgcgtctctctagagagggcgcgtgagcgccgacaaaatgtcgagggtcacaacctcgactacgacttcgctgcggttgcaccgtag

SEQ ID NO: 28702 - DNA, 627 bp, Zea mays
  Peptide Sequence Number=SeqID_72077
atggccgccgccgcggtctatgggcagaacgccgccgctacctgggattggccgaccgtgagagaggaccttgctgtgcgtggcccggaccctgcacagggggggtccggggcccatcccaggggtccgggcacgcccgtggaggttctggaccttactcggaggtccggtctgtacgtacaggggtccgacacttctcgatgggggtccggacccactgttgataccttggagtatatcgtcttttctggccgcgtggcgacccgggagtcgaccacgtggtggggtcaggcgctgtttaccacgcgactagagggtaggtcgcgtctgtgttgctggttcaccggcctcagtgacattggtaggatccagcgcgggccgaggaccgacctgtcctgggaggagctggaggttttagtgaagggaatcactggtgaggcttttatccccgaatccttgatacctccccagggcattccgctgctctgtgatgatccagggatgcggtcggcggtgctggactggctgccgactcttgatgagagcggcgtggcgattcgccaaaccggcggccgggacccccaccgggggatccatattcccggtgtaccagccgggggttcctag

SEQ ID NO: 28703 - DNA, 891 bp, Zea mays
  Peptide Sequence Number=SeqID_72078
atggacccgccccttgattcggaccccccagaagcgtcagaggacagctggcggggccgaggaggccggctcccaggcccagggcgcgcagaggcgcgtcagtcctcgtccaccaccaccatcagacccgccgccaccgccaccgccaccaccatcgggctcgccgccaccaccccaggggcaacagcagcatcaatagcagcaacaggagcagcagcagcaggggcagcgaacgtcccgcttccagggtcgctggaaggttcagggccccaattatcatgtcaacgggtattaacccatcctttgctcgtcagggcatcttctccctctgcatacaaagtcgtgcctccctcgcctccggctgctgtcaccgagacagtgccaccgggcccccaggctccagctatggatccggctgcagcggcgccaacaccaagcggtgctgcagcggcggagggggtccccactgccctgacggctgccacagcctcagcgacggtggtgccattgagtacaccgtcggcagcggcagaggaggccctagccgcgtccgtcaccactatcgagcccgacagagggggcgcatccatctccaacccgctgcccactccggaggagacggaggtgattttcgggcggcggctccgatccggcaccgagccagaagcggcgtcgattcccctctcccgggtgctatctcgcgcccatcaggccctccaagagactggggcggcgatcctgtgggagtgggaggcgcttgagaccgaacaccagtgcctcagcgactggcttacccagctggaggagtgcaccaaggcagcgtcccaccagttcgcctttgagcggtccgagcttgagtgggaccgcaaggactaccaaaaggacctctag

SEQ ID NO: 28704 - DNA, 699 bp, Zea mays
  Peptide Sequence Number=SeqID_72079
atggagctccagtcgaagctgaatgcctacaacaagatgctggaggagcagcgggaccagcaggccgcggctgtggaggacctgcgaaaggtgcagcaggggcttgatgacagggccagcagccttgccctggccgaagagaacctcaaagagaaggatgcctccctggataagcgggcggtggatctcgcctggcgggagaaggacctcgccttcaaggaggaaatgcttgagaggcgagataagctgctggccgattatgagctcgaggcggaggagaaggagcggacgctggaggagaaggagcagacactaggggagcgggtccgccagttcgaggcggcgcaggccgatgaggcaagctcgacactggtgccgctgagggtgagccccaacccagtgtcggagcagccgacgtccatctccgacgcgctcccggtgctggattccgccgccgaccgcctccgacgcctgaaccagatccttgaggcccgcctagaggccgagggcagcatactctgccggttggtaatagagtacatcctaacgtgcttccggagccatgacccggccatctccttggtgtcgatgatcgcaggtctggtggtcgacaccgaagatgccgcccgggagggcgtactagatgttgtggatgcagtggccgagcgcttccagcgggatcccgctgatgatgagtag

SEQ ID NO: 28705 - DNA, 117 bp, Zea mays
  Peptide Sequence Number=SeqID_72080
atggccgccgccgcggtctatgggcagaacgccgccgctacctgggattggccggccgtgagagagattaaagacaaatttaatccgagccatctatggccgttccaacggccatga

SEQ ID NO: 28706 - DNA, 723 bp, Zea mays
  Peptide Sequence Number=SeqID_72081
atgagtttgcggtatggccgtatttatacgctcggtgcgttgaaagctgaaagaccccacctgtcattgaatgttgctattctagcaaagggaaggtaccctcggactaaagtcggcattgcagtggaccggaataatacgaaggttgactcagagccgaagggaagtgaccaagtcttcataaccgcgaagaccgagagcacagatacaccaccgtccagcctcttgccacggaggggaccgggaaatgggatatttcgaaaaaggatccttcccagcgaaggaaacgggccccgagccctcctactgatcaagggttcgaaggttgcgccctccggggttcggcaaccaccccagagcacccgggctccgagccctttactgataaggggttcgaaggctggcccctcggaagggttcgacagccgccccagagcacgcagagtcagggatgaccctgggtacgtccgttacatggccgaggctcgggctacgctcccgagggagctccgcctcgcccgacctcaggcctcggcctcagcctcagcctcggcctcgggagaaggcctctgcctcgcccgacctgggcctcagaccgactacgctgcaggggggctcaaggcgcttctctgccagccacgttggcacatagctacaccccattgtacagctgggcatctccttgtatctataaaaggggatgaccaggtgaaagtcgcctag

SEQ ID NO: 28707 - DNA, 588 bp, Zea mays
  Peptide Sequence Number=SeqID_72082
atggctgtcggagaggtgctagagtcctgtgtacgcggtgtcgtggccgtcggaggagcgtttgagccctgtagaagcacagctgtcggggctgctgggaccttgctgacgtctccttgcttccgtagggggctgagaaccaccgtcgtcatggacgcacgcggggagccatcattacttgttaccgaggcgagcctggatgggacgccggtcttgttccctcctcaaggtcgtgcaaggcggagactcctcctgaggccgaggccggggtcgggcgaggacgcgattcctcctgaggtcgaggttgaggccaggccctggggtcgggcgaggcggagaccactttccgaggccgaggttgaggccgagccctggggtcgggcgagggcggagaacaccttccgaggccgaggcccaaggtcgagcgaggcggagcttcctgttgcgcctgagcctggactcagctgctgtcagcctcaccctggcgagtggcacagcagtcggagaggggcgagcggcgctcctctcctgtcaggtcagtcagtgggagggcgaagtgactgcggtcactttgaccttgccgactga

SEQ ID NO: 28708 - DNA, 585 bp, Zea mays
  Peptide Sequence Number=SeqID_72083
atggggagtgcccacgttgccttcgtcttgttgttggaggagcgcaacctcatagaggttggcacccttcagccatcgctcggcttcaaggattttcatcaggcagcccggctgcattccctcaccaatgcatctgggggtggaaaccattctccagctctgcggaggaggcgtcctccagccatgcggggaaaggcaaactgctgctgcctggccagggtgcagcattccgtcctccgtccgagcgactgtggccggctgcactggggggtcgtacaacacgtcgtacgccacgagggcggtactcgtgttctgagacggtcccgttctcgttcttgcggcgaggacgggagtgaggacctgccggtgcgctttggggcggccggtgctcgctggtgcggtgttggtgggcaggtggctgccgtcgtcggtgctgaggtggtggcagccagagaaggtttctccgccgacgagatcgtcggcgccacctgcggtcggacctccggctcttcggccttagcggcttgtcctcgccccttgtgtcacacccggattttagggtccaaaacccgggcgcgaacataa

SEQ ID NO: 28709 - DNA, 132 bp, Zea mays
  Peptide Sequence Number=SeqID_72084
atggctgggagcctgggacatgtacaaacggctcacaagcaagtagaagaccggagaagggccttttcgcatcacttctatcgtcgagttccagttaattggtttgggataaaaatcgaaggactggactga

SEQ ID NO: 28710 - DNA, 222 bp, Zea mays
  Peptide Sequence Number=SeqID_72085
atgatggtgaatttgaggttgccttgggctgtgggcaatagtccgatgatatctagtccccaccgctgcagtggccagctgaccgttgacaatggcgaagtctctgcttctgtgtttaagccttttggcttcattgcgatcgggtgtatggtaatgaccttaaagggtgaagcctttgaattgtttctcaaggctgcgaatggcggcaagatactgcattag

SEQ ID NO: 28711 - DNA, 219 bp, Zea mays
  Peptide Sequence Number=SeqID_72086
atggagggttttgatgtggaggattttgatgatgcggtggaagaggaaggaattggacctcttgacgatgatggtacaagtggttgggttggtgagggatctgctcgttgtggtatgattgctgctggtagtgctgagggtgataaccatcctatctttggtggccttggtttccaggtaatccctcatggggtgtgcacaaccttcgccgtgaaatag

SEQ ID NO: 28712 - DNA, 180 bp, Zea mays
  Peptide Sequence Number=SeqID_72087
atgcaggtggcgtgcaaccgcaccgcgggggcgcaccccttcggcttcgtcgcatccagcatggaggcccaagcccacacgtcatgtaaccggcgcgccggttactacggaccgggaaaggggatatttcgaaagggatccttctccgcgaaggaagcgggccccgagccctcctactga

SEQ ID NO: 28713 - DNA, 531 bp, Zea mays
  Peptide Sequence Number=SeqID_72088
atggggagaagcaagccgggatacgatcttggtcccgccctcagcttcaaggaagttcatcatccttgctggggcggaggctgggctgagccggagctctacctcccgcgcgggttcgtgggtcagcctctccttcagcattcaagggagagggcgctcactggccctacgagcggggcggacttcgataacgcggggctggtcgacggcgggcatcgtcagcttcagcacgttgggcttgccggcttggcccccggtgccccctcccgccgcgagggcggttgtcgcgccgcgcgcatgggaggaccgcccaagacgtcgtgcgctgctagggcggcgttcgtgttctggggcggtcctgcctttgcaccggtacggtgcctccgcgcggaggatcaccgccaccatccgcgcttcgggcctccggctctttgtacttgtcctcgcccctcgagcgtcagcgtgggcgagggcaaggttgcagcggcgttcgccctgaggccgtcgctgctgcagttcgggcccccgtag

SEQ ID NO: 28714 - DNA, 252 bp, Zea mays
  Peptide Sequence Number=SeqID_72089
atgcaggcggcatgcaaccgcgctaagtgggtgcgtccctccgacttccaacgcacccagcatgggggcccacgcccacgcgtcatgcaaccggcgcgccggtcgctacgtgcaagcaactgcaccgccactcgcaccactaccacgccccctcgactgcggaaccagtaccgcgactcgaggcaactctgcggattgggaaagggggataccccgaaaaggatccttctccgtgaaggaaacagcctctga

SEQ ID NO: 28715 - DNA, 180 bp, Zea mays
  Peptide Sequence Number=SeqID_72090
atgcaggtgtcgtgcaaccgcaccgcgggggcgcaccccttcggcttcgtcgcatccagcatggaggcccaggcccacacgtcatgtaactggcgcgccggttactacggactgggaaaggggatatttcgaaatggatccttctccgtgaaggaagcgggccccgagccctcctactga

SEQ ID NO: 28716 - DNA, 276 bp, Zea mays
  Peptide Sequence Number=SeqID_72091
atggaccacggccacaggggtcgccgaccggagcagtttcgcgcgcacggctaccagaaaaacagggagcagcgtgcagccaacagagaagctttgcgcgcgccatggaagagctggagatggccggcggccgtcgcgcaggaaactggacgcagaactcggacaggcgggcacgctagggaagtcagcatggcggccaaggcgagggaggagctcggcgcgcagagctccacggcgcagtggccatggccgagcacaggggcgagatccgagtag

SEQ ID NO: 28717 - DNA, 153 bp, Zea mays
  Peptide Sequence Number=SeqID_72092
atggcaactacaccgtcagagatggctgcaccaagacctcaactacagccccacatttctggagcagagggtcgtgggtttgagtgctcgctttgtattattttttatataattattgtggcagttgcacagaaggggtcaggtgctgagtag

SEQ ID NO: 28718 - DNA, 1253 bp, Zea mays
  Peptide Sequence Number=SeqID_72093
gagactgggatgaatggcagtttggaccgagcacagttcatagtggtggtgctatggcaaactatgcatttgatatgaatctcctttggacagatatgaatccagacaatgctgaatatcacagaaatatccagaatcacttcatgtcaaacattgaaaacatgaatgcttatggtaatagggatcttgatgcttcctccatgtttgattctgatatttcagatgctttatctgggttgaggctgtctaataattcagtaatggatcaaaggaataatagggaagagctagcagatgaaatactcgagcgtcaaagagatttctctaaaactgttgatgaaacccgatcatctttggttggtaatgtttttcatgcacctaggtcagatgtgcatccatcacgaatatatggagatggtattttacggaggcagaccagtgcatgtgcattagatggttccaatgtttcaaggatcaatcgccatcacataaagggtgttgatcgcccatctttggctgaccagctagctataatgcaatcaggcaactttcctagagggaccaatctttctcgcaatgtgtctgtgactaacatgtccaaccccatgagcaacagatacaacagcaatacagacctggatttggctaggagtcgaatgacattttttaaggagatacttgcacaacagtatctgcaggaggataatctgtcatataacgatagtaggatctatcatgatgagccttgttttccctgttcaagaatgcaaagatctggatctcatttttattcaaactcgcggtgcattctatcccatggtgatcggcaatcacggctcttgtccctcaataggaaggcaatgggtagaaatattggatcacatgcctatcatgataatacattatcaaactacctggatgtgctttctttggataatgcagatagaaacggtgctgattcagtggaactgattgatttagtgggtcacgttaaggaaattagtatggatcaatatggaagccggtttattcaacaaaaactcgaaattgcatcactggatgaccgggaaaaaatatttccagagatattatccaatgccattgctctaacaactgatgtttttggcaattatgttatccagaagtttttcgagttcgctacagaaaggcagttaatccaattggcagatcaactcaaaggtcacattttggaactcagcctccagatgtatggttgcagggtagttcagaag

SEQ ID NO: 28719 - DNA, 399 bp, Zea mays
  Peptide Sequence Number=SeqID_72094
atggctccattcggcgacggcggtgtcggctgtggcgatggaggggaggcgctgcgtgggtgggaccctctgcgcagtggcagcgcgccgccaacgatggagggcgcggcggcggcagcggcggcggcggagaggagggtatttggcggcggcggtgacggcgcgtcgttcttctccgggatcgacgggctcatgtttggcgcgaggatggacgaggtcagcaggtgccgcggtgccgccggagctcaggtgagggtgttgctgatcttgagttcgtcgatggttttggtttctttggtccgtaaggttgggttttgccattgccatttttccgtcgatgggcctctgaggattagagatgcatctcactggtcacggttgctactgggagtagtttga

SEQ ID NO: 28720 - DNA, 453 bp, Zea mays
  Peptide Sequence Number=SeqID_72095
atgaagccttggattgccaagtgggtcactaagctacttgggttcgacgtgaggagcacaaggacggtggtcgacggcgaagatgaaggtcatgcgaggttcgtgtcggtggaccaggagcgggcgaagggtaccacgcacgggcgagggccacgccgcccaacagcgggcccaggccgtgttctgttgtcattcgggtccatttgtaagcccctccttgggcatttgccacccatcgttcgtgatacgacaaaacaatcccgcgatggccccaagaaagcgacttccaaggccaccacctctcttgatgacgcgacgaaggcgtccctcactgacaagaaatgcaaggcagccctcaccatcgacgctccccaagatgcacccgaaaacaacaacgaagcggtcaacagcaagcatcctcgaacagagaacccacccagcctcggaggctga

SEQ ID NO: 28721 - DNA, 192 bp, Zea mays
  Peptide Sequence Number=SeqID_72096
atggacgaaggtaacatcgaggaggctgacatactgggagaagatctggtcgactacggagcctcacctgagcacgcagaaaagtgcttttggttcgctcattttccccagaaggcaggggcatgtgttgagcaccatttgtggcattgggcacggccggacggtccggccataggtgtggatggtctgtga

SEQ ID NO: 28722 - DNA, 891 bp, Zea mays
  Peptide Sequence Number=SeqID_72097
atggactggcacttcggggtcatcgatggggaacgcagcactgacaaggggggatggaggtccagggtgttttggagtgtctctcgtgccccgatctcgggcagggagcgcgaccgatccgcgtcgcgccatggtctccgggaggacaactcgtcctcggctgggaggcatcgtcgtcctgctgctacccccaccgcgctgtgcttaacgggcgacacaacacctccaccggcagtcaccatttcccatccccattccggctcctcgtccgggggttggccgctgacagggctagtggctgtgccgactccgagggagcgcgggcgcagccgagagcgtggctgtctacgccacaacggccgcgtgcagcgctcgcctgccagagcagagacgactcccatcgggctggcttctgcactgcattgtgacgccaggtgcctcccggccggtagccttggcagcgtcaaccactctccgagcccaccagccgtgccttgtctcagcatatctcagactgtcacctcccttgacccaccgactccatgcaggagcgcgccgccgcccggagtggacgtggcggcattgggctcccttgttgtttcagctgcgagcgccggcctatgcatggggggccggatgcgtcttcaggcgtcgtccgtgtggccctggtggcgccacggctcgccgtggctgctccagatcggctgcgtccgcttcgctatctggatcctcatgagccgccttggactaaaggatgaaggcgacgacaacgaccgtttcctgcgctatgtaaacctcttcaaggggccgctcaatgacaccaccatcatggccatatctgctctgagtggcctggaagacacctcgacgctggagtccgtccacgagtag

SEQ ID NO: 28723 - DNA, 132 bp, Zea mays
  Peptide Sequence Number=SeqID_72098
atgtggagttctcgtataatagcgcggaacactccaccaccaaggcaaggattagccttcgtggcgaggtcaatcgagcagcgcacggttgataaccagaggagaagtggtgctgcgattgcggggttctag

SEQ ID NO: 28724 - DNA, 270 bp, Zea mays
  Peptide Sequence Number=SeqID_72099
atggcggcgctcgcccgccccgcccctcccctgcccgcgcgcggcgcggcccccgcccctgctcgccggtgcgtgcccccggcgcggcccccggcgcggccccgacgactcggccccggcgcggcccctgccccggcgcggcctcgacccccccctgcgcgcgcgtctggccctcggcgtggctcgcgtgactcgcgttgcccgtttgccgctagcgcatcccgcgtgcgcgaccgcctcgcgaccgcctcgcgtgataattttgtgtag

SEQ ID NO: 28725 - DNA, 825 bp, Zea mays
  Peptide Sequence Number=SeqID_72100
atgtggagacttggagacgtgcgctatccgggcgagtcgtcgggctcgcgcgggggtgaaaaatccgagcgcgttgtactcccgtcgctggcgacttcgatccatctcagcgagggggcctcgcggcgcggctcgtcggcggagccgagcaagctgggctcgaagcggccgtgctcgagcgggtccggcggcggaccgctctcggtggttggaggcaaggaggtggcccgcgaggagacaaagatccaagggtccggtgcaaccgtcggtgttcgtcgccgtcgaaccgccatcgcgaagaagctgagaagatccacggcgccgacgaaggaaggtgcgcagaaacgcaagcgcatctcgtcgccgccatcttcatcgtcttccactagctccggtgctccacatccgaagagaaaaagtcacaacatttcaatgcggtgtgtattgacaaaaacatatccactgaccatggattcggagaacgcaaagctccgaagagcactcgctcatttaatcagagtagtggaggagcgttgtgccgacatcgtcgatgtcgtccacggtgccttccaaccagttagcggaccagtcttgaatgaaatgaatcgtgcattagttcagatcgaggacctcgccaacgaccttgatcagcttgcactggaaaaagactgggagatggagcacatgaccccttcaccaattgctgaatcatcacaaacagaggatgagcttctgattgattatgattcagagttaaacaatgacgatatcgtcggctacgacgacggccgtgactactccaccgacgacacctatccctactag

SEQ ID NO: 28726 - DNA, 713 bp, Zea mays
  Peptide Sequence Number=SeqID_72101
gggcggcccccaaccccatcccggtgcccccacctttcctcccctcccgttctccaaggcgcaagggagcaccaggcgcgacggccatggccccagcgcaggcgcgacagttccggcccaggcgcggtggccaggcccccgacgcggccctcggaggcacagccgccggcgcggactcggccagccaagcgcaacgacggctccagcacgggcacgtggatccggccaggtacgacccggcgcatggcgcgacggcctggccacggcggcgcgtagccccgaggagggcgcggccccaacatgcgcggggatggccacgacgcaggcgcggcgtgcatctctggccaggcgcgaccgcctccttcgggcacgaactggccccggcgtgcgcacacgtccccggccagcggcggtggcagctgggctcgactgcatcctccaccgagctggcctcctcgccgacctccaccgagctcctctcctcgccggccatgaaggccgtcgtcccagctcctccctcacctccccttggtgctcggcctccaccaggtcgtggccttcaccacctcctcatcctggcccctctcgcccacgccatcttctcccagtttcctctacagcagccgatgctcttcctctctctgcttcctctccggccgtctggctccctgctcggcgggcacaagccctcggacgccccgcgatctgcttag

SEQ ID NO: 28727 - DNA, 603 bp, Zea mays
  Peptide Sequence Number=SeqID_72102
atggagatcgtagcagcggtccgtcgtcttctccggcgagcaagggacactgaaattctgaggctgaagcaactcttagatgagaaagctgaaaaaaacaattctacagcttctgggtttcattgcttaacacctgaagctatcctagaaaattcaacttcaatgtcacctaaaagaaaaacaccactttcccacggcaaggagaagagggtacagttgagtgaaaatgctcctcacagtagccccgcaaaggaatctcaagagctagtttgttctagaagacgtacatgcatcagagggaatgggacaaatgaaattcggagtgcgcatatgcttcgtttgcttcttcaatctttagttcgcatgaaggtctcagtaaatgatgaatcagagatattttcggtttcagtctctcatgaagctagtggttacagcttcaccctcacttggttagaaaaatctgatgaatggtcatataagctctcgtcgttgggcaccctgggaaggatagccgctgattggatgaggcaagacataagattcagcacgaaaatgtgccgtatgttcgttgagcggatatcaagcatcataacaaaaggatga

SEQ ID NO: 28728 - DNA, 426 bp, Zea mays
  Peptide Sequence Number=SeqID_72103
atgggcctaattgacagtttgttgcaatcaatgccacctgtggttggtgtttctttagttgctgatgcaactaaggagctcgagcatgacacgattaactcaggaattttatgcattagcataaatcatatgaaggaagtagattcacatgcacccgtgaagcagaagctacaattatttccaataaatgaagctactcttaagccatttgagaaggttgatttattagacagccctattgccagactacctgacatagagaccacaacacttggagccacatatgttgctagcttagatgcaggagtttggaccaaggaacaagtatttgcagatttgaatggtttgcatagactatcccatcaacatagacaattggagaagctcaatttccgatctgcagctttgctagagaattttgcttag

SEQ ID NO: 28729 - DNA, 429 bp, Zea mays
  Peptide Sequence Number=SeqID_72104
atgcacgaagatgaactgagaccctctcagtcgatgcagagcctcaacgactctcctgctgatcaggaatctgaagcgcccattcgtcgtcggtggtggggcgagggtgccatcggggatggagaggagctccttggcaatgctcagatgaggagccctgaactcttgcgatggcccaaacgcggaggtggaggcgacgacagtgttcggctgggccctgacggggagagatgcggccccggcggcgtgtgcggtggtactcagggcgatggtgcggtgggggaggagaagcggcggcggcggtgcagcgtgttgggtgtggcgggcgaggcgtcgagatggatgtggccacaggccgggatgccatgtgggccagcaatggtccgtgggtacgctagggttttcctgctccgcggtgggatggcctag

SEQ ID NO: 28730 - DNA, 179 bp, Zea mays
  Peptide Sequence Number=SeqID_72105
atggccgcgagccacgggtgcggcgagctccccgagggccggggatgcgcgagcggcgcggtgccgggcagggggccgcgccgagaatccgggacgggtgggcgcggcatcggcgagcaggctgggccgcaagctggctgggccgccgccggcccacagcgagaaagggacacgctgaa

SEQ ID NO: 28731 - DNA, 297 bp, Zea mays
  Peptide Sequence Number=SeqID_72106
atgacaaaggaggccagtttcagaggccacaacatagctcgcaatcttcaggacagcagcaaagctccttcaggccaccagctccaaggggctgaggcggcaggggctttagaggaagatatggggatcagcccaggaaaatctattgcttattctatggtgaagacaagggccacacaacaagaacgtgtcaaatcaccattcagaagcaaaaagagattgccgaagcagaagcccggcagaatcagccgaagcaggtcttgcatactgattcgtgtcactctccctacatactag

SEQ ID NO: 28732 - DNA, 498 bp, Zea mays
  Peptide Sequence Number=SeqID_72107
atgacgaagcagcctgtgaaggggtacaaatgggacatggatgagacacttattttgctcaagtcacttcttgttggctcatatgctagggattttgaaggcctcaaggatcgtgagaaaagtactcaaacaaggaagcgatgggagaacctcattctagaactctgtgatgagtacttcttttatgaggaggagcatcatgtacgccctcaaggagaaggggatcgacatggtgattgcttctcgctccccacctcggacatagccaaggtgttccaagacaagttggagctccagcccatgtttgtcgcccaagtaagaatccttcctcagccggtcgtaatcttcgtttcaagattatatgtacctgatgttccaaggataactaacagaaagcataccagcctggtggatttggggttattgggtatctcctttgattatatgtacgccgagctggaggaagagcagaacgtcgcgaccatcgcgaccaactag

SEQ ID NO: 28733 - DNA, 747 bp, Zea mays
  Peptide Sequence Number=SeqID_72108
atgtccactctgctgacgggcggcgaccaggccatcctgcaggaggcgtgcctgtccattccggtggcagacagtacgcctgtgctgcggcatacgttgtgctcatcatcactcatacgtccccagggaagcttccgcggcacgccaatgctacgtagaccgcggatatcagagcgcaaggagattgcactggcaaccagcattagttgttccaagtctgctggagcttgggaagggacagggtggagactgcagctagtgaaccttaagacagttgccgcaggtggagactgcagcaggcgagcaggggaagggcagggtggtgtagccgctgatgatgtagccgccggtgctgtcgctcaggacgacaaaaagaagaagaagaagaaccacagctccgagaggccaccgtctgccgctccgatcgtcgcagctgcgattgggggccgaaacgagcacaacaagcgcccacggccgcagaggggtaacagcggctcatgccctgtacaccccaactgtcgccatagtgccacggagtgtcgcgagatcatcgaactcgcgaagcgcgtcagcgaacggtgcgagcagacctccaaggatggctcccctcctcgccgtcggcctggcgaggaaagggtcaacagcggcaaggtagctgtgggagaaccggacctctggtatcagtcacccgaggaggtcctgaaggatgttttcaccggagactccgaccctggcgatgacaactag

SEQ ID NO: 28734 - DNA, 279 bp, Zea mays
  Peptide Sequence Number=SeqID_72109
atggccgacctccagcccacctctccggtcattgttgatcctgacaccgacgtctctgctgattctgagcgtgcggccctggctgcccgtgaggcggctttggctcgcatcgctgctgcagagcaggacgccgccctcgcccaacgcgagcgtgacgccgccgacacccggatccgcgtggctctcgcccgtgtagcccacgagcgcacaacggtggccctctctcctctagtcaacgacgtcatcctcgacggcactggtgctgactccactgcttag

SEQ ID NO: 28735 - DNA, 1416 bp, Zea mays
  Peptide Sequence Number=SeqID_72110
atggcggctcgccgtggcgcgcggcccggcctcgccccgcccggcgcgctcccctccccgcaccccggcggcgctcggcccccggcgtggctcggcctcgcccgccagcggcagccccggccccggcccccctttcccccccgcatcttggcctcggccggccggccatggcgcggcgacctgtggccccggcgtggcgccctccccgacgcggccccctgcccggcgcggcggcactcgcgcagccccggcccccggcaagctcgccgcacccgcggctcgcggccatggcggctcggtcccgcccgccttggtgtgccccgcccctgcgcagcgcggccccggcccggcgtggcttcggctctcgcgaccgtggtgcccctgcgtagcgcggcgcgtgcgctgctcggccccggcgtcattgcaacccctgctcaggagaaggcgaagtcatcgaaggagacttccaggagttccaagactatgacgagttctaggcgtggccacttggagaggctgcaccaccgcctgcatgaagagcaggaacgtcgtcgacaggagcagcagggcttttctttctcgctccagcaggagatagagtatgtgaggagctgctcccctgtgcttcccctggaggcgccccctgcaccaccactgggcgccccagcctctggagtagctgctggaggagacccagacgacggaggtggcgacgacagctcgagccacgacaccgacttttctactgaccaggagccggaaggatgggttgctcgacccatcactcgcgacgctgctcgcgggtgtcacttccacgatgcgctcgacaccctgctacgtcgggcacttaaccggcgtacttggtccatcgagtatcgctgtgtggtctaccagcatagtcgcagggtctacccggaccgctgggaggcgacctgcttggtgcgccgtccggagaacagtctccagggtgcggaggcctgctcagagcactattctatctctgagcgggactcagctgaggcggccatgcaagatgctgcacgacatgcgctttcgcactactgcttggttctcggtggggtagctgacagtctcaacctgaagtattacccccgccgtccatctggcagcacaagaggcgtgattgtttcacctgtcggtgaggacaatcctaggttgagcagcacagtcaacctagccgtcgtgctaaacacggagctggaccatgcactagacgagctgagtagggctcgtgctgagatcgccctgcggcgggctgagcgcgcggaacgtcgtcacctggatgatggttcccccgctcccgttgggactcagcacccgtaccgctcacctcggcgtggacaccagtcttatggcaatcccgactgcaagaccaagataaatctagaaccatag

SEQ ID NO: 28736 - DNA, 1091 bp, Zea mays
  Peptide Sequence Number=SeqID_72111
atgcaggcggcatgcaaccgcgccaggtggacgcgcttctccgactcccaacacgccggcatggaggcccaggcccacgcgtcacgcaaccggcgcgccggatgctgcatgcaagcaactgcaccgccacttgcgccaccactgcgcctcttcggctgcggaaccaatgccgcgactcgaggcgacccagcgcacgacccagcagcgccaacatggcgcgacggtcaatgcagccgaaagtgggccgacagtaatgacgatggcagggcgcccatgatccgttcctcgaacggctcgcgcacgcgcaacggccgccccgccaaccactcgccccgtcgcattaactccgcggcaggacaggcggcgtttctggcaggagaagcgggcgacgcttcaccttcgccgttcgaaggctggccccccgaagggttcaacagccgcctcagatcgcgtgggccctacacccactactggctggcccctgaagggttcacagtcgcctcagacgccgagcgagggatgaccaggggggaccgggtccggcagatcacccgcaggtacttttgggcgtgcctctgggcccctagccgacccctaacgaacggggcacggacgtccactcggattacccgcttgcagctcaccggagacaccatgttcggtgcccatcgagggctccggggctgctctcgcaaacccggctccggccgaaccgttgacagcgtcaacataccagcccgagaacttgggccccgaccgtacacccgggctatggccagttcgcatgagggaacaaccagaccagccgacgcattacgcaaggcattaagacctcggaggagtgaaaccactcctccgaggcctcgggggctacacccggcgggtgcgctcgcgcgcacccaccggaacaaaatgcaaccgaggaaggttggtccccttgcaaaaaagtgcgacgaaagcctccaagcgagtgctaacactcccttcgaggctcgggggatactgtcggggaccataattaggggtaccctcaagacgcctaattctcagctggtaacccccatcagcataaagctgcagaggcctgatgg

SEQ ID NO: 28737 - DNA, 630 bp, Zea mays
  Peptide Sequence Number=SeqID_72112
atggcccctgccgtcggtgccgaggcggaggcggctcgagaagtccccgtcaccgatgggatcaccgccaccatccgcgcttcgggcctccggttcttcgtacttgtcctcgcccctcgagcgtcggtagcgggcggcggcgagccgctcgtcagtcttctgttgctccgcaggccttcccccatggagtggggttactcgcctgttgattatctgaaccgcttcaccaagcatgagtcgccccgtgtcaaggtgacgagtgaggccaggggtagcgatatcagcacgaacagaggcgggagctggctcgaaaatgaaaacctggttggccagagcctagccgggttgcccgtcatcgggaccgacgccggagttgatcagccgaggcctcggatcgggctggcgcccttggaagatggttggctgaggccccagggggatgtttgtgcgagcgagagttgcttctcgcggaaggtgatgagtgagaaggtgatgagtgagaaagcacgaaagacattctggcagaagagatcttttttcgaggaaaatttcgacgcagagggggtttccccccttttagcccccgagggagggtcgggctttgccgaggcgaggccgacccttcattga

SEQ ID NO: 28738 - DNA, 216 bp, Zea mays
  Peptide Sequence Number=SeqID_72113
atggcgcctgaggctggactcggctgctgtcaacctcaccctggcgggtggcacagcagtcggagcagggcaggcagcgctgttttcctgtcagcttgtgctgatggtggttaccagccgagtttaggagtcttgggggtacccctaattatggtccccgacaataacctcaaatcctcatatgaaaatgataaaatgaagtattggttatattga

SEQ ID NO: 28739 - DNA, 75 bp, Zea mays
  Peptide Sequence Number=SeqID_72114
atggctcatgacgctgaggtaacccatctcggcaccatgacctatggcaccgagatatctgatgagctgcagtaa

SEQ ID NO: 28740 - DNA, 429 bp, Zea mays
  Peptide Sequence Number=SeqID_72115
atgggcctcctcgacaagctgtgggacgacaccgtcgcaggcccgcgcccggacaccgggctcggccgcctccgcaagcagcctgtgcgtcccgccgccgtcaagatcagtgatccggccggggacgctgcagcgttcgtgccgccctcgccggcttcgggtagcgaggagacgccggtgaaggtgacgcgcagcatcatgatcaagcgccccgcggggtacccgtcgtcgccgaggagcgcggcaagcacgccgccggcctcgccactggggactaccccgcccatctcgccgtttgccggcgccgaccctttactcggcgttatggctcatggcactgaggtaacacgtttcggcgtcatgacctatgacgccgagttatctgatgagctggcaactaaatacgtgctggcagctgatgtgtcttag

SEQ ID NO: 28741 - DNA, 606 bp, Zea mays
  Peptide Sequence Number=SeqID_72116
atgaacaaaaacactggcattcaaagtgccattacaaacggaactccggttccccctctgcaggtacgaacaatcccactctatgggggagggcctgcggagcaacagaagactgacgagcgactcgcggccgcccgctctgactacaacgacaacgacccccgctccgggtggccgaactgcagcagcgcaggcctcagggtgggcgctgctgcaatcttgccctcgcccacgccgacgctcgaggggcgaggacaagtacaaagagccggaggcccgaggcacggatggtggtgccgccctccggcagaaggggccgccgggagccaagccgacgagcccgacacgctggaggtgacgacgcctgccgtcgaccagccccgcgttgtcgaagtccgggccgcctgcagggccagtgagcgccctctccctcgaacgccgcgggagagggtgacccacgaacccgcgcgagaggtagagcgccggctcagcccggcccccacaccagcgaggatgatgaacatccttgaagctgagggtgggaccaagatcgcagcccggcttgcttctccccacccaggaactggtggtcaccgtcttgggtga

SEQ ID NO: 28742 - DNA, 474 bp, Zea mays
  Peptide Sequence Number=SeqID_72117
atgaggatcaggctcaagacaatgaagatgaagatcaagaggatgagccacctcaagaggaggataatgatcaagggggagatgaccatgacaaagacaaggaagatgagcaagacattcagggtcaaagaccgccacacccaagagtccaccaagcgattcaaagagatcaccccgtcaactctattcttggtgatatctataaggaggatggaggatgcactaagagacttggattgggtgttggcaatgcaagaggagctcaacaacttcacgaggaatgaggattatgattcaaaaattcgagatgtctatgacgggagagttgaagatgccaaacccatcaagacacccatgggaacaaatgggcatctcgacctcgacatgggagcgaagcaaatcaacggtccaacagccacaggcaaggttgggaacaggcgtaactcttacccgatcagcgatcaccttctctga

SEQ ID NO: 28743 - DNA, 1314 bp, Zea mays
  Peptide Sequence Number=SeqID_72118
atgcaggcggcacgcaaccgcgccgagtggacgcgcttctccgactcccgacacgcccagcatggaggcccaggcccacgcgtcacgagaagcgggcgacgcttcgccttcgccgtaaaaaccgcgccaaaaaaggctccgagcctccctactgatcagaggttcgaagggttcgacagccgcctcagatcgcgtgggccctacacccactactggtcagaggttcgaaggccggccccccgaagggttccacggccgcctcaggctactcgggctccgcgcccattactgatcagaggttcgaaggctggcccccgaagggttcacagccgcctcagacgccgagcgagggatgaccatgggtacgttcgatacataaccaaggctcgggctgcgctcccgaggtacttttgggcgtgcctctgggcccctagccgacccctaacgaatggggcacggacgtccactcggattacccgcttgcagctcaccggagacaccatgttcggtgcccatcgagggctcgggggctgctctcgcaaacccggctccggccgaaccgttgacagcgtcaacataccagcccgagaacttgggccccgaccgtacacccgggctacggccagttcgcatgagggaacaaccagaccagccgaagcattacgcaaggcattaagacctcggaggagtgaaaccactcccccgaggcctcgggggctacacccggcgggtgcgctcgtgcgcacccaccggaacaaaatgcaaccgagaaaggctggtccccttgcaaaaaagtgcgacgaaagcctccaagcgagtgctaacactccgttcgaggctcgggggctactgtcggggaccataattatgggtaccctcaagactcctaattctcagctgggctcggactcgggctcagccctagaagacgacgaactccgctccacccgacctagggctcggactcgggctcagccccggaagacgacgaactccgctttgcccgaccccagggctcggactccgccctggcctctgccgaacgacctccgcctcgcccgacccaggggctcgggctcggcctcggccatggaagacagactcaacctcggcttcagaggagcctccatgtcgcccaacctagggcgcaggccagccacgtcaacaggaagcgccatcatcaccctaccccgagttgactcgggccacagagaacaagaccggctccgtcgctcctccgacggccacaacatcacaccagctgggtgccaaaatctctccggctgccacatcggcatgtacttagggcgctag

SEQ ID NO: 28744 - DNA, 1424 bp, Zea mays
  Peptide Sequence Number=SeqID_72119
atggagaagaaccaggggacgggacggagggcgcagtgcgaagtgtgcaagaagctccggcgctcctgcccgctgaactgcatcttcgcgcccaacttctcggcggaggagttcgccgccgtgaatcgcgtctacggctccggcaacgtggccaatatgatccgttgcgtcacgcccagcgagcagcggcgggtcgccgcggccacgctcgtcgcggaggccagggcgcgggagcgggaccccgtcttcggctgcgtctcctacatccgcatcctccaggagttcaactacaacgccaggaagcaggtggacgaggcgcgggaggagatcgccagggagttcggcgccgcggcggccgccgagccggtcgacctcgcggccgcgggaccggcggtcaggctggaggcgcgggcgcaggtcgacgccgcgctcaaggatgccagggagctggacgccaggatgctggacgtccggaagggcaacgacgtcatattgtggcgggagctgcaacagcaacaggcggccgttaaggggaaggggaaggggaagcgcgccatgaaagggaaggaagtcgacgtcaagcgccgccgccacgagccctccttgagcgagcagacaatgcaggttgttccacaggccgcaaagccgcgcaaccccgggccgccgggattccctgacgaccactcgcggcagcaggtggcggtagcggtggcggaggccgagcggacagcgccgccggatgccccggaggggcacggacatggccggcagctgcaccaccagatgtcggagccggaggcgcagcagcaggcttccgcggcagatgcatctgcgggacagcacactgggacagggcatccgcaccatgcaggagatgctgctgccccggacataccggcgggaccgggacatgacagcagcacctcggtcatccgcgccatgcaggaggtgcagcatgccggcgccacgggcgagcaggatcagcaccacgtggcgcaacacgcccagaacgagcactgcgtcgcccttgggcacggcgacccgtacgggatatcccaggacatcctgcagctgcagttgttgttgatggggcagtgcggcgcggcgccggcgacggagcaggacgtgacggcgatgatgcagcagatggcggccgctgcgtctggttggcagcagcaagaccaccccgccccgcagccgcagtatgctgagatgcgtgacaacacccttggacacgggcatggccacccggacgggctatcgtccgaggagatcctgcagccgcaggagttgtcgatggagcagtgcgacgcggcggtggagggcacggcgccggcagagcaggacgtgatggcgatgatgcagcagatggcggccgctgcgtctggttggcagcagcaagaccaccttgccccgcagccgca

SEQ ID NO: 28745 - DNA, 1345 bp, Zea mays
  Peptide Sequence Number=SeqID_72120
atgatggtccaggacatggcgtcccgattgagcattttggcgaacacgacacgggcgtcagggaggcggccggacttcgcgcacatcgatagcagcgagttccaagtgaacgtgttccaccgcgcgtacgaggtagatgctgacgaggaggcccgccttgatggctatgacgtccacattggctgtggtgcacggttctgccctgagcgcccgcccgcccacagcactcctttccatcgatggcgtcgctgcggcatcccccgcaatcaactcccagatctcgtgctcatctccccgcgatccccctccccagctcttccaccccgaagcaccacacctcccgccatgcactgcatcgccccccgcctgctcctcctcccactcccgaccgcctcccgccatgcgctatcgccaacccagatgccacctcttcctccccttctcccctcccgcgcttgtaagttccacctcgcctcggcacgctcgccgtcccacgccgccgcttcggttttcggcgacgacgaggatgaggtggcgcatgcgtgcagggctgctgctgctcgtccttgtgccttctccctcgcgacgacgcgctctcgtccccctccgcctgcgcgcaccgcctcaagccttggtcttggcgtgcccaatcccccacctcgtcctcctaacgcttgtccccgcccgctccccaccctgatctacctgtctctacccttacctcttccatttctacttctccccgttgctgctctgctcctgctgccacaagagtattcgccttcaatcgttgctcgtgcctgtgatttcgtgctgcacgccgacttgtttgtcgttttcgctgtcgtcttctgttggatcggatttgtctggatcgcttccgagatcggatctatgctgttgcgggtcaggatcgacctttgctatgcggctatgcctggagttcgttcaccttcacaattgcatctctggcacttagcattagcatctaaatctatatgtatgtgcgctggtattcagcttctgccagagaagcactacgccgatgaagcttgtggagccatggcgagcagtaatggtcctgaaggagtgccagtagtgacttctgctgatgaccctccgacccgtgccgatattccatttctctgcaattcagttgatgaaacctgtgaagccacaggggacgacagtgctcccttgaatgctcagatatgtacgggtttctctaagttgatcagcttggaggtgaagaaaggcctccagaagtgcgcgacgttcccaccctcgtctggtcagcctcagcaggaggattgttcatgctcccatgtaggtgatggcctcacgg

SEQ ID NO: 28746 - DNA, 408 bp, Zea mays
  Peptide Sequence Number=SeqID_72121
atgcatcaacatggggatggattcggtgtgggagctcgacgcgtgcagggaaacttcacgacgcaaagtcacagcaaggatgacggaacacacacgacgcagggaaaagctccggccatgtgcgcggcgagcgcgaaccgatggagtagcatcggccatccatggagaagcaccgagtgtcgaactaaggagtgcgcgatgaaatccgagctgggcgagcgccagggaacttcagggccgagcgaacgcagggaaaacgacgccgtggggaagaaccgcgcagcgggtcaaacaggagctgagcaccgacaggaaccgagtagggagattgggcgaccgcgaagctgtatgcctgccatgggaaatcagctggagatatttctaactctagattttagcgaaaaatga

SEQ ID NO: 28747 - DNA, 486 bp, Zea mays
  Peptide Sequence Number=SeqID_72122
atggatacatatcatgtaaaccattgtatttctttggactataaaaggatggacgatggggtaccccaagaaggtccttcaaccatctcgaccaatcttgccatcgtcgagctcgcgttgagggtgaagagggccaccgctggcaaactccgttggtcccatcgattaggccccgataactggtcggagaggatccgtggggcatatcaaaggtgtccggtgacgggcgtgggctcgtgctggtctgagacgatgacaattgctcgacggagccaccttcggttgcgatcccaccgcacgacgtgggctggaatgaccgcgaagggattcacgtgtccaacacaagtgcctaagtataaaatggtgaacaaggtacaaatcaaggacaaagttgctaatccctcccttgctctgtgcttctttgtgaacttcaagtgtaagggcgagaggctccaagttgtggagattcctcgcgaacgggattaa

SEQ ID NO: 28748 - DNA, 483 bp, Zea mays
  Peptide Sequence Number=SeqID_72123
atgtcttcttcctcccttatgcgtcgtgtcttttcatcttccaagcccccggatgggggcccggtcgcttccccccgctggcggtcacccaagatggtgacctccagcttgatggtggggagaagcaagccgggctgcgatcttggtcccaccctcagcttcaaggatgttcatcatcctcgctggggtgggggccgggctgagccggcgctctacctcccacgcagcgtgtcggagtcgtcggcttggctcccggtggcccccctgccggagggcggctgccgcgccgtgtgcacgggaggaccacccacgatgccgcgcgctgctagggcggcgttcgtgttctggggtggccctgcttttgcaccgggatggcgccctcgcgcagaggccggtgcccccactcgtctgggaggatttgagtggggatctgccggggggctggtggcccccgccatcagcgccgaggcggaggcggcttga

SEQ ID NO: 28749 - DNA, 114 bp, Zea mays
  Peptide Sequence Number=SeqID_72124
atgaaggtgaaggtgagggtgaagcagcagaatgggtcgaaggggaggccaaagaacgcagcgaagaccatcaattaccatctccagcgacttgggcacatcaagttcctctag

SEQ ID NO: 28750 - DNA, 1224 bp, Zea mays
  Peptide Sequence Number=SeqID_72125
atgaggaagctgccgccagcgcaccgcctccggtggatgcgcgcgctgctcctcgcgctcccgctcgtctcgctccccatcctctacgcggcgctcggcgcggcgcgctcgtcggcctcggcggcgcggccgccgccgccgccgccgcagcagcagcagcagcggaggccgccgccgaggctggcgtacctcataacgggcgcaggccccggggacggcccgcggatccggaggctgatgcgggcgctctaccacccctggaactactacctcgtcggagtggcgggggaggacgagcggacggatctcgaagccttcgtgcgcgcccaggaggcgccgcgccggtacggcaatgtccgggtgtcggccgcgggggagtggggctccgtctcgcggaggggccccaccgaattggcctccacgctccacgccgccgcggtgctgctccgggagttcgacggctggagctggttcatcaatcttagcgcctccgattacccgctcatgccccaagatgacatccttcatatcttctcatacatgccaagagacctcaatttcattgagcacacaagcaatattggttggaaagagtatcaaagagcccgaccaatcattgtagacccagcattgcaggtcccaaataaaactgaggttgtaacaacaaaggagaaaaggagtatgccctcagctttcaaaatatttgtaggttcgtcttgggtgatgcttagtagatcattcctggagttttgcttactgggatgggataaccttcctcgcacactactcatgtatttcaccaacttcctctcgtcctcagaaggctacttccacacagtgatctgcaactcagagtactaccagaacaccactgtgaacagtgatctgcgcttcatggcatgggataacccacctcggacgcaccctgctaacctcacaacagagcattttgatgcaatggcagacagcggggcgccgtttgcacactcatttgccaatgataactcagtcctggatatgatcgacgccaagttgttggggcgagcacctgaccgcttcacgccgggtggatggtgcctgggtagctcagtaggcgggaaagatccgtgtaccttcttgggaaggtcctttattctcaggccgaccaaaggctcggccaagctagagaagttgctgttgaaacttttggaacctgataacttcaggcctaaacagtgtaaataa

SEQ ID NO: 28751 - DNA, 534 bp, Zea mays
  Peptide Sequence Number=SeqID_72126
atgtccagaccgtgggagcggtaccgaagggtctctatcaagcacgatgccggatacgtatccccgctgactagtgggaccattcaaccccggtcgcacggacctcagcatcgagtccctatatattcgctcgagaggggattctctcggttccttaccttgttcttgcctcccagccctagccgcctttaccttagccacagaaaggtggagctccacaacttcaaccccaactccatcgctcaggcgaccatcttcaccatggtctacgagagactctgggaccgcgggcttaccgcacccggggtcgtcgccgccttccaacgctggcgggtgctgccgctgttggatgctctgcggagactatgggaccacaggcttaccacacccggggtcgtcgccgccttccaacgctggcgggtgctgctgctagtgaagcgtcggcttcacttggatgaaatgacacctgaggcctctgttgagagttcccggatggcctcggtgagagcacctagagggggggtgaataggtga

SEQ ID NO: 28752 - DNA, 204 bp, Zea mays
  Peptide Sequence Number=SeqID_72127
atggccgccgcgcccgcgccggggaacgcgtgcctgcgctgtcgcgctaggccgggggggccgagcgcctaccaccgcgtcacccgccaccagagggccctcgcgcctgcgcactggggggccgccaggggccgctgtggccttgcagcgcgccctaggcacccgagccgccgggggtgccgcgccccgagccgccgtgcctag

SEQ ID NO: 28753 - DNA, 555 bp, Zea mays
  Peptide Sequence Number=SeqID_72128
atggctgaaaggtaccaactcccgcggagttgcgttcctccaacgacgaggcggaaagacggcgggtatcccccatccgggggcttggaaggtggaaagacacgatgcataggggagcgcgaagacatggtcgccttccaagagggtcaccctccttttaaaggcgactctccctacttgcgtccccagccgtcgtgggctgagtcttctccaacacgctccaaggtcctcccctacggcgcgggggctgggtcccacacgtcatgcaagccggcccagagcagaagaagccaaaccgccgtgcgcggtgcatgcaaccgcccagcgggaccgggaaagggggataccccgaaaaggatccttccccgtgaaggaacaaggctccgagcctccctactgatcagaggttcgaaggctggcccctcggaagggttcaacaaccgcctcagagcacgtgggctcacacacccactactggtcagaggttcgaaggccggcccctcggaagggttcaacggccacctcaggctactcgggctccacgcccactactga

SEQ ID NO: 28754 - DNA, 906 bp, Zea mays
  Peptide Sequence Number=SeqID_72129
atggcgcctcccgttgacgtggccggcccgcgccctaggttgggcgatgcgaaggctcctccgaggtcgaggccgagtccgtctttcgtggccgaggtcgagtccgagcccctaggtcgggcgaggcggaggccgttggctgaggccagggcggagttcgagtcctggggttgggcgaagcggagttcgtcgtcttctgaggctgagcccaagtccgagccctgggtcaggcggagcggagttcgtcgtcttctggggctgagcccaagttcgagccctgggtcgggcggagcggagttcgccgcattccggggcttagcccgagtccgagccctgggtcgggcggagcggagttcgccgtcttctggggttgagcccgagtccgagccctgggtcgggcggagcggagttcgctgtcttccggggcctagcccgagtccgagccctaggtcgggcggagcggagttcgccgtcttccggggcttagcccgagtccgagccctgggtcgggcgaagcggagcttcctatggtgcctgcggccgggcctgactgcctatcagcctcactctgtcaagtggcaccgtagtcggagcggcgcaggcggcgctgtctttctgtcagaccggtcagtggagcggcaaagtgacagcgggttgcttcttggcgaagacagggcctcgggcgagccggaaatatgttcgccgctggaggggggcctcgggcgaggcggagatcctccgggctcggctgcccttctttatgttgatgggggttaccagctgagaattaggagccttgaggggagaagagaactcatgcttgatgccctcttcctcaaggaagccttcaatttgagagttcttgaactccgtcccgttgtcgcttctaattttcttgatccttaa

SEQ ID NO: 28755 - DNA, 492 bp, Zea mays
  Peptide Sequence Number=SeqID_72130
atgtccggtgcaccagaggattccaacttcaaactcttcaccttcgggaatttctggaggtgtctccgctataattcaccggactgtccggtgtacaccggacatgtccggtgctccaaggaagagcggcctccggaactcgccagcctcgggaattcatttcaactgctccgctataattcaccggacatgtccggtgtgcaccggactgtccggtgtaactacggggcaatggctactacgcgccaacggtcacctgcaacagcaattaatgcgcgccagagcgcgcaggagtcaggcacgcgcgtagtggcgcaccggacactctacagtacatgtccggtgcgaccggacatccaggcgggcccagtgtcagagctccaacggtcgaaccccaacggctttggtgacgtggctgtcgcaccggacatgtccggtgtgcaccggactgtccggtgcgccatcgaacagacagccccaccaaacggctag

SEQ ID NO: 28756 - DNA, 2232 bp, Zea mays
  Peptide Sequence Number=SeqID_72131
atggcgacttatgagcccaagaacattctcataactggtgctgctggtttcattgcatcgcatgtcgccaaccgtctggtcaggaactatccccaatacaagatcgttgtccttgacaagattgactactgctccaacctaaagaacctcaatccttcacggtcttcaccaaatttcaaatttgtcaagggtgatattgcaagtgctgacctggtgaattaccttctgatcaccgagtcaattgacaccatcatgcactttgctgctcagacgcatgttgataattcttttggcaattcatttgagttcacaaaaaacaatatatatggcacccatgttcttcttgaggcttgcaaggttactggtcagatcaggaggtttattcatgtcagtaccgacgaggtatatggtgaaactgatgaagatgctgtggttggtaaccatgaggcctcacagctgcttccaacaaatccatattcagctacaaaggctggggctgaaatgcttgtgatggcatacggaaggtcttatggtcttcctgtgattaccactcgtggcaacaatgtgtatgggccaaatcaatttcctgagaaactcattcccaaattcattcttttggccatgcaaggtctgcctcttccaattcatggagatggctccaacgtcaggagctacctgtactgtgaggatgtggccgaagcttttgaggtggtccttcacaaaggagaagttggacatgtgtataatattggtactgtgaaggagaggagggtgattgatgtggccaaggacatatgcaagctctttggcttggatactgagaaagtcatcaggtttgttgaaaacaggccattcaatgaccagaggtacttcttagatgatcagaagctaaagagattgggatgggcagagcgcacaccatgggaagagggtttgaagaagacgatggagtggtacaccaccaatcctgattactggggagatgtcactggtgcgctgcttcctcatccaaggatgttgatgactcctggagttgaaaggcataactgggctgaagaaatcaagtctctggcttcttcgccagctgaagctagtacaatagctccagcaaccagtaccaaaagcatctctgatgcccctcagaagccttcctacaggtttttaatctatggtaggactggatggattggtggcctccttggaaagatttgtgaaaagcaagggataccatatgagtatgggaaaggacgcttggaggagcgctctcagctgttggaggacattagaaatgtgaagccaactcatgttttcaatgctgccggagtcactgggagaccaaatgttgactggtgcgagacccataaacaggacactatccgcaccaatgttgtaggcactttgaatctagctgatgtctgtcgcaagcagggtctgctcatgattaattatgctacaggctgtatatttgagtatgatgctaagcaccctgaagggtctggtattggctttaaagaggaagacacgcccaactttattggttcctttttattccaaaacaaaagcaatgtatacctgaagctaatttatgtgctgttcaccatggtgcaggtggaagagctattgaaggagtatgataatgtctgtactcttagggtcaggatgcctatatcatcagatctaagcaacccccgtaatttcatcacaaagatagctcgttacgacaaggtggtgaacattcccaacagcatgacaatcttggatgagcttctgcctatctccattgagatggcgaaacgggactgcaggggcatatggaacttcaccaaccctggcgctgtaagccacaacgagattctagagatgtacaagaaatacatcaatcctgatttcaagtggaccaacttcacactcgaagagcaggccaaggtgatagtcgcgcctagaagcaacaacgagatggacacgtcgaaactgaaggctgagttccctcagcttctgtccatcaaggattctttgatcaagtacgtctttgagcccaacaggaagttcctgatacgcagaaggttgtgtatctttcaaccagcaccccctgctatgaaaacgttctgttttgtcaagggctggatgctggatcatgtaccgttcggtgcacacacaagtgaagaagatgtagctttactagagtcggggcgtcagcaacagtccctcgccgaagaaacacaacagcaatag

SEQ ID NO: 28757 - DNA, 855 bp, Zea mays
  Peptide Sequence Number=SeqID_72132
atggcggagacgctcgacatgaccctcgacgacatcatcaagaacaacaagaagagtaacccctcgtctcgcggggcccgccgcagccgcggcgtatccgcccctggcggcgggaccggcggggtcgggccgaccaggcgcccctttaaaagggctgggaacaggcaggcgccctaccagccgccgaaggcccccgacgctgcgtggcagcacgacatgtaccctgcggtcgccgcaggaggcggcggcggcggcgggagggtctcggctctcgagacgggcgccaagctctacatctccaacctggactttggggtttcgaacgaggatattaaggagcttttctctgagctaggtgatttgaagcgtttttcgataaattatgatcgaagtgggaggtctaaggtgcagatgccatcttacagtcttctacttgtctcttacatacacctaacttcccggtctcttacatttgttgtacctcgtacctcacagggaacagctgaagttgtatttgcaaggcgttctgatgctgtagcggcggttaagaaatatgacaatgtccaacttgatggtaagcccatgaagatagagatagttggtaccaatactccagctgcagcagctgctcatccagtccctaatggtggtcatgctaggaatgctgcgaggagtgcaccaaaggatgctgctccagcaggtatgtcgcagcatagaacccatcagaggggtgggaggcgtgctgctggatctggtggtggtcgtcgtggcaaagagcgcagcaagccaaagtcgactgaagaactcgatgctgatttggagaagtatcatgctgatgcgatgcagaccaactaa

SEQ ID NO: 28758 - DNA, 1959 bp, Zea mays
  Peptide Sequence Number=SeqID_72133
atggcgggcaacaagggagagggcccggcgatcggcatcgacctcggcacgacctactcctgcgtcggggtctggcagcatgaccgggtggagattatcgccaacgaccagggcaaccgcaccacgccgtcgtacgtggcgttcaccgacaccgagaggctcatcggcgacgccgccaagaaccaggtcgccatgaatcccaccaacaccgtcttcgatgccaagcgactcatcggccggcgcttctcggacccgtctgtgcaggcggacatgaagatgtggccattcaaggtcgtcccaggccccgccgacaagccaatgatcgtggtgacttacaagggcgaggagaagaagttctcggccgaggagatctcctccatggtgctcaccaagatgaaggagatcgccgaggcctacctcagcaccaccatcaagaacgccgtcattaccgtgccggcctacttcaatgactcgcagcgccaggccaccaaggacgccggcgtcattgccggcctcaacgtcacgcgcatcatcaacgagcccacggccgccgccatcgcctacggactcgacaagaaggccaccagcactggcgagaagaacgtgctcatcttcgaccttggcggtggcacctttgatgtgtccatcctcaccattgaggagggcatcttcgaggtcaaggccacggctggtgacacccacctgggaggcgaggacttcgacaaccgcctggtgaaccacttcgtgatggagttcaagaggaaacacaagaaggacatcagcggcaacccgagggcgctccggcggctgcgtaccgcgtgcgagagggcgaagaggacgctctcctccaccgcccagaccaccattgagatcgactcgctctacgagggcatcgacttctacgcgaccatcacccgggccaggttcgaggagcttaacatggacctcttcaggaagtgcatggagcccgtggagaagtgcctccgcgacgccaagatggacaagtcacagatccacgacgtcgtgctcgtcggaggttccacccgtatccccaaggtgcagcagctgctccaggacttcttcaacggcaaggagttgtgcaagagcatcaaccctgacgaggccgtcgcgtacggcgccgctgtccaggccgccatcctcagcggcgagggcaaccagaaggtgcaggacctgctccttctcgatgtcacgccgctctcgctcgggctggagactgcaggcggtgtcatgaccgtgctgatcccgaggaacaccaccatccccaccaagaaggagcaggtgttctccacctactccgacaaccagcccggcgtgctgatccaggtgtacgagggtgagaggacgaggaccaaggacaacaacctgctcggcaagttcgagctgaccggcatcccgccggcgccacggggcgtgccccagatcaacgtgaccttcgacatcgacgcgaacggcatcctgaacgtgtcggcggaggacaagacgacggggaagaagaacaagatcaccatcaccaacgacaagggccggctgagcaaggaagagatcgagcgcatggtgcaggaggcggagaagtacaagaccgaggacgaggaggtgaagcgcaaggtggaggcccgcaacgcgctggagaactacgcgtataacatgcgcaacacggtgcgggacgagaagatcgcgtcgaagctgcccgccgatgacaagaagaagatcgaggacacgatcgaggacgccatcaagtggctcgacggcaaccagctcgcggaggccgaggagttcgaggacaagatgaaggagctggagagcatctgcaaccccatcatctcacagatgtaccagggcggcgcgggcgctgcgggcatggacgaggatgtgcccggcggtggcgccggcaacggaggtggcagcggcgccgggcccaagattgaggaggtcgactga

SEQ ID NO: 28759 - DNA, 276 bp, Zea mays
  Peptide Sequence Number=SeqID_72134
atggcgttggaggccggtgcccgaggcgagcttcggccggcgcgggcagttgcattctatatagagttggaatatgtagaagaggacgcaagagatgaaggagtggagcaccaggtgcctcctcctcgtcgtgtaggatgccgcgggaccgtcgtcgccgccatccgtcattggctcggcctcattggggggcaccgatgccggggcagcaacatagacaggtgcggcggtgaactagtagaagagggcgcatgggatgagggagttgagcaatag

SEQ ID NO: 28760 - DNA, 2250 bp, Zea mays
  Peptide Sequence Number=SeqID_72135
atgcaaaaacaaatcaagcagggatgcgcgagcgcgagcccatcacccccgctggccgcaccaccccacgcggtctcgaaaccaggcacagggcaggcagccgcgcggggccgtctccccttccgttccgcctcgccgaaacgacagacagacgagttgctccagccgtcaccgtcaagtaacggacccccaccccagccccgcgtccagggcctccaggctccttctgggggaggccgcggctcaccgtgttggctgcgcccccaccgtcgcctcgccttaaactctccccgcctccgttaccgtcttcccccttcccacctcccccacccgctgtgttcatccatcgaccgcgcgagccccccgcccgccgattcgacgacgtttgattttttttcatttgatttgattgtaacgtaccgcagcaggaggagggagggattcttggaccgttgttcggctggatggtggaggcggttcgtcgatttgagagctccgggtttcttggacctgcgtagcgattcggaggagaggagcgcgccgtgcggaggcggtggaggaggaagcgccgaagatttgggcagagaagcgacggaaggggagcagcaggcggacgaggagcgagccgccaggaggacgacggccgccgccgccgccatgggcgagtcgctgctcaccgcgctctccatggacaccaccacggcccaccatccacaccagggccctttcaccttcctctccatggacaccgcctcccacgaccacttcgacctcttcctcccgccacaggggcccttccgccgctgcctacatgccgcggcggtcgccccccctgacatcaacctccccctcaccgccgacccgtctccgccacctccggcgtcgcacgacgccaacgttgacgtgctagatgccggcctcggcggcccgcagcactacgactcggattcgcccgctgctgccgggcctgtcttggccccagcagcagccgcggccaccgtgatcgccgtgtcccacaccaagggctccggttccagcgtggcgcgcaagtgcgtcaagaggaatgatagcatttggggagcgtggttcttcttcacccactacttcaagccagtcatgtccaccgacaagggtggcaaggcgaaggcagccaccaccggcgggaatggtaatagtgccagtgccactctggacgctttcctggtgcagcacgacatggagaacatgtacatgtggatctttaaggagcgatcggagaatgccctggggaagatgcagctgaggagcttcatgaatgggcactcgcgccttggggatccacagttccctttcagcgcagacaaagggtttgtgcgctcacaccggatgcagcgcaagcattatcgtgggctctctaacccgcagtgtattcacgggatcgaaatcgtgagggcgccaaacttggcaggtgtacctgagtctgatttaaagaggtggatggagctcaccgggagggatgccaatttctcgatcccagccgaggcaagtgatttcgagtcttggaggaatctgccgagcacggaatttgagctcgagaggctagcagccgtggttcctacaaagagtagctcacatgggcaccacaagaggttgctgaacggttctggccttaacctatcgacacaaccatccaatcacagttctggggatgccatggagatcgcaaccatctgtaacaagcgcaggaaggattcctcaccgtctgcaacggaagaggactgcagcaattcgaattcagacaaggcccaagacatggatgtgagccacacctttgagccatcatggatgaatgacttcacaggtgtgatgcgccatgcttctggaccagtaactgccgcaaaaacaatatatgaggacagcaagggctacttgatcattgttagcctgcctttctctgattttcagaaggtgaaggtttcatggaagaatactcttacgaatgggattgttaaggtatcttgcattagcgttggtaggatgccattattgaaaaggcatgatcggactttcaagttggcggatccttctcctgagcattgcccaccaggagagtttgtccgggaaatcccactgcctacccggatccctgaagatgccactctggaagcataccgcgatgaaacggggacaggcctggagattattgtcccaaagtaccgtgttggccctgaagaacatgagcatttggaacgtattaggtatatgctatag

SEQ ID NO: 28761 - DNA, 495 bp, Zea mays
  Peptide Sequence Number=SeqID_72136
atgactatcgatgccctgacgaagacgacaaggatccgtccagtacaacggcacgggcaagcgcggcatggcgcttcacagcagcacggtcgcaatcccaacctgccgcgggcgggcgcgacctcggctccggcatgcagtaggcggcacaagtgtgccctggccacgtgcggcacggcgcggacgcatcccgacgtggatgaaagcggccacggcgaggacgcggcccctggcagccgcctcctggcgcgcgcgggcgagccccgatcaggcgctacagaggacggatgcggcctcggcggcgcgggtgaagccatggcctggcacagcctcgcacgggtgctcccgggcggcacaggcatgaccacggccagaagcgtggtcgctgctctggccggttgccaggcgctgcatgcgcgctgctatggcgagcaccggccagacgatgatggcgctgtacagcgtggaatgtcacttctccccgtgggaccgtaa

SEQ ID NO: 28762 - DNA, 477 bp, Zea mays
  Peptide Sequence Number=SeqID_72137
atgaagaccctgacgactttctatggctaccatcccctagatatggtgatgcaccccttgggactctttcccgctgagaagagagatgaccccatttggtgcaaccgtgtgagccatgtgaaggacgtgtgggcgatgtatcccgacttagttgggaggatcactgttcagtgcatgagcgcactgtaccgcctacaggtggaacgattgagccagcgcatcaccaccctggagcagcaggtggagattcgggacaacaccattgatgtcctggaaaaccaactccacgatgtgcagcaggagtttgaggaagctaacgaccacttggacatgcaccacctggagatggaggccaacgagaccgaaagcgagggagaggaggcccccgaggagttaggaccagcccctggtaccaatgcagttgcctccgagatgaccccttcgcttccactactcagggttgatgggtcattttga

SEQ ID NO: 28763 - DNA, 258 bp, Zea mays
  Peptide Sequence Number=SeqID_72138
atggccggctcggcccacgcgccctggccgcgcgccccggccgcccgcctggccgcccgcctggccgcgcccctggccgcccgcctggcccctggccgcgctcgcctggccgctcgcctggccgccggtgcttatgagatcgatgatggttctggttatgattatgatgctggttgtcagcattgcaaccactgctcaggcgaagatgaagctgtggaaggagacttccaggagtttcaagactacgacgagttctag

SEQ ID NO: 28764 - DNA, 729 bp, Zea mays
  Peptide Sequence Number=SeqID_72139
atggagtggttgatgggggcgagggcacgatgcacagcgaggatgttgggagcggtcgccgatggaagggcgcgggggaggatgtcaggggcaggggcatgcgcacgggcgcgggccgatgatggcggggcggcgatggatagttcctgggatcccgcgacagagagcatgggcatgagctcgggagcgggcgatgatggtgggcggcgatggagggttcctgggattgcgcgaccaagagccggggcaaggggaggatgtcgagatagggacagggcagaaccgtggctgaggacgcctacgttgtctcttaagagtagtagagatttggcatacaaaacaaatcattctcaagtgttttggtgccaaaggttaaactgcaactatactaaatcgactgtccggaataccgtagattattccggacaggagaagctttttggaaaacaaactacgcgcggaccgtccgggcccttgcggcggaccgtccgcgacaccactttgactttgaccaggaactataaatcatggataagtccgactaagtcgcagaccgtccagctacaacgcgcggaccgtccggctataattcacggacagtccgcaggtgaagacctggttcagcccgaaggtgacaagttgagcaaaaggaattatatagctggcgcggaccgtccgggaccaagggcggaccgtccgcgtggtgtcaccgaggcagatagccgttga

SEQ ID NO: 28765 - DNA, 682 bp, Zea mays
  Peptide Sequence Number=SeqID_72140
atggccgacgcgtactggaggtacgcggccgctgccccgcgccagcagcagcagcagcagcagccgccgccctccgccggcgggggcgtcgcgcaccccggcatgggcggcggcgcaccgcagatggcccccgccggggggcagcagcagcccatgaagcggccccgccccaccgaattctcagatgtacccggtgcacctgacacggctggctattatccacgcgatgaagaaagggcagggtatcgtgctgctagagataccgagtctcttaacgcttcctacgaacgttttctacgtactgggtctgctaatgcttatgttgaacttcagcaaattcaatcctttggtggtggacatgctggagaacctattaggcctgctgtgggtggcaatgctgcctacccagttgatgatcgttcaatgatggctgctagggacatcttccgaccatttgttggctttcgtgaggttagacttgtaaacaaagaaccgaaacatcctggtggtgaccctattgtcctttgttttgttgattttgcggaacctacacaatctgctattgcattggatgctttgcaaggctataagtttgacgagcatgatcgcaattcacccaatctgcggctgcagtttgctcgtttcgcaggtccaaaggggaattcaggacctggtggtcgtg

SEQ ID NO: 28766 - DNA, 795 bp, Zea mays
  Peptide Sequence Number=SeqID_72141
atggcgcctcctattgatgtggtcggtccgtgccctgggttgggcgacgtggaggctcctccgaggtcgaggtcgagtccgtcttccgaggccgaggtcgagtccgagcccccgggtcgggcgaggcggagaccgtcggctgaggtcagggctgagtccgagccctgggtcgggcggagcggagttcgtcgtcttccggggctgagcccgagtccgagccatggggtcgggcgaagcggacctcactctgtcgagtggcacagcagtcggagcggcgcaggcggcgctgtcctcttgtcagaccggtcagtggagcggcgaagtgactgcggtcacttcggctctgtcgaccagagggcgtgcgtcaggataaagctttgtgccgatgggggttatcagctgagaattaggagccttgaggcgttactggaggtgtggattcctgcctcccctatctatcgatctgtgaatcatcgaagaagcctgacagagctagtagctagccaagggctgggaataatgtcgagcggtaagaagatgtcagtggtcgtcatcatgttcatggccgcgctgctgctgctgctgctggcaactgtggagtcgtcgtcgtcgtcgtcggcggcgtcgtcagccatggcctccagctcatccgaccagctgggcgggctggtggcgcttgaggcggcaggaagaaagctactgcagatcgacttatgcggaggacggttctgcaccattgttgatgactgctgcattaccaaccctcgctgtattgccaacgcttgcaccgcctaa

SEQ ID NO: 28767 - DNA, 408 bp, Zea mays
  Peptide Sequence Number=SeqID_72142
atgacggcgcccatgcctggcaggggagcagcggcggcggggcccaggacagtgctcatcacgagggatcatgtcgttctacgccacgccgaagaccacgccacgccgaagaccatggcattacgtgcgatccacgggacggtggccctgcgcgtagggggccatttgaaggccaccgctgcgcgcgtagagggcctctacgcgtatacagtgctaggggaggggggcaaccactgcgatggtgccgtcgatgaggaggaggagctcagagcagagtggcttccggcgaccgcgttggagatggcggcgagccacagcgcggggacactcaagtccacctccatcaacggggtcaagctctactcgctcactggcgaccgctatgtcgcaccttgggtcgtcgcgtag

SEQ ID NO: 28768 - DNA, 1533 bp, Zea mays
  Peptide Sequence Number=SeqID_72143
atgggggacttcaatgtggcactggtgatcgtggcggcggtggtcagcgtgctggtgctgctcgtcagcgtctaccttctcgtcaactaccagcaccccgacgacgtcaaccaggcctacttccccaagctcgtcgtcgtgctcggcctcaccgtcgccgtcctctccatcctcatgctccccgccgacgtcgccaaccgccaggcatgccgcaaggccgtctacaacggcgcctgcagcctcacgctccccatgaggacgctctggctcgtcgtttacatcgttgacgccgtcctcgtcttcctcgtcatccccttcgcaatgttctactacgagggcgaccaggacaagtccgtcgggaagaggctcaggaccgcgctcatctgggtcgtcgcgtccgcggacttgttggtaaaagtggacttcactgtcaggcacctatcttcctcggtccagacatttccaaactcattttctggattctcaagtggccagccgtgcattagtccattgactcgtcagtgtgcggcttctactgcaccggctaactcgcaaacaacttggacaatgcgtgctaccttccctgaatatgtggttgctcttactacaattgttggatctgtgcttttcacgatatttggtggtgtcggaattgcctgccttccattgggacttatattctcatttgttcggcgtccaaaagctgtaattacacgctcacaatatataaaggaagcaactgaattggggaagaaggccagggagctgaaaaaggcggctgaagctcttcaccaagaagaaagaagtgggaacaagggccggaaatggcgaaaaaacgtgaaggctgtagagaaggagttactacttctggaagatgacatgaaggctctagaagagatgtatcctcaaggagaacaggttctctccttgacacatgttatggcacaggcagaggctacttgggcattcacagtccttgggtacattggaaaacttatatttggtgttgttgggttaattgtttcaatagcttgggttgcacatatcgtcatatacttgttgattgatcctcctctatcttctttcctgaatgaagtcttcataaagttggatggtgtttggggtctccttgggactgctgctttcgcattcttctgcttctatctccttattgcagtgattgctggggagatgatgcttggtttgaaacttgttttcatcacaattcacccaatgaagtatgacatcaatgccttccttaaatgttacgttcttttatctggaaaggcagtcatagtcatagaatgctcatattggcatgtcctcaatctaacatgtgtgattcagttctgtgccacggcttttgcctattatgcacaagcaactgctgctcaagagatctttggccacacattgcaatcccttcgtggaattaagtatctttacaagtacaatgttttccagtatggctttgttgctcttgccatcctcacactcttctactatgctatatttgtttttgagcggttttga

SEQ ID NO: 28769 - DNA, 1800 bp, Zea mays
  Peptide Sequence Number=SeqID_72144
atggaggtggtgctgggttccgccgctcgccgctgcctggcttccactgccgtcgccgccgcgcgggctctgctgcagaggatgagcaccgcgcagcgattcgacatcctcccctacggcttctccaagcgggcgagcaaccgcggcgatggctccggcgccgcgccgcgcgtcgcggcgcccgacgccaggagcggtggcggcggcggcacctgctccttccgcgcccacccggcgccgccagtcacgcaggccgtttcctggggcgccaagccggagcccggcggcaatggcgctgcgtgggagaggagcagggccgttaagcgggcccatgaggaagacgcaggcgaggagtacggcggccccgtcgttcgcgccaagcggacgaggatgggcggggacggggataaggtatggttccatcgatccattgcagggacagtgcaagcggccgggtccggcgacggacacgaagccgaggaagagaaggccttcctggtgccgagcgccgcggcgttcccccacggcatgtccgccgccgccgcgggcccgtcgctggccgtggccaagaaagaggagttcagcaagtcgccgtccaactcgccggcctcgtcgggcggcacggacggcggctcgtcggctgtcccgtggccggagcagctccacgcgcagaacggcgccgcggcgcgggtggaggccatggagctcgtcgtcgcgctcaccgcctgcgccgactccgtcgccgcctgcaaccacgacgccgccaactactacctggcgcggctgggcgagatggcctcccccgcggggcccacgccgatgcaccgcgtggccgcctacttcgcggaggcgctcacgctgcgcgtggtgcgcatgtggccccaggtgttcgacgttagcccgccgcgcgagctcaccgacggcgccgtcgccgccgacgacgacgcgacggcgctgcgggtgctcaacgccgtcaccccgatcccgcgcttcctgcacttcaccctcaacgagcgggtgctccgcgcgttcgacggccacgaccgcgtccacgtcattgacttcgacatcaagcaggggctgcagtggccgggcctcctccagagcctcgccacgcgcgtggctcccccggcgcacgtgcggatcaccggcgtcggcgagtcaagacaggagctgcaggagaccggcgcgcggctggggcgcgtggccgccgcgctcgggctcgcgttcgagttccacgccgtggtggactcgcctcgaggacgtccgcctgtggatgctccacgtgaagcgcggcgagtgcgtcgccgtgaactgcgtcctcgcggcgcaccgcttgctccgcgacgagaccggcgccgcggtggccgacttcctcgggctcacgcgcagcacgggcgccgccatcctcctcctgggcgagcacgaggacgccctcaactccgggcggtgggaggcgcggttcgcgcgcgcgctgcggtactacgccgcggcgttcgacgccgtggaggcggctgggctggcggacgccagccccgcgagggccaaggcggaggagatgaaggcgggttccagaacgccggcatcggcgaccgggaggcgttgcaggggcgcatgatcgcgaggatgttcgcgccgggcaactacagcgtgcaggtgcagggcgacggcgaggggctcacgctccggtggatggaccaggccatgtacaccgtgtccgcgtggacgccggtcagcgacgggggcagcacggtgtctgcgtctgtctccaccacagcatcccattctcagcatagctga

SEQ ID NO: 28770 - DNA, 141 bp, Zea mays
  Peptide Sequence Number=SeqID_72145
atggccatgatgggttcaacatcggaaaagatgtacctctgccaggtgaagaagcagcaaacttttgttgcttctgttcaaaggtggtacccaaagaagagaaccaagactaaagctgcaggagggcaagccctccgttaa

SEQ ID NO: 28771 - DNA, 342 bp, Zea mays
  Peptide Sequence Number=SeqID_72146
atgtccggccgggtccgagggcttggcaagcttcacgggctactggtggagctagccgaagcactggctcgacttgaggatggctggagtgggttagccacggtggccgaagctctggcggcaatggcgggcggaattgagctcgccggagctaagggaaagcggccggccggtgctgctgtggcattaactaaggcggtgatggcctcagctaatgttggaggtactgggggtggattcggggttgcctccctcccacgggaggtggcggatgtctgttctcaattcgtttattctttcaccatccgcgacccatatatcgttcctgtgacggagttctaa

SEQ ID NO: 28772 - DNA, 681 bp, Zea mays
  Peptide Sequence Number=SeqID_72147
atggatccattggatgtgcaggggaggaaggcatccgcggcgccgtcatttgtgctggatgcgacgaagatgcaggaacttctagatgcggcggcggcgcggaagcagactggcgatgcagcaccgtcggtggccaagaggaccggcatggggaaggcggcaacagcagggtcgacacgcttgcgacatgctatggaggcggactttcaaggagcaggcacagcggagggccgccagcggccaggcacagctttgggattgaagcggaaggtggccgctgtcggtgttttgggcccacgaaagaatgaccttacgaattattgggcccttgggcttttcgtgaggccttttacttctttagtggacccaggggatatctatcccccacaagcccccgatctttgggttgatttagaggtaatcaacccaaagatccaaggtccagaaaatgacttcctgctatcttctctggctctgatcactcgtccgaccaaagtttggttttgtgcttgtgccttagaggtcggcattttggattgtaagactccggacttcattgggtgcaccggaggtgcacccaatgggtgtagcccccgacctttgagtagattttggaagataatctactcgaaggtcttcttccaaaggttatctccattcgcgctcctgcatctcggttga

SEQ ID NO: 28773 - DNA, 465 bp, Zea mays
  Peptide Sequence Number=SeqID_72148
atgaggaaaaaacacggcttcatgccaaaaatacatacatgttcaggccccgacagccacaatgaacagacatcggcattcaaggtgccattacaaacggaactccggtttcgtccccgcgggtatgaacaacctccacaccggagagcctgcggggcgacaagctccgggcgactcgccagcgacctctgcagcagcagcgatggtcctaggacggacgctacagctggaaggctctcgttcgcgtccccattcaagggacgcgaaccagacattaaagccaaagagccggaggagctagaagaagaggtggccaaccgactcgtgcgggaggtagagctccggctcacctcgctctccgcaacagcaaggatgatgaagatccttgaagctgagggcggggcacaggccgcagcccggctcgcttctccccaccatcgaactggtggtcaccgtcttgggtga

SEQ ID NO: 28774 - DNA, 1029 bp, Zea mays
  Peptide Sequence Number=SeqID_72149
atgaggtctgttcatcgccctccatctaatgcaaaaagattaactattgagtcaagtcaggaggtgttttctgttgacatttcaagacgcacaagatctagcagctcagcccaacatgctgataatccccataaccaacaacagattgatcctcatccattaccagttactcgtgtccgtagaaaggcgctagcttgtccgaaattgaatatccgttgcatcccgtatgatgtcattgtgtcaacttggataatgagtgatcgacatcgtgacactgttgctaggttgagatttcaaagtatatttgatttgcgtaccaatgcattagagagcatgtctctcataaggtggttgatggataagcttgatccagacgacatgacaatacgctcaggggctggtaaagaactcaagatcacaaaagagacggttcttctcatattgggtttgccaagcgctggaagtggcagggatttcactgattggtatggtcaagttgatgctgcttcaaaactgagacgagatctcaacatttgtaaagaagagtttgatgtcgttaagctacaggacaagctagttattgagaatgatgatgagttatccatcagatgtttttttctgattttattcaatcggcttctattcccatctgcttcatggggtattacgaacaacgaggtcctaatgacaacaaacatggaccggatggctgagattgattggtgtcaattagtatatactgatctgtgtgatgctgcgagtcgttggcacaacatgaacagaacaaacataactgcaacagtttatggatgttcactcattattcttatatattaccttgaccatttacaccaccctgcatcacctgagaacaagtatggtactccccgcatcaagtattttgacaacgagacaataagagatttggctaggggtgacagacgtggcccccgccaaactggagaaccatttggtcatgcagagatgttaaaattccaatacatgctaacagttataactgggatttaa

SEQ ID NO: 28775 - DNA, 498 bp, Zea mays
  Peptide Sequence Number=SeqID_72150
atggcggtcagacgggggattcttgcaaatggagataaaccacccactccctcatcgcccccgatatatgaccctgtatccacgcctcctgttcgatcccctgataatcagcatcacgatcagccaacccaggttcctactgatgataataaaatatccgaacgggaaggacaaaatcctgttgtacaagatcctcccacatatggtgccccaaagtttgacagaacctctctgacagaaggattcattgactgtattcgtgatgatgatcaattatacaatccagataccataatcaacacactcatactaaatgtcaatgttgggatcatggttcctatgctacgccgtagtcactggactctatatgcaatcaatttccagcttcgtcgcatatacattttggattcaaatccttatggtccatcacttggtggtactacctggaaacatatccacaatgatcaagtgatgataaatggaacaaaactaccttag

SEQ ID NO: 28776 - DNA, 156 bp, Zea mays
  Peptide Sequence Number=SeqID_72151
atggcgagcaagcggacccgtggcgattctgatgcccggcgacaaattaccggcggcccggagcgtaatgcccttcgtattccttatgcttcttcacaccgtggttctaatccgagtctgaagctcttgcctaccaacgctttcctggctttttag

SEQ ID NO: 28777 - DNA, 1002 bp, Zea mays
  Peptide Sequence Number=SeqID_72152
atgaccgcgtcaaaaaagcagggaccgggaaagggggataccccgaaaaggatccttccccgtgaaggaaccaggctccgagcctccctactgataagaggtttgaaggctggcccctcggaagggttcgacagccgcctcagatcacgtgggccctacacccactactggtcagaggttcgaaggccggcccctcggaagggttcaacgaccgcctcaggctactcgggctccgcgcccactactgatcaggggttcgaaggctggcccccgaaggaatcccatcagagggaggcatcgagccctctgaccccgtcgccaggggaccgggtccggcagatcacccgcagctcaccggagacaccatgttcggcgcccatcgagggcaacatggcgctttcccccctcctccttgcggaaaggcgacgcaggggcaggctcgggggctgctctcgcaaacccagctccggccaaaccgttgacagcgtcaacataccagcccgagaacttgggacccgaccgtacacccgggctacggccagctcacatgagggaacgaccagaccagcagaagcattacgcgaggcattaagacctcgaaggagtgaaaccactccttcgaggccttgggggctacagccggcgggtgcgctcgcgcgcacccaccggaacaaaacgcaaccgagaaaggctggtccccttgcaaaaaagtgcgacgaaagcctccaagcgagtgctaacactcccttcgaggctcgggggctactgtcggggaccataattaggggtaccctcaaggctcctaattctcagctgggctcggactcgggcaaagtcccggaagacggcgaactccgctccgcccgacccagggctcggactcgggctaagtcccggaagacggcgaactccgctccgcccaacccagggctcggactcgggcaaagtcccggaagacggcgaactccgctccgcccgacccagggctcggactcgggctaa

SEQ ID NO: 28778 - DNA, 630 bp, Zea mays
  Peptide Sequence Number=SeqID_72153
atgagtacatcagagctaataatgatttccggcaaaggagggaggaagcttacagatattctgagatggccaggggctttggaggatggctccacccaaggcatgtcagagcaatacacaatcccagccaaagtgaagacaaaggcaatcacaaccaaggacaccaacacagttcctagtcaactaggacgcagcaaagctccttcagaccaccagccccaagaggcagagggggatgaagcttcggaggaagattcaactcacaagcaagaaggttgttctgcttgttctgtggagaggataaggggcacacaactaggacctgctaagttacaatacggcgctgcgcgcgggaaagtcgggtggacgctacggatagcgctcgagtttgacgagttgcttgggcctgagcctgcttccttctcacgtcgacccatcccgctagtagtcctcccctggcccacaaagggatggccttgcgagataataggcccaaagcctctcgtgaggccttcttgccttctagtggacccgggggatatctgtcccccaaaagcccccaaacttggagttgattttgaaataatcagcccaaagattctaggtccagctcgcgagtttgtggcttga

SEQ ID NO: 28779 - DNA, 90 bp, Zea mays
  Peptide Sequence Number=SeqID_72154
atggcgtcgcgctcctctcgctcccaaatctaccagctaataaatgatagattctatgtctttttaggccagatgaagtacttcatataa

SEQ ID NO: 28780 - DNA, 489 bp, Zea mays
  Peptide Sequence Number=SeqID_72155
atgacggtggacggcgactcacagagctccgacgagctcgtgtaccggccaaatcgctccacgactgacgtcctactttggccgaagccaaattcaagacctaccaatggtttcccctcacttaatttcacaaatggctacccggtttgctctggccacgccctcaccggcgatgatcagacgaccaaagtgagtcatggcgatgtggtgaatgtgcctaggtatgtggcgcaaggccgtgaagcagctgtcaccgacgagctcatccaaagcggtcgtggcaaaacttggtatggtggccgggaggacatcgagcaggccatcctctccgactcaccagtcatcgtcatcatgcccaccttccctaatcgacaaacacctcaaacagttgttgtgactctccaccgccatgcacatctggagacatcagggcaagagaacaccatgggagaggaggaggagacatcaccgtcggtgatgtctagctaa

SEQ ID NO: 28781 - DNA, 264 bp, Zea mays
  Peptide Sequence Number=SeqID_72156
atggccatgatgggttcaacatcggaaaagatgtacctctgccaggtaccaaactttgggtttgaaatgattaagctgagaccgggcgggcaaacctcaccgcgccgccgccccgtggccaacgccaaccgcgccgtcgccatcgtccttcgcggtcctccgcggtcgccggtcgtcctccaccgcaaggccgcccaagctcggctcgcctccgtgccggcctgcgtctcctcgatcatcaccaccttgacgatctccgtgaag

SEQ ID NO: 28782 - DNA, 828 bp, Zea mays
  Peptide Sequence Number=SeqID_72157
atgtcacacaactgtggagggacatgctggttggcaccttgcaagagtttcaccaaatcaccagcatgtttccactcttgtttagagaaaaaggtctacgagactccagtaacgccagctgtttctgttcgaatcattgacgatgacatgccccttgctcaatttgctgttgctttcaatggagcatcatgggtagatcctgattctgttgcactgatggttatgcaatcaatgcttggttcatggaacaagagtgctggtggaggaaagcacatgggtgtgtacaggcctgatcctcattttccatattctgttactgaccatatctttgctatgttaccctgctttactgtttacaattcggagcttgtacagaaagcagcaatcaatgacattgctgagagtgtaatgtcattcaacatgaattacaaggacactggtctttttggtgtctatgctgttgctaaggctgattgcttggatgatttggcttttgcaattatgcatgagatgagcaaattgtcataccgggttacggaggaagatgttatccgtgcacgtaatcagctgaagtcctcaatccaactccaccttgatggttcaactgctgttgtcgatgacattggccgccagctgctgacctatggacgaagaattcctaccccagagctttttgcaagaatagatgatgttgatgcaagcactgtgaagcgtgttgcaaaccgcttcatctttgatcaggatgttgctattgctgcgatgggaccgatccaaggacttccagactacaactggttcagacgccggacctacatgctccgttactaa

SEQ ID NO: 28783 - DNA, 453 bp, Zea mays
  Peptide Sequence Number=SeqID_72158
atggcggtgctggtcgaggtcaacgcggcggacgctggtgacgaggtaggagacgtaggtggtcgcggattcggggacgaacgaggcgggcggctacggggccatcagcgtggtcagccgcctcctcatcccggtcccgttcgaccagccgccgccggattcggggacgaggtgctggcccgccagatcgacgccggcaagggcgtaggccgccccgcgggcgtgctcatcaacgacaagggcggcaaggacctggaggccgtgcctgccttcaccttcgaggccggcaaaacgtaccgcctccgcgtctgcaacaccgggatcaaggcgtcgctcaacttccgcatccagcgcagatctcacctaccttctagccgggtcggagacagtgaggagggcgtactcggaggccgccaccgcgtggatctcggcgatgcggaggaggacgggtag

SEQ ID NO: 28784 - DNA, 162 bp, Zea mays
  Peptide Sequence Number=SeqID_72159
atggtgggtacaagtgcggtcactgcacgacggcagccggggtcagtggagcattgtaccgtgcaggatttggttgatggtgcgacttggcctaccaccctgccaccgggttggacggtcgagtgggatgttgcttcggcaggagaggagcatgaggagtag

SEQ ID NO: 28785 - DNA, 159 bp, Zea mays
  Peptide Sequence Number=SeqID_72160
atggccgaagctctggcggcaacggcgagcggaattgagctcgccggagctaaggaaaggatgtgttcaagggaatttggcacgactttgatatttggatctcttggctttgaggttcgaaaaacagagaacacagatgatctttgggaagaggtctaa

SEQ ID NO: 28786 - DNA, 924 bp, Zea mays
  Peptide Sequence Number=SeqID_72161
atgacgactggcagctggttgtgcgtagaaagagagctcgtggtgtgcattttcctcatcaaggatcccaagtggatctctgaggctgcggcaaagtgcacctccctcccggagggtgcaaagaagcaggtggtgtggcaacgtttgaacaacatcgaggagtgcccccagtatcaggaaccaccccgccataagatatcagtatggaagcaccttgctgcatcgcatgatcaggcaacgttggaggcaaacacggaggaagacaagaagatgtgttctcggcccatgcagaaaaaggtgttccaagcacgggaaaggatgaagacacgacaaccaaggttatcaatgaaggaagcctctgaggggaccccatttaactttgatgctcaagagatggtcagatttgctcatgcatcttcatcatcgatggccgagttggttgatgttaaattaacaggcatccctgaacatgcctgggaacctgatgatgatgaccctgatgatcaagacccccagcaacgacggatgggagccgaggagaaccttgggcagggagcatggatttttcctcagtcactattatgggcgggagctgaggagagccttggggagggagcttggtttttgcctcttcctgatgctgctgggacgctggagagtttgtgccatggctcgccccaccaggatccttatgatgaaacattaacctttgatgggtcgctgggctcgcttggtccatcttcaccccatcacaattccttggatgggctgctggagatggccaacctaaactcaccccatcatctctctctaattttaaaggacactatgaaagggacgctaggcctgaataggctctcttcgccccctcaggcccagcctaaggcaacactggagaggcttgtttcttggctcgccccatag

SEQ ID NO: 28787 - DNA, 159 bp, Zea mays
  Peptide Sequence Number=SeqID_72162
atggccgaagctctggcggcaacggcgggcggaattgagctcgccggagctaaggaaaggatgtgttcaagggaatttggcacgactttgatatttggatctcctggctttgaggttcgaaaaacagagaacacagatgatctttgggaagaggtctga

SEQ ID NO: 28788 - DNA, 249 bp, Zea mays
  Peptide Sequence Number=SeqID_72163
atggtcgtgatgggttcaacatctgaaaagatgtacctctgccaggaccgaaccgatgtaggcttgatgatcgaggaccttttaactggccacatgcctcgtcatgcaatgggagttggaccatctggagcagctaatggaggacctgatggggagttggacctttttggagcccctccttccatgaacctcgctgatgaacgttctcccgatgctggcagtggagcggccaaagacgaagataattag

SEQ ID NO: 28789 - DNA, 708 bp, Zea mays
  Peptide Sequence Number=SeqID_72164
atgatgcaaggggatgctaatgtcaaggtgcaggtttcggctagaacgactggaatggagactattggctcgtatggggagaatcggaccaattgctcaagctctagtgatttcctgaacagattaggtatcaggctagctgctctattatcgaatccatgcaccaaagtaaacaagaagacatcctctccactctcatctttggctattccccgaagaagtcgtagagtggctggtgttggagttgaatttaatatgcaggacctaggcaaaagagcaacaaaacagctatggcaaccttgcacattattagagaaactgagggcatcaatcaagaggctattgatgcatatgcaaagctattttcttgtcacacccggttttggaaggcaaaccaaatgcggaccattaacagaaatatccctgggttcagtccccctcgccgctgattattcgcgtgcccggattcgcaccggtcgccgtgattcgtgtctggaatgcagtggatatccatggggagagaacgaggaagaagtagtggttgaagaagaaggagctacaccaccaccaccacctgaagacccacctgtcgggaactgcttttattttgacatttgtggagcagaacccgactctcctactactcaaggcaagccccgatgcatttgccacctccttgctattttaaaatctttctcacttgcttga

SEQ ID NO: 28790 - DNA, 78 bp, Zea mays
  Peptide Sequence Number=SeqID_72165
atggctttaatcaccaaaagctttcgccaaattctcaagcaaaggaaggggagtgactacaagtcccgtttcaagaag

SEQ ID NO: 28791 - DNA, 459 bp, Zea mays
  Peptide Sequence Number=SeqID_72166
atggccggatcatccgggtacaacaccggacaatttggccctgtcgcggaccgtccggatatgtcgtggaccgtccggtaccttatgtcggaccgtctggatatgtcgcggactgtcagtgctccctgcagtgctcgtgctccccatttccacttcctgccgcggtgccgacgaccactcgcccacaggctgcagtgcgctactgcgctacctgctccggtgccggtgctccctgatgctgcctgcttccaggcggtgatgcggacgatgcagccagccggccacgcgcccacggcccacctgctggctgctgcagtgctgctcggcttcctccagcaacaacagatcggcggggatttttccccattgggtccccgtatacccgacggggacgggtacggggaaaaaatctccccgcgggcggggacggggacggggaacgaggaattttatttttga

SEQ ID NO: 28792 - DNA, 423 bp, Zea mays
  Peptide Sequence Number=SeqID_72167
atgaccgagcagggagagagcagcgaggcgaagaccaccagcgaggtggctgggggctgcaactgctccggcgacgggcggtgccgacggagctgcatagggcggggagagggctgccagccggcggtattgcacggggcgagggctgcacggggcaggggcgcgacggctgggatggatatgttcagggctgcgcaccaacgggatgggactgcgcgtgcgctggctggaacggaccgtgcgccgtcggtagggacccgcgaaagagacaacggcagcatggagatggtctcgacggggcggatccggtgggtctggatgcccgacggcgtggggaggcgcgacagcgcgatggccagcaggtggcgcgactactggcttgacctgcagcgccacgcgcgacctctagcgggtggatggtga

SEQ ID NO: 28793 - DNA, 435 bp, Zea mays
  Peptide Sequence Number=SeqID_72168
atggcgtgcgctggaggctggttcgtggtgagcagtggattggcggggtcgcaaaactccgatgatggattctctaacgctataactcccccggagctcgcggatcccacaggcgcacacagggcaccctgtggatggccctcgacctcttcaaatgacccccgcgacggtatcttcgaactcgagtcggtattacagcaggagaagcccagaataatacgaaggttgatacagcgccgaagatgtgaacagtattcccgtactgttcacgctgatttggcatctgcttttgcgtcacacttgtactttcatcttcttccaagctgtacgtccttcataaccttcgtccaaaaactattatatcctaatggaaataatgcttcgaaggacgaaggactttaccgattaacattttctgtgttgccttgttcttaa

SEQ ID NO: 28794 - DNA, 246 bp, Zea mays
  Peptide Sequence Number=SeqID_72169
atgaaggtgatggtagtagcaaaagcatgggatgagactgttggcaccgatccgggcgccaaacacgggaacagaccgcctggcaaggctctccgcggaggcacggacagtccgtggcacagggccggacggtccacgacctggcgcaggagcgactcctcctttgcacacttccggacagtccgcgcctggggccggacggtccgcgatagcacagaggatcttcttctccgtgaagaaccctag

SEQ ID NO: 28795 - DNA, 195 bp, Zea mays
  Peptide Sequence Number=SeqID_72170
atggataacggtcagttggcggagtccgaaagagttgcagatgaagaccctgagaagcagtcggttggtggtgacgaggatgatggttttggttatgactatggtaatggttgtccgcgttgcaaccactgctcaggtgaagatgaagtcgtggaggaggacttccaggagttccaagagtacgatgagttctag

SEQ ID NO: 28796 - DNA, 135 bp, Zea mays
  Peptide Sequence Number=SeqID_72171
atggtttgttcggattgggacggtggatttttgactctcgtctctccatctgtttccgcaggggaatcagatatgccacaggctgcacgatggtgttgcgcttgcttgggtttgggtacaccctcgttgacgtga

SEQ ID NO: 28797 - DNA, 288 bp, Zea mays
  Peptide Sequence Number=SeqID_72172
atgggataccgaactttccagtttggattaccgtttagactttcagagatactaaaattgagaaaccagggaaataaaaacattgctgactttgttagactatttataataaaacagttcctttggcgctttgaaccattgcccattccttttcatgggttgcatcttctaccagagcaggcttattctgatgcgtcgcaaagtgcagaggtcgtcaaagacagagatcagctcaccaagcacgaactaccatcgcctccaaagaagtattcgtttttgcaagcataa

SEQ ID NO: 28798 - DNA, 834 bp, Zea mays
  Peptide Sequence Number=SeqID_72173
atgacgtgtgggacccagcccccgcgccgtgggggggagaatcttggagcgtgttggagaagactcaacccgcaacggttgaggacgcaagtggagagagtcgcccttaaaaggggggcgacccccttggagggccaccatgtcttcgcgctcccctcatgcatcgtgtctttccaccttctgagcccctgggcgggggacgcccggaacccttccgtcttgtcatcggaggaacgcaactttgtagaagttggtacctttcagccatcgttcggcttcaaggattttcatcatgcagcccggctgcacccctctgccggcggtcacccaagacgcatccgccctgaggtcatcgctgctgctagtcggccccccggagcagaagtcgtcgtcgtcgccgctgctggggcgagcgacgacaagccgttcgtcggtcttctgttgctccgcaggcccccccgcactaagactcgccttgttgattatctgaaccgcttcaccgagcgtgagttgcctcgtgcgaaggagacgagtgagagtgggggccctccgaccccgtcgccattcgaggctaggtcagaccccgccgaaggtgtagttgatgccgagggtgctgctgcccccttcggctgtcgacgtccaagcctgcaggatcagtatccggactcatttgtcggtaacagaattgtttgcgcgggcgagagttgcttttcacggaaggcgatgagtgagaaggtgatgagtgaggaaaattttgacgcagagggggttgccccccttctagcccccgagggagggtcgggcttttccgaggcaaggctgacccttccttga

SEQ ID NO: 28799 - DNA, 1323 bp, Zea mays
  Peptide Sequence Number=SeqID_72174
atgaggcatgcatcgcagcagctgaagcatgcggccgacttcgccgaccatgttgcgtcgggtgccttgacttcggagtttgctgccaaaatcgagcgtcttcgggcgcagcatacagatgctgttcgggagaagtcggctgcggaaaacaaaagccgcaggctgacggagaggttggatgctgcggaggccgagaagggggatctccggtgtcagttggcggaggagaggagggatgcgaacaaagccattgccgatgcgcaggctgctcaagccgaggccaaacttgcgcgggcggaggccagtatcgcccgccaacgcgccgaggagctagaggcgaggctcggcggcctgcacaaccgcgtggacaaaatcgaggcctcgacgcgcgcggaggttgagcggacgcatgcgcatttcgtggacgcgtaccgagagctgggtgcgcggaccgccgccttcgaagtgcccgaccaagaggtgggcctctgcttccttgagtggctacaggaggagctgggggtgctcccgacaatcgtgatgggcctcatgtcctttgcctccctcgtcacctgcgagggggccgtgaatgctttgtcccgcgaggggtgcgggcacttcgaggtcttcgaccagtcggacgaaggcttcgaacgcgaaatcttccaggtcaaggacccggtgctgaagcggtcggcgggggcgctcttcgacaggatgtggggccctcacggccgagagacggtccgggagaggtccgaccgggcgattgatcagatggcgcatgacaaagatgttgaggaccttggtgatctggacagcacgctgcccgaggcatcgggggtggagctagcgctgccatacgatgcgggcaagggcccctcggcgacccccgcgctgaccgcgttgactggagctggcgaagaccccatgccagcccctgcgctgacgggtgaggacgcctcgaaggcaatgggcgaaccagctgccgaagaccccgcggcggcggcccggcctttgcaggttccggcgtttgggcctgcgcaagcaaccgcggctaacaatactaattttgtggcggcctcaaccatagtgcctgccgatgatagtttgtttggctctgtgtctgagtgttttgagtctgatggtgaatctgggagttcgtttccttggacggaggagtcctcagatgaaggcttggattactttgctgcgttggatgtggctgcggcggagacttcgccgcatgtggagggtgccagggatcttcctagtgcgagtacaagggagatgggtatcatcccgaaggttgagccgatgtaa

SEQ ID NO: 28800 - DNA, 408 bp, Zea mays
  Peptide Sequence Number=SeqID_72175
atgggcaagaacaacaagcgcaagcgtgagccgactcctccatcggaggagtttggtgactcggaatactcagaggaggagttcccctctgagtccgagggatctccggctcccatcccccaggggcttgcggcggaggtctggacgtacatccgggccgtcgagcgctccgggctcgagggctcggatgagtctgagttctcctcggatgaggaggactcggacggtggcgaggacgaagatgatgacgacgacgacggcgacgacgacgacggtggtgacggagacggtgatggcggcaacggcggcggaggcagaggcggcaagggcagcaccagaggcggccgcagcacgggcagcaccagaggcggcggcggcaagggcagcagcggcaaggccagtggctaa

SEQ ID NO: 28801 - DNA, 153 bp, Zea mays
  Peptide Sequence Number=SeqID_72176
atggcgcaccggacagtccggtgcgccaccgggaagacactgccgtggaccagcctggccccacctggcagagggtgcaccggacagtccggtgcacaccggacagtccggtgcacaccggacagtccggtgcccctaagccagaaaccctaa

SEQ ID NO: 28802 - DNA, 540 bp, Zea mays
  Peptide Sequence Number=SeqID_72177
atggggggctcggagcccggttccttcgcggagaaggatccctttcggggtgaagcgccgcgcgctccttcttgccagaggcgccgcgtgtcccgccgcggagttaatgcgacggggcgagtggttggcgaggcgcccgttgcgcgcgtgcgatccagttcgaggaacgggtcacgggtgcaccgtctccacgccgtgagaggaggctctctttctgtctcaggatgggacgtgagcatggctgacgacgtgaccgctgcacccgccctctctgccaccgctatcactgccggcccactttcggtcgctttgaccgacgcgccagcaactggtgcgccggttgctcgacgcgtgggcctgggttcccaagctggcgtgtcggaagtcggagaagcgcgtccatctggcacggttgcataccgcctgcatggctgcccgccccttctgcccgttggtctgggcggaaatggggggtcgcctgggagggccttggagcgtgttggagaagactcagcccgcggcgtctgggggcgcccgtag

SEQ ID NO: 28803 - DNA, 555 bp, Zea mays
  Peptide Sequence Number=SeqID_72178
atggccgtgagctcacctcgccgagcgctcatcgcggccgtgtccctctgcttccttctcggcgctgcgagcagcgtccgcaccgcgacgttttccccttctcagcagcagaacctggcggaggacaagtcgcggctggggtcgacgccgccgagctgccgcaaccggtgcagcgcctgcaacccctgcatgcccgtccaggtgaccaccgtgcccgggctcggccgcggcgcccgcgccaccgacgtcgacgacgacacggtggcggtggcggccggcttctcgcgctactccaactacaagccgctggggtggaaatgccgctgcgacggccgccttgaggtgtctcccccgcgcccacccgtccgtatgggactgggaggggcgctttggaggcagctgaatgggcgtgttgctcttgtcgggctcagctctggtggggacgacgacgatgcagctgccgctcatcccatccgggctcacggccctgaacgtatgtcggcttgggtccttccagagcccacgctccacacctttctgtgccactacggttga

SEQ ID NO: 28804 - DNA, 927 bp, Zea mays
  Peptide Sequence Number=SeqID_72179
atgccggagtccggcgagagagagatgggaatcccgcggccttcgtgttcgtcccgcgcccaggtcgggcgtaaggagaggatccaggtgtacaatgggggtgtagcagagtgctacgtgtctagcgggggagagctagcgcccctaagtacacgccaatgtgttattcggagagatcttggcacccagctggtgtggtgtcgtggttgccaaaggagcgacggagcctggcggagggacaactgtcggagcggttgggtccttgctgacgtcccccctgcttccgtaagggagctaatagccgccgtcgtcacggggctagcggggcgccatcattgcctatctggcggagccagccagatgggacaccggtcttgttctctgcggcccgagtccgctcggggcagggtgatgatggcgcttcccgttgacgtggcgggcctgtgccctaggtcgggcgacgtggaggctcctccgaagccgaggtcgagtctgtccttcatggccgaggccgagtccgagccctttggtcgggcaaggcggagagttcgtcgtcttctggggctgagcccgagtccgagccctgggtcgggcgaagcggagttcgtcgtcttccggggccttagcccgagtccgagccctgggtcgggcgaagcggagttcgtcgtcttccggggccttagcccgagtccgagccctgggtcgggcgaagcggagttcgtcgtcttccggggccttagcccgagtccgagccctgggtcgggcgaagcggagttcgtcgtcttccggggccttagcccgagtccgagccctgggtcgggcggagcggagttcgccgtcttccggggccttagcccgagtccgagccctgggtcgggcggaacttcctatggcgcctttgacagggcctggcttcctttgcgttaa

SEQ ID NO: 28805 - DNA, 1047 bp, Zea mays
  Peptide Sequence Number=SeqID_72180
atgtcttctcgctcccttatgcaccgcgtctttccaccttccaagcccccggatgggggatgcccgccgtctctgtgcctcgtcgttggagggacgcaactccgtgggagttggtacctttcagccatcgttcggcttcaaggattttcatcacgcagcccggctgcacccctccaccggcggttacccaagacggtgacctccggcttgatgatgggggaaagcgagccgggctgcggcctctgcccctccctcagcctcaaggattttcatcaccagggctggggaggggagtatgccgagttgaggtcggcccccgcgtgggcggcacgtgcctggctttcggacgcgagtggcttcagagccgctcgcggcgccggcgtctgccacggcagctggaagaggttcttccgccggtgtgatagccaaggttggccacggaccgacctccaactctacggccttctgcccgtccttgcctctcgagttttgggcatgggtgggggcctcctggcagcagcatccgccctgagaacatcgctgctgctgttcggccccccgggacagaagtcttcatcgtcgccgctgctggggcgggcgacgacaagccgttcgtcggtcttctgttgctccgcaggcctctcccccgtcgagtggggttacttgtctgttgattatctgaaccgcttcaccaagcatgagtcgccccatgtcaaggtgacgagtgagccgggttgtccgtcagcgggaccgatgccggagttgatcagccaaggccccaggtcgggctggcgccctcgggagatggtcggccgaggacccaggggcaaccggccgagccgcctgcttgggccggattcccggagaagtccctggcagcgatcgcccgggcgtggtgatgacgtcgtccttcggagcggagaacctcggaccgcgtcgccgtccgaggctaggtcgggcctcgccggaggtgtcgtcgatgccgagggtgttgttgcccccttccagcgtcaagacccgagcctgcagggtcaaagtgtcttgtag

SEQ ID NO: 28806 - DNA, 183 bp, Zea mays
  Peptide Sequence Number=SeqID_72181
atgcccatggatgaacaaagagcaaatcttcaacaaagccaaggggctgtttcggtctggggcaccggactgtccggtggtgcaccggacagtgtccggtggtgcaccggacagtgtccggtgcgccaggctgcctcggccaaagaggccgctctcgggaattggctgacggcgttcggctaa

SEQ ID NO: 28807 - DNA, 507 bp, Zea mays
  Peptide Sequence Number=SeqID_72182
atgacgggtgctccctctggaatgtcagccatggtggtgaagttcagcctgccttgcctcacttgcaccttctgcctcttgccttggttttgggttggcattctgtccctgccgctgctggtttctggggcaattcttggcataatgtccggtgttaccacaagtgaaacacctgttgtcattggcctgacagtactgctgctgctgtggctgattgttcctctaaactggaaactggctgttggccctaactatgttgagacggtcacggagcttagtgctgagccccctcctgaacttgtccctcttattctcgtcggtgtctgcatgatattcggcatactggcacaggtcattgaaggcccatacatcagcatcaaggcggtcctctgccctggtgaacaacggtggctgggtactgaggaactcctgataagtggctgctgcggggtgacgctgatgatcaccaccaccatagtgctgaggtggtggctgacgctgagctag

SEQ ID NO: 28808 - DNA, 603 bp, Zea mays
  Peptide Sequence Number=SeqID_72183
atggcgagagtagcgtgtaccctccgtggcaagaggctggacggtggtgtatctgtgctctcggttggcgtgaacccgttggcttccagacatgaagggagcagcagcggcagcaacgatccaatcggagacttggaagctaaagtggaacagcttcagacagagctacgtcaccgaaatagggtgtgggcacaagacggtcagcgtatagctgagttggcagctgatgtcagacgcttgcaagacgagctttctgaatgggatctcgcggttgattgggccgtcaagtcacgttcgattgcttgggaccgcgaagcgaaagctcgagctcgggtgactgagcttagtgcggcccttgacaatctgcaagtatactccaatactttacatgaggacgtgcatgtactgtatgctcgactacacccagacgtgcctttcgatgctgctatgggagccggaccgtcaggaacaacaaacgaaggacatgacgaggagttggacctttttcagccccctccttccatgaaccttgctgacgaacggtctcctgtggcaggaaatgcagcagcaaaggataacgaagactataataggatagtttag

SEQ ID NO: 28809 - DNA, 318 bp, Zea mays
  Peptide Sequence Number=SeqID_72184
atggtgggcgctaatgttggagacttgttctcaaatgttgtatgtcaagaacaaggcaactcaattgttaattattatggaccttcgtcttccgaagcatcatctccgcatgggtataatgctcatcagacgaaggtcttcgtcttgagaaacttcggcagaagaagggaagacttctgtatcatttcaccgaaggtgttttttgtcttgaggaccttcggcggagaagaagacccccaacagtacatttggtgctcaagaggagatgcaggcaacatgcaggactttgaggagttccaggacttcgacgacttctag

SEQ ID NO: 28810 - DNA, 1237 bp, Zea mays
  Peptide Sequence Number=SeqID_72185
atgatccgccacgctggcaacagcggcacccgcgaagtggttctcgggatggcgcaccgtggtcgtctgaacgtgctggtgaacgtgctgggtaaaaaaccgcaagacttgttcgacgagttcgccggtaaacataaagaacacctcggcacgggtgacgtgaaataccacatgggcttctcgtctgacttccagaccgatggcggcctggtgcacctggcgctggcgtttaacccgtctcaccttgagattgtaagcccggtagttatcggttctgttcgtgcccgtctggacagacttgatgagccgagcagcaacaaagtgctgccaatcaccatccacggtgacgccgcagtgaccgggcagggcgtggttcaggaaaccctgaacatgtcgaaagcgcgtggttatgaagttggcggtacggtacgtatcgttatcaacaaccaggttggtttcaccacctctaatccgctggatgcccgttctacgccgtactgtactgatatcggaaaaagtggcgacgctggaagatgccccgagatggttaacctgtaccgcgatgcgctggatgctggcgattgcgtagtggcagagtggcgtccgatgaacatgcactctttcacctggtcgccgtacctcaaccacgaatgggacgaagagtacccgaacaaagttgagatgaagcgcctgcaggagctggcgaaacgcatcagcacggtgccggaagcagttgaaatgcagtctcgcgttgccaagatttatggcgatcgccaggcgatggctgccggtgagaaactgttcgactggggcggtgcggaaaacctcgcttacgccacgctggttgatgaaggcattccggttcgcctgtcgggtgaagactccggtcgcggtaccttcttccaccgccacgcggtgatccacaaccagtctaacggttccacttacacgccgctgcaacatatccataacgggcagggcgcgttccgtgtctgggactccgtactgtctgaagaagcagtgctggcgtttgaatatggttatgccaccgcagaaccacgcactctgaccatctgggaagcgcagttcggtgacttcgccaacggtgcgcaggtggttatcgaccagttcatctcctctggcgaacagaaatggggccggatgtgtggtctggtgatgttgctgccgccccgtttggtcgggcaggggccggagcactcctccgcgcgtctggaac

SEQ ID NO: 28811 - DNA, 1005 bp, Zea mays
  Peptide Sequence Number=SeqID_72186
atgggcagaggcaacgggcacacgtgttcgaccgtggctgacacctccggttcacgcccgttcgcgcaccgcgcctcccagccggacttcaccggaggctcgagatcgacctcaccggacttcggtcttccgccgccgcgcgtggacagagctaaccggccggactcctcgccgccgataagcatccccgcctgcgcacgtggaccggccaactccgaccatccccgacggcgacccgcacaccgttgtgatccccgagacctcccctacgtcctcgaccgcttcaccggagcaatctcgccgccgatgaattcacccacccccgccagtggaggagactctcgtttcagttctgacttcctttctcgcgatggctttccctccatcttgtgggaagtgcttaactccgccggttaccctacgccccctttgtacacggtgcagttgtatgaggagcatcgggtacctcgttgtcgggtctggctgactttggaggctcatccccttcagccgggttggcgttctcttgattctgagacgattggactcaggacggacgacaccgttgaagcagcagccatgaagactctgacgactttctgtggctaccatcccctggagatggtgatgcaccccttgggactcttccctgctgagaagaaggatgatcccatgtggtgtaaccgcgtgagccatgtgaaggatgtgtgggcgatgtatcctgacttggttgggagggtcactgttcagtgcatgagtgcgctgttgaaagggaaatgtgcccttgggccatttctaagtattttggtgattgagtgccaacacaagtgcttaaatgtgaatctatgcccatggatgaacaaagtgcaaatcaagagtaaagccaagactcagctctgtctggcacaccggactgtccggtggtgcaccgaacagtgtccggtgcgccaggctggctcgggcgaagtggccgctctcgggaattcaccggcgacgtacggctaa

SEQ ID NO: 28812 - DNA, 378 bp, Zea mays
  Peptide Sequence Number=SeqID_72187
atgaggaaatgggcaaggcctagcccactactcctcgtgctcctctcctgccggagcaacatcccactcgaccgtccaacccggtggcagggtggtaggccaagtcacaccatcaaccatttcctgaatggtacctgcaaaaattatgccacaagcaaggctgagtatactaatactcagctagacttaaccgtgaccgcacttgtacccaccatagctagcatgggagacccagtctcaggtcgcatgagggataaagtccgcgtccggcttcaatcagaatttacaactttgaaggtgtatgatctacttgagttaaacaaggttgactttacttatgtgagacctttgggtggaatacttggtaaattgggttaa

SEQ ID NO: 28813 - DNA, 435 bp, Zea mays
  Peptide Sequence Number=SeqID_72188
atgaaggtgatgcttgccgaaagtgttcaagactcaaaaaatggaagtgggttcaccggagagaaggatctgcaggtggagaggctgagccagcgcatcaccaccttggagcagcaggtggagatccgagataacactattgatgtcttggagaaccagcttcacgatgtgcagagggaactcgaagaagcaaacgaccacttggacatgcaccacctggagatggaggccaatgaagcaggaagcgagggagaagaggctcccggggagctaggaccagcccctggtgccaatgggactacctccgcgatgcctccttcacacctaggcagcgtcgcgggcataacgagcaggttcccccgccacctccccccagctcccacagtgcaggagctgatggcccagcagaatgagattctgcgacagctcttgtag

SEQ ID NO: 28814 - DNA, 1234 bp, Zea mays
  Peptide Sequence Number=SeqID_72189
atggaagaaacacacctccacgtgttcgacgccttctgcccgcgccagagcatgctcacgcgcgcccccgcatgcccagcgccgcgcccgagccaagccagcgccatggcccgcgcccgcgcttataaaaccctcccagacttagattgtacccttccacgcaccctcaaacctcaccggagtctagctcgtcgccgtttgcccgtgcgcagcgagtccgcggccgcccaatccctctgccaccgtagaccggccagtggagccattcccaactccgtccagccctcggagaagactgtgcacacctccgtgaggctccccgagcgaggaatcggagtttgcttcgctggagaggccagtccacgctcgccggagctctcaaccccgccggagtacgtggaccgggtaaaccactccaccatccttcgattccttgtgcacacggtcgctccgttacctcgtgaagctcaccatgccctcggattgaaccagttcgccgtggtttggccggtatactcgccgccgacgaggacacccgcctgcacgcgtggaccgggcaattccggccatctccgacgtcaagccgtacctcgacgtgaccgccagagtctccccgagccaaccccacccttcgccggacctccctcgccgccgggggccgggtacgcgacaccccctcagtacgcggtgcagcagttcgagaagcaccgagtgcctcgctgtagggtgaggatgactttggagcctcatcccctgcagccaggctggcgctctttggattccgagtctttcggataccgagcagaggacacgatcgaggcgatcgctctgcatggattgactactttctgcgggttccatcctttggagctggctacccaccctattggtttgttccccgctgagagggaggacgacccaatgtggaaggatcgggtggagcatgccaaggacatctgggccatctacccaggacagactgcgcacttgacagtacggtgcatgaatgctctgtaccgtctgcaggtggagcagctatccactgatattcaggagttggaggagctggtaggcaccagggagaacaccatcgaggttctagaggatcagctcattaacactcagcagcagcttgctgaggctaacgagcacctggacatgcatcaccaggagatccaggaccaagaggcaaacgaggacgtcgacattgagggaggagatgagcctgcctcca

SEQ ID NO: 28815 - DNA, 512 bp, Zea mays
  Peptide Sequence Number=SeqID_72190
atggcacccaagagagctagctcgaaggcagccccatccgttgacgaatcagcgaaggcagcgctgttggctgagaaaaagggcaaggcccttgtcgacaccatccaccaagaaacatgcgaagacgacgcactcagcaagaggcagcgcaatgaacaacccactcccgaaggtagtctccgcacctacagcttcggaggacaaccgcaacttcccccaggcttcgctccaccgaagggcgcagacgccactgaggacggtgaggtcatcggtgtctcagcagaagaacagctacagctacgggccttgcgcatcaagaactgcaacctccaaaagcagaaggagatcctcgaggccaagcgccaacgtgtctcccgcaggccaagcgcggacccgtcatcccgcacgccgcagcattccaaggtgtcaactaccttgacgagcgaagtcccctggcgccgcacctgcaagtgtcaccatggtccgccaacttcaggcagaacctaccccaa

SEQ ID NO: 28816 - DNA, 660 bp, Zea mays
  Peptide Sequence Number=SeqID_72191
atgtcttcttgctcccttatgcatcgcgtctttccaccttccaagcccccggatgggggatacccgccgtcttttcgcctcatcgttggaggaacgcaactccgtgggagttggtacctttcagccatcgttcggcttcaaggattttcatcagccagcccggctgtacccccccgccggcggtcacccgagacggtgaccaccagctcctgggtggggagaagcaagacgggctgcgatcttggtcccaccctcagcttcaaggatgttcatcatcctcgctggggtgggggccgggctgagccggcgctctacctcccgcgcgggttcgtgggtcaccctctcccgcggcgttcgagggagagggcgctcactggccctgcgggcggcccggacttcgacaacgcggggctggtcgacggcggacgtcgtcacctccagcgtgtcgggctcgtcggcttggctcccggcggccccttctgccggagggcggctgccgcgccacgtgcacgggaggaccgctccagatgccgcgcgctgctagggcggcgttcgtgttctgggggtggtcctgcctttgcaccggcgtggcatcttcacgcggaggccggcgccccactcgtccgggaggatttgagtggggatctgctggagggctga

SEQ ID NO: 28817 - DNA, 696 bp, Zea mays
  Peptide Sequence Number=SeqID_72192
atgaattggagtcagactttaggagattatgggaagaatttcgctcttccagctctgaaaaggttagtagaaggacatgttttttcttttgttattggaagagcttttgttactgatgtggagaaactaagaatccacagcaaaggaagactgctgcgtgtggctgatgttattggcttcttttcggatatcacagagcttggtatatgtccaggatcaaatttgttgtacgcagtcgaagtgcttgtgactgagggatggtattgtttcccttcacacaatttagctccatcgccatgcaatgcagggtcatgtttctctgctgcatcaatagttgctaaatatattaagttcataactggacaggtccttggtcttcttcttgcaaatgacaatggggcttctggaaaatacatcaggaagcaccagctgatagtcactggtgacatgtcaggtccatggtttgtgctcggatcagatccatggtttgtgctcggatctgatccatggttggttctccacagatctagagccgtggagttagaacaccaccgtaggcggcggtggggtggcgccctcctcctcgagctttgtcggcggtggctgccaggccttgtggcgctccgcatcggggaagaagcgggtcgtcgatggcggtgcgcggcccgccttgatgctgcttcccccgtctgctga

SEQ ID NO: 28818 - DNA, 549 bp, Zea mays
  Peptide Sequence Number=SeqID_72193
atggcacaccggacagtgtctggtgcaccaggcccgtacgcaatcaaaccagccactctcgtgaattcgctgggcgcgctcttctataattcactagattgcccggtgccaaaggttcacaataagccaataaaaagaccaaagaagggttcaaacaaagagagcaaaagacaacctgaaggcaccctggtctggcgcaccggactgtccgactgtccggtgtcacaccagactgtccggtgtgccagcggagcaacggctacttcgcgtgcaacggtcaactgcaacgcatttaatgcgcgcctgcgcgtgcagaggacagagcacgcgcagttggcgcaccggacagtctacaggacctgtccggtgcaccaccagacagcccagaggccccacaagtcagagctccaatggtcgaaccccaacggctggctgacgtggctagcgcaccggacagtgtccgatcacgccaagaaggagatggtgatcggcgagaagcccggcacaagccacgggaaagctccatccgggagtccaccaacaaggtga

SEQ ID NO: 28819 - DNA, 97 bp, Zea mays
  Peptide Sequence Number=SeqID_72194
ctcgcgattcgttttcgagcttcgagggatcgaaggtcaagcgttggcgaccatgtgatcaagctctctgagttctatgaggctgaagatcctgacc

SEQ ID NO: 28820 - DNA, 258 bp, Zea mays
  Peptide Sequence Number=SeqID_72195
atggctaccgcccgggggatcgatccctttttaaaggcggctctccccactcgcattccaagcgtcacgggcaaagtctccaccgacgagctccagggttcccaccctctgccgcgggggctgggtcccacatgtcatgggagcgggccggaaacagaagaagccaaaccgctgcacacgaagcagggaccgggaaaggggatatttcataaaggatccttctccgcgaaggaagcgggccccgagccctcctactga

SEQ ID NO: 28821 - DNA, 1458 bp, Zea mays
  Peptide Sequence Number=SeqID_72196
atgaagccgaaagggtgcacaaccgtggtgcggttgcacgcctcctgcatggcggtccgccctttcgcccgctgcccccgcggcagagggtgggaaccctggagctcgtcggtggagactttgcccgtgacgcttggaatgcgagtggggagagccgcctttaaaaagggatcgatcccccgggcggagcgcgaccttgtggtggttggcgcccttcagccatcgctcggcttcaaggattttcatcatccgggctggggaggagggcggggcgagttgggccctacctccgcgtgggccggcgacccgcttctttctccggcattcaggggaagggcatcctccagctctgcggaggaggcgttctccagccatgcggggaaaggcaaactgctgctgcctggccagggtgcagctatcggtcctccacccgggcgatggtcgtcccgcgcgcgggcccacccacgtccaggtttccctgcaccggggggtcgcacaacacgctgtacgccgcgagggcggtactcgtgttctgggacggtcccgttctcgttcttgtggcaagaacgggagtgcctgccggtgcactttggggcggccgccgctcactggtgcagtgttggtgggcaggtggttgctgtcgtcggtgctgaggcggtggtcgccataggtgaggctgtctctgctgaagaggttgcctccgccgacgagaccgtcagcgccacctgcgctccgggcctccggctctttggctttaatggctggttctcgtcccccatgaggggacgtgaacgagggtcttttagcagcagcgtttgccctgaggccatcactgcagctgtcttgccgcccgagacgaaggtcgttgtcgctgctgatgaagcggttgccggcgagccacctggagtttgttatcccgcaggccctctggccgaggaggtgcagcagcggcggctggagcttggccaggtcgtccgcgagcgggaccaatcccagagtcacaccgccgaggccgagagccgggctgaggtcctcgggggacaaccggctgaggctatggagcggctagccggggtgtctgctcgggccggaacccttgtggagaacctggtcgtgagggcccaagcacggtgctggcgtcctccttcgaggtggagatccttccgtccgagtcgccgtccgaggctgggccaggatctgccgagggtggaaacatcgccgagggtgctgctgctccccctgccgatgtccgaacctgcaggaacagtttgtctgaaagtccctcgtccgagcgtgagttacttttcgcagaaggtgatgagtgagtcgaaacggcacgaaagtcgttctggcagaaaagacttttccgaggaaaattttgatgcagagggggttcccccccttctagcccccgagggagggtcgggctttgccgaggcaaggctgatccttcattga

SEQ ID NO: 28822 - DNA, 420 bp, Zea mays
  Peptide Sequence Number=SeqID_72197
atgtcttctaaataccctggcacaaatattcaatgcagaacattgacagacaacatcatcgttggtgtgtcgaaaggattcgataagaagcttcagctagtgggcgtcgggtatcgtgcggcggtggagggcaacgatctcgtgatgaacctgggattctcccaccctgttcggatggccattcctgaaggcctggcggtcaaggtggaggagaacacaaggatcaccgtgagcggctatgacaagagcgcgatcggtcagtttgctgctaccataaagaagtggaggccacctgagccatacaagggaaaggccctgatcacaggtggtaatgaaatttggtgctggagttcggctggcgccaagggtctaggcctgttgacagctcaaattgaactccttaatggtttagttgtttag

SEQ ID NO: 28823 - DNA, 656 bp, Zea mays
  Peptide Sequence Number=SeqID_72198
atggcgcgtgctgaggaggtggaggacttcgggcgtctgaacagcgcgctgcccgaagcggaggccgacccggtgatggccgaggctaaagtctacccagcgtcgctcccggaaaccggcgaaggttcccatactgcccctgtgtctactgtgtctggtggaggctcgccggcagccaccgtgccgatggttcaggattttgggcctgcgcacgcaaccggtactgctaattttgtggcggcttcgaccgtggtcgccggaaatgaatcggatgggtctacgtctaagttttctgagtttgacgactctgggagttcggttttgtggacggaagagtcttcggatgaaggcttagattactttgcggccttggatgtggctgaggcggagacttctccgcgtgttacggatgctgaaattttgcctggtccgagtgttgggcgtaggcggcgaagggtggtggcgaagcgtagagtgagcgggtttgatggtggtcggcttcgtgtgggcagggctgataggcaggaattgttgtcctcgccggttggggcgagtatgggcgagggggagttgcgaaggctttttgagggtgaggagctgaggataatgctatttaactatagggagatggggatcattccgaaggttgagcctat

SEQ ID NO: 28824 - DNA, 585 bp, Zea mays
  Peptide Sequence Number=SeqID_72199
atggcgtcgggcgcccttacggcgggcgtggatgccgaagtcgagagacttcgggcgcatcacgcggacgccgtccgggaaaaatctgctgcggagagcaaaaaccgcaggctggcggaaaaggtggccgccttggagagcgagaggactgacctccggcgccagctggtggaggaaaggaaggaggccaatcaggccatcaccaaggcgcagacagcgcaggcggaggccaaattggcgagggcggaggagagtctcgccagccagcgcgccgaggaatgggaggcgcggttcaacgctctgcaggcccgcgtggagagggccgaggcttctactcgcatggaggttgagcggacgcgcaaacagctcgtggacttgtaccgcgagctaggtgcgcagactgctgacttcgaggtgcccgaccgagaggcgggccttcggttcctcgagtggctgcaagaggagttgcaagctctcccgaccatcgtggcaggcttcatatcgtatgcctccctcgtcacctgcgagggggctatgaatgcgctgtcccgcgaggggtgcagtcactatgaggtcttcgactga

SEQ ID NO: 28825 - DNA, 261 bp, Zea mays
  Peptide Sequence Number=SeqID_72200
atggagaaatatctcgtatttaatttattagactacaatcatggatcatcgctaataatagtcatcccacctctcccaaacggtatgaaaatgcataatatggaatgcacccgcatgactgcctgcaagagcactggaggaaagattcgcatcagtaacgaagagttcccaccacctccagccattgagcttgtggtagaagagggacctttgcacatcaccgtcaaggacaacccaaaagatgttgagtttgacgactag

SEQ ID NO: 28826 - DNA, 2010 bp, Zea mays
  Peptide Sequence Number=SeqID_72201
atggcctcccttccacgacggcgcgccgcactcctcgacctcctcccccacgagcacaacctcaaccgctccgccacttacgcacgcacgacctgcactacaccacgcggcgaggacggatggaagagccatggccaccagcacgatgaagctatcgccgtcgaagaaggcaagaatccttgctccgagctcgaaacccacatcgacatcggcgacaaggtgctgaccgagttcatcaccgagctcggccgcgactccacaaccgtcctcgagttcgacgccaagctcaaggagaagggcgccgacttccccgactacttcgtccgtacgctcctcaccatcatccacgccatcctccagcctactgcttccaaccctagctctgccaccatcgccgagggccctgctggcgcggagtcggccaaattccctgggctcgcccgccccgacgaccccgaccatgcccgcaacctccgcctcgagctcgagcgggatgctgatgcggcccctcctgctccgatgagggacgaccgcgaccgccgctgggatgggagagccgagaccgggactacggccgcggcggccgtgagcatgatcaagacaggaggcaccacgattcggatcgagacgaactccatgaacgcgattggcggcagctgctttatacaattattcctacttatgctagattgtgagacattgtatatcaatgtattcatattgattccgttgcaacgcattgcaagacgtgtggcggcccagctgatcagcgggatgcattgcaagatatacagggacactgtcttaggggagctgaaccgccacgagcctgtgcctgttttcctcaaggacacaagctcaaatggcacattcatcaactggaaaaggccaagaaaaattcatccccggtcaagcttaatcatggcgacattatatcattatcatcacctcctcatgacggaacttcctaagaggcttcttcttacatacaaacctgaagaatcggaggacattcctgagcttgcttctgttgaagaggaaaatgcaccagttgaagagcctgttctggtaccacatgttactgaagttgtttcacctcccaagaccgaggtggccgatactggtgacttactgggcttaaatgatccaaatcctgctgtatcagctatagaggaaagcaatgctcttgccttggctattgttccaacagcctcacatagccataagtccttttttcatgcttttgagttggataagctggagcttaaagccgtgaaagacggttctgcaagctatgctgctctggaaaagaaagcagagttgtatgaaaagttatctagaggcaaggtacctgatgaagaagacaaggagaaatactatgtggatttcttccaaaaaggtttcgatcgtgtctatgagcctcagataccagagtgtagccatagagccactgatggtgcggaaccagtaaacgatcatgaagattctatgcctaatgccaaaccgttgggccttggccaagcaggcactacaatcgacagagatgaacacaagcgctttgtgagggaagttcacgaggaagtaactgaggcaaggcagaaggcctcaaagaggtcgagtttggtgggaggatggaagaggcaggcatcctgctttagtcctcaacaagctaggacttttgttttagaacgtcacagaagatctgtcaaagtagatagaaggggagatgacaaaaagtatcttggcaaggttttagctaggggtgttgaatgcgatcttgcgttgctatctgttgagaatgaagagttctggagaggaacagaggcacttcattttggtcgtttgccatgccttcaggacgacgatgacactgatattattggttgttgtacgctgaaggttgataatgttacatgtaaagattcaataagatactttaacatcgtagagattgaagagcttgtgtacaaggcaattaagggtttctgtgctggtatctctctcatataa

SEQ ID NO: 28827 - DNA, 321 bp, Zea mays
  Peptide Sequence Number=SeqID_72202
atggggtctcttaggggaaggatggtagtatcacctacatggctctattaccatactgagcaaaagccccaacaagatcctcccctgctcacatcaaattttgagggtcatggtaagatctttggctacctcaagggaaagcccaagatttttacaagttgcgaaagaaacaatcggttattaaattctcataatcaagaaaaagagtggcgaagagaacataccttcaagcttgtgattgctggcctccaggtcagctctaagcttttggaccttggcggtcaactcgacggttgcctccttctatcgggccaagtctaa

SEQ ID NO: 28828 - DNA, 78 bp, Zea mays
  Peptide Sequence Number=SeqID_72203
atgggaactaatgagcatctcgacctcgacacgggaggttccaagcggaccctaaggaagttcaccttagggccgtga

SEQ ID NO: 28829 - DNA, 1116 bp, Zea mays
  Peptide Sequence Number=SeqID_72204
atgcaggcggcatgcaatcgtgccaagtgggcgcgccccttcgactccaacaagcccagcatgaaggtccaggcccacgcgtcatgcaaccgtaccagccaagcgcgacggtcaaatgcggtcaaaattgggccggcagtaatggcggtgacaggcgggcaggagcagcggtcacgtcgtcagccaagcttatgtcccatccaggggcagcgagggagccctctcccacggcgtgaagacggtgcgcctgtgatccgttcctcgaacggctcgcgcacgcgcaacgaccgcctcgcgaactactcgccccgtcgcattaactccgcggcaggacaggcggcgcctcaggcgggagaagcaagcaaccgcttcgcctttgccataatgaccgcgtcgaaaaagggaccgggaaagggggatacccccaaaaggacccttctccgtgaaggaaacaggctccgagcctccctactgatcagaggttcgaaggccggcccctcggaggggttcaacggccgcctcagatcgattgggttccacacccactactggtcagaggctggccctcggagggttcacagtcgcctcagacacagagcgagggatgaccatgggtacattcgatacataaccaaggctcgggctatgctcccgaggcaagggaagccgaccccggagaacctacgtctcgcccgaggacccccctccagcaacgggcacactatcggctcgctcgaggcccagtcttcaccgagaagcaaccttggccacatcgccacgccgaccgaccaaatcgcaggggcatttaatccaaagggctcggacatgggctcagccccggaagacgacgaactccgcctcgcccgaccccagggctcggacatgagctcaaccccggaagatgacgaactccgcttcgcccgacctcagggctcggactcagccctgggcctcaaccgacggtctccgcttcgcccgaccccagggctcggactcagccctagcctcagccgacggtctccgcctcgcccgacccaaggggctcggattcgaccacggtcacagaagacagactcgacctcgacctcggaggagcctccacatcgcccaacctag

SEQ ID NO: 28830 - DNA, 477 bp, Zea mays
  Peptide Sequence Number=SeqID_72205
atggagcacacctgcgcggctttcttcttgctgctgtttgaggagcgcgagctcatgggggttggcgctctccagtcgtcgctcggcttcaaggattttcgtcatgcagcctggctgcattccctcaccaatgcttcaaggatcttcatcatccgggctgaggtggaggagtgcaccgagtgggggccgcctccgcatgggccggccagggtgctgctttccgtcctccacccgagcggtggtcgtgccacgcgcgggtggccgctgtcaccggcgctggagtgggggctaccgctggtgaggctccccaccgcagcggttgcctccgccgacgagaccgtcggtgctagctgcgctccagaccttcggctctttggctttaatgcgcccgaggcagaggtcgttgtcgcgctgctggcgcagtggtcgccggtcgggaaagccgccgagggcgctgccgacgcctacatagcatag

SEQ ID NO: 28831 - DNA, 2478 bp, Zea mays
  Peptide Sequence Number=SeqID_72206
atggagccggatccggtcgccgctggggcatcctcctcgccgccgccttcaccagcgccggccacgtccccgccgtggcaaacgcgagatgacgatgagccgggagcggtggattgcgcggatcccggaggagacctgaatcccgcgccgccgccgtcgcttcagcagggtacagttgagaacgccgcggtgggcagcgaggtggagcaggaggaaccaaagaaggaggcgatggcaggagtaggggagactctccgcagcttcatggaggagtttggggatcaaggagaggactccattatcttgtcaccgcggctgaaggatattagtactcctgaccgccccgctgccctcggtttcctaggggagaagtataacaacctcatggagaggtacaagaagtacaagaagcaggtggtcaagtgttccgaggagtgtgaaccaagatataatggcctgaagaagaagtacacagacgagtgtgcagagaggcggcgtctgtacaatgagcttattgagctaagaggtaacattagggtgttctgcagatgcagacctctgagctccgatgaggtcaaccgtgggtgtttatctgttgttgagattgacccatcacaggagagtgagctgcagtttgtgcccagtgaaaaagaaaggaagccctttaagttcgatcatgtttttgggccagaggatgaccaagaggccgtcttttcagaaacagtgcatgttgttaggtcagtgatggatggttttaacgtatgcatctttgcatatgggcaaacaggaactgggaaaactttcacaatggaaggggttccagaaaataggggtgtaaattatcgggctttggaagaattgttcagaacgtcagagaaaagaagtgcatctgttgcatacacattttccgtaagcatcttggaagtttacaatgaaaagatcagagatcttcttgatgagagcaatgatcaatcaaaaaggttggatattaagcaaaatgctgatggaacacaagaagttcatggtttggttgaggctccagtttataacatagatgatgtgtgggagaaactgaagtttggtgctcaaaatagatctgttggctcaaccaattctaatgaactcagcagccgctcccacagtttggttagggtcactgttaggagcgagcatttggtgacttatcagaggagcagaagccacatgtggctggttgaccttgctggaagtgagagaatagctaaaactggggtagaaggagatcggctgaaagagtcacagttcatcaacaaatcactatctgccttgggtgatgttatatctgcccttgcctcaaaaaattcccatattccataccggaattccaagttgactcatttgctccaaagctctttaggcggcgattgcaagactctaatgttcgtgcagataagtccaagctctatggattcaggagaaactctcagttcactcaattttgccagtagagtccggactgtagaacatggccctgctcgtaagcaagtggatccagctgaaagtttgaagttcaagcagatgactgaaaaacttcggcacgaggaaaaggaaaatgcacagctgaaccaaagcttgcagctgatgcagctcaagtacgcttctcgtgagaatgtcttcaggacactaaacgaaaaggtgaaggatgctgaacaagcatgcagaaattatcagcaacggattagagagctggaaagtgaattaggcaatgagaaaagggtttctagggattctgctagatcctcaaggccgccacttgttcctacgagacagaagcagcctcacggaaggaacgcgccaccttcaggcccttctagatggaggctcaaagcccccacaatccacaacaaagagaacattccggtgatgatgaacaaatcaaatcctggggatgaccctaataaggctgttggcagagcaaggcgcgtttcacttactccggtgattcgacaaatccccatccagcccaagaggcggtcttcgatagcaatactaccatctgtgagagagcatctttctgtgctaaacgaaaagagagcagcgtctcgactgtcgcaagtcaacatgccaagaagatcagtcgcgacctttggtttgaatttgggtccaggaacaccccttgcaggacatggtggacctgttgacgccaccccagacggagcaaagttcaggagatttgatctaggaagcagcagcagcaagttcacgagccctcctccgaatgtcaccccgcagcggaagatgggaatggcaccggcgggaggtcctccaaacgcagccaagctgtgcttcagcatccagaaaagagttacgcctgcacatgttcgggcaaaacctggtatgggcatctttgacccagctcttcgtgagaatatggttgtggggagaaccggcaacgcgctgcgggtgctcaacggcaagaggagacagtccgttgtctaa

SEQ ID NO: 28832 - DNA, 264 bp, Zea mays
  Peptide Sequence Number=SeqID_72207
atggcaccgtcggcgacgtgctggtgcgaccactgcggcgctgtccgccacctccgggcggagggcgagttcgcgtcctgcgcggtgtgcggcagggtgctcctggacctgcaggacgatgcggtggcggctccaccaccaccgcagctgctgcgacgtcagaggaggagggctcgtgacggcggcgcggcgggtcggggcgtcggcgcgaggcccgaacgcggagatatatcggacgctgagtccaccgtcaccagcacctga

SEQ ID NO: 28833 - DNA, 402 bp, Zea mays
  Peptide Sequence Number=SeqID_72208
atgtcggatgaagtgaaggcgtcgtcgacggagaaaacacgtgagctcttgctcgctcgtgaaagtgtcatcgcggccgccgggcagacgcccttctctcaaaaaggagcaaccaactccaagagctctgtctggttgtcggtgtgcgttgacgcgcattttcaatctttcattgattttgggcgaaagtacacgattgcgccttctgtgcttgtgccgccttacccgttgacccgcgcgcttggggacatcgacagtgcttggagtcgtcttggggcctcctccttgctctacgagcccagtggcgtcgagaccgactacggttgtgtcggtgaggcttggagtgacgcccctctgggatccaacgagcattgggaccagctcgaagctggttcgttgtaa

SEQ ID NO: 28834 - DNA, 732 bp, Zea mays
  Peptide Sequence Number=SeqID_72209
atggacatagcctccgggccttcgcccccggcacaagaagtggcctcgatgagcttgagcttgatgaagacccttgcaaagccttcgcgatattcgcctcgcctccgccacaatgggtcgacctctcattggtcgaaggccactgcctctcgctatcgaggcagaaaggccttcaaactcttggattggaatgaggcacttcctattacgcatgccttcgcttttctcctcagatgtatgccctgtgttaggcacttaaagcgattgatcagtaaacaagtaggaggtgaccgagggcatgtttcgttctcatcccaacacaagcccctcgagggaggggttcaacttgttaagacgatcatgaagtcctctggaagaggcatgatgttgcaggcacaccttttgatgatgggcggctacaacattttcaaggagtcgtgcacccattataaaaggggcagggcaactaggatcgccgccgcattcctcgctgttgatgtcgctgtcattgcacgttctggcgaggatcatgcaaactgctcgtcgccgccatcagtatgtgtcgatgccctcttcctcctcctcgtccaacagcgaaccccctctagcgatgtttttgacggtgagtggatctggcgtatagcgcggtgccatcctggagatcgtggaattcgggcggtcagcgaattcctcaagccgagtgtgagaattccagctactgagggtttttag

SEQ ID NO: 28835 - DNA, 465 bp, Zea mays
  Peptide Sequence Number=SeqID_72210
atggccgggatccacggcccgagcgacgcatcaagggaggagcagggaagggaaccggagctgacaaaccttcagggagcacagaatcgccaaggacagcaacctcctggaattctcaagaaacctactgagggtgattcaaacccatcaaaacaaacgcgttcctccggcgttgtgtcgatggcaccgtcggcgacgtgctggtgcggccactgcggcgctgtccgccgcctccgggcggagggcgagttcgcgtcctgcgcggtgtgcggcagggtgctcctggacctgcaggacgacgcggtggcggctccaccaccacggcagctgcggcgacgtcagaggagggctcgtgacggcgcggcggctcgtgacatcggcgcgaggcccgaacgcggagatatatcggacgctgaatccaccgtcaccagtaccggagaggatcgatggattgacgagaagtag

SEQ ID NO: 28836 - DNA, 2661 bp, Zea mays
  Peptide Sequence Number=SeqID_72211
atgccgcttccctggtgctcgccctctccctgctcagttttggcggcccctgtggtgttcagcgctcctctgctcccagcctccagccagctaggcgctgctcccctctgcagcgtctcccctgcgcagccccccgacatcttccctaccacctgcacaactccctccatggcggcccccatcacctctcccgccgcttctgtggctcccggtctcctcggcgccgcccccatgccggttctctgtcctagcccgcccgcgacttggacttctcctcctgtcgtcaagggccctgtctcccctgcgtttgctatgcctcccctcgccggttccatggcttcacccccaacatacatgagctttgccttgcccgctactcccgtggctcctggattctgcggccctctcctggcttcgcccatttccatcgggatcacagtgtgcatccgcctccacaacgaccaccttgtccaaggcacctttgtggccttcgatcgcgccatgagtcatgtccttcgtgactgcatcgagcttcatccaaatgcggggccccctcttacgcccacctctgctcgtgcctctacccgtgccacgcacgacctcgacgcctccactcgcgcctcgtgcggcaccgcctgcgccacgcatgcccgcttcaccgaccccacccacgtctaccatcgctgcgagcaggccactccctcggctcccgttgccccggccccgtcgacaagcgtggctcgcttcgtcaacctcgccctcgtttaccaccgtcgcgagcgggccccgcccttagctcccgacgacccgccgacacgcaccgagcctcctgtgtaccacctggtcgccatccaccgcgaccccaagcacatccacctgatggtgactcaccgcgtagccggcgttcttcgccccatcgactggccggtcctggcggctgacacggctgccacccctccgacgctgactgggttgactgtcccgacatgcgccgcgctgaggtcgagtatcgcgctgtggccaacgacgtggccaaggcctcctggctgcgccagcttctccaggagctccacagccccctacagcaggccgccctcgtctactgacaatgtcagcgcgatttttttgacccttcctttcccgcctgacccttcccctcccttggacctctcctctacccccgacgcctcttcacctacctacaccagccccacgccggtgatcattccgatcccggcggccaatcatctctcttcttccccggcgtcggcggggccctctaggtgcggtggtcgttccaaggcccagaggtggtgtgaagacggcgcggcgggcgttggtgttgtcccgacgggcgcggcgggcgttggtgttgtcccgacgggcgttggtgcggtccaggcgggcgcgacgggagttggtgctgtccctgcgggcgcgggcgtgggtgctgacctagcgggcgtggttgcgatcccgcatccgagtcggctctcctataaggaagcgctggtgtcctcacagccctctgtttctcatttcgtgggagggagtgctggtggcggctgggagactgtccagagtcgttgtggccgtcgcttggctcgccgccctccccggccagtgcctagacccgttctggttgatctgcggggcagatgtttcaactgcttctctgctgagcaccgggtggcgaggtgttcgaaccatgttcgatgcttcttctgcaggcggccggggcaccatgtgagcgagtgcccgcgcaggcagacgagcctggtcgctcctcatacgaacctggtcgctcctgtgcgcaaactggtgtggcggccaatctccagggaggccccagcggtcgctggtgcgggccccgccatggcagatggctcggcgcttggtggtgtaaaaggttcacactcagccaataaaaagatcaagttttggattcaacaaaggagcaaagggccaaccgaaggcacctctggtctggcgcaccggactgtccggtgtaccaccggacagtgtccggtgcaccaccggacagtgtccggtgcaccaccggacagtgtccggtgcaccaccggacagtgtccggtgcaccaccggacagtgtccggtgcaccaccggacaatgttcggtgcaccagaggactccaactcgaactcgctaccttcgggaatttctcaggccggcgcgctataattcaccggactgtccggtgtgcaccggacagtgtccggtgctccaagggagagcggcctcaggaactcgccagcttcgggaaactccaacggctagtccgctataattcaccggacatgtccggtgtgcaccggactgtccggtggaactccgaagcaacggctattcggcgccaacggctacctgcagcgcatttaatgcgcgcgctgcgcgcgcagaaggcaggcgcgcccatactggcgcaccggacaaggaacagtgcatgtccggtgtgcaccggacatccaggagggcccacaagtcagaagctccaacggtcagaatccaacggcagtgatgacgtggcgggggcaccggacatgtccggtgtgcaccggactgtccgttataaataccccaaccacctcaccattcatggcatccaagttttccacttctcaaccacttacaagagctag

SEQ ID NO: 28837 - DNA, 618 bp, Zea mays
  Peptide Sequence Number=SeqID_72212
atggttaggaagtatggagaagactacgattggcgaggagcgcctaccatcgacgctgaagttgtgcattctattggaggcaaggcgcatggacgatattctatgtttaccggtgttatcgattcgacggagttgcgttctcgtggtggctcttcgtcgcaggcgggttgtggtagtagaagccgtagtcgccgctctgtatctagcatggaggacgctatgagggagcagcaagaaaagtttcgtgaagagctgcggcaacaacaaatggcattcctcaaagagcaatcagagtacatggctgcttactacgcacaagcgcaacaagcaatgaactcttggtttccacagcaggcacaacaacaaccatttgttttccctcaatttcagccgtcgatgcctcagtggggattacatgctccgccacctccacctccacctcaaggatccggggtcatgggccacaacacgccaccaacggtgataccagcaccaggaggagcttatgcaggagagggagatactccaggagagaatccaaacccgttacacgacttcgtcaacgagtttttcgcttctagagggagtggtcacaactccaatggccccgatatgtga

SEQ ID NO: 28838 - DNA, 294 bp, Zea mays
  Peptide Sequence Number=SeqID_72213
atgaggaatagggcaaggcctagcccactactcctcctgctcctctcctgctggaccagcatcccactcaaccttccaacccggtggcagggtgtgaccgcacttgtacccaccatagctagcatgggagacccagtcttaggacaagtgaggagaaaagtccgcgccaagcttcactcaggctgcggggagatcctcgatggcaggctcggaagctggctcctgatcttcctcgtggacagctccttgctcgggaaagagcacgtactctccgtcaccgaggttgcaatctaa

SEQ ID NO: 28839 - DNA, 585 bp, Zea mays
  Peptide Sequence Number=SeqID_72214
atgagctaccccgcctgcacacgtggaccggcctactccaaccatcaccggagacgattcacacatcggcgtgaccgtcaagacctcccctacaccctaggccacttcactggagcaatctcaccgccgctgtacgaggagcatcgggtgccacgttgccgagtctggctgactctggaggcacatccccttcagccaggttggtgttcccttgactccaagactgttggattcaggacggatgacaccaccgaggagggagccatgaagaccctgacgactttctgtggctaccatcccctggagatggtgatgcatccactgggacttttccccgatgagaagagggatgaccccatgtggtgcaaccgtgtaagccatgtgaaggacgtgtgggctatgtatcctgacttggttgggatgatcactgttcagtgcatgagcgcattgcaccacctacaggccctacagagcgacgctatggcacatcttgctaacctttctcagaccaccaagttcaccctcgacagccgagaagacttcatggtcgacttgtcctcagagttggtggagaaggacctatag

SEQ ID NO: 28840 - DNA, 399 bp, Zea mays
  Peptide Sequence Number=SeqID_72215
atggcggccccccggcgcggctccctcggccccggcggtgcggccccttggtccccggcggcgcggctccctggccccctgcgcgcggctccccggccccgccaaacgggacattttgctgagtatgttgatgtgtactcacccttgctttacacaccaaacccccaggttgtccgcgttgcaaccactgctcaggtgaagaatagggctcatagctttggcatacaatgctccacagaccccggctgccgccgtgcagtgaccgcacttgtatccaccatagctagcatgggagactttgtctcaggtctaatgaggaggaaagtctgcgggcagatatggcatctgtggcagaaccgcccgaattattctagctcaagtgcccaagtcatgccttag

SEQ ID NO: 28841 - DNA, 402 bp, Zea mays
  Peptide Sequence Number=SeqID_72216
atggctaaactaagtaatgattgtgatgggagggataccctagccttcatgcgcaagaactcgggcagattaacacgaccacgtgttcgacgcgccctggcaacgccagagcatgccccggcgctcggccccgcgtgcgcctcgcctcgccacgtcaaccccgcgcccatggctataaaccctattccggccatcaccgccaatgatccacccctcgacgtgaccgccaggacctcttggacctcacctagccctccactggacctctcccgccgccgagagtacgtcctcattctggagcaaggaattgctcaggaggtagtcccggagccagcaccagagcctgccatcgaggatctgcctgccccagcttttgaaggcaagccccggttttatgcataa

SEQ ID NO: 28842 - DNA, 213 bp, Zea mays
  Peptide Sequence Number=SeqID_72217
ccgtcgcgccgtcaatggggctcggtgtatgcggctcgctctgccaaggttgatttgtccctcggggaggagtgcggtggttatgagatcgatggttctggttatgactatggtgctgatgtcgaagtaaaagttgttctccgctggaggattctcagtctgggagacaacctcttcttcttctacgatttcttcctcgtgttctatacatga

SEQ ID NO: 28843 - DNA, 447 bp, Zea mays
  Peptide Sequence Number=SeqID_72218
atgaacccctacttagaatcgaattttcttgttaagttgatggaagaaatggaagaggaagaagaagagttggatttagtgaggcacatgctcaataggaggcggcgtgcaagcaacgagcgtcgtcatggtggttcggttccagggcgtgttcggattcatcgtgatcacatgagcgacgatgcaagaattcgagcggactactttggaccgcaacccgtgtacacggatgctcaatttcgtaggagtggatccatactttattgtgacaccccagtgtcacctagggtttctcttaaaaagccacaccaagagccattacttcctgtgaaccaaaaagatggcattgggacgcgagccctaggcacgacaaaacttgggatttgcctcgggtttgggcagggagacagaccagatttcctggctccatatctctgcaaccagtag

SEQ ID NO: 28844 - DNA, 718 bp, Zea mays
  Peptide Sequence Number=SeqID_72219
atgtccggtgctccaaggaagcacggtctccagaactcgccagcctcgggttcgcgcggcagccgctccgctaaaattcaccggactgtccggtgtgcaccggactgtccggtgtaccagcggagcaacggctcttttcggcgccaacggctccctgcggagcatttaatgcgcgcacagcgcgcgcagaagtcagaatcgcccatgccggtgcaccggacatcaaacagtacatgtccggtgtgcaccggacacccaggcgggcccacaagtcagaagctccaacggtcagaatccaacggcagtgatgacgtggcaggggcaccggactgtccggtgtgcacccggactgtccgtttcgacgtattcaccccccctctatgcgactatcaccgacccagagctcggactcgggctaagccccggaagacggtgaactccgctccgcccgacccagggctcggactcgggctaggccccggaagaaggcgaactccgctccgtccgacacacggctcggagtcggattatccccaaaagacgacgaactccgcatcgcccgacccatgggctcggaatcagccttgtgctctgccggacaatctacgcctcggcaaggcaagggctcgggctcagtgtcggtacgtatcacaaaaccacctcaattctgagaaccgccccttcgcccacctgttggcacagggcgctcacaacactg

SEQ ID NO: 28845 - DNA, 764 bp, Zea mays
  Peptide Sequence Number=SeqID_72220
atgaagaaaacacttgaagatctccaagcggagcatcgcgccggggtccagcacatcgccgcatgggctggcgacgcgagcacgacactggtgccgctaggggtgagtcccatcccggtgtcggagctaccgacgtccatctccggcgcgctcccggtgctggacttcgccgccgaccgcctccaacgcttggaccagatccttggcgcccgtctagaggtcgaaggcgacaggctctgtcgggtggtgatcgagtacgtcctgacatgcttccagagccacgacccaaccatctccttggagccggtgatcgctggtctggtggccgacactgaagacgccgcccgggaggccgtacaagatgtcgtacaactgctggataccagtatacctaagaaagagttggtgacccggcccccaggaggtagcctcgactgggacctggacctgtacacagcttcagctaggagtgttagtagcacacccataggacccatcgtctggtatcagccatcctttgattcatggaacgggaccggcaggattgaatttgggaagccaagcctcatgtttggacctacaagatcacagctccaaatactagggcacccgttgcagagtgggggaggtgcaggcttagggataggggtcccaaactgcaagcctggcttactcaattcggatgtcatcataccagcaagggtgggaactgtatgggtggaccaacaggccgggcttatgagggcagacctcaccgggctgac

SEQ ID NO: 28846 - DNA, 834 bp, Zea mays
  Peptide Sequence Number=SeqID_72221
atggacaagttcctcgtgccggcgccgcctcattgtggcgaggagcccgcgccgcctcctaggtgctccgcgccccctcagaacaaccctcgattgccttttgcttttcgttgccctctgaagtctgaacctcttctgggccgcaggagacaccggtggaggcgcatcatcgcggagctggacggccgcatagactccaggttccagcacagagattcgcgcctccttcttgattccttcaccgaggtttattgtgattgcttctatcaggtggatcgaataattagtgcttcaactataaattttcatccagtaagggagggtgtttcagcaatagaattcgatagaaagggaatatacattgcatcagtgacactctcagggtgtctgacggtgcatgactttgagactttgtactgctctaaatatggcccaccatgcagtatgccagatgaatcatcaaattatgtgctccatatatctaaccgaattcccctaaatgctgtccgatggaatccaggaaaccaagacgagattgcttgcacatcaaatcaaagtgataacgttttcctctttgatattggctatgtctcatctacaccaactgaagttttgcataaaggaaaatcgaaattcccctcgctctactctgaatcctgcaagagtttgactgatataacttttacttcagatgataagtcacggatatttgcatctggccttgatggggcagtgtacatgtgggacaggcgatcaagtaagacacactgtcttgagcttgtggcatctccagaagctcagttcaacactgtcaagttaactgtggataatcgg

SEQ ID NO: 28847 - DNA, 105 bp, Zea mays
  Peptide Sequence Number=SeqID_72222
atgacgaggaaggcgagctggccatacatgaagggtgctgaggcgccggaggcacagacggagggtgcaaccgcactcagggctctaaaaattgagagcctctag

SEQ ID NO: 28848 - DNA, 1683 bp, Zea mays
  Peptide Sequence Number=SeqID_72223
atggggtgttcgtgtcctccgctcgccgacgccgcgtgcctggccctgcttcttctggccttgtcgttggcgtgtcgccaccaccacgggtgcgcggcggccacgctgtcgacggcgtcgcggtgggtgctggacgagagcgggagccgggtgaagctggcgtgcgtgaactggccgtcgcacctggagccggtgctggcggaggggctgggcaagcggcccgtcggcgccatcgccgcggacgtggccgccatggggttcaactgcgtcaggttcacgtggcccacgttcctggtcaccgacgcctcctactccgacctcaccgtcgcgcagtccttccagcggctcaacctcaccgagtcgctcgccggcatcagggccgtggtgagcagcctgggcgagcacaacctgatggtcatcctggacaaccacctgagcaagcccgggtggtgctgcagcaacaccgacggcagcggcttcttcggcgacacctacttcgacccggacgtctgggtcgacggcctcaccaagatggccaccatgttcgccggcgtccccaatgtcgtcggcatgagccttcggaacgagctcaggggccccaggcagaacgtgaacgactggtacaagtacatgcagcgcggcgcggaggcggtgcacgcggcgaacccgcgcgtgctggtcatcctctcgggcctcagcttcgacaacgacctggccttcctcaactcgcggccggtgaacctcagcttcaccgggaaggtggcgttcgaggtgcactggtacagcttctccaacggtcccgagtggagctcgggcaacgccaaccaggcgtgcgcgcgcatcacggccggcatcacccgccgcgcgttctacctgctcgacaggggctggcccgtcatcctcagcgagttcggggtcgacaaccgcggcgtcaacaccaacgacaaccgctactacggctgcgccgccgccgccgcggccgacctggacctggactgggcgctctgggcgctgcaggggagctactacctccgcgagggcgtcctggggctcgacgaggtctacggcgtcctcgactgggcctggtgcaggccgcgcaacgacaccgcgctgcgcagggtccaggccctccagcgcccgctcagggggcccggcctcgcggaggcggcgccgtacaccgtgctgttccacccggtgtccgggatgtgcgtggtgcgccggtcgccgacgccgtcgctgacgcagccctttcagctgagcctgggcccctgcaacgagacggaggcgtgggagtacagcgcgcagcagcagcgactggcgctgcgggacgctgcgctgctgtgcctccgcgccgagggcgccggcaggcccgcgagcctcgccgtgagctgcggcgacgccatggcaaggtggggcttcgtgtctgactccaagctgcacgtcgccgtcaacgccacgtcgtcggccgggagcgtcggcgacggcttgctctgcctggacgtgggcgcggacggccggagcgtcgtgaccaacccgtgccgctgcctgagcgcggacaacagctgcgacccgcagggacagtggttcaagctcgtgagcagcacgaggagcgtggtcaccaagcagaccatgctcgcgcagctgccgctcaagctcaaagactggaagatcaggtcgttttga

SEQ ID NO: 28849 - DNA, 339 bp, Zea mays
  Peptide Sequence Number=SeqID_72224
atgccccgctcgaaattggtggtcgccgtgatttccaggtgccccgccgcggccctggaacgccccgcggggacgacggctgggttatatagccagccgaggaccaagtccgcgacgcaaggattccgccatcgccgtattctgttggaatgccccatggcagggatgaacggactgggcacgcggtccacgcgccagagattcatcagcgcacacatcggaggtagtttcgcggcagatagcgatggattcccaccggacttccgagctctcggcacacccgccatgcgcgccgagaggagcgcgacggcctgcggcttctgttttgcgaccgagcgg

SEQ ID NO: 28850 - DNA, 357 bp, Zea mays
  Peptide Sequence Number=SeqID_72225
atggcagggatgaacggactgggcacgcggtccacgcgccagagattcatcagcgcacacatcggaggtagtttcgcggcagatagcgatggattcccaccggacttccgagcaaattaccaagtgggtgttacaaatcctaccccccttaaaaataatctcgtcctcgagattagtaagcagaagggttataccgaggtaagaagagagatggtcagagtgaggttagctgatggtaagaagaacttggtgagggaagactccgtccaaggtggtgtaattgtggatattactccacaactcatcacactcaatcaaagatccaaatcaaacaagtatcataagaacaaacattga

SEQ ID NO: 28851 - DNA, 66 bp, Zea mays
  Peptide Sequence Number=SeqID_72226
atgacgaaggtcggtgcttgccgaaggtataaagtggggattatcttagtgctaaaaggcatatag

SEQ ID NO: 28852 - DNA, 228 bp, Zea mays
  Peptide Sequence Number=SeqID_72227
atgatcccgaaaataggagaccctatagtaggcacatgcgagcagggtcgagacacggtgtcctgggttggcaaaaaacaccatgaccctacgctgagggcaagtaaaaggaagcatgactttaagaaaaataacgtccctagaaatgtagatgtggctagaatcaagatcaagctaaactattttgttggtgagtgtgaggacacatgccctatgagcaatacctaa

SEQ ID NO: 28853 - DNA, 1038 bp, Zea mays
  Peptide Sequence Number=SeqID_72228
atggatggaggtttacaaatcgaattgcttcgtagttttgtctatggattgtgtgtctttttctggttatcaaaccgtggtcttctatgtgccttgaagagtgcagttgctagagcctcagaagatttcatgcctcgggaaccaacactgcaaactctgcacattgcgtctgtggcattcaatagcctattgttgggagaaatcttcatacctgactgggatatgttccatagcaagcatgaatcagcggaattccacggagcagctagagccctgagtggaggtggtgtttatgtcagtgacaaacctggggtgcatgatttcagtgttctaaaaaagcttgttctaccagatggttcgattctaagagcaaggtatgctggtcgtcctacacgcgattgtctgttcactgacccagtcatggatggcaaaagtctgatgaagatatggaacttgaacaatttcactggtgtcattggagtgttcaattgtcagggagctggacagtgggtttggccagttaaacaaactgcttatgttcctaccaacataaacataactggtcagctctcaccgtccgacgtagaatctctcgaggagatagctggtgatgactggaatggggagactgcagtatatgctttcggttcatgttctctttcaaggcttcagaaacaccaaagtttggaggtgtcactgtctactatgacatgtgagatctacagcatttcaccaataaagattttcagcgaagtcgtccagtttgcgcctcttggactgatcgacatgttcaactccggtggtgcacttgacaatatttcaagcgttgcagattcttcagctacgacagttcatataagatgccgaggaccagggcggtttggggcgtattcagacaccaggccagagctttgcagagttgatgaacacgaagtggagttcactcttgcagaggatggcctcctgaccttttaccttcccccttcttcctcccaggacaacctgagacacgttgagattgtctacaaagcatcatga

SEQ ID NO: 28854 - DNA, 1074 bp, Zea mays
  Peptide Sequence Number=SeqID_72229
atgtcagaacttggaatgtcaactgcaagtgatatcactaagtgcaaagaatacattgtgttggcaactcctccagctaaggatcagatggaacagttcaagaaggtgcatgctcagtttctacaagcaacaactcaagtgatagctggactccaacaagttgatttagcagaatttatagcacatgagcagactaccgacacccatatgacatcaaccacaacatcaccctcgatagttgacttagaaaagctgttacatgcacaagctcttgtaatacagaatatcagtacgaacgaaagtgaaactacaaaacagaagaaccggattttattttctggtataaaaagtcaatggtcttcccaagaacaactagtagcagatgcactgtcagacgatgaattgccaggttttccaaaaaggaaacatcacaaggatgctcatctccaaaaagaagcaaatgagtgttacattgatggatggactatcacctgcacacagtttcagcctcgtcgtcgcatcagttccaagaaacaaaaggggaaacatggaaaaagtcaagaaataacttcaagaaaagcttgctatcaatgtggacgtgaagatcattactttcgtaattgtcctgagaagagttcactaccgaacacctccgagattaagctatctcagtctccagacatgggatatgaaccaaaatgtacagaaaattctataaacatcgtgaagaacaacaaaaggaataggaaaatgtttggatacatgggtagtccaccccaaccacaagcaaaagccccaaaacacattgacacccaaacagaagaatcaagtcaggctcagccatttgagatacagacacccaatcaaccctcacccccggttggtcaagcaaagttgactcgcaaagaactcaaagcaagaggtgcttgcttctactgcaagaatgaagaacatattattcgtgaatgccccaagaagcgtctagatcgactaaagaagaagacggtgaagcaagacccaaacaataacccagaagaccaaccagctacaagtacgatgatgaagatcgcttga

SEQ ID NO: 28855 - DNA, 1089 bp, Zea mays
  Peptide Sequence Number=SeqID_72230
atggcgaagagcgaaggcccgtccgccgccgcggggctccgcccacggcagcggggcgccttccttctgggggagccaacctgggaggacaccggcagcgggcggtggcggtgcgcggagacggggcacgagctgccggagcgggagaaggaggcctacgcgcggtcccgcgcctgccgcctcgcgctcattgaccacgccgtcgcgcacaagaagccgccgctcaacgccttcaagccccaccccgagcacaactcatgtgaatttgttcggcacttacccttatgcgagcctgagggttcaattggatgtccattagtgctagtgcaagcccaggggcttaactggctatgcattagtgctagtgcgattccagtagaacttggctggaattatgctaccagtacaaccaactgcataaagccactgcaccatccctgtgtaacagaaaaacaagaggaccagatgacttctggtgagatggctgatggacaatctgtgaagtcaaatgaagaagtggcaaagaagagcaagccaagcaagaagtacaagaagaaaactaatgtttccagtccattgccaggagaacctaaaccagagatggatggttcagatgatcgcaatttctgggtgcctcctgtcgagggtcgctgggatgatgatgacgggaaaaaaagatgggagttgtcaccgggaaagcacacattagcaaagaatgaaggtggttctgatgctgctgctggtggtggtgataacgacggtggtgatgaaaatgttacggctgagaaggatgacgctgaatcaagggaacttgcctcaatgtatcttcgattcaaccttttgctcgattcaatgaataatgcctgctgtcacataaataagcaaggttttcaactattgtgtggcaggacaaagcaaatttcttcctggctgcagctaaagcaacagattcgggcacccgtgagcgcagcctcctttcaaagttcaacgaaagggcctaaaagtcagcaggtagaatctttagaatgtcagcaacaagttattaccagggccggccctgagattttgggggcccagagcaagacttaa

SEQ ID NO: 28856 - DNA, 1662 bp, Zea mays
  Peptide Sequence Number=SeqID_72231
atgtcgccgccggctgccggcgcggccgccaactccggcgacgggacgcctccgtcgccgcgcgagctctacaccatcccggcatcatccggcggcgctgggttcgggacggcgacgcggaacccgcggatctaccgcgagtaccgcgacttcatcatcgccaaataccgggaggacccggcgcgccgcctcactttcaccgaggtccgcagggcgcttgtcggggacgtcacgctcctccggaagctctttgccttcctcgactcctccggcctcatcaacttctcggcctcctcgtcctcggtccccgcgtcgcggcagcaggaggtgggggtcgtcgtggaggcgcccgtgggtctgcaggtgacgccgcgtcctccagcgtcctacttcgccgaagagaagcgtgtagcggcgggcggggagaaggagaacgaattccggttgccgccgctgacctcctacagtgatgtgttcggggaatgggcacctgggaaggcgcctatatgcggtttttgcggtgaggagtgcaatggtgcggatgttgagacgctgcagataataattgccatgggagatgaaaaacatatattttcctttggaccagatgacaaggatggttttaaagtatgttcaaaatgttccaaaagcaataatgataatatcaaggaagaggcgaataaatgtcctggtgacaaaaaagagaatatggaaaatcatgcttccagtgcatggacagacactgagacgttactccttttagaaggagtcctaaaacatggagatgattgggatcttatcgctcagcatgtccgcacaaagaataaatcagaatgcatagcaatgcttattcaattaccttttggcgaacatatgctgggcacaataaatggtaaattcgttagcaggctccacataaaccagacagatgatggaaaaacgaaccagcacattatggagtcttcaagtcactcaaccgaaatggctgatggcatgcagattgatggaagtgaagatagtgctgataaatcagttgaagaatatcctacaaaacgcagacgattgtttttttcaatggatgctaccacttcattgatggagcagttagctatcctgaccacagcagctagcccagatgttgctgctgctgctgctgatgccgcaattaaagcatttggcaatgaaaacccgcaagcaaggaaagcctttcgcctcaacgagcaagaatataagactaaggcttttgcttctaatcatgtccaacagattgaccacaaagttagcaataaggatacggcgatgcatggccagagtggttctgataagcaggaaaagaagttcattgctagcgcatatcaattgagggcagctgttgctactgctgttggtgtagctgctgcccgtgctaaaatgcttgcagaccaggaggagcgagaaatggagctcctaatggcgtctgtaattgaaactcagctaagaaagatgcaatacaagatcaaacactttgaggagctagattcactcatggatcaagagtacaccgctatacagcaaatgaagggatccctcatgaatgaatggataaaggtccttgagcatgcattccgggctggagtgtctctaccgagagatgaattgctcaccaaactgttgctgaactag

SEQ ID NO: 28857 - DNA, 102 bp, Zea mays
  Peptide Sequence Number=SeqID_72232
atggctgccgagtacaacaagctgcgggagcgttcgtactcagccgaggctgacctttttgtttgcttcgatcaagtcgtacctgttggacagtggacggat

SEQ ID NO: 28858 - DNA, 709 bp, Zea mays
  Peptide Sequence Number=SeqID_72233
atgacaagtcaagatgtgttgctgcccgagcaaggctgctgcatctgcacgctcatcgtgcgggtgctggtggtcgtcggcctcgtcttcggctttggcatctacacacgtggcttccacaagctcaccagcagcatgcacctacaggacgcctactgccccggcgccggcagctccttccgcggctacaaccacttcgtcccgctgccccttctccaagatttagggcctggttgcgggccgattcgagccctgtcccgctctcgagtctcgatggagttggatgaactgtcgccgccaccgggcggatttgggactaacgagccactgctcccgatggcggcattcgcagtcccttccttgtcctcgcgcatcctcctcgcctcgccccactccccgcccactctcctccgcctgcgtcgcgcgggcggccgctctctggagctgtcgtcacggcgcggcgggagcgcgcgccttcgggtcgttcgacgagcggtgacggaggaggatagcggggccgcgcgcggagacgaggaggtggaggaggacccggaggagccagtggctggccgcgacctcgtcacgctcgccgcctgcctcgtgggcctcctcaccggtgtctccatcgtgctcttcaacctctcgattgatgtctattcgtttggaattgtcatgtgggagtttcttactggggaagagccatactctg

SEQ ID NO: 28859 - DNA, 606 bp, Zea mays
  Peptide Sequence Number=SeqID_72234
atgaacagagctatcgcccccgagcacgtaaccctgttgtcgccactattcactcctgttggtctccttgctgctgagagcaagttccaacatttggcgcccaccgttcgtgctacgacaaaaccacccgcgatggcacccaagagagctaacccgaaggatgacgaggctgcgaaggcagcactgcttgccgcaagaaagggcaaggccctcgccctcacccaatccacccaccaagagcccactgaagacaatacgtgctcgggggcgatagctctgttcatctggcctctcacgggcactgtgcgggggaatgcctttacaaatgaggcccgtagcacacagcgaccgcgcagggcccgttacaatgggccggatcgtacgtgggcctccgaactggacgaggccgcacggtgggaggacctcgtcgcaggccttcgtctggcgtcgtaccgagcgaagggtgtccctgcccgttttgtcttcgtcggaccggcggcaccggcgaggacttcgagcggagggtggcggctatgccttcggcccaacatttgccctccgagggaccagttcgacaaagtcacctggtgccgaagacgtcgctag

SEQ ID NO: 28860 - DNA, 1581 bp, Zea mays
  Peptide Sequence Number=SeqID_72235
atggacaaggatcgccaaggtgcggcgcaaaaacgccaggcggctgtcaggctgcatgaagctaggccgaagaggcagcggggggctgcgaaggctgcggcctccggcggaggcaagccgccgaaggcgggcgcctctgcacctagcaaggcgccggaggcaacggcgggcgccggaggctccaagacaacgaaggtggtgccgccggccagcggagtggcggaggcttcgaaggcggcccgagcgttgccgttgtcgggcaagcgctttgccgacttcggcaccgatattactgtagacgactatcttggtgggtcggacgagggccagcttgctatggttgcgcctggcgcggagatcgcgacggcggccatagtgccgaaggcgaggggcgaggcccttgacgccggaggcgaggtgtcggccctcgcggtggtcagggacgaggcgggcgcatcgacccgccggctgaagggagtgacggaggcgctgagtcaggcgacggaggcgctgagtcaggtggctgacttcgccagccgtactgcgtcgggggccctcacggcagctgtgtctgccgaagtcgagagacttcggacacaacatgctgacgctgtccgtgagaagtcggcctccgacagcaagtgccgtaagctgacggacagggtggccgccctggagagggagaaggctgacctccggcgccaactggcggcggagaggagggaagccaacgaggccgtcgccaaggggcaggctgcgcaggcggaggccaagctggcgcgggcggagggcaatcttgccaaggagctcgccgaacatctgcaagagcggctcaccgccctggagagccgcgcgaaggaggccgaggccgcgatgcatgcggaggccgaaaggacgcgcacgcagcttatggatacatatcgtgagctgggcgcgcggaccggtgacttcgaggtgccggaccgagagcccggccttcgctgtctgcaggaggagctgctggaacttccagccgtcgcgggggggttgatgtcgtacgcctccctggtcacctgcgagggggcgatgaacgcgctctcccgcgaagggtgccgacacttcgaggccttcgaccaggcggatgaagattttgagcgagatatctataaggtcgaagaccccgtagtgaaggaatccgccggggccctttatgaccggatgtggggtctgtacggtcgtgaggtggttagggagcgggccgagactgcgagggctcaggcggagcgcggcgagcgggtggacgacttcggggctctgaacagcgcgctgccggacccggagccgaccctcgcggaggctgtgactggggtcgccctggagccaaccccggagaccgcagcgaccgcgacggctgcccccacatccgctgtggccggcgaagacctgcccccgaaggtggccgaaggcgcccctgatgcccccgcagctgctgtgccgagtgctgaagatcccgcggcggtggcggcggaaacaacggcggaggcagcggcggagccaacggcggaggcacccgcagcgtcagggccttcgcaggtggcgtag

SEQ ID NO: 28861 - DNA, 744 bp, Zea mays
  Peptide Sequence Number=SeqID_72236
atgccgtcttcctcttcttccgctgctactacgccgccggccgccgcctcgtctgaggagacgttgagtagcttgatggtggaggagttgcgcgccggcgactctgttgattttggtgtgtcacggatgacgtcagcccgcgttgaagatatgcagcgattgggctactttggcggcggagttgctcgtgctccggggacggaggaagtccccgagccggagggtgaattggtcgttttcgaggcgttcttcgccgccgtggcagaggaagatgcagacgaaggggcccttcggtgcgccgccggtcagagcagtgggcgtgatttagttgaagagttcgtggcgtacggggtgtggcccttggcgcacggctgggcgctgggcgaagtgtgccctcgccagatgccttttcacggaggaagggtggtgcgaagccctgccttcgcactgaatctgcgaaaccgcgacccggccgcgtttgtgcgcgatgcggaggacggggcggtgcggctcgtggggcgttacgtgccgaggacggaaggccagcgcagctttgatatccgcgggtcaaatgaccgtttgaacagggtcttcgaattaaatcaattgtcgtacgacggctatcctggtcaagacgaagcgaaccgccgtggaaagaaaccggcggtggagactggaggcggccgccccttcctcaaaaaagagaaaattaggtactgcgatgggaggacttggggtgtctga

SEQ ID NO: 28862 - DNA, 81 bp, Zea mays
  Peptide Sequence Number=SeqID_72237
atggtctttctgaagcacagttctctgtttgcaaattcgttacctaataatgatctaattggccccgtgctaagcatctaa

SEQ ID NO: 28863 - DNA, 213 bp, Zea mays
  Peptide Sequence Number=SeqID_72238
gaacttctgggaaggcctgtacgcttgaattggcgggaaagtggtgatgataaggttgaagttgcaaaggctgacagtgaagttgaagctgtaaatattgaaggagcatgcgttgatgatgccagcacggatggaggcgacaccagcggagaagacaccacgctgcgtggcgtggggcaggtggtggactgggactcccattccgagctgtag

SEQ ID NO: 28864 - DNA, 267 bp, Zea mays
  Peptide Sequence Number=SeqID_72239
atggcaatgggtacccgctacccgaaacccgtgggtatgggaaacccgttgggtacccgaaacccgcatgggtttgggcaaaattttatacccgtcatgggtatgggttttttagcgggcgtattttttcttcgcgggtacgggtttgggcaagtggaggaagggtgcggcctggcgacggccgaggagatcgccgcggcggcgcaccacgtcctctgcatcatcgacgctgaggcggcggcgcagaggcagccgggcctcatctag

SEQ ID NO: 28865 - DNA, 402 bp, Zea mays
  Peptide Sequence Number=SeqID_72240
atggagccgaaatttacggcgcgaaaatcacgcatcaccggacgaggggcacttggcgatgaggttgtcgccggcgaggatgaacccggggatggagaggaagcccttctcgaggaagacagaaacggtgtacgggcccgtgacgggaagttcgtagggcgcgaaggcggcgcgggcgtggtccggagcgggcgagggcgtggatggatcgctggttgtcggcggctgggcaagcccggagggggcaaggacgcggacgcatcaccggtgcccggcggctgggcgagttcagagggggcgaggacgcagacggatctgagcgaggatggaggtggtggccggcggctgggcaaggacgcagacgctagggttcggccgccgcgagagttacgggagagatga

SEQ ID NO: 28866 - DNA, 1992 bp, Zea mays
  Peptide Sequence Number=SeqID_72241
atgccgggctcgtcatgtccaactttgagctctacgcatagccgcggcgagagcagaaaatctcccatagaagagaggcgagaggcgcgttccacatttctccttttggctattgttttacttccccggcctcccgctcgcttttcagccgaggaagagaggcagtggcagcagcttgcacaaacacgcgcacacacacaagtgcgcgcagataccagcagatcacagctagctccgcgcctccgccccacggccgcctcccagagatttctgtttcgccgcgaagtcaaaacaaagcgagcttttggtggtaatctcttggagcattgcggcggcgagccggatctggcacgacgcgtgcagctgctgaagtggcctgccactgccactcatctgcgcgcgctggctgaagcgctaccgctgccgccgcgctcattgactgcccaagctgccaagcacaaagccctctcatcctcaggctactccaaagtccaaactactgctgcgtccactgtcgcccgcccgcccgccagccacgcagcaggcggcagcgaggaaggttccttgctggcctccgtgccataccacaagtccacaagccgccaaatcgccgatcgacatgacgctggaagctttgtgccgcgacgtactcatctcatctacgacaccttcaacgccgcgtctgccgcttctgcggggacggggagcttttccggcaatgcaccatcggcggaggtggcaccgcggccaccgccgcggggggtgtcccaggcgaacagcgtgcagcaggggcggaggaagcgccggcggcggcagaggagcaccaagaacgccgagagccagcggatgactcacatcgccgtcgagcgcaaccgccgccgccaggtgaacgagtacctcgccccgctccgttcgctcatgccgggactcctacgtccaccggatattcagaattcagatagtggcacactggcactgagctcgagcagcagctgcaatccctacacggcgcaacgaacaccaggccgtgaccccgcgtccgccggcagcagtggcgcgggcgtgacagcggacgccgcggcgcgcagcgagggggcggcgcctcatgaggcgcggccgcctgcgttcgcgcggttcttccggtacccgcagtacgcgtggcgccacgcggcggcgcgggaggatggcgtcgtggccgtggaggacgaggcgagcggcgactgcgcggtggcggacgtggaggtgggcctggtggtggacgcgcacgccagcctccgcgtgatggcgccgcggcggcccgggcagctgctgaggctggtggccggggtgcaggcgctcggcctcgcggtggtgcacctcaacgtggccaccgcgcccgacgcgatggcgctctacacgctcagcctcaggctcgcctccgtcccgctcccgttcgcgagcgagagggtagctccctcatatgctcccgtccctgcgccaccgctcagcagcattagccgagtgaacaccccagaacctgccagagaggtaggcgacgttgccgccgacagcgactccgcggcttccgctgcactctccgatgattaccgcttttccagcaagcccatggcttcctcggtcgtcgacgtccacctccggctagtttcgagggactgcgagctcgcggcttcctccgtcgtcagcgtctacattcggccattgtcactttttcagaggcactcgcgctataattcaccggactgtccggtgtacaccggacagtgtccggtgcgccacaggagagcggcctcaggaactcgccagcttcgggaaactccaacggctagtccgctaaaattcaccggactgtccggtgtgcaccggactgtccggtgcaactccggagcaacggctacctccgcgccaacggctctctgccgcgcatttaatgcgcgctctgcgcgcgcagatgtcaggcgcgcccattccggcacaccggacaaggaacagtag

SEQ ID NO: 28867 - DNA, 402 bp, Zea mays
  Peptide Sequence Number=SeqID_72242
atggagttatggcttcgccttcgctcaaggcttggaatggtgatactgcagctattggtaagctggatgatgtctgggtgcagatcaaagccgccgacaaccagcgatccatccacgccctcgcccgctccggaccacgcccgcgccgccttcgcgccctacgaacttcccgtcacgggcccgtacaccgtttctgtcttcctcgagaagggcttcctctccatccccgggttcatcctcgccggcgacaacctcatcgccaagtgcccctcctggttctggtgcattctttactcatatcgccctgctcttgtgatttttattcctaaatacgtcttttatgctaatttgaatgtgttattatgctcaattaccagatctcgtgtacgctccgcattataa

SEQ ID NO: 28868 - DNA, 393 bp, Zea mays
  Peptide Sequence Number=SeqID_72243
atggagaaggcggtgcacagctgccatgggttgtatcacctgtggattctggggcctgagccgttggacttggaagttggaatagctaggaggtggaagcccataacgtacaagcccactaacctaactggtctggatgggaattgctacggcccagtctatagcaaccgatgggccagactgtcgctcactgcgtcgccgccccacgcccaccacaccgtcacctccacaccgccgccccaccgcctccacgtcaccgccgccgccacgctcaccacgcccacggcgctgccgccgccccacacccaccgtgccaccgctcgccgcatggttctccttggcctcgcccatgccaccctggaaccacatcaagggtacatgctcacctattag

SEQ ID NO: 28869 - DNA, 585 bp, Zea mays
  Peptide Sequence Number=SeqID_72244
atggcgcctaccagcagcaccgagctcgcacatgtcaagcacatcacgctgcaccagttcctgaagcagcagcagctgctgcagcaccggctgaagcccgccgtgatgtggggatggccagcgacggcggccgctatcggccgccacgtgcccgacgacgtcgcggacgacgacgacggcctcggcggggcgtggccgccgcgttcgtacacgtgcgcgttctgccgccgcgagttcaagtccgcgcaggcactgggcgggcacatgaacgtgcaccgccgggaccgcgccaagatgcgcggcggccaccatggcagcgccgcggcgcaggcgccgcagctcggaggcgcggcgtcgcaggccacggacgagacgccccacgccgcgccggctgcgaagtacgcggtgctgtacccgatactgaactccaatgccgctgccggggtcctcattcccagcggcgacgtgctgctctctgggccggtggcgctgcaggcggccgcgcacgacctgtgccacgtcagcgacgacgacgacgaggaagacagcgacgtcgacctggagctgcgcctctggtggccgtga

SEQ ID NO: 28870 - DNA, 867 bp, Zea mays
  Peptide Sequence Number=SeqID_72245
atgccgggaaaggcggaccgccgccactcagccagggcgcagcattacgtcctccgtccggacgatggttgcgccgcgtaccgcgagggcggcgcccatgttctgggtggtttcggcgaaggcgaagacctgccggcgcgctttgaggcgtcggcagccggagaaggcttctctaccgatgagattgccaactccgccagtagccctgggtctccgtctcccggcctgaatggctggctctcgtcctcggtgggtgagagtccttctgccgtagcacccgccccgaagccgctgctgaagctgcttcgtcgcccgggacgggggttgttgtcgctgttgccggatcgggcggcggcgagccacccgtcggccctcgatcgctccgcgggttccctaatcttgtggggttgttcgtacccgcggagacggaaccggagttccgtttgtaatggcactttgaatgccagtgttcattgtggctgtcgaagcctgaacataaatgtttgtgcgagcgagagttgcttctcgcggaaggtgatgagtgaggtatccgtatcccggaggcgtaggagtccctcggctcggtctgccttgccgcttacgcgcactcttacccgtccatggggctctgtcaccgacgcagtcgagaaggctcgaaggatcgcttcggcagaagagctttcgaacgtgaagacttgttcggtccgcagaatcacttatccgaacgtgagttacttatcgcagaaggtgatgagtgaggtatccgtatcccggaggcgtaggagtccctcggctcggtcagccttggctgcttacgtgtactccgtcgttttcaggatccactttcgaagtagccaaaaagcgtga

SEQ ID NO: 28871 - DNA, 306 bp, Zea mays
  Peptide Sequence Number=SeqID_72246
atggataatattgatcacatcgcacaccttcagcatgcattgaaaagctctgtttccacccctaatgatgaagaggtcgaagcagaggcccttgacggagcgacggcgcgggcgtcccggacgagcttgccgcaccgagcgaggcgaaactactcgagcacgtgcgcgaggtgcgcgacatcggtgcaggtccggagcgtggtgaccgcggaagcgaggcccggcgtccatgtagaggcagggcttaaaataccacatgagcatgagctgatgagaacattatttgtaaacacatgctcaatataa

SEQ ID NO: 28872 - DNA, 1429 bp, Zea mays
  Peptide Sequence Number=SeqID_72247
gcgcaagaacaagggcagaaagcaacggccacgtgttcgacgcgctctgggctcgccagagcacgcccgacgcgcgccccgcgtgccccgcgtcgcgccaaagccaagccggcgccatggcccgcgcccgcgcctataaagcacccagggacttcgaccgtacccttccgcacgcgctcgacctcaccggagcccaaaaccaccggcgtttgcccgtgcacggcgtgtctgcggccgcccgatccccctgccaccgtagaccggccaacagaacccttcccaaccccgtccaaccctcggagaagactatgcacacctcggtgaagctccccgagcgaggaatcggagtttgcttcgccggagaggccagtccacggtcgccggactccacccgaccgccagtgagcgtagaccggtctctacgacaccccgtgaagctcaccatgctactggattgtactagatcgtcgtggtttggccggagctcccgccgccaacgagagcacccgcctgcgcacgtggtccggacgattccggccacccccgccgtcgagtcgtacaccgttgtgaccgccaggacctcccggagccaaccccgcccctcgtcggacctctctcgccgccgcccacgcccgcggtcgcttccccctcccacgcccgcgactccctccccctcagcccacctaccggcccactccgcgctcgcgcacactgacacgccgtcccactcgtcagtcgccttccactcgccctcgctcgctaccgcttccgctggcgggctggccccaccggtcagccgctccgtcgtcctcgccgcgtacggctttgtcgcggtcacctccggccaccgtcctcccccgcaccccgtcccctcgcccatcccctcgccgcataggaaaggttggcaccgccccgtcctcgccgcagcggcctcgtccttgcacggcaccgcccgccgtgcggtctcatcgtcgccgctgtgcggcatttacttcggcgttgtgcacctcaccggcgtccgccgagctccaccgctcccctcccctcgggcgcctataaaagggccgccccgagcacctccttgccccgcaccggcctcagccacatatcttcccgctcgcccgagctcaatcatgaaagcgtcgccgtcttcttcccctccgcttcgccacaccaccgcgaacttgggacaccattcccttgccccaatccccgcacgcacctcatcggcggcgactctcgccgcagagctccgccacctccccgaggtcagccccctcccgaccccctctagccaaattgagcccgcccttaagtttgccagcccctcctcgtgcttgggcgcctgcccgttacccaagaaccgggtcaccggcggcgaatcgccgccgagcccactagcggtcgggttctcccccgcgggcggccg

SEQ ID NO: 28873 - DNA, 546 bp, Zea mays
  Peptide Sequence Number=SeqID_72248
atgtcttcttcctcccttatgcgtcgcgtctttccaccttccaagcccccggatggggggtacccgccgtcttttcgcctcatcgttggaggaacgcaactccatgggagttggtaccttttagccatcgttcggcttcaaggatttccatcatgcagcccggctgcacccctccaccggcggtcacccaagacggtgaccaccagttcctgggtggggagaagcaagccgggctgcgatcttggtcccaccctcagcttcaaggatgttcatcatcctcgttggggtgggggccgggctgagccggcgctctacctcccgcgcgggttcatgggtcaccctctcccgcggcgttcgggggagagggcgcccactggccctgcgggcggcccggacttcgacaatgcggggctggtcgacggcggggcgtcgtcacctccagcgcgtcgggcttgtcggcttggctcccggcggcccctcctgctggaggggcggctgccgcgccgtgtgcacgggaggaccacccaagatgccgcgcgccgctag

SEQ ID NO: 28874 - DNA, 807 bp, Zea mays
  Peptide Sequence Number=SeqID_72249
atgcaaccgagaaaggctggtccccttgcaaaaaagtgcgacgaaagcctccaagcgagtgctaacactcccttcgaggctcgggggctactgtcggggaccataattaggggtaccctcaagacgcctaattctcagctggctaagccccagaagacgacgaactccgtttcgtgcgaccccagggctcagactccgccctggcctctgccaaacgacctccgcctcgcccgacccaggaggtcgggctcggcctcggccatggaagacagactcgacctcggcttcggaggagcctccacgtcgcccgacctagggcacaggcccgccacgtcaacaggaagcgccatcatcaccctaccccgagccgactcgggccgcagagaacaagaccggctccgttgctcctccgacagccacgacatcacaccatcagggtgccaagatctctccggctgccacattggcatggccttcttagagaaggttggccgcgcggggacgaggacgggacaggcgctctcttggggccgctcgcttccctcacccgcgtggacgcttgtaaccccctactgcaagtgcacccgacctgggcgcgggacgaacacgaaggccgcgggatttccacctctctcacgcccgtctccggccacctcgcttccccccttcgcgctcgcccacgcgctcgacccatctgggctggggcacgcggcacactcactcgtcggcttagggaccccccggtctcgagacgccgacaaatggcagtccttaaaactgattctcaagttatttctagccatgtag

SEQ ID NO: 28875 - DNA, 175 bp, Zea mays
  Peptide Sequence Number=SeqID_72250
atgggaattagagggaagggctgctgctccccaacgcttggaagagaagggggcatggagaagaagaccgggaaggatggacttgccttcgtcgaagctttcctggcacaaaaggtctacctccgggagatcgagctctggcccttcttccggggctacgggttccggatcgacg

SEQ ID NO: 28876 - DNA, 348 bp, Zea mays
  Peptide Sequence Number=SeqID_72251
atgacctgcataaagtactttttcatggcccataactttgggttgctcagccttcaaagaaccttcgtgccatcctatgttaaaaagccaaaggggattgaaatcaagtatcaacattggcgcccacctccggtgatctcacgaccacaacaactcacaacatgtcgccgaagaaggcaacaacaacaatcggctccatcctcaggaccttggacatcaaccaagaggatgaagctctccttagggagacttggtactcgtcgcttcgacgtagaactgttatcatggcaaaaattgaaggaaatgctcctcacaaggcttgtttcagtgtacccaagatccagatga

SEQ ID NO: 28877 - DNA, 579 bp, Zea mays
  Peptide Sequence Number=SeqID_72252
atgccttgcttctctcccactcgcggcgtcctctcgcctccgagctctctgtgcccctttgccttcaaggtctctgctttgcgttaccatagtttaccatggccttgtaagttcatctcgagcatgcccagactgagtgggtgctcgacatggtatgccgcctacttggatggaatgcgccggcgttcggcggaaggatttgcgctggcaccctccacactggtgaacttgcagttggagagttcgtgccttttgtcctccccagcgggttggttctactggtcttgtttttcctctgctggaggtgcgtggccttgtgggagcggcgctcttccaccggtgcttggcttcaaggatgttcatcagcctcgcggtggtggagagcaagctgagccgtggctccacctcccacatgggctggtgacccgcctcttcctccagcattcggaggaaaaggatgatcaccagccttgtgaaggaggcaaacttcagctatgcggtcccggccagaccgcaagcaccgcctgccgccgtgctcccagctccatggcttggatggtcttgtcctcacccccgtag

SEQ ID NO: 28878 - DNA, 570 bp, Zea mays
  Peptide Sequence Number=SeqID_72253
atgcctgtccagtctattgccaaacagtacgctcgtgctgcaaggtgcactgtgtccatcatcacttatgcattgccaaggaagcttcccctgcacgctaataccacgcagatcgcggatgtcaggattctcccgaaccatcttgatgttctctttgatttcgagcaaaatgtcgagcccaaacacttgcttttctctaggttgatcccaattcaacgaagttctgcaactccttccataaagcgcctggaacggcctcctgggctcgagttgattcactcttgcgtcgacccactcttccagacattcctccccaggcccacaaagggatggccttgcgaaataacaggcctaaggccttccgcgagtacgcttgtcaagtcgttgcctctgagctttgatcggtcagcttatgctttagagatcagcacttcgtttttggaggttgaagattcattgggtgcaccgaaggttggaaatttatttgatcggcgacagattggacgtccggtagatggctctttggctggtcttcatttcgcttcgtgcttcaatgcttctgttgattag

SEQ ID NO: 28879 - DNA, 306 bp, Zea mays
  Peptide Sequence Number=SeqID_72254
atgagcatcatatgttgcccaagaaggggtatgatgcagcttcatatccttagagttatgccgcctcgtagggctcgtggcagcccgcaagcccctagtggggattctatgagtccagcggcaatgttagccgcgatgcaggacatgcagcaggagttggccattctgaggcatgctattcctgttgctcctgcgggtgttgctcagggtgctggtggtggaggagtgcccggggcgatgttcccgcgggtgatacttcagatggcggggctgaggtgcctcttcctgtcagtggtctttctgtga

SEQ ID NO: 28880 - DNA, 324 bp, Zea mays
  Peptide Sequence Number=SeqID_72255
atggcagcctcctccacttccaccgcgcccaagccgaagaagattaaggttttaactcataggccaaggccacatcctatagagaagacatatgaagtgcttgatatagaaaagatgaagaaggttgaacatgtcgaagctatccccttagctccagaggcaattcctgctgcgacagttgaagctagcatcggtccagcagaagagcatctaaagctactgaatcccccacccataactgagttgccgaagccaacatctgttgcgaccacaacaataactcctaagaaaggaggatggccagcgttttggatgttgttttga

SEQ ID NO: 28881 - DNA, 255 bp, Zea mays
  Peptide Sequence Number=SeqID_72256
atggcgacgacgcgttcggcatccagttttcttcccctactctctggttgcccgatggggacagtcgcgctcggccccacttaccaaagtcactgtgcgcggtctatggtgggtgggcaagagcgtggtgccgctggccaacagggcccatgtgtcggcgtgagggggtgttttggctggggggcgcgtgcagcgagtggagaaaagaagatgggccacgcggtagaaggagaagtgggccagaagcggaaatga

SEQ ID NO: 28882 - DNA, 381 bp, Zea mays
  Peptide Sequence Number=SeqID_72257
atggcgccggcgaggaagcgggcagacgtcgagaggcaccgaggtcgcgggtcgtttcaccaccggcccgcacgcccccacaggtgcgggcaccgcagcgcagccggccacgacgagctcggggcgggggccggagcgctagggcgtggaggaggcggtggagggagggggctgcaaagcgaggccgggggcggtgttgctgctgcgactgggcgaccgcgaggcgaagccaaagcagcggacgcggaaatgaagggggagcggaacagaatgacgcgtcgtgtgtctcgggcactctgcacagtgcacctgcgcagttctgcactgcgcggcgcggcgcacgcctcctgtccctgttggcagttgacgctaggggcatag

SEQ ID NO: 28883 - DNA, 402 bp, Zea mays
  Peptide Sequence Number=SeqID_72258
atgtgcattggcgtgtaccgcaatgaaccaaaaaaccaaagcaacataacaaagcgaggaccggtggaacgattacctcaaatcgctgaagaagggaagactggacgatttcaggacctgtgcttgttcgccagttctccaatgcggcagatctacacgagcgacatgaacgatgagccaatgcacatgaatccggtgccgaaacggaaagcaatcgaaacaaaagaaatagggatcccaagaagaggaacggacgacagcgacggagtcgacgagaagaaaggagcgcttgccagtcagggggaaaaggaagacaacacagcagagggggcttcatataagggattgggagaaagcagtggcatgggcgctgcggtggaaggacatgacacagtgagctga

SEQ ID NO: 28884 - DNA, 1893 bp, Zea mays
  Peptide Sequence Number=SeqID_72259
atggcggatgggcagcggcgcggatctggacgagggcggcgcagacgagctcgcagtccagcgaacgggcggcggccggatctgggcagcggcggcgcggatctggacgagggcggcgaacgggcggcgaccggatctgggcggcggcggcgcagacgagctcgcagcgacgggatccagcaaacgggcggtggccggatcagggcggcagcgggcgggatccgcgcagatgaggccgcaggcggtagggccgcgacggcggcggagaagaccgcgacggcggcaaaggggaccacgacggcggccggaaggagagatgaaaaaaaaatgatattgcaaatttatggaattgcactcagcaaggtgaggattttagaaactattaatgcacatctagggacgagttttacagtgaagtgccactttgaagatatattcaaggaaactactgaactaatagactctgaggatgcactagatgaagattggctttctgagtattcaggtgatgaggactatgatcctgatgaaaatgaggccagtggcgactgtatggacagcggggagaagattatgtctgatgattccaatggttcaggaagccccctttattctccaaatgacgatattcctgacttcatatcagcagacttaaatgttgtggaagggttttgtcataccaatttagatttaggcattgatgccgttgaagatgattttgcacagatcctcacctaccaaaggccaagaagagatgttgattatagaaggcttaacgaggaaatgtttgggaaaataaccgggaatgaagaacagagcgaggacgaagattggggccatgaaaggagaaagaaaaggacacattcaggtgttgctggggataattctgttggtttcttgaacgttatatctgatgaaaagagccagaagaaggggagaaaacttttcaggattcctcctgcagctgttgaggtacttcgcagagcttttgctgaaaatgagcttccaccccgggatgttaaagaaaatctctcaagagaattgggaatttcttttgaaaagattgataaatggttcaaaaatacacggtgtgctgctctcagagatcggaaggctgaaggaaacagtcataatacagctcccagcaaaagctcaaaaaataaaggaaaagctggaatctcaggcaaggtgagggaggtgctggccagggatcaaatcctagtggccaaaagaaaaaccccttgctgccaatccccaaaaggtagtggcagatcgcagactggaaggaatggtcatgttactggtccctgcaataatttgagaacaaatgaagaaaaaacaggtatatcggggaagtttgattcaggagacaactcttgtttggttcccttctctgaagtcatcaatgtgcctacgcgattgccacacaactttgagatgaggaagatggaatcaactagaagtcctgcgaggctacacaataaaggagggttcctgtctgcaacagtccaaattaaggagagtacgttgttacccacaggcaagccttgttggcagtcagaaatgagccatccaacaactaatgaagtgagcacttcagcgcaagctactacttggatcgacgcgggggcgtgtgccgaggagcaagaacctactccttgggtggacatcggggtctcagactaccagcctttcctggatgtgatcgacgacatgtgcggacttgagtggaggctgcagagactgaaggagaacatgctctcatctagcatagacggccaaaccgccgccagtgagagtgacaaaagaaaccagaccgtggtgctagtgccaaccgccgagctcaaggaaaagctgccgcatgacggtttattcgggcattattgcccatag

SEQ ID NO: 28885 - DNA, 2306 bp, Zea mays
  Peptide Sequence Number=SeqID_72260
atggagaacatgtggtataaaacaaagtccttcccacccagttctgatgccccctcccacctcagcccctcgccggcattctccccgaactcggcgtccacacccacttttagccaggcgttagaacctagtcacagtggtgtatcttctcagttgaggtctgcaaaggaggtggtggtccggggtcacgtcgaggacctccggcaggcggtctctgggcgacgtcaagaaggtctgacgccctactcgctgtttccgctgtcgtcttcttgggcatcaagcaaggagcggctgggtccaccggttccatcctctgtgctcaatcataggatgtctgtgtggcaaagaattggccctcagctgccgccgtcgaagttttctcattctccggcagcagaggcaagcttggtggagagcaatatctcgagtcattctggtaagaagaagaggaggcgggccaaatgtcataaggaggtttcttggcagtccacagcgccggtgggtgccgcttcgaccttggagccctcgccaggagtagggacgcagtcgagagtgaagacctgcgtgcttgagttctccactgctatggctcgggaggaggcggctcttcgccgggctttattcgtctctattgttggcagcaggccggagatcagtggagctgaagtgcgggatgaagtggctcgggcttttggaattgacgttaattcaatatcgattcatcagtccttgccagaagatttcctattgttgttaccggatgaaagttcggctgatagagtctttagcggaggaaaattgtttaggggccctcttttcaatcttcaattcagacggtggtcgcggttggctcatgctgaggcggctaggttgccagcactggtggaagtcgaggttcatggcatccctgcccacgcatgggatcgttctacggcggagtatctgctccgtgactcttgcattatcacagacattcatccgagcacgtcattgaagaatgatctgtcttccttcaggctttgtgcatggtgttcgaacacagatttgttccctcggtcgatgaagctcctcattgttgagccggggacggatgtgcacgagaaaagatgtctttcctatgatattgagcatgaggatggcggcgggaggcattcggacgactccaattctccacgtccggacgacgggcggcttcagcgcccaattttccagcgtctgggcccgaggggacagtcaacgtctggtggccatggagccgaggaggaccttgctgcggggatcgaggaggtgcgacggctgcattgccccctccctttactgctggttgctgcgggggtcgaggaggtgcctccccctgtgcggcggctggctgttaattctgtggcgggagtcgaggaggtggcctcttcaatgggacgagcggtccattctccttcatggttggcggcaggcacaggaaccgaggcgcacattgggagaatgctggcggccgacataggaaccgagacgcactctgggggaatgctggtggtcagcataggagccgaggcacacactgggagcatggtggtcgttcctgccagggaggtgttggctgtccatatggaactcacggcagcagacatgggcacaggtcccgggacagactgcgcaaaggttggccctgtgggctgtgctgttgatgctccagttgtgcaacagccgcagatggatgggcacggggggccatgtggacaagaggctgaccaagaccgtttcgccccgcaacagtttcaatgtcgggatcgagttggtcccccggctgacctcaactcaatctttggttgggacgtcggaggcggacaggaactctcccgctggaatatggaggtgtcggcaccagttttggatctggtacctgctggtgtttcttctcagttggaggaggcgacccccgttatgaaactggtggctaatatcacaagggacattgactgcttgcttccgcaacctccaattcaaaaaagaagaactaaacagcttccgccagattttgtcccacgtcacagtagtcgcttgtcaaagaaaagggaaggcttaaattcaacagtcagacaagtccaggcggagctcatgttgaagttgaacgtcacaaactcacaggtggctgtgactgatgaaatgctggaggaatttggacagctgtttgacaaacccctttccaactctcacatcaaggccctggcagctttgtttggatggccggtcccagataatgtgcaagaatgcttggatgttcctttgcttagggagttaagcattgaaac

SEQ ID NO: 28886 - DNA, 687 bp, Zea mays
  Peptide Sequence Number=SeqID_72261
atgaagttaagatacataccagttctctatgcaacattttggaaatacgcctatatgagagtttgtaaaaatattccatctgaactgccagatcctacatcttcattttttaacagactgacaagttctctagaacctgttgatttcacaggagaggatcttttggtgattgctgctgatcaaccatttcgcttcccttccacatttacatttgtggtcagagcattctcagttctagatggtattaggaaaggccttgatcctaggtttcatattacagagattgctaagcccttgcacatcttcacatatccaattgtttcaacaattggatatgtgcggtgcagggacaacgagctatgcagcgccgccggcgccaaggtggtggtgacggaccaagcgcggatgtcgaaccgcacagccctggtgctgagcgccgcggcgtacgcggccatagccagcgccggcaaggccgcgcgcctcagggaccggcgcgttgtcgacgtcgagtacaagagggtaccctacgagtacgcgaaggaccgcaacctgtcgatacgcgtggaggagaagatccggccgccaagcaacctgtccatcaggatcctgtaccagggcggccagaccgacatcgtcgccgtcgacgtcgccaccggcgcccgtaagggcgccgcctgttctagttag

SEQ ID NO: 28887 - DNA, 894 bp, Zea mays
  Peptide Sequence Number=SeqID_72262
atggtgggtacaagtgcggtcactgcacggcggcagccggggtcagtggagcattgtaccattcaggaaatggttgatggtgtgacttggcctaccaccctgccaccgggttggacggtcgagtgggatgttgctccgatgaattcacccacccccgccagtggaggagacacccgtttcagttccgatttcctttctcgcgatggctttccttccatcttgtgggaagtgcttaactccgccggttaccctacgccccctttgtacacggtgcagttgtatgaggagcatcgggtacctcgttgtcgggtctggctgactttggaggctcatccccttcagccgggttggcgttctcttgattctgagacagttggactcaggacggacgacatcgttgaagcggcagctatgaagactctgacgactttctgtggctaccatcccctagagatggtgatgcaccccttgggactcttccctgctgagaagaaggatgatcccatgtggtgtaaccgcgtgagccatgtaaaggatgtgtgggcgatgtatccttacttggttgggagggtcaccgttcagtgcatgagtgcgctgtaccgccttcaggcccttcagagcgatgctatggcactccttgctaacaccgctcaaactgccaagctcactctcgacagtcgagaagattttgtggtcgatctatccaccgagttggtagagaaggatctgcaggtggagaggctgagccagcgcatcaccaccttggagcagcaggtggagatccgagacaacactattgatgtcttggagaaccagcttcacgatgtgcagagggaactcgaagaagagaatgacccacttggacatgcaccacctggagatggaggccaatga

SEQ ID NO: 28888 - DNA, 405 bp, Zea mays
  Peptide Sequence Number=SeqID_72263
atggcagcgaccaatgaggagtcggtgtctggcgctgtgggagcccaagtgatgtccacgatgagtgggcgagtgctagggaagctgaggggcagctgccagaagaagcaggccggcaagagatgtcccaattccatggtgagggcgagggcccccgtgcaggttggggtcggggaggagggctgtcctggtgccggtgtcggcgacagtggggaactcgatctattgcagggaggggccgacagagggggaagaggtggctggcacacaagggaccgatggcggggacacagagggtcgcggctgatggggggcaagggagcgatctgtgaaggggtggcagtggcgagaagaatggccgcaaacgcgcaggggatcgacggtggggaggagggccgtgactag

SEQ ID NO: 28889 - DNA, 309 bp, Zea mays
  Peptide Sequence Number=SeqID_72264
atgcggcttcatacccttagagcgtttccacagtttaacgtgatgaaaggggatcaggacgagcaagcccttcgctgcgcagcccgtctaagcagtggccgtgatttggtcgaagagttcatcgcttgcggagtgtggcctttggggcacgggtgggtgttaggcgaaattatacctcgccggatgccaaccctggaggataagctggtgcaaagcgcagccttcgctatggacttgcgtgggcgggatgtggccgctttcgtgcgggaagtggatgttgggggcctccgaaggtcctcaaaaacatga

SEQ ID NO: 28890 - DNA, 567 bp, Zea mays
  Peptide Sequence Number=SeqID_72265
atggagaactttggcagtcattctgctgaagcatcctccagcattcttgagccccttaggcatccgaaggtagcaatagctgtccctgacgcgtgggccatgccagtcaaccgtccatcacccgcgcggacttgggatcattttgctgaatccgcgggcccacctgcactgtgtttcttctacccgcgcgatgcagccgcccacctcctcaacgaactccgagatccggccgaatatgccgggcgtgcatggggacccccgcaccctgggcacctgagtatatggtccttgagcacacccgccttctactgccttgtcccacgcgagagtcaccacgagcagaggaagttgagtgaaccgccgccgccgctgtgcttccgcgcctgcaccaaggctctgcggccgaggaagggacctgggtgttcagcatcgtgcgaggattgtgtgggaagaagtatcgggatcgggggccgtgacgggtgttcagaattcctcgtcgaacctcaccgccgccgcaagatctcgtcgcgccgtggaccgaccgagactcgtcgtttgcgtcggtga

SEQ ID NO: 28891 - DNA, 1869 bp, Zea mays
  Peptide Sequence Number=SeqID_72266
cgccatctctctgtctctggcgattccctctcccccgccggcgacctcccctctccggcgaccactggcgatcccacggcgtcctcgtgcccctctccttccctcctcgtgaccttgattgcccgtgtgccgtctcccgtcctgcctggatcgtcacctctcgtacatcagctcaggatgccgcgcacgaagaatgtgtcggcgccagggggaggcgatgatgaggatcctcgtcgccccttcaggcaggtcaagggcaagaccgtttacttggagcagcaggaaggccgcaagaagcggcgtacgaacagagcagctcgtgcagcggcagcggctgcagcggccgctgcgcaggccgagcttggagatcagtcgcagactccatccgatcagatcgcataccgtgttcgtcgtctcgcctcccggcctcgctcctccactcaccccactgcttccactctgccacccactctacctgctcccgtcacccctgttgcgccatccacctccacagccatacccactacgccagcttccactgctcctcctcctcgtgctcccgcttcagctcctcctgtccctccacctcgattccgggagcgcgatgagactgaggttcgacccctggctacggatcctcgtttgtttgaccttcagcgtgctatagcggcacgggtacgtaggttcagatacatacccgtggagtcttggctaccacctcagagagaccctgcagcaggtgaccttttcagcacacgtattcaggagtcgtttttcagagctcagatgtctgctcagatagctctgcgagtgcaccggcttttggatcttccagcctttctgcttgcagccggtgctgactctgaggcgcacctcacctatctgcctggccttcagacacttctgactaccagcggcaggtatgttgaggagtgggtacgagtcctctatgcctctgtttggattgacccggatcatcactggatgaggtttcgctttgagcgcgaggatgtcaccattactgccagtcagatccgccagctttttggatttcccgagtcgacgactcgtcttcacagcctctgctacggcacttctgaccctcctcgtcgccctcacggcggtgtggctccgggtacagctcacgtcgcggctctgttccgcccgcccttcacagatgggtcgcgacgttcaccggcagattttactacagcagcaaagtacttatatgagctcatcagacggactcttctgccgaggatgggatacagggaggctaccactcatatacagctctggctccttggtgccctggtctcccactctgagtttgacgttgtggacttcctgatttgtgagatcgaggacaccgttttggatgggattcgtgctcgtcggcagttgccctatgctcactacttgtgtcacatctttgcgcagctgattcagcctcctcggtttcagggcacccttgaggcctcacgcctcgtttttggatcctaccgtcctgcgcctgagattcctgtgccagcttctgctcctgtttttgactctcaggccgaggatgcagctcttcgtcagttcgacactcagggtacagcagcagatgatgatgatgatgatgatgatgattttggggttcctcctccgcctccgcctcctatgcctccacgctcacatgatcatgaggctgggagttctagtgctgcccctgctactcctcaggctatggaccctgctcttgctttgattctccagactctcactcagcagcaggctcacctggcagccgagcaggcccgattatccgagaggatgctctcgatgtttcagaacatgcaggacaggcaggatgcacttcagcagtag

SEQ ID NO: 28892 - DNA, 222 bp, Zea mays
  Peptide Sequence Number=SeqID_72267
atgtcgaaggacagcttcgcgtcatcgttgcgccaccgaatcaaggaccagccagttgtcaacgcgcacctcgcggaggaggccaacgtctacatccaggttgatgttgataatgtcagagtaatcgatgtagcacgcaaatatgtcatgccaagagaattcatccagattaagaagttcagggatgcacttgcaaagcacagagcacagtatgcagattaa

SEQ ID NO: 28893 - DNA, 585 bp, Zea mays
  Peptide Sequence Number=SeqID_72268
atggctgccgtcgcgcgcgacgggcttgcgatgcccccagcggttgtgcccgcggcggaggaggagatgcggtggtggaagctagacagtggcgtgagcgcagtatcgttcgggttcgtggccaccgccatcctcgtgtccatgttcctcgccatggccatcctcgagcacttcctttgccccctggcccacacgctcgggcacgcgccgccccgggggatccaccgccgactccgcttcttcctcggccgcggcggtgagcgtgccgctgcccccagctcggatctcgaggcggcgaggaagctccaaggccacacgcccctggaggatgagctacgtgatgctgtgctgcttgttttcgccaacaagcaagatcttcctaatgccatgaatgctgctgagatcactgacaagcttggattacactccctgcgccagcgacactggtacatccagagcacttgtgccacaactggcgagggtctgtacgagggcctggactggctgtccagcaacattgcgagcaaggggatcatatacttctatggattgagccctctgggtatcttcttgtctattgtttaa

SEQ ID NO: 28894 - DNA, 279 bp, Zea mays
  Peptide Sequence Number=SeqID_72269
atggcgctgagtgctcgccgagaagatgcacaggggctgatcgggcaggcttgccggaacgcggaccgaacggcaaggaagcgcgttagggagctcagggagccacagctactcggccggcgagcagcagcgatcgctaggtgcggggttagggacgaccggactgggagcggctgggcgcaacggggactcggccacggccttgctgggcgctcgcgggaggggctggacgcagctcgcaccggagcttggcgcggtggctcgtctacggtcgcgtag

SEQ ID NO: 28895 - DNA, 279 bp, Zea mays
  Peptide Sequence Number=SeqID_72270
atgaactttggtaaacgacatattaccacaaatgacgccagcaggagcccacccacggcacagagcggatccgccgtgatgaaactcccacgacgaggagttgcagcggcgccaaggtttcccccatccaatgaatcccatgaagagactccctgtgagcatggcgagcgtcccaacccttcatcgagctctcgttatagcgccccaggtttctcccccatctaccgccaatggccccagggcgcgggtctcatatatgtccaggggggtcacgactga

SEQ ID NO: 28896 - DNA, 491 bp, Zea mays
  Peptide Sequence Number=SeqID_72271
atggcgtcttcatcgacgctgacgctaatgaacactgttgacgagcaaggaagtgaagttactttcattgggttctacgactaccagtgtttgtcttctctgcaagcctatccacttcatcagaagcaaacaaggcggaagctaggagcagataaagctggggagagaggggagcaacaatgggttcgaaggtgcgaggttagggttgaggcgaaggaggtcgggaaaagggtggcatgtccaggaggtagaggcgggcgagtgtggacgactactgacgcggaggttgtttgcggagcgacagcgtcgggcaccgagatccatggcgcctacctcggcatcgagatattatcgaaatttaggaagggtcctttgaccggaactgccttcgacccactgcctttgccaactggtgttccagagtcaatgtgtttttgtggtgatccttgcaaggttgacaagtctgaggatcatgacacctatcgtcagag

SEQ ID NO: 28897 - DNA, 342 bp, Zea mays
  Peptide Sequence Number=SeqID_72272
atgacgtatcacgtatggctatggcagcaactagagatgtcaatgggccccgaaacccgattacccgtggggaatttctctattaaggttaggggcatggtgcacggcgacatcgggacgtcgccgctctacaccttctcgtccttcaccatgtactcgttcctgcgccagcacgtcaacttcagcggcaacaggctggcgggcgtggttctcaggactcagggatttctcgccatggagtctcgctcggccgcggacggtgtatctgcgctccaaatctcggtaaggcctcgctcgcgctttcctgtggccatcgcgacgttttgctctgggattcgctag

SEQ ID NO: 28898 - DNA, 417 bp, Zea mays
  Peptide Sequence Number=SeqID_72273
atggcgggcgcgcggatttcgcgcgatacgttgtggcatcccggccacgtccgcgcccttataggtagcaggaccgggcttacctctccctcttgccttcctactcttgcgaccgccaccgtagtggagatagagtcgagagcgaaacagagagtgggggagattgcccctcgcggctgccggcggtggaacccttacctcgcccacgccgcgtccctggtttgcttcctgagtgcatcgctgagacattgggaagacgctcgtgcccccgggaaagagaaggtggccgtggggtgtgggaaattgctcaccggagtccgtgggttaccgccgagccgcctgaacgtgtgggcagggccgtcaccgcttcataccgagacgagcaagccactgtggaatctgaggatcagcaagtag

SEQ ID NO: 28899 - DNA, 1140 bp, Zea mays
  Peptide Sequence Number=SeqID_72274
atggccgacggcacctatctgaagatccaaccaaccttttttcctgccgcaaatttcttcacaatgtccttgggtagagcaaaggtgagcttctttaggcagttcttcagatccgtccgtaagacagactactttactttgcgacatggattcatttcagctcatttatctccggggactaggttcaattttcgaaagtacattaaaaggtccttggaggatgatttcaagacagttgttggcattagtccaccactatgggcttctgctttggctgtcatgctgttcaatgttcatggatggcacaacttattctggttctctgcaattccccttgtagttattctagcagttggaacaaagctgcaggctataattgctatgatggctattgaaattgcagagaggcatacagttatccaaggcatgccggtggtaaaactaagtgatgatcatttctggttcgggaagcctcgtttggttctccacctcattcatttcgcatcatttcagaacgcatttgaaattacatatttcttttggatctggtacgaatttggcctgaggtcctgcttccatgacaactttgagtttatcattgcaagagtctgccttggggctatcgtccagtttatgtgcagctacatcacccttccactctatgcccttgtttctcagatgggttcagaaatgaagcgaacaattttcgacgagcagacagcgaaggccctgaagaaatggcacaaggccgtggtgaagaagaaacaccacaaggattcctcacacaattcttccgagactcctagcactgacacaacaggacctgcaggggaagcgggtgagtggcagcggctgcacgaggtgccggtccggcacctccaccggtacaagaccatcgcgcacgtcggcggcgtgaggagcccgttgtcggacccggactacagcgacacggacgacaccgagccgctgtcgttgcagactaggcacctgataccgccggcgaagcagcggagcctcgacaccgagcgcgcggaggtgcgcgtgaacgtcgtagagacagcggcggcgccaagcgacgtcctccaagacagcttctcgttcccaaggctgcttcctcctcgccatgtgccggacaagtaa

SEQ ID NO: 28900 - DNA, 294 bp, Zea mays
  Peptide Sequence Number=SeqID_72275
atggcactacgtgttggagaagggtcagcctccctcgacgacttcgacaacttcctcgaggcatttccaccccatttgcgtcacgcccttggggtcaacgttgccctcgtggcctacgaccatgttcccactatcaatgacatggagtttgtgggaatggttgatggtggcagggaccttaccttcgatgcactctgctcgaactcgggctcagatcccagcttcccgacaagtggcgagaatgaacccctagcgacggggagaactgaaagtcgcctagaggggggtgaatag

SEQ ID NO: 28901 - DNA, 1635 bp, Zea mays
  Peptide Sequence Number=SeqID_72276
atgggttcttgcgtgtcggtgtcgtcgacgaggcaccggcggcggcggtcgaggaagctgtcggtcgcggcgaggaagttccggcggaagctgtccacggcgatcgccgccgacgcgccgatcgtccgcggcgccggcagcgcggcgacctgcctcgcccggcacggggtcgtccacgtggaggcgccggactccaacgtcaccctgcgcctcaccaagctgcagtggcagcacagccagatggacgccgggagcgtggtttgcgaagaagcgtggtacgattctgtcagcatcctggagtcgccggactccgacgacgatctcgacaacgatttcgctagcgtcagcggagaccctctccctgatgtcaccggcggctcggacgcaccgcagtgcaaggaggcagcgtgcttcttggacaccatgcagctcctcaggagcatcgcaaacgcagaagcatacgaccaaagtgaacaacctgctgacaagagtgacgacgacgactcgaacgtcgctgccactgcaactaataatagcggtagctgcaataatgacgagggctgctgcagtagtacactgaaggagcttcaggctgcaatgtcgccgcggccgttcccggcgtcggttccgagcaacaaggtccagccgatgccggtcgttggtgtcagcccggtcccgcccccgcaccagcagcagcagcagcagaagaagaaaacggccgtggtcaggctctcgttcaggcgaaggtcatatgagggcgacgagatgaccgaaatgagtggttctgcgaattatctgtaccgcccaagggcaggtttcacggtgccgtgttcgaccggcgagaaactgccacaaggttgctggtcggttcttgagccatcgacgttcagagtccgaggggagagcttcttcaaagacaagaggaagtacccagctccaggctgctccccttacacccccatcggagtggacatgttcgcctacacgaggaagattcaccacattgcgcagcacctctcgcttccgtctctgaagacacacgagacatttcctaccctgctcatcgtcaacattcagttgcccacctaccctgctacagtgtttggcgataacgacggcgatgggataagcctagttctgtatttcaagttatctgacagttttgacaaggagatttctcctcagttgcaggacagcataaagaggctcatgaacgaggaaacggaaaaggtgaaggggttcccagtagacagcattgtgccctacaccgagaggctgaaaatcctggctggtttggcgaaccctgaggacctgcaactgagcaccgcagagaggaagcttgtgcagacctacaatatgaagcctgtgctatctcgcccacaacacaaattctacaagggttcaaactactttgagatcgatctggatgtccatcggttcagcttcatatcacggaaagggctcgagaccttccaggagcggctcaagcatggcgttcttgatcttggtctaactatccaggcacagaaggctgaggagttgccagagcatgtcctgtgctgcatgaggctgaacaagatcgacttcgccaacaacgggcagataccgacgctgataactgcagctgatgagtaa

SEQ ID NO: 28902 - DNA, 222 bp, Zea mays
  Peptide Sequence Number=SeqID_72277
atggtccctaatctggagcaaccgccaccatggtccatgggtgaaggcgtgaagcccaagaatgggatacacgggcagtgggggtgggggaatggctggcagcctggcacgtggcaccaacgagaactcgagaagaacagttccactatggttttgtgccaattcagacttgttcgtttacaccaatctagagggggattggagggctgtgtgagtatctga

SEQ ID NO: 28903 - DNA, 846 bp, Zea mays
  Peptide Sequence Number=SeqID_72278
atgcagtatgcaaagctcctgcctttgaccttgatccacatgcttggaaatgttttcaccaatatgagtttgggtaaggtggttgtctccttcacccacaccatcaaggccatggagcccttcttctcggtcctcctctctatcctattcctaggagaggattttgctcctacacctattaaattatttaaggtggatcacctattcaggccgagagccatcctcgccccaaatcctcactgcagtcgacgaccacctcccatctacaccaggaccaagaggctcatgctgcagaggttggacctaccactgctctttttaagactaaagtgccctggtcatcccaaagaggaaatctctcggagaaacaaagagtcttcaaaacgcgtcaaagaatttaatcaaagcaatattgtgtatttgattctaatactaggagaaaacaggattggattctggagtgccatgacttcgaatcttatgaatcaatcgcggaacgtttacagcaagaaaattctcgctgataaagaggacagtttggatgacataaatctcttctcaataataactgtcatggcattcttgttatctgctccactgatgctatgtgtagaaggaatcaagtttagcccatcgtatctacagaatgctggagttaatgtaaaagaattatttgtaagagcggcacttgctgggacatctttctatttttaccaacaggaatggccaatgtgtgtcacctatggtgcagttgctgggtatttgttcggaatggcagtgtcattggtcctaagtcctaatagctgtccacaagagaagggtttgtgcaaaaactgtctggcctag

SEQ ID NO: 28904 - DNA, 276 bp, Zea mays
  Peptide Sequence Number=SeqID_72279
atgtcggagggtcataaggactgcgagctcctcgcctccggtgccatagagcatgccaaagccgaagatgatgtcgtaaggccacaggggccgcttctcttatgcgcgcaggcaccatacatgatgcttgcggtggccgccgaaggagatgatgtcacagagccaccagagaagcccatctatggtgtaaacggtctcttggtagatgagaaacgtaggaggggaacagacctacgcgcgttggtaggtgagaagcgaaggagagaaagtgactaa

SEQ ID NO: 28905 - DNA, 339 bp, Zea mays
  Peptide Sequence Number=SeqID_72280
atgcagctggacgcttccaggatcctcatcgccaacagcagggagcgattggtagccagagacgaggacagggggaagaagaaggtcaggatcctggtcatcgcggtcggcgtgggcggctacagtggcgctctacctctgacacaacaagacgacgctggcgttgtttctcggggagcagtcacggtggctgtgccacaatgcggagccatggcgatgccagcgccgttggtcccgtcgctcgaatgcgaggagttcaggatccatgacctgactcgcatcatcgacaacttcttggaggagaagaagatcgagaacaacagcttcgcgtcggtgtag

SEQ ID NO: 28906 - DNA, 384 bp, Zea mays
  Peptide Sequence Number=SeqID_72281
atggaccttcttcggctcctggcgcccgcgccggcactgctgcttctcctacacgggggcgccgccacggggaagacgcgtgcgctcccctcctcgctcttcgccactgtggcgctgacgccattgttccgggtaacaaggagggcagatgaactggtggctgcactagtgcactggagccactattcagtagctttcctggcttcaaggaacccggctacgcttgatgcagctttgttcgattcaactggagggtcagatagccataggcgtaagagaaagagttctcaggtgttgacgaatatgaaggacaccatggccgaagagatgcttttgaaaggccctggcacatttcctcttgagaggctcttggctatattttag

SEQ ID NO: 28907 - DNA, 616 bp, Zea mays
  Peptide Sequence Number=SeqID_72282
taacgacgagtcagattcattcgaatccttgacactgaagctggaagagaccaagattgatgagtactggagcaggccactggaacctgaaatcacaaccgatgaacaattaatttcaactgctcaccttctcaccaagcccagaaggggccagcaaaggaggcgacggcagaagcgggatttccagaaagatatcttgcctggcctttcgtcactttcccggcctgaaatcatagaggatgtccagttgcttgaggggttagtccaggcttctggtggatcctgggagtcgagtttaactaggcgaggacgttatggtgggcggactcgaggtaggaaacctcggaaaactgtagtaactgtaattgtagaagaggaggtcgaggttagcccaccgccgaaacctgttggcactggcgacctcgaagccgatggtagggtcatgagtgtacatactctgtcggcgtattggcctcaccccaactttcatgcttttgggttgaaacatggtttacgttcttataataagttccgtaaattagctggtaagacatttctgcgacagcattgtattaagctgttccaggttatgaggtccggtataaattcattgtga

SEQ ID NO: 28908 - DNA, 918 bp, Zea mays
  Peptide Sequence Number=SeqID_72283
atggcggaagcgctcgtgggcctccgcatcgctgcccccgccgtctcgttgtacattaagcaaggatcctctgcaatatcgattgtggacgaagaggattctgaacctgaatgggtggagtacaaaatcaaagagacgaacatgttcactgtggacaaatatcagcagatagggttctttcctgaacaaaaggcatttgctctgaggtaccagactgctggaatgctggagactgttcttcggattggtgtgcttggagaagatgatactggtgaagaatcccccaaaaacttgaagataccttctcgtaagccatctattgtatgtgaaaattgtctttactcccttgaaggcaatggtagaatcagggcttttcacataatggatccaaagggagtgctcgacacacttcttgtttttcatgagaagaggcagggatctaaagtgccacagccacttacaaactattcagttggtaccaagagtgctagcagcgataggataaatgcactacttggaagatgggaggggcattctgtgactaagcggagtggggtgtatggagcaacacttgttgaggcagatacagctattgttctcaagatggacagtaatggccaattaattcaggatactttatcaactaaattcggaactggaacaacaacggtcaactggacaggatcagcaaatgacaacttgcttcagtttgatggaggatatgaaataacattgctacctggtgggatgtacatgggatatccgtcagacattagcaaatctgttgcccaattagattcttttcatttggagttctgttggatggaatcacctggaaagaggcagcggcttgtccgaacttacgattcagctggtttggctgtttcgtcgacctatttttctgaaaccaaagtatga

SEQ ID NO: 28909 - DNA, 396 bp, Zea mays
  Peptide Sequence Number=SeqID_72284
atggctatggaatgggatgatggtatgatgcttttacatttgtcaagctttgagcacctaagagattcaaaagttagcttctggcttggctaccgagttatccctctttaccagagggaggtgctcatgttggtgttgctcatcggtgacgagaagaagcttggtaactgtcagttcgacctctggaagcagtcctacgtggccgcatgtgccgctgtgtttggcaagctgctgcgcagccgccgcttggacgtggtccagagcggctgcattgtgctgtccatctttaaacagggggacctcatggtcgtcgccaacaccggcgactctcgagttgttctaggcaccgcatccgacgacggtgctatcacaccgtccagctcatcatccatctga

SEQ ID NO: 28910 - DNA, 675 bp, Zea mays
  Peptide Sequence Number=SeqID_72285
atggacgaccggcgcgggcgcggcgacgcgttgggccagaggccgttcgcgtctgctgctcagagacaggaaagggtgttcgacggtggaggcggaggcggtggcggcggccatgggccagcgtttggcgacgagtttgatcaggggtcgtccctcatggcgcttctcagcgctggcgcacgtgcagtgagctcccagccaccgccgccgacgtggggcgtggaggaggtgaccgcggcgcctgccattaacctggtgcctcaatcgttctccatgtgtttcagtgcaattgacaataatatatacctcaaagatcacaatagtatgatatgtttcctctcaatgaaggcaaactacgcgccaccgccgccgtcctaccagtaccagcaaccgacctcattcgccccatcgccgctgggcggcagaatggatccctacgcgccgtaccttcacgtagaccagccgccgcaatggcctcctccccgagcgacggttgttggttcctccctgccgcactccaacttcaccgtcctcttccccagcaatccatacgagcatgacatgcagctgcgagcgaccgcgctattcggcgtcaatctctcctgtaatctctcctgtaatctctccctcgattgtatctctcctgtatgtatgcctgatggccaatggaagtga

SEQ ID NO: 28911 - DNA, 2424 bp, Zea mays
  Peptide Sequence Number=SeqID_72286
atgccagtagtggagttggtcccgtgcgcccgcaacaagtggggcagttggaatgagttttggttttatgtttctgaggcgactgtcgaaggccatcaagggctccccgtgtccttaatgtgctctcactattactctgcgtatccgcctttcgaagtggcagaagaggatacagacgaagaggccctacggtacgccgccggacagagcagcgggcgtgatttggttgaagagtttgcggcgtacggggtctggcccttggcacacggctgggcgctgggcgaagtatgccctcgccagatgccctttcacggaggaagggaggtgcgaagtcctgccttcgcactgagtttgcggaaccgtgacccggccgccttcgtgcgcgatgcagaagacttggcggtgcgactcgtggggcgctacgtgccgaagacggaaggccagcgcagtttcgatatccgtgggtcaaacgatcgcttgaacagggtctttgaattaaatcaactgccgtacgacggctaccctggtcaggacgaagcagaccgccgcgggaagaaaccggcggtggaggccggaggcgaccctgcgctggcggccgccacctcttcgaaaaagagaaaattaggtactgcgatgggagggcttggggtgtctgatagtttcgctagagagttaatgaggacatgtgcggccccgggggagaggatgtcttcgcccgagctccgggagtcttcggctcggatgctgagggttaccgggggttgctggcctaaaaacattcctatcccctgggatgaagaggactgttttacatctcgtatggctcgtcggtggaaagtttttccttatgggcgaaatatcggtcatgttgtgtgggcagtgatggacaaggatcgccaagcggcggcgcggaaacgtcaggcgactgtgagggttcatgaagcccggccgaaaaggcagcggggagcatcgaaggctgaggcctccggcggaggcaagccgccattgccggcgaaggcgggtgcctccgcgcctggcaaggcgccggaggcgacggtgggcgccggaggccccaagctgtcgaaggtggtgccgtccgccagcggagtggcggaggctgcgaaggcggcccgatcgctaccgccgcccggcaaacgcgttgccgacttcggcactgagattgatgtggaggattatcttggggggttggacgagggcccgctcgctctagttgtgcctggcgcggcggtcgcgacggctgtgccagcgccggaggcgggggtagagatccttggcgctggaggcgaggtgactgccctcgcgttggtcagagacgaggcggacgcggcgacccgccggctgaaagaagcaatggaggcgctgagtcaggtggctgacttcaccagccgtactgcgtcgggggcccttacggcgacgttgtctgccgaggtcgagagacttcggacgcaacacgcggacgctgtccgtgagaagtcggcctccgacagcaagtgccgcaagctggcggagaaggtggccgcccttgagaaggagaaggcagacctccggcgccagctgatggaggagagaagggaggccaacgaagccatcgccaaggagcagtctgcgcaggcggaggccaggctggcgcgggcggagggcaatgtcgccaaggagctcgccggggagctgcagcggcggcttgctgccttcgagagccgcgcggagggggccgaggccgcggcgcgagcggaggccgaacggacgcgcacgcagctcatgacttcatatcgcgagctgggtgtgcggacgagcgacttcgaggtgccggagcgagaggccggacttcgctgtctggagtgggtgcaggaggaactgcaggagctccccactgtcttggcggggttgatgtcgttcacctccctggtcacctgcgaggcagcgatgaacgcgctctctcgcgaaggctgccggcactttgaggccctcgaccaggtggatgaagattttgggcgagatatctttgaggtcgaagaccccgtggtgaaggagtccggcggggccctctttgaccggatgtggggttcatacggtcgagaggtggtccgggcgcgggccgaggctgcaagggctcaggcggagcgcggcgagcgggtggacgattttggggcgctgaacagcgcgccgcctgagccggagaccacccctgcggaggccgccactggagtcgccccggtgaccgcggaagatgcaccaggcgtccttgtacctgctgcggccggcgaaggcctactcccaagggtggccgaaggcgcgtctgatgcccccgcagccgctgtgccgggcgttgaagatccagcggagacaacggcggaggcggcggcggaggctcccgcagcggcagggccttcgcaggtggcgtag

SEQ ID NO: 28912 - DNA, 558 bp, Zea mays
  Peptide Sequence Number=SeqID_72287
atgctaagattagaaaagaagcttgatgaagtaagcgaaaattttgaatgtgagaaagcaaaatgtgagatagctgaacctgagcggaatagagtcccaaggaatgttgaagagcttcatcaatcgaaagaaggtttttttgttcctatgcaattctgtaataagctgaagagtaggtttgctaaagttggtgcactctcgactgatcaaaattttactcgtggcgatcccgaaggggtaattaggtggatagagggtgaagtcgaggcttttgatgaagttctcgatgggcgaggagcgggtgatacaaacttcttggggtcgtccacaaatttggagactcccaagcaacctctaaccgtcaaggaacacgaggttccaagagtaacaaatccgcacacggtcaagtttgcaacgagctcaagaacaagagaaagggagaatcaagatgaaattgacagcgagttcgatcgagttcacctcacaccaagggtccttcaaatgattgaaggagatgcgattgcgggtgtgagaggtgaagtgaatgctcttgtttga

SEQ ID NO: 28913 - DNA, 507 bp, Zea mays
  Peptide Sequence Number=SeqID_72288
atgggtaggggtaagaggggccggggcttggctcgccgtgccgatggcaagcgcaagcatgccccaagtcccccttcagaggattttggcgactcggagtactcgaaggaagcttcctccgagtatgatcgatcgcccgctcccacctccccggtggcgtcgtccgaggactcggatgactccatggggctgtccaccgcgacccgagcatactggcgctccatcgagcgtgccgagctcggtggatcgaatgactcggaggaggtctcctcagaagcggtggactcctccgactcttctaaggagtggagcagcagcgaaggtgacggcggcgaggacgacgacagcagcggcgacaacgacggtgatggcggtgccggtggcgacggtgagggcgatggcgacaacgatggtgacgacgacggcaacgacagtggtggtgacgacaagggcgactgtgacgacagcggcaagtgtgatggcaacgacaagggcgacggtgattga

SEQ ID NO: 28914 - DNA, 1161 bp, Zea mays
  Peptide Sequence Number=SeqID_72289
atgaagtctcgcatggcactgggattaccgagcccggagaattcccaaccagagtcgggctcgtcgtcttcctcggaacccgagggcccgtacgaggctaacgcccagcaagtcctccgcgagagtgctggcgtcatttgtccgcttggggttggcacgttgcggggaaacgacactcgccatcgtctcagacgcgaggtcaacgcccgacatgtcccctgctggggtgccgacgtcgtcgactcgctcgacagccgacgaggtgccgcctcctgcctagccacggttgccccgcctcctcctcctgcggcgaggaaggcgacgggacaaacccggatgctgctcttccgccatggggggaagatgtcgccgagtccgccaccgccgggcgggctgacggccgtcgttgtcgctgtcgcgctacgggggaaggagtactatgtcgtggctgccgtcgagggacatgaactcgagactcccaaaacggagcagcatcccgggctgaagaggttgctggagactacccatctggaactcaacgagaagttgttcgtcaacacgcagcaggcccctacctggcgcgccaactgtcggcgtttcgaccccggggggtccataggggatgcacttgcagtaggggttacaagcgttcgcgagggagagagagcgagcctgtttgtcagcctgtcctcccgcgcgaccaccttttcgcatgagggccctggaccttccttttatagatgcaaggagagggtccagggtaatgatgtatcccctgtggcgcggtcggtccgagcccaaggtcgggcgaggcggagactcctcctgaggccgaggtcgggcgaggaagcgattcctcccgaggtcgaggtcgaggccgagccctggggtcgggcgaggcggagaccaccttccgaggtcgagggtgaggccgaaccctggggtcgggcgaggcggagacctcctcctaaggccgaggcccaaggttgggcgaggcggagcttcctgttgcgcctgaggctggatttagctgttgcgatcctcgcattgaatgcgcctgcgatacggtcggttggtgaaggcgagttggccaaggttgcttcacaacgaagcctgtccgagctgggcttcgggcgagtcgagggcgcgcccgttgcttga

SEQ ID NO: 28915 - DNA, 525 bp, Zea mays
  Peptide Sequence Number=SeqID_72290
atgtggcgcaccagactgtctggtggtgcaccagacagtgtccggtgcccaggctggcccaacggcgaactggccactctcgggaatcggcgcggcgtcgtggctataaatcaccgtactgtctggtcgtgcactggactgtccagtgagtcatctgcgcccgcgcccaagtcttcggtgacgaactcgtcgctctcgggaaaagccgaaggcgctgcggctaaaattcactggactgtccagatgtgcaccggactgtccgataatatgaaccaaccaacaaatttaaagcgcttaacaagaacacacaagaacacgcaatataacccgaggttcggcaaccaccacaaaggtgtcctactcctcgttgaggagcccacaaagggccgggtcttttccaaccctaatcctcctcaagccgaccacaaaggtcaaggcaatctcttctcaaatatgctcaaagagcgggtgatacaaacttcttggggtcgtccacaaatttggagactcccaagcaacctctaa

SEQ ID NO: 28916 - DNA, 621 bp, Zea mays
  Peptide Sequence Number=SeqID_72291
atggcgcctcctgttgacgtggctggtctgcgccctaggttgggcgatgtggaagctcctccgaagccgaggtcgagtctgtcttccgtggccgaggtcgagtccgagcccctgggtcgggcgaggcagagaccgtcggctgagcccgagtccgagccctgggtcgggcggagcggagttcgccgtcttccgggacttagcccgagtccgagccctgggtcgggcaaagcggagcttcctatggtgccttcgaccgggcctgactgcctgtcagcctcactctgtcgagtggcaccacagtcgggagcggcgcaggcggcgctgtctttctgtcaggccggtcagtggagcggcgaagtgacggcggtcacttcggctctgtcgggctggggggcgcgcgtcaggataaaggtgtcaggccacctttgcattaaatgctcctgcggcttggtcggtcggtgcggcgatttggtcagggttgcttcttggcgaagacagggcctcgggcgagccgggaacacgttcgccgctggaggggggcctcggctttatgctgatgggggttaccagctgagaattaagagccttgagggtacccctaattatggtccccgacagtag

SEQ ID NO: 28917 - DNA, 162 bp, Zea mays
  Peptide Sequence Number=SeqID_72292
atgaagctgaactatctcctccaccggagccgttcgaccccttgggctgacccagaaacgaagaaagcaatagaaatcatcaacatagctgaatctattattgacgaagtcgtgaacaaattgcttaacgaagttgtggagaaggttctgaaggaagaatag

SEQ ID NO: 28918 - DNA, 375 bp, Zea mays
  Peptide Sequence Number=SeqID_72293
atgacgacggcggctctcagccccttacggaagcaaagagacgtcagcaaggactcgacagccccgacaactgtccttccgcgaggctccaacgctcctctgacggccacgacatcacatgaacagggtgccaaaacctctctggctgccacgacggcatgtaccttggagaggaccaacaaggacttgggaaaggccaaggtgttgaggaggagcagcaagggcgtccacaacaggaaggagatcaagtccgagtcggctacgactccatctcgggttccaggaccagtctgcactgaaatggacgcccaagatgcatccgaactccgattgagacggactggatatggttggaaagataacgagattatctaa

SEQ ID NO: 28919 - DNA, 1881 bp, Zea mays
  Peptide Sequence Number=SeqID_72294
atgggcatctgtggaccggcatctgcgcgcccagcgagattggaaaaggacgagggcgtgattaccggagagaaatcgaccatcgaagggaatggagacgaacaacagatggaaaacagcgccacctgccctgctccgactgctgtgccacccgccagggtgaggctgatagcagccaagtccagccttgggcgccataggaagctccgcctcgcccgaccccagggctcggactcaacctcgaccccggaagatggtctccgcctcgcccgaccccagggctcggactccacctcgacctcggaggagtcgccaccttgcccgaccttggctcagaccgaccacgtcgcagggggggaaggtccagggccctcgtacgaaaaggtggcggcgcgggagaacgggctgacggataggctcactctctccctcgtgaacgcttgtaaccccctactgcaagcgcatccgccctgggcgcaggacaacacgagccgcggttccccttattgttcccccttgtgttccgtctcacgccgacccatctgggctgggacacgcatcgacaatttactcgtcggtccagggaccccctggggtcgaaacgccgacagaaaggtaatggggatgatccgcaagattaatctaatgggtgtgcccatgcaagtcgaggatcttctctttaacattgacaggaaaaagcaaagaaagagaggatgcttcgcgtgcgaggagaagggccacttcagggatagctgcccaaatatggctgaacccacagaagggaggagcaaaggcaaggtgcttacaagtgtcaaattttgggattactcgtcaagcaaagatgaacctccaaggatgcgcagccaccgatcctcatcacactcatcacggtcatcacacaagtgccttatggcaagagataaaatgagtatttcatcctctagtgatgatagcagtagtgatgatgaaggtgagggaaagccctccgtagatgagtttgcggaagccgtaatttttttccaggatgtatgcactaagcaaaatgctcaacttaaaaccttgaaaaacaagttgattagctctgaaaatgattataaatgtttcctagaaaaaattgaaacatttgcaaatttgaattctaccgatgatggccttattaaaaagaatgaaaaacttaaggctaaagtagctatctctcaagaagctattgaaaatttgctagggaaaacggaaattcttagtatacataatgatgaactaactactaagctagaaaacattggtagcaccctagaagtatctttggttgaaatgcttgaaattaataagaaagatgcttctacttcttgctttgatttaattgatgattctaacccctgcaatcaagttcttgttaagaatgttgttatagaaacatgttcggatgacattgcaatggagaatgagcaattaaagcaagaggtggctcgccttggcaaggccttgcatgacaagaaaggcaaagccaaacaaatccaacctcctcaagataacaccactacggtagtgaacaagcctgtggagggcgaaactgtgatttgtaggctatgccacaaggaaggccacaagtcttaccaatgcaaggtgaagattgggcagaagcaaaggcaaaagctcaagcaaaagccaacaagcaaaatttccaacacctacataaacaaggtggataaaaaggttgctacaccatatttaatcaaaaagaaaaagaatggaaaggtgatagcaatcaaggccaacaagcaagccaacaaaggaaatgggtccaaacgcatctgggtgcctaaagaaattatttcaaccatgaaaagcaccaagaaggtttggatcccaagagggaagtga

SEQ ID NO: 28920 - DNA, 158 bp, Zea mays
  Peptide Sequence Number=SeqID_72295
agccagatccgggtaacagattcgagtttgcgcccgccctgttcggcttcaggattctgccgggggttagcttgaaggctagggtcccatacaagcaaaatttcagcatccaaatgctatgtggggttgcagaaaaaaatgttaggtctctaggctag

SEQ ID NO: 28921 - DNA, 915 bp, Zea mays
  Peptide Sequence Number=SeqID_72296
atggcgtgggaggctcatctccatgcagtgaggcaggaacccggggagactctctgggctttcatttcccgtttcaccaaggcgggcggctcgggtgccaccgcccagggcggtggcaagaaaaagaagaagaaccactgtcacgataggccgcagtctggtgctccggtcgctgtagctacggctggggggcaggacgagcgcgacaagcgcccatggcagcagggaagcgacagtgggtcaagccctgttcaccccaacagtcgccatagcgcctcggaatgtcgggagatcctgaagctcgcgaagcgcatcagcgagcggcgcgaccaggcctccagggatggcttgccacctcagcgtcggcctggcaaggagaaggtcgacgaaggtgacgtagccgcgggagaaggggacctcgggtatcaggcccccgagcaagttctcaaagacatcctcattgtagactccgactccggggtcccgaaggcagccccaaatcaacggtggtggagcaccactatctcctttggggaatccgactgccccgaaaacatggcaggggctgctctagatcctaggatcccgactgggaccctctcgctcattctctggagtgggccctcaaccgaggttaaccgccctttcaatgccatcattggcaggctggccctgtaccggttcatggccattgcccattatgggtatttggtcctcaaagatgttgtcccctactgggaagccgctcgcccggatgacgaggggagggacccctcgacttcatgtaccaagacgcctactaaggtgcctaaggtgcaaccatctggggcagacgacatccccgtcaagaccatccggctcagcgcggattcctcccaaaccactcgcatcgcgggtgatctagaggagaaatag

SEQ ID NO: 28922 - DNA, 366 bp, Zea mays
  Peptide Sequence Number=SeqID_72297
atggcagaagagcgccaacccccatggggtcgcactcctccaacagcaacaagaagaagacaagatcgacagcaccgccgcgcaggaaacaaaaagcgcgagctccccggcggtgagaccgctgggggggtggccctgacacagatccctccagcgaacaccggaaagttgcaccgctgctcgcgccaataccacgccttctcgaggccgtcgcagaaggctaaggagataaattttcaaaaccgatgcagcgactcgaggcaccccgcacatggcccaacaaagacattaaatacgaagctcatgggccagtcagacgcgggggcaggcgtggcagtcggcgtgaccataggcggccgacaataa

SEQ ID NO: 28923 - DNA, 732 bp, Zea mays
  Peptide Sequence Number=SeqID_72298
atggacacttgtctcctagggtggtccgaagcccgtgtagccgctcagcctggttctgtaccgtgggtgtgcacgctccaccactctgcgacgggtcccagtcgaggctacctcctgggggccatcgccaactctttcttaggtatgctggtctgcagcctcgacaaatcgagcctacgtcccaaggggccaggtatgaactacctccacaccagtagggccgcgtgggtagctagctccgagcggttcgccagcggaggcgaccacctctgcaccgatggcttactggcgacggcggccgcctcagcgcgtgcagaaaggtcctcgctcctgtcctcctacgggggtgaggacaagaccatccaagaacgcgaccaccacccccacggcgtgcgatgtcttgtacggccccctgggcagtgtcggagcagttcaccatggatacgacagacctgcgcacggcgtgactgtcgcccgtgcggtggacgaacagacgcgccccgcttggcagcgacaggcggcgctggaggcggcaccaaagccatccaagccaaggagccagacacgctgcagctgacggcgcttgcggccggccagccccgcgtagccgaagttcgcctcctccgcaaggctggtgaacatccttctcctccaaatgctggaggaagaagcgggtcaccagcccatgcggaaggcaggaccccaactcggctcgccttccacccccagtga

SEQ ID NO: 28924 - DNA, 450 bp, Zea mays
  Peptide Sequence Number=SeqID_72299
atggtgctcctcgggcgtgcgctgtgcaagggagaggtgcgagaggtctacagaggagcgcttctaggcgaggggaaaattgagttggggaattcaacaaagtttggagcaaagacaagcattggtgctgccagtggcgcactggacaatgtccggtgcctaggccgagcacctcacaaactggccgctctcggggttttcccagagtcggtccgctataattcatcagactatccgagctacgcgcttcgcatggggatccgcaagaagccggagtatgtctggaaagaataccgcgagaacgggattgagaaatgctccatggcagtctacctgggagaaagccgaaactacccaaatcaccctccctttcagaacaccgctactggctaccgcttcccagatacctgccagaatgcttcccaaaaagccctccaccagctatgctaa

SEQ ID NO: 28925 - DNA, 249 bp, Zea mays
  Peptide Sequence Number=SeqID_72300
atggcggccattccttcttggagtgaatgggtagaggagatggaggggaaacgggcagccgttacttgcatgggaggatgttgcacacattacccacgagtcgtgatccctttccagcctaggttgtacagacccgatcttcactaccgaggttgctgctcagggaagtcttcggcaacagacttaggaaccacagactactcgttgtccacgcaaaacaatcgtgcattcaacacatttgggaaatga

SEQ ID NO: 28926 - DNA, 522 bp, Zea mays
  Peptide Sequence Number=SeqID_72301
atggttcagatcgtcgagcaccgcggcttgtctcctgaggacttcctgatggaggaaggggcagcatcttttgtgccacggggctcttaccgccctgcgcctggtgctgctgctatgcacactgcgcagcagcacacgcccgcgcagacatccagggctccgtcgggggttgctcatggtggggcgttgtctgcagccagggagttgctgctgaaagggaaatgtgcccttgggccatttctaagtattttggtgattgagtgccaacacaagtggacatatgttaatctatgccaagtgatggacaaagtgcaaatcaagagaaatcaagttggaaaagatggctttgttcagcccaaagacagctcggtctgggtgcacctgactgtcccggtggtgcaccggacagtgtccgggcgagagactccaagttgtggagattcctcgcaaacgggaaagagtaaagcaaagaagatcaccgtggtattcaagttgatcattggatcacttgagaagagttga

SEQ ID NO: 28927 - DNA, 663 bp, Zea mays
  Peptide Sequence Number=SeqID_72302
atgtccgtagtccatgctgcattgatgggcaattaccgtacgagtaatgtatgccacatggcagcatcgggtctccgcctgagcggggagcaggagtgtatgcggataggtctggatcacacgagaccaggtctggacatgtgtcagctttggacccccgcctgggccctaattaaggcccggatcttggtcgtcgtcttttttgtcaaaaatgtggtgatgaagggcatcacgccagggaatgcttcaaacctctttggtgctatatgtgaacttggctcaacaattggggttgttgaggaaatagatctgaattcccttgaatctaaagatatggttaggtttaaagttcatgtcaaaagtattgatatgattccagaagttatagaagttggggtgaaaccttatttgtatgacatattctacaaagtagagaatattgatgcagaaggatggaatgatgattctgtcagcttggaaaaaagggcctctgttgatgttcatagatctggaaaaacagtgatggagaaaagtgggaaaaagcaaaaaaatgaagattttgtgacagaggaaaatgatatgatcatcgaatatcattctggattgacttctaaaatgattgggtccttgatcacttctggaaaatctgataaattatcagat

SEQ ID NO: 28928 - DNA, 279 bp, Zea mays
  Peptide Sequence Number=SeqID_72303
atgcggagccccctgagacagacgctgtcgcagtcgacagtattcagacaaccagatatggggaacactacatctgtgcaagctgaggcttcagattcagcgcagaaacctgccacaacagctcctgcacctgggtcaaagccgaaaaagatctgctgtgcttgcccagatacaaagaagctgagggacgattgcatcgtgcagaatggcgaggatgcctgcggaaagctcatcgaagcccacctgaaatgcctgagagccgaagggttcagcgtctga

SEQ ID NO: 28929 - DNA, 324 bp, Zea mays
  Peptide Sequence Number=SeqID_72304
atggcgatccccaagcgcagcgcagatagaggcagagccgcagttgctgccgtaccccgggacaagcagaagccgacgccggttggtggtcacgcacgcgcccggcgacggggacgggacgggctccgtgcatccatgcccccagcccatgggaaggagaaggaaagcgactgttggatggacatggacatggacatggacgggaccctgctgctgcagtccctgcttgatcattcacgccggcccggcaagcaagccgaccggccggccggggacctcacgtcactagagcctgtgcgcgcggatgacacctctagaatctag

SEQ ID NO: 28930 - DNA, 390 bp, Zea mays
  Peptide Sequence Number=SeqID_72305
atgatgcgcaatcatgcgtgcgtgtgcatcgcactcgcaccccaccccacccggatcgccgccttggaatctcgcaaaaagagtttcagtcggtcatcgattattagtgtgcggccgcaggcaggcaggctcggagggaagggagcggatctggtgatccgtggtaacgtagttctcaatacgttatcagcacgctctacctcgacgttactgcgagatcagatctgcatcaactctccgtcaagccggcaggtcctccggcctagccgaactgtcctacgcgacagacttcgattttccctctacacatttgagcggtatacttcaattagatctattgttcttgatcaatttgtgtacacgcgctacgatctatacgccacgaactag

SEQ ID NO: 28931 - DNA, 4044 bp, Zea mays
  Peptide Sequence Number=SeqID_72306
atggaatccagtggcggtgataaacccactgcaacagatgctaccgaatcagtggtgggtttagatggcgaggagactttgtctgagagggaatctgttggagcaagacatggccctgccttgtctaatgggggtggaaaggaggctccttcgagcagttcatctgcagggaataagaggaagcacggcatcttgggttctaatcaaatggaactcaatgaaccagggatgccaagttccagctcaggtgattccacatggagtttagatagtctggatgaccgtcaccagatctcattgttgagaagtaagaatgaacactctgaacattcagttacttcagctggagttacagtgatcaggcagcctcgtggcgtcttgaggttaaggaagcgggatcagaatgtcagtactgagagttggactggtggtcataatattccacaagctaatggagttcctaggtcttcccaactcctgaggcggaacaagaaggggaaatcaactgtgttcgagcagaatagaattggtggtgatgaacctgtcagttgcttgagaactgagaatggtacttgtgatcaggataccggctccaagttctgttctgaaactgagttctcagctgaaaagctgtcacatctttcaggtgaagccccaaaagctgttcatgttgacaagggtgggtgtgaccatgtcaaagatgatgatgataacatatgtgctggatcaccaaggaagggaatgaaatcatctgatacgtcatcaaagagatgtattcctcagcattcaaatcattttaagagttcaaacaaaaaaatcaaggatgtacctagtcctgctagattgctgcggaagcgtgatggtaaagttccattcaggaagcgtcgtccgcgtcggcatttttatgaagttagccctagcgacgtggatccattttgcattgtaaaagagaggatcagagttttttggcctcttgatgagacttggtactttggcttggtcaaggaatataatccggacacaaggttacatcatgtcaggtatgatgataaagatgaagaatggatcaatcttcaaaatgagaggattaaactcctgttcttaccagcggaagctcgcaatagatctaaatgcaccaactcaaggtcagtgtttgacctgaagcatgaacagggtgacagagaagacatggatggaagcgaaggcaatacagaaagttctgagtcaggtcccattggctcatggttagctcgatcaaaccaagcaaaatctgctgcactttgtaacatcagcaagcaagatcacagtcattccaatattgttccaatttcatttgaccaaaagcagtgccgtggttctgatgctaaggagtctaatgattatataccatgtgattcatttggaaatgggagtgcaaaagttctcaaggatagaaccacacctgaggacaggaggtttcgctttgtttattctaggaaacggttttgcagaaaaacgaatggttttcttagcatttccgaacagcattctaattgtcagataagagcaagatttgctatggttcttgctgcatgtcctggtatggaatctagttctgcaactggtgcttcagtcacatatgtcatacctgcattgagcctcccactgaaacctgtttacaagttgctttgtgaagcctgttgtgtttcgttttccaataccttctttctccattgtggtacaatggttgctttatggcctgttgtacatctggacatactttttgataatgctttaggcttgaaacattttcttctcgacacatgcttgatatcggcagtatcacttctctgtttacttgctggaagcttcaagcagtgttctaggcagagaactaccaaggaagctagaataccttgtacttcgatcagatttcagatatctggtgggcatggtagaagcgaagtagtatttatgttattcaactttgttggtgtagagaaatcgaaatgggaacaccttcaaggaaagcttcaatatcactgttctaaatcggagttgtctaaagattccacaaaatgtactggtcgaagagccctttcttcaatggatctcttctccaagattagttatgttacagttacaattcatgaatcgatatttattccacaaggcgtggttaggcgcttgcctaggcgcgcgttaagtcctgggtggagaataggtggaggtataggtgctgtgccaccagatccagagctgcgctgcctgagggagtgcgttgccggatccattgcggtaccacctcgctttctgtccaagggagccaaagggaaagggattgagggttttgatgttcaggactttcttccagagtctaattattcagatcgcgaacctatcatttgttgtttggatgaacattgtagatttactcaaagtgttctggacatgacaactgcaccttcactactgccttggcaccataaaaaaatgttaacagaaagcaatttgactaatggttctcagcaatccatgtcatgtactttggatgaggatcagcagcagttggtaacagaacatgcatctgacacagtttttcatgctccacctcaagtttgttcacttaatctcggttcatcacctgatagtccattggatatggcttctgctagttgtgcaaatccatctagctctgctagtagggaatccaatattgctgaaaggaatgtaagcacagaatgtaatggcagcagtattggtgatgcaaatataattcacaggaagtgtgaagatcaaaatgggccttgtgctggtcctgacaagtcattttcctccaaccttagtgttatttgctcttcacagaagtctgcagagagtcgtctttccataaatattgacaaagcaaatgataaacctcttgacaacgatgaaaaagaaaagcaacctatatctaacttggttcaggaattgaatgaacatccaattggctgtgttacacctactgcccctagaactacttcccataggaaccggtttacatctatatcacgtgcttttggagatggttcaaaattactgccagaagaccacgtgttgactggctttgctggtggttctaagaaaccacgaagtcaagtttcatactcagtttctcctaaaagtgaggaacttggcataaaaaacaaaggtcatttccgcaagatacaatctcatgttagtgcaaagataaatgatgcaaagaaacttcctgatagttctagaagtgggcatagcagcccggagtcattgacttgcgttgcaaatgttcttgttacagtgggtgatagaggttggagggagtatgatacccagatcacaatggattccgatggtcagagtgaaaggaggatatgcgtgaaacttgctgaagggaccaagtatgctcacaaggtctgtcaagttttgcagcctggggccacaaaccgctatacacatgccatgatgtggaaaggtggtgctgaatggtgcctggaatttcctgacagaagccagtggttgattttcaagcaaatgcacgatgagtgctatagccataacatcagagctgcttctgtgagaaacattccaatccctggtgtccatttggttgaaatccatgatgataatgatgtggtatcctttgtgcaatctgaagcttatcttgttcacatcggaacagatgttgaaattgctcttgatcaatcccgtgtgttatatgacatggacagcgatgatgaagagtggatatcaagctggcggaaatccttagtaagagacaacaccaccacacttcagtttgcagaagatttgtttgagagggttatggacaaactagagaagtttgcatatagccacaactgtaatggactcagcattgatcagatgaaggaactggagactgatgatgtacctctgcacactattgaagtgatacatgcatattggcaagacaagaggcagaaaaggggaatgccacttattcgacattttcagtcggctatgtggaagatctacgagcagcagctgcatgaatgggaatcaaaa

SEQ ID NO: 28932 - DNA, 135 bp, Zea mays
  Peptide Sequence Number=SeqID_72307
atggacgaacaaagtgcaaatcaagagcaaagccaaggggctgtttcggtctggggcaccggacagtgtccggtgcgccaggctgcctcggccgaacaggccgctctcgggaattcgtcgacggcgtacggctaa

SEQ ID NO: 28933 - DNA, 384 bp, Zea mays
  Peptide Sequence Number=SeqID_72308
atgtggacaccgtcgcacttaacccaaaaacctaaatcccctaaccccgcgcgtctctcttcctctcctttctctcttcccaccagctcgcgcccgccgccagcacgcgctttccgcgccgccaccgcgcgccctgccgctgccaccccgcgcaccccacgccgccaccgccgcgtgccccgctgctgccaccccgcgcgccctgcgccgccagcccgcgcctccaccccacgcgccagctcgtgcgtcgccccgcgcgccgtgccgcccgcttgcacctaccattctggagaggaggtgacgcaggagcgcctggacgagctcatccgcggatacgccgcgctcgtcaacgtggtcccctccatgaaggcctttcactggtaa

SEQ ID NO: 28934 - DNA, 1500 bp, Zea mays
  Peptide Sequence Number=SeqID_72309
atggctgaaaggtaccaactcccacggagttgcgttcctccaacgacaaggcggaaagactgcgggcatcccccatccgggggcttggaaggtgaaaagacacgatgcataagggagcgcgaagacatggtcgcctttcaagggggtcaccctccttttaaaggcgactctccctacttgcgtcccaagccgtcgtgggctgagtcttctccgacacgctccaaggtcctccccctacggcgcgggggctgggtcccacacgtcatgcaagccgacccagagcagaagaagccaaaccgccgcgcgcagtgcatgcaaccgcccagcggttacaagcggctctccacttttgcccagaccggcgggcgaaagggcgggcagccatgctggcggcatgcaaccgtgccaagtgggcgcacttctccgacttccaacacgcccagcatggaggcccaggcccacgcgtcatgcaaccggtgcgccggatgcttcgtgcaagcagctgcaccgccactcgcgccactaccgcacctcctcgactgcggaaccaataccgcgactcgaggcgacccagcgcacgacccagcagcgccagcctggcgcgacggcggcgcctctggcaggagaagcgagcgacacttcgccttcaccataatgaccgcgtcaaaaaaggctggcccctcggaagggttcaacagccgcctcagagcacgtgggctccacacccactactggtccgaggttcgaaggccggcccctcggaagggttcaacggccgcctcaggctactcgggctccgcgcccactactgatcagggcgggaacgatcttgtaacggaatcccatcagagggaggcatcgagccctcggaccccgtcgacaggggaccgggtccggcatatcacccgcagctcaccggagacaccatgttcggcgcccatcgagggcaacatggcgctttcccccctcctccttgcggaaaggcgacgcaggggcgtatgtaaaaaagtcgagtctgtccctgatcgtcctctcgccctgtgcagaggctcgggggctgctctcgcaaacccggctccggccaaaccgttgacagcgtcaacataccagcccgagaacttggaacccgaccgtgcacccgggctacggccagctcgcatgaggaaacgaccagaccagccaagcattacgcgaggcattaagacctcggaggagtcaaaccactcctccgaggcctcgggggctacacccggcggtcgacagaaccgaagtgactgccgtcacttcgccgctccactgatcggcctaacagaaagacagcgccgcctgcgccgctccgactatggtgcccctggacagagtgaggctgacaggcagtcaggcccggccgtaggcgccataggaagctccgcttcgcccgacccagggctcggactcaggctcagccccggaagacggcgaactccgctccgcccgacccagggctcggactcgggctaa

SEQ ID NO: 28935 - DNA, 360 bp, Zea mays
  Peptide Sequence Number=SeqID_72310
atggcggaggagcccgccgttgtcgtggcctcctccagctacgaggttgacctcgggaacctcatggcgtacgatccgtcgcatcacgtcgccaccgcctccagaatgtggtggtgttggttggggcggaaaaaactcagggaggagctgagacaggagtgcctgcggaagggtacagagctggcgcaggcggtggccgacgtcctcttcgcgctgccgcccaacgaggaccgcgacggccccattatccacctcccgccgcccaccttcagactcccgcgggagaagcatctacccaagcccaagccaccgaccaagtgggagctgtttgcaaaggcgaaaggtgatccaattgcctaa

SEQ ID NO: 28936 - DNA, 1578 bp, Zea mays
  Peptide Sequence Number=SeqID_72311
atgcgcggccccgagggaaggatgtcttcgcccgagctccgggagtcttcggcgcggatgctggaggttaccgagggtcgatggcctaagaacgttcctatcccccgcgcggccggcgaagacttctttacgtctcgcatggctcgtgacttgagagtgtttccttacggatggaatattgctgctgttgtgtcggcagtgatgaacaaggatcgccaggaagctacgcagaagcgccgggaggtcatcaggcttcccgaggctaggccgaagagggcgcgggggactgcgaaggctaccgcccccggcgatagccagccgacgctggcggcgaagccggccgccctgggatcgggcgaggggcaacttgttgttgttctgcctgcggtggcgaccacggtgtctgccgcggtgcctggggtgaagggtagcgctctcagcgctggtggcgagatttcgacggttgctgctgtcaaggatgaagcgggcactgtgtcccgccggttgaggcaggcgtcacagcagctgagtcaagcgaccgacttcgtcgaccgtgtggcatcgggggcccttattgcagatgtgtctgccgaagtcgagagacttcgggcgcagcatgctgacgccgtccgggaaaagtcggctgcggatagcaagtgccgcaagctggccgagaaggtggccgccctggagggcaagaggacggacctccggcgccagctagtggaggagaggagggaggccaaccaggccatcgccaaggcgcaggcggaggccaaattggcgcgagtggaggggagtcttgccagccagcgcgccgaggagcgggaggtgcggttcaacgctttgcaggcccgcatggagagggccgaggcctctacacgctcagaagttgaccggacgcgcaaacagctcgtggactcgtaccgcgagctgggcgcgcggactgctgacttcgaagtgcccgagcgagaggtgggccttcgcttcctcgagtggctgcaagaggaattgttggcgctcccgaccatcatggagggatttatgtcctttgcctccctcgtcacctgcgaaggggtgttgaacgcgctgtcccgcgaggggtgcagtcactatgaggtcttcgaccgatctgatgaagattttgggcgcgagatttataaagtcgaagaccctgtggtgaaggactccgcggggcccctcttcgaccggatgtggggcccctacggtcgggaggtggtcagggagcggtctgaccgggcgagggatcagatggcgcgtgccgaggacgtggaggactttggacccctgaacagcgcgcagcccgaagcggaggccaacccggttgtggccgaggctgaagtcgacctagccccacccccagaaaccggtgaaggctcccacgctgcccctgcggctgctgtgtccggtggaggctcgtcgccagccactgcgccgatggtggagaatcccccgaaggcggcgacggagctggcagcggaggatcccccgaaggcggcgacggagccagcagcagaggatcccatggcagcggctgggtcttcgcaggtggcttag

SEQ ID NO: 28937 - DNA, 651 bp, Zea mays
  Peptide Sequence Number=SeqID_72312
atggctcaaagaagatcccaaaagaacaagaacacaactcggaatgaggtaactcttgagatattattttccgattgttctaactatgattcatggtctactagtgtactaaatgcttttagaactctagatcctcgattagaacaaattatagacaagagtatcataccttctgattatgatgcttccgaggaagatcaaagatgtatacgcttaaaccatctagctattgacatcttaggtaattctcttagtgaagaagattatcatgccttcattacaaattatgatgaacatattcctgatgcgcatgatatttggactaggattaaaaataaatttgatgagtccaaatatgatagttcattttgtgcttctacttcctttggtctttgtgatactaacccttgcaaggaagaagaagaaaatgaccaatggagaccaaacgatgaatccacctctccaagaggtttgtcttcccatttcgattcccacatatgttgtgtggctaatgaaaatgatagcggaagcacaaacgaggatgaggaggaagaaagaagcttcatgcaactctacgctcgcctaaaccaagaagataaggcggttgttgggggccttcggcttccgaaggtcctcaaaaacatgatttga

SEQ ID NO: 28938 - DNA, 399 bp, Zea mays
  Peptide Sequence Number=SeqID_72313
atgggcaagagcaagaaacgtgggagttcctcacaccattctggcgataagcggaagcgcgagccgactcctccctcggaggacttcggcgactccgagtactcggaggaggagttttcctccgagtccgagggttcgccggttcatgcctctcccccggcgtcgtctgacgactcagacgactaccaggggatcgccgcagaggtgtggacctacatccgggccgtcaagcgcgccgggcttgagggctcggatgagtgggaggtctcctcggacgaggagaactcctcggactcgtccgatgagggcgatggcgagggcgatgacggcggcggaggcgatggcggcgaaggtgacggcaaggacggcaacaagggcagcaacaaggccagtggctag

SEQ ID NO: 28939 - DNA, 483 bp, Zea mays
  Peptide Sequence Number=SeqID_72314
atgaccttggagcctcatcccttgcagccgggctggcgttcgttggactctgagtctttcggtttcagggctgaagatactatcgagtccaccactctccacgtgctgatgaccttttgtggctttcagccctgggagctatcaactcatcccattggcttgttccatgctgtgaaggaggacgacccaatgtggaaggatcgagtggagcatgccaaggatgtatgggctctttacccggggcagactgctcacctgacgtctaccaagatcaccctggataacagggaggaccttgtggtagacctgtccactgagctggtggagaaggacctccaggtggagcagatggccactcaaattcaagagcttgaggatcagataggggccagggagaacaccattgaggttctcgaggatcagctcctgaccacacaacaacaacttgaggaggccaaccagcatttggatatgcaccattag

SEQ ID NO: 28940 - DNA, 186 bp, Zea mays
  Peptide Sequence Number=SeqID_72315
atggagagaccccgcctgtcagtgaatgttgctattctagcaaagggaaggtatcttcggactcgtatcagagagggagaagctcaaaagatacgaaggttgacacagcgccgaagctgtgaagcagggaagcttcggcatgttcgcagaaaagggaaccgacttgaagatgaaaaggccatttag

SEQ ID NO: 28941 - DNA, 900 bp, Zea mays
  Peptide Sequence Number=SeqID_72316
atgtccgctcgattaaacttcaatgcccaggatccccccacgaaccggtaccctagtcccgatcacaggatcaagatcccacagccagcgctcctctcccacatcaccctcaactctctcttcccaactctgcacacggcggcgccggaacaggccatgcggaggccattgtcggcggctccaacatggcctcaaggcttcaaacacaaatcggataggcgcatcacgatccagggacgaaggtcaatcaagagggaggggactcttactgaggctgcggcgtataggcacccgtccgcgacgaagagcggcaccatggcggaacatcgctctgacaagcaattccatgcggccccgccaccaatccctcccggtgaagccatgcccatcgtcgacaggctcaaaagcgccaagtataggctgttccgggcctcaccagaccggtccgatggtgcaccgaaccgcatccacacaggcccggaacttggtattttggcggcatgggtcattggaccgtccggcggcacaccggaccacctgtacgatcgaagtctaaggtctcgagaaatattctatagctcatccgaccatgaacagtactcgaaccggtgtgcaaccggaccgcctccagtggctccatccaacggcacgcgggtgacgcaacggctagctgacgtggcccacggtctggtggttcaccaggctagtgccactcagctaaggaaggccccaattataattctgagcgcggggctacatggcctagtgcgggctcggactcgggctaagccccggaagacggcgaactccgctccgcccgacccagggctcggactcgggctaagccccggaagacagcgaactccgctccgcccgacccagggctcggactcgggctaa

SEQ ID NO: 28942 - DNA, 552 bp, Zea mays
  Peptide Sequence Number=SeqID_72317
atgaggcggaaagacggcgggtaccccccatccgggggcttggaagatggaaagacacgacacataagggaggaagaagacatggtcgccttccgaaaggggcaactgcaccgccacttgcgccaccatcgcgcctcttcggttgcggaaccaatgccgcggctcgaggcgacccagcgcacgacccagcggcgccagcctggcgcgacggtcaatgcagccgaaagcgggccggcagtaatgacggtggcaggcgggcgggagcagcggtcacgtcgtcagccaggctcacgtcccatccaggggcagcaagagagcctctcctcacggcgtgaagacgacgcgcccgtgatccgttcctcgaacggctcgcgcacgcgcaacggccgccccgccaaccactcgccccgtcgcattaactccgcggcgggacaggcggcgcttctagcaggagaagcgggcgacgcttcgccttcgccggaccgggaaagggggataccccgaaaaggatccttccctgtgaaggaaccaggctccgagcccccctactga

SEQ ID NO: 28943 - DNA, 606 bp, Zea mays
  Peptide Sequence Number=SeqID_72318
atgtcgtcgattccgccgccggcgggcgggttgtcggccgccattgtcgttgtcgcgcggcggtggaaggagtgtcatgtcgtaggtgccgtcgaaggacatgaactcaagactcccaaaacggagtaccgtcccgggccggagaggttgctggagactacccatctggagcttgacgggaagctgttcgtcagcacgcagcaggcccctacctggcgcgccaactgtcggcgtttcgagaccagggggttcctaagccgacgactttatgctgatgggggttaccagctgagaattaggcgtcttgagggtacccctaattatggtccccgacacaactgcttgactttaaccccacataaagctagtccattacagccaaacgagataattgctgagtatgttgatgtttactcagccttgctttacacaccaaacccccaggttatccacgttgcaaccactgctcaggagaagatgaagtcgtggtggaggacttccaggagttccaagagtacgatgagttctaggtgtgggttagcggcaaacccccagtcggctgcctgtgaagtccatgtttatctacgtttcgttttcgcactttga

SEQ ID NO: 28944 - DNA, 702 bp, Zea mays
  Peptide Sequence Number=SeqID_72319
atggccacgtcgggacaggaagcgggtcgaagcgggcgaaattcatcatcgtggttcgccaccatcgcagatccgtcattctgcacaggtcattatatcgaggttaagtacaccatgattaaatacaccacaaaccctaccctaggatggggcttacaaatgggcccgaatggcgagcgaggcgtcgtgtgggcccattccatagaccacgtggacgaggagcgatggtcttcgctcgggggcgccgagtctttgaaccttgccaagacttgtcccttcgcctccaagccttcgtcggttctccgaccaaggctttgccttcggtacgggttgaagtaccctttgcctcctcacttgttgcgccatctcctgctttttctcgctgctggtgagctggcccgcgtgaagcagatcgtccgcctccgtcgacgtcaagctactcccgatgcccttttgaataattggatggtgctgagccccgcctttgccattgaactgtgggggcgggatgtgactgccttcgtcagggaggtggaagcggaggtggtgaaatttattagcaagtacttagcaaagacagagctaatgaggagttgggaaatacgaggttcgaatgttaggttgaaccatgattttgaattgaatgaccttccgtatggtccataccctaaggagggttgtaccgacaccggggatgaatga

SEQ ID NO: 28945 - DNA, 471 bp, Zea mays
  Peptide Sequence Number=SeqID_72320
atgatggtactcgtctcagttgtcaccacctcgttcgtcattctacttcttttctctcttccctcatgccttcatcttcgtgccaccccattctcggcagagggcgtaggagcagtcgcctactccccgtatttgtccgacaccagccccaacaccgacttgcgtagtggctattgcacgtccacgaggacgtttcacattatgcgcgcatcattgttttcgccattatcagacatcccgttcgtcttctcggcgcgcacgctgttcttcctccccaacctgctgcccccgcccacggtcacagccgcgagccgaccgacgctcgtcgacgcgggtacagggcgagtcggtcatgctcctggtctttctccgtgcgtgccgtcgaggaggacatggtggcgcctgccacgcttaagttatcttggcgacgaggagtctaggtctaagatattggacaaccaaggcccgtag

SEQ ID NO: 28946 - DNA, 2364 bp, Zea mays
  Peptide Sequence Number=SeqID_72321
atggcgcttggtcatgatgcgatggccaggacatcgacgatggcactgcttttgaggcgttcgtccgtaccttctcaggccttcatcgcgtccttcgccggcgacgatcaccgacaaggcggtgttagatcagcgttggaaggcttatggatggatagtgggattcccaggataattttatgtattgggagcgacgctatgtgctttccaacccctaccatcccctccctccccggcgcctcaccctcaccaccccacagccccacgtcggtgcctactccaggcccggcggccactccctcctcccctttggcgccggaggccacccctgttcctctggccgttggccgttccaaggcccttaggtggcgcgacgatggaagcccggcgtcctcttccgtggcttctccaggacttcatcgacgtaggccatcatacaaggaggctcttctccttcccaggcctgctcccttcctaggccgggaggatgactttggagttggctgggtgacagttgaaggaaggcaagctcgtcgacgccgccttcgccacctcaagccccctcctctttcccccagggtcgtgccttccgaccttcgggggaagtgttttaattgcttctctccttcccactgtgctgctgtgtgtcgtcggcaggtgcggtgcttctgttgccggctgcctaggcaccgtgcttacgtgtgcccgcgtcggcgatcagccgcacccctgccgcggcgaggactggtgtggcggcctgtctccctgtcctctgggatggccggctcaaatgacagtctcgctggaagagtcgtggatggaggtgaagatggcggtggcggactgaagaggcgcacccgccgtggacagaggaggagaagacctggaaacctgagggatagcgccgatcaagatgcaattgttgcggtgccttcccaacgtccggctgatcagtgccacgatcgtgcattggggaggcccaggaggatcatcaaacactccaggatgattcttcaggcagaagataacctccggcgggccctgatcatcactgtcattgatcaatcgaattctggctgcgccgcggacgtgtctgacgcgctcgctgtgaggtttaacctcgatgcgcagacgctcgacctccgtcgtgctgcgccgaattcattcatcgcgtttctccccaatgaagaggtagcgtgccgggtcttcaatggcggcattccttttgtctctcccaccgttcgtcttcacatcaaacgctggtccagacatgccatggccgtcggcgggagggagctaccagtgccagttgacatcgagttgagaggaatccctgctcacctctgggggttggaaacaacaacacaacttctcgatgaatattgtctcattcgagatgtgcatcctgactccgcggaaggcggcgatctttcagtcttcaagttgagtgcatggtgcgacgagccagagctggtgccggcggaattagatcttctggcggaggagccgcagttgggtgccagtgacttcggcagttttcctcacactctggtgttcccaatcaccgtgcgggtgtgccgttcagatgcgatcttggacaggaggccctcgcctccgccgccgccacccttttccggcgacgatcgcgagcagaaccacggcaagcggcggcgggatcaacattcaatttcttcggtgcctggacgcaggccagtgcacgcgcgtctcgggccatgcgtccgggccgactctgcgcctgggggaacatgtgaaacgatcgcgctcccggttcccttgggggcagtgagcaccgcttcggcttctccaccccgggcgcgcctcgggccttgtggtggagccggctctgcgcctggatgtacagttgggacgttcagtgccccgggacccttgagcgctgtggttgctgtgggggctgaggaagccgcttcgggctctacaattccgacgccagccccttcggtttctcccccaacggcgctcgtcacttcggttatagtcccaggagccgccaatgctttaacaaccggctctccatctgaagatcctgggcccgcctcattaattggtgcaatttcctctggtctattggattctgagaggccaattctgcatgacaactcatttaatgtggcggcttttgaggaggctggcggttttcagaggttaggacagggcccagaaagtctttgtgctgatgcttcaggacgggcctctgtgccattttctcatgtcccgcatgtcccagatgtccctgctgataatgctgcacaagtcaggaatccctgggatattatcaagtactttttgagaacgcgcaggagaactgcacatcttatatattaa

SEQ ID NO: 28947 - DNA, 357 bp, Zea mays
  Peptide Sequence Number=SeqID_72322
atggcggatcccagacctgagctcctcgcggaggcggaggatttcgcgcatccggttccaggcctgcgaaggagggtgttgctgcttcgcggcccggcggcagagggatcactcgatttcccccgcgcaccgacgtcgattgcaccagcggcgaacccgaaggtcaccggcgagcttggtcctttctctctctttgatggagtttggtgtgactaccccaatggtggcggtgacgcccagcgcccaagagacggtcgaggcaaagcgagaggcgcggagaccccacacgcagggaagctggcgcccatgggtcatgcggctgagaaagggatttgggctggccaggtagagaaatag

SEQ ID NO: 28948 - DNA, 489 bp, Zea mays
  Peptide Sequence Number=SeqID_72323
atgcagtcgggttcttcgcatggtggaagaagaaggcacgcgcgcgaagataggggagatgatccgggcgaccctgccgtgtggatatatagcggcgcggacgttccccagccggccgaacaccacggaatggttgttgtaacaacccccaccgagatcgacgcggggtggaagaagcacatagccgtggtcgagggcccacctgccagtcagtgcgaaacgagtgcggctgtagattcaggcgcggagaccccacacgcagggaagctggcgcccatgggtcatgcggctgagaaagggatttgggctggccagtcctcaatttgtaatactcagattttgggccttacaaatcctaccccccttaacaaaaatctcgtcctcgagatttgtaaggaaagggtgtatactcatattgtctcaacacatatgcacacacaaaaatctcagcatgatgcatactttattagcaacacatgggtcaattag

SEQ ID NO: 28949 - DNA, 567 bp, Zea mays
  Peptide Sequence Number=SeqID_72324
atggccatgatgggttcaacatcggaaaagatgtacctctgccagatatggcgcgcactaagcatacccagcataaatcgactggacctcatgggtgtgccacgacatcagctagcctctagacacgaaggaagtagcagtagcactaatgacccgattggatacctggaagcccgggtggagcaacttcggtcagaactacgccacagaaatcaggcacgtgagcaggatagccaccatattgcggagctatcagccgaaatgccatcctggactcgcgcacatgatggtgcggggacatcccacagtggggaggatactcctaatccgccacccgtaccacctaccttggccaaggctatcgttgccttggtcaacgccaccgccgacaatacgcgctttctgcgtgagatggcgggcaaccaatttcaacagcagggaggaagagctcctcctcaaggaccacgagatactacttatctagaattctctgaaactcgacccctgctcttcgtcaaggcggaggaacccttagaagccgatgaatgggtgcgagcaatgcaatag

SEQ ID NO: 28950 - DNA, 363 bp, Zea mays
  Peptide Sequence Number=SeqID_72325
atggcgtgtcgtcgaatcgcccacagcgccgagctcggattctttctgctcctcaacctctctgttctcccagtggcggctaagctggcaccggtggttgaccccgagaccgattccggcggcgcgatatccgcgtatcgcgcggcaatctgttactaccgccatggtgaaggaggaacccgacaaggtggccccacatgtcatcagcatatagagggaaagcaacaaaggaaaaggggaaggagatggactgccgtgggagaaagtgggcctgccagggaaaatggcccaagcgcaggcttcctttattcttttccatttagttttcctatttcagatttcaaatatccaattcaaatttga

SEQ ID NO: 28951 - DNA, 405 bp, Zea mays
  Peptide Sequence Number=SeqID_72326
atgcaggcggcatgcaaccgcgccaagtgggcgcacctctccgacttccaacgcgcccagcatggaggcccaggcccacgcgtcatgcaaccggcgcaccggatgctgcgtgcgagcaactgcaccgccacccgcgccactgccacgcctcctcaactgcggaaccagtaccgcgactcgaggcaaccctacgcacgacccagcagcgccagcctggcgcgacggaaccaggctccgagcctccctactgatcagaggttcgaaggctggcccctcggaggggttcaacagccgcctcagagcgcgtgggctccacacccactactggtcataggttcgaaggccggcccctcggaagggttcaacgaccgcctcaggctactcgggctccgcgcccactactga

SEQ ID NO: 28952 - DNA, 936 bp, Zea mays
  Peptide Sequence Number=SeqID_72327
atggcggcgaccccgtccccctccgtccccgcctgcccgaccttcccgtcctcctcctcgctccctcctcgctcgaagactccgaccaccttcctcccttctccatcccgactcgtcgccatcggagacctccacggggacctgcccaagtccctctccgcgctccgcctcgtcggcctcgtgcccccgtcttgcacccccgactccccctccgcctcctcctcatggaccgcggggcccaccctcaccgtccagctcggcgacatcctcgaccgcggcggcgacgagctccgcctcctatacctactccgcctttccctctctgccgagacacgcggaggcgcgttcctccccatcctcggcaaccacgaggtcaagaacgtctccagcgacttccgcttcgccacgccgcagggtttccacgacagggcggtgaatcgcggggggaggggaggggggctggatccatcgcggcggttgtgcgcgtgcgcgggattcgcggcgggggctgctgaggcgggggcagtctacattctcctcttaatagttagtagagattttaaccttcatcaagccttcaaatttgaatgtgcaaagatctgctgcctatcaaaagggccaaaagcattgcgccctagaaagaggaatggatgcataagctgcaagactgctctttatgcttacacagaagaaaaccaatatgttgataccaaacctggaaaatacattaccaaacctagaacaaacaattccctcatcgttatttcatggaaatgcgaccaggttttatccaataatttgtttggccttggctatgcgattcaggccgtgttgaggaaagcaacatccagtgagaaattagacaaagagacgaaaggggaaaagaaccaatctgagagacgcgtcgaaagggcttcagtgtgtgtaacaacataa

SEQ ID NO: 28953 - DNA, 1611 bp, Zea mays
  Peptide Sequence Number=SeqID_72328
atgttacaaagccaattaactctgctggtgctcttggaaacccccgcgggtttcgcgctattcaaggtgcttgatgaggggaagctcgacaaggtcgaggatctgtggaaggagttcacgacgtcggactcagcgagaaaggtggttgagctgaaggcttttaacaagtttgagaacacatctgacgccctatctgcagcaaccctgattattgacagcaagcctagcaagggtctgcacaagttcttgcagaaacattgtcagggtgaaacattagctgtggctgattctaagcttgggaatgctataaaagaaaagctgaaaattgactgccttcataatagtgttgtgatggagctaatgagagggctgagaaatcagctcacagagcttataactgggtttggtgcacaagaccttggtccaatgagcttgggattgtcgcacagcttgtctagatataagctgaagttcagtcctgagaaggcgtgtcttatatcggttgataccatgattattcaggccattggcttattggatgatcttgataaggatcttaacacttttgccatgagagttcgtgaatggtatggctggcactttccagagctcacaaaaatagtttcagataatattcagtatgccaaagttgtgaagatgatgggtaacagagctaatgcagtcaaccttgacttctctgagatattgtctgatgaagagctagaaacacagctcaaggaggctgcagtaatatccatgggaactgaagttagtgaacttgacttgttaaatatcagagagctatgtgatcaagtgttggccctttctgagtacagagcccagttgtatgactatttaagaagcaggatgaacactatcgccccaaatctgcagcactggtggctttctccactaagaactaaaggttgtgtttctctatatgctttattcaaagctctaaagacaaagcattctacacccaactatgggctcatctaccatgcatccttaattggtaaggcttctcaaaaacataagggaaaaatctctcgttctcttgctgcaaaaactactcttgccatcagatatgatgcccttggtgatggtgaggacaactccattggcactgagagtctactcaagcttgagacacggcttcaagttctcgaaggtagagaacttgggaaatctgctggttccacaaaaggaaagccaaagatagaagtgtatgaaaaggacaggaagaatggtgctagggctttgacgactcctgctaagcgtggtggggacgctgagaacccgaacgtcaccgacggcgaccctttcgcagacaaagtgcaggtcgatttacacgtgcttcgtgcgctgatgctgcacgaggttggtggagaggtagaccgcgctgacattgtcgcagtagacgaggctggcacgctggagggggctgtggaactcgtggagctcgtggacaagctgtcgaagccaggagacctttgccacgacgttggctacgacgcagtactcggcctccgtgctggagtgagagacgacgggctaccgcttggcggcctaggagacgaggttggcgcccaggaacacttcatagcctga

SEQ ID NO: 28954 - DNA, 210 bp, Zea mays
  Peptide Sequence Number=SeqID_72329
atggatcatcggccgcctcggcatggctcgtttatctggcctgaggcgattcgatgccgccaccaagtttgttgtggcatccgcagtgtgcctccatggatgagatccaagggctgcaagcgcaagataccgcttcggtcggttcttttacaaaagaaaccctgtataatacggttatcaatccgcagtacacctctgggtgtttactga

SEQ ID NO: 28955 - DNA, 925 bp, Zea mays
  Peptide Sequence Number=SeqID_72330
tgatgccctgctgggccatctaggtagtggtcaatggggagtagctctctccgggcagaaagggaatcacggcttgtgggtgacaatgagattgatggttcttggtattgactctggtaatgacacaccgcacggaagtctgtcatccccttcttaccctctcgtctcgcggagcgtccgcttcgccgtcccgtggccgcaggagatagagtctgtgaggagctgctcccctgtgcttcccctggaggcaccccctgcaccaccactgagcgccccagtccctagagtagctactggaggagtcccagacgacggcggaggcgacaacagctcaagccacgacaccgacttttctgctgaccaggagtcggaaggatgggttgctcgacccatcactcgcgacgctgctcgcgggtgtcacttccacgatgcgctcgacaccctgttacgtcgggcacttgaccgacgtacttggtctatcgagtatcgttgtgtggtcttccagcatagtcgcggggtctacccggaccgctgggaggcgacctgcttggtgcgccgtctggagaacagtctccgggtgctcggcggggtagccgatggtctcaacctgaagtattacccccgtcgtccatctggcagcacaggaggcgtgattgtctcacctgttggtgatgacaatcctaggttaagtagcacagtcaacctagccgccgtgctaaacacggagatggaccatgcattagacgagctgagtagggctcatgctgagatcgccctgctgcgtgctgagcgcgcggagcgtcgtcacctggatgatggctcccccgctcctttcgggactcagcacccgtaccgctcacctcggcgtggacaccagtcttatggcaactccgactacaagaccaagataaatttggagccatag

SEQ ID NO: 28956 - DNA, 192 bp, Zea mays
  Peptide Sequence Number=SeqID_72331
atgtctgcaatcgcgcgatggatcccctctccctcttgtagctccctcacgccaaccgctgcccctagccgcggtcaccgtgccattgagctccgctcgacgggatgcactaccgggccattctggggcaatgctgcgagatgtctgtccgatcgattgaaagctaaggtgacaatccgagtgctggtctga

SEQ ID NO: 28957 - DNA, 390 bp, Zea mays
  Peptide Sequence Number=SeqID_72332
atggtggctgaaaggtcgtcgttgacattaacggcgccgatctggccctcggtggcggccactgcctccgagctggtgtcgagcacccgcgacgagcggagactgttgcgtggaggaggagccaggcgggggcatggcgtggtgagaatattgagggcgggggcaagcgcgtcagagagcggggtggagaccgatgtgaaggagatgagaggagggaggcgagcgcggccgggcggggatgagcgcctgtcacgacgagccggcgcggatggaacgcgtgtgggcgaggatggaaggggcggggaagaggatggaagggaggcggggaggaggaccacagtcggttttgcccgaagaggatcgcaggaggatggggcggtgtcgcggtag

SEQ ID NO: 28958 - DNA, 177 bp, Zea mays
  Peptide Sequence Number=SeqID_72333
atgctcagctctaaccatcctctttggtttactgaggtgacgaagcgtgctgatgagatgattgacatgagagttgagttgtcacggtccacaatggagaatatgaagcgtgcttttgctaaggctggcaggcaccaatcatatgacaacattgcaagaaggctaaagcgatattag

SEQ ID NO: 28959 - DNA, 810 bp, Zea mays
  Peptide Sequence Number=SeqID_72334
atgcaaacctactgtattgggctgcatgcgctaactagccgcaggcccacctatcctttccagggcacacaccagaaacgacctggattccatcatgtacgtccatatctcatcggtcggcttgcaagttgcatcagccagcagcaactcgccaatgaagccactgcccgcccgcgcgccgcattcccaaaccctactataccccgctcctctcctccccgtctgccggctcccttcttcttcgctgtcgacgacgcggactccccgccgcgctccctctctcaggcctcgcggggtgatcagaggcggctgggagactcgtgcgctccgacgagtccggttacggcgcggatcacaacggggatcttctgtcgcaacccctacaacgcgacgggcatctgcaaccggagctcctgcccgcttgccaacagccgctatgccaccatccgggatcatgaaggtattttctatctgtatatgaaaaccgccgaaagagctcatctgccaaacaaattatgggagagagtcaaactgccgaagaattatgagaaagcaatggaagtcataaacaaacatcttgaattttggcctaagctacttgtgcacaagatcaaacagcggctgacaaaaatgactcaatatcgtataagaatgaggaaacttcaactgaaaattgagttccagttccgaatattcatgagtgccaaggaggccatggttattaaaaaggcgcttaagcgccttttaagcgctactcagaacgtaaagcgctgtaacgtttcacgaaataacgaaaagtgcccgttttaa

SEQ ID NO: 28960 - DNA, 321 bp, Zea mays
  Peptide Sequence Number=SeqID_72335
atgaaagagagaaagcaatccaagggcaagagctcaaatgaacacgacaaatcactctcactagtcactagggatttgtgtggaattggagaggatttgatcactttgagtgtgtctagaattgaatgcctagctcttccccaaccaccaaacttgaccgttggtggagctgtctgttcgatggcgcaccggacagtccggtgcacaccggacatgtccggtgcgacagccacgtcaccaaatggccgttggatcgaccgttggagttctgacttctgggcccgccttgatgtccggtggcgcaccggacatgcactgtag

SEQ ID NO: 28961 - DNA, 219 bp, Zea mays
  Peptide Sequence Number=SeqID_72336
atgttcggattacaggtggcaatgagattgatggtttttggtattgactctggtaatggttgtcagcattgcaaccactgctcaggagaagatgaagccgtggaaggagacctccaggagttccaagattacgacgagttctatgcgtgggttagcgacaacccccagtcagctgcctgtgaaggccgcgtgtatctacgtttcttttccgcactttga

SEQ ID NO: 28962 - DNA, 573 bp, Zea mays
  Peptide Sequence Number=SeqID_72337
atggggagcgcccacgttgctttcgtcttgctgtcgttggaggaacgcaacttcgcggaagttggtacctttcagccatcgctcgacttcaaggattttcatcaggcagcccggctgcaccccctcgccgcctcccttaggagcttcttcgccttttatttcagcggtattagtgttgacttttcgcttctcactgctggtgattgtgctggctcccttctggctgctggccttggggataagcgggttgcattggtggtggaggtggaggctgttgccaagatggctgaggttgtcttgccgaagcaacaaaaactgcaggatggttacccacatactctggaatgtacggtgagtgatggtgacatggcacatcctggtagtatggcccttgtcctcaccgcagaaataggcaataaattttccttggttgatccccaaaccttcctccgaagcccctggcgcctctgccccttggagctggaggccgtggatagctctgttgctgccccgaagcctgggaggaatactgtggcctctgttgctgacttcccctgttgtcattctgagtag

SEQ ID NO: 28963 - DNA, 315 bp, Zea mays
  Peptide Sequence Number=SeqID_72338
atggggttgtacgtcgcggcgcgggcgtactggcgatccatcgagtgcggggggattggtgggtcggacgactcggaggaggtggaggactcctctgactccgaggaggggagtggtggcgagggcgacggcagcaacagcggtggcggcgacagcagcgatggcagcgacaacagaggcgatgacggtggcgagggcagcagcgatgacggtggcgaaggcggcggcagcggcggtgacgacgatggcaaaggcggtgttagcgacggcaacggcgatgatggcaaggccggtggcataatgctaccggcttaa

SEQ ID NO: 28964 - DNA, 519 bp, Zea mays
  Peptide Sequence Number=SeqID_72339
atgaagctgtggaaggagacttccaggagttccaagattacgacgagttctaggtgtgggttagcggcaacccccagtcggctgcctgtgaaggccgcggttatctacgtttcttttccgcactttgatttatttggttgtttgcctagagacagcataaaatctaggattatgagcctttttaatgtactcttcaataagccagatgattcagccaaagcaaataaggatctcgagattgacaaaagaggagttgaactcgggtcacacatcgagacgctggaatcgtcgctcagcctcgtcgccactagaaccgtggcgaggaacaggagcgaggtggctcggcctgtgcaggggtgtgcccatgcggggcggggcgaagctcgatgcctcggctgggggtgggcccgtgactccgtgggaggagctcggctgctcggcgtccgcggagatgaccttggtctgccagtgcaggtgggcggcctaggcggagctcgggtcagtggtggctccacctga

SEQ ID NO: 28965 - DNA, 228 bp, Zea mays
  Peptide Sequence Number=SeqID_72340
atggcgcctccgcccaccatcttgctagcacctcatgctcctctacgatccttcgagtcccaggaggctaggaccgcctctagcctccgtggctttgttgggaccagctcgtcgttggctggcgccaaggctccctcgccctcatggtcgctgaggtcacgacctctcaccctcgctggagcaaagtttcttaatcattatccaaggaagattttatttatcgactag

SEQ ID NO: 28966 - DNA, 495 bp, Zea mays
  Peptide Sequence Number=SeqID_72341
atggcgtcatcgcgaagggtgcatcgagtttttgagagaacctttgatctcttgagttgttgtttgtattggagattgacttgcagtgaatatcagtctctagaccactccaaatatcagtccaccctcgagaaattccatgagaccaatgatcacataaagaccagaccctttgagatgtacatgcgggagtatgagaactttgtccagttggctgtagagatgatcaacatcatgttctctcggttccagttaatagtgaacaagacgcgcgcaaacaaggcacaactgacctatgatgatcatgagagagcactcaagttactatatgctctagatcggagggttgggagtttccccaagaatggtaagccggaggctagacagtgcgaccaccactctggtcgacgcaagggaaagtgcaagtacaccaccaacgagcacaagtccaaggggaggttcgacaaggaggcactcaagaagaagtacctctag

SEQ ID NO: 28967 - DNA, 243 bp, Zea mays
  Peptide Sequence Number=SeqID_72342
atggctggggtgagctggccgcggtggccggagctcgggcggcttggcgagcggtggagctctcggttcatggccaatgctccggtgattgagcgcgattgcaacctcgcagacgtagagtatgtgctgattctagagcaaggagtcgaacaagaagatgtagaagagccagctcctgaacttgccgttgaggaactccccgctacacccgcacctgaaggcaagccccgattttatgcataa

SEQ ID NO: 28968 - DNA, 336 bp, Zea mays
  Peptide Sequence Number=SeqID_72343
atggaggggcactccgtccccacacatatcaaccgtccccatcgattccctgttgcggccagggctcaccgccttggcatacaatgctccactgaccctggctgccgccgtgcagtgaccacacttgtacccaccatagctagcatgggagaccccgtctcaggacaagtgaggaggaaagtccgcgcccggcttcactcagggcttgccttcaaaagctggggctgtgggaagatccttggtggcaggctcttgagttggctcctgaacttcctcttgggcaacttcttgctcggggatgagaacgtactctccgtcagcaaggttgcaatctaa

SEQ ID NO: 28969 - DNA, 1470 bp, Zea mays
  Peptide Sequence Number=SeqID_72344
atggacaccgctcttcatttcatccccgccgcggacaccgctctggcgctcttcatttcatccaagaagcctttgctgatctctccagcaacgcctcgcctgctcctgtcgttcgcggacacggccgcccctgccctggacgagctgtacaggaggagcggcgaccagccggagatcgagcagcaggccgacgaggaagacgacgaggtcgaggtcgtggagaacgcgacggccaagcagccggcctggcgcccctccccttccgtcccgccgctgctgccgtgcctcgtgcctgccagcggcggatgccgccccgccccgctgctgaccaccgccgctgctgagcatggccgccgctcccgcgggcgctcagaaccgctgcgtcttcgatgtggaaatgttggcaacataccatatgatgcgacggaggagcagctcgtgcagatttgcgaagaagtcggcccagtcgtatccttcagattggtgattgacaaagagaccggcaagccaaaaggttatggcttttgcgagtacaaggatgaggaaactgctttaagtgcacgccggaaccttcagggttacgagattaatggtcgtcagttacgtgttgattttgctgaaagtgggaggaacactgatagaaatagagaaaagatgcagatggcaaagagccaacagccgttgggctccttagcacaatcttcatctcacctcaatgagccatatccacagccagagccagatgctatggttccagtagtctcaagaccatcaagtttgccaactaacgtactaccaaacccagttatcctacaggaacaaacagctgcaatacatagttttcctcagcatcaacatgcatctcagccccaagtcaaaatgtttccacatggacaaccgtctgggatcaccgcacaatctccaatgctacatcagccccttggtggttcttccagtgttcctattcaatctcttgtgacctcagtaggcttaacctcacaggttcagcctccatttgtgccagagcaccctggaccacctgtcatgcctacaagtgtacaacagctacctttgacccaccctcatcttgctctggtagccgccgcacctgagactctaccaaatgaaataagggttgctgatcaagcaagtcatttgacagagtttactcatccttcaaaattgagaaaattggaggatggaacctcggtgcctggaatggtgaacagcagccatgctatttatacagctccactgcaagcagtgggccctagtggaccatcagggagctatagtgctggtgctggtagcttacaacaaccagggaatgaagggcagattacgcctgatgtggagtcagctcttctgcagcaagtcttgcagctgacacccgagcagctgagttcgttgccaccagagcaacagcagcaggtgattgaactccagaagatgctttcagctggtaaatag

SEQ ID NO: 28970 - DNA, 1383 bp, Zea mays
  Peptide Sequence Number=SeqID_72345
atgtcaaatgacacggagccggagaaagtctggcactacaaggatccttctgggaatgttcagggtccatttactcttttgcaactatcaaagtggagaagttacttcccacgtgatctgagagtatggcttacatttgagagtgaggagagatctttgctgttgactgaagtgctttcaaaacagcagaaagatttcactcaggctgcatcacatacaagcagcaaggcaacgctggttggcactggacatacaaggaacaaccctagtgtggatcagaccaatgctttctcccctgctggtcatagtgtggttagtttttcaggaataactgttcagtataataagttgggcagtcgcttgcagacgaccaggtctcgcgcggcgagtagcttccgggcgatctcgagccaccgggccggctcggctcggcgcggctgcggccgccgcccccgccggagaaatccatgtgtggtggagatctccatggtggtgggctccacctgcgccgcgccagcgacggcagcggcggcgggaacgccctgggcggggccgtgtgcggggccacctcctcctcccccgcgctcgtcgtcgccgcagcccaggcacgagagtccctgctcgacggactgctggcacgggaggagctgctgctcggtggtctccaacactgtcagtgccatgtccgtggacggcagcaagagcgagcagcaggcctatatgctgtacgaggagcatcgggtaccacgttgccgagtctggctgactctagaggctcatccccttcagccgggttggcgttcccttgactccgagactgttggattcaggacggacgacaccaccgaggcggcagctatgaagaccctgacgactttctatggttaccatcccctggagatggtgatgcaccccttgggactcttccctgctgagaagagggatgaccccatgtggtgcaaccgtgtgagccatgtgaaggatgtatgggccatgtatcctgacttggttgggagaatcactgttcagtgcatgagcgcactgtaccaccttcaggccctgcagagctacgctatggcacatcttgctaacctcgctcagaccaccaagctcacccttgacagccgagaagacttcgtggtcgacttgtcctcagagttggtggagaaggacctacaggtggaacgattgagccagcgcatcaccaccttggagcagcaggagcttgaggaagctaatgaccacctgtacatgcaccacctggacatgcaccacctggagatggaggccaatgaggccgaaagcgagggagaagaggctcccgaggagttaggaccagcccctggtaccaatgcgactgactccgagatgcccccttcactc

SEQ ID NO: 28971 - DNA, 498 bp, Zea mays
  Peptide Sequence Number=SeqID_72346
atggtgaaagtaccgagtggagcatgccaaggatgtgtgggctcttacccagggcagactgcttacctaacggtgcggtgcatgaatgccctgtatcgtctgcaagccgtgcgagctgaggcaatgtcccaactgatgggcttggtggagtctaccaagatcaccctggataaccgggaggaccttgtggtagacctatccactgagctggtggaaaaggacctccaggtggagcagatggccactcagatccaagagcttgaggatcaagtagtagctagggagaacaccatcgaggttctcgaggaacaacttgaggaagccaaccagcacctggatatgcaccatcaggaaatccaaggcatggaggccgaaggggccaacgaggatgttgacatcgatggaggagaggagccggagcctgcatccagcttggacactgctggctcagggagaccaccttcccccgagtctagcgttgccttgtttgcccattag

SEQ ID NO: 28972 - DNA, 459 bp, Zea mays
  Peptide Sequence Number=SeqID_72347
atggctgagggagctcgggacacaggagcgccgcgcagaggaagctctgcgagctgggatccgacgtcggggaaggaagaaagaatagcagctgtcaggaggggaggagacacgactagggagggactccgctggtgctccactcgacggccggagatgaggcgacttgggaagagcctgggcgtcggccaggaagataggtcagggggcacggcggcatggcgagggagccggcgagcgcaggggctccacgagctgagggggcgcggcgatgggagctcagcacggatcttggcaaggcgtggccatgggaggagcgaccggcgcagagaacttgaggaacgcgcgataggaagatggagcagggagatgaagaagggtgtcgtgctcatcaacaggaagggaaggagcaggggacgaccatgggaaagcggcaacagggaagagcgcgcggcgtga

SEQ ID NO: 28973 - DNA, 255 bp, Zea mays
  Peptide Sequence Number=SeqID_72348
atggccggacttggggaaagctgggcgccgaggacaggcttcaagctgagcgcgcacaggggagcttggggcgccgagcagggagctgggcggtcgcgaccaggaagatgggcaggggttgagcccggccagacggctgccatggccaccggcagaggggaagaaggaccggcgcgtgcatttaaaggatccaggggcggcggcgtccaaaaaaaatcccaggggagggcggcagagataagaacgagagcttga

SEQ ID NO: 28974 - DNA, 708 bp, Zea mays
  Peptide Sequence Number=SeqID_72349
atggggggggggcctgcggagcaacagaagaccgacgaacggcgcgccgtcgcccgctccaacagcggcgacgacgacgacttctgctccggagggccgaacagcggcaacgatgacctcagggcggatgctgctgccaggaggcccccgtccatgcccaaactcgtgaggcaaggacgggcagagggccgtagagttggaggtcttcccctacggcgcgggggctgggtcccacacgtcatgcaagccggctcaaagcagaagaagccaaatcgccgtgcgcggtgcgtacaaccgcccagcggttacaagcgactctccacttttgcccagaccagcgggcgaaagggcgggcagccatgcaggcggcatgcaaccgcgccaagtgggcgcacttctccgactcccaacacgcccggcatggaggcccaggcccacgcgtcatgcaaccggcgcgccgggtgcttcgtgcatgcaactgcaccgccacttgcgccaccaccgcgcctcctcgactgcggaaccgataccgcaactcgaggcgaccccgagcacgacccagcggcgccagcctggcgcgacggtcaatgcggccaaaaatgggccggcagtaatggcggtggcaggcgggcaggagcagcggtcacgtcgccagccaagcctacgtcccatccgggggcagcgagagaaccctctctcacggcgtga

SEQ ID NO: 28975 - DNA, 810 bp, Zea mays
  Peptide Sequence Number=SeqID_72350
atggtggggagaagcgagccgggctgcgatcttggtcccaccctcagcttcaaggatcttcatcatcctggctggggcggaggccgggctgagccggagctctacctcccgcgcgggttcgtgggtcaccttctccctcagcattcaaggcagagggcgctcaccagcctagcgggagggtcggacttcgacaacacggggctggttggcggcgagcgtcgtcagcttcagcgcgttgggctcgctggctcagctggctctggctcggctcccggtgccctctcccgccgtgagagcggttgtcgcgccgcgtgcaccggaggaccgcccaagacgtcgcgcgctgctagggcggcattcgtgttctggggctgtcctgcctttgccccggtacgacgcctctgcgcggaggttggtgcttcgctcgtccgggaggatccgagtggggatctgccggtgggcagatggcttccgtcgtcggcgctgatgtggtggcggctgaagaagtcctcgtcgctgacgggatcaccgccaccatccgcgctccgggcctccggctctttggctttgatagcttgtcctcgcccctcgagtggggacgtgggcgagggcattgttgcggcggcgtccgccctgaggccattgccgctgctgttcggccgctcggagcagaggtcgttgtcgctgctgctcttcgggcgtcagcgagccatccgtcggccttctgttgctccgcaggccctccaatcgtggggggttgttcgtacctgcggaggtggaaccggagttccgtttgtaatggcaccttga

SEQ ID NO: 28976 - DNA, 780 bp, Zea mays
  Peptide Sequence Number=SeqID_72351
atggttgccttccaagggggtcaccctccttttaaaggcaactctccccacttgcgtcctcagccgtcgcggactgagtcttctccaacactctccaaggtcttccccctacgacacgggggctgggtcccacgcgtcatgcaaactggcccaggacagaaggagccaaaaccgccatgcgcggtgcgcgcaattgcccagcggttacgagtattcctccactttcgcccaggccagcgggtgaaagggcgggccgccatgcaggcggcatgcaaccacaccaagggggtgcaccctttcgacgacgcgttcggcatgagggcccaagcccacacgtcatgtaaccggcgcgccggttactatgtacaagaaactgcatcgccactcgcgccactaccgcgcctcctcgactgcggaaccggtgtcgcgactcgaggcaaccctgcgcatgacccaacagtgccaagcaagcacatcggtcacgggacaggcggcacctttggcaggcgaagcaggcgacgcttcacctccgccataatgaccgcgtcaaaaaagggaccgagaaaggggatactccgaaagggatccttctccgcgaaggaagtggcctcgagcccccctactgatcagaggttcgaaggctggcccctcggaagggttcaacagccgcctcagaacactcgggctccgcgcccactattggtcagaggtttgaaggctggcccctcggaagggttcaacggccgcctcaggccactcgggcttcgcgcccactactga

SEQ ID NO: 28977 - DNA, 216 bp, Zea mays
  Peptide Sequence Number=SeqID_72352
atggcgcctcctgggtcgggcgaagcggagcttcctatggtgccttcggtcaggcctgactgcctgtcagcctcactctgtcaagtggcaccgcagtcagagcagcgcaggcggcgctgtccttctgtcaggccgctttatgctgatgggggttaccagctgagaattaggagccttgagggtacccctaattatggtccccgacaaatagcatag

SEQ ID NO: 28978 - DNA, 558 bp, Zea mays
  Peptide Sequence Number=SeqID_72353
ctggaaagggttctgttggcatcccccccaggagtcggggaggtcgggaagggcgcggggagttctccggtagggtctgggtcggggcagaggcatcggaggggggcgattcacggcggggcggctcggcggcggggctattctactccggcgagcaatcaatcgcaacagagagcaaaacaaggggcgataggggcgggagaggtccgttacctcaaggcgggctccggggactcctcggcggcgacggagacgcgacggggacccgggtcgacggtggcggctgcacggcggacgacgggtgagcgcgggcagagagaaatagggagggggagagggaattggggcgcgttccgggttgcggacgtcggggcggagctcaccggggctaagggcgcggcggagctccaacggcgacgaggaaccgagctcgggacggcgggggttatggcggcgggtgttacaccctcgggggccgagggtacctcgggtcgaaccgagggtgcctcgggccgagccgagggtgcctcgggctgtgccgagggtgcctcgggctag

SEQ ID NO: 28979 - DNA, 786 bp, Zea mays
  Peptide Sequence Number=SeqID_72354
atggcggtggcgcgcgagccggtcgggatggcggtagtggtagcaggaacgaagccggggcggcggcaagtgggcgtgcagggcaggcagacggtcgccactagccaggctgtcagcaacattcagtctcctgtacctgcttgctgttgtgttgcggcgaccccaatcttccgtgatggagcaccaagatgccgccatccgcaagctgctcgacgaaatgcgactcatggaggcaggcctgtccgatggcatcagctcggacaacacgacagagaacttgttcagcccccgcgacgagtcgagtcggctagtcgcgtcgagtcggctactcgcgtcgagtcgagcattcctagggcctccagcactgagctggacagggagttcagcgccgccttcgccttcgtcacagcatcagccacctccggcactagcgccctcgaggaggcgcaactgcatctctacgacctctacacaatcaccaccgagaggccctgcacggcgctgccgccgtcgacgctcaagctggagcggttcgacttggcggggtgcactcccttcctggacgcaccgtcgcgtgggtatgtggcctacgtgccgttcgggagtctgatgatcatgcgccccgtgcaactccaggagctcgcgctgtccctactgacctccgcccgctccttcctatgggtattctggccggaactggtggcgaccaaactcccgcatgcgaccctcagttgtgctgcccatgaggtgttcgaggtatttcctcttagcttccctgctgcctag

SEQ ID NO: 28980 - DNA, 711 bp, Zea mays
  Peptide Sequence Number=SeqID_72355
atggagtccaccagcagccgctcaagctctcgttcttatctctgccgccctcccctgggattttttttggacgccgccgcccctggatcctttaaatgcacgcgccggtccctcttcccctctgccggtggccatggcagccgtctggccgggctcaacccctgcccatcttcctggtcgcgaccgcccagctccctgctcggcgccccaagctcccctgtgcgcgctcagcttgaagcctgtcctcggcgcccagctttccccaagtccggccatcgcctcactggtcgcgcgtccgaaatccctgccgagcaactcacttcagcccccagctcggatccgctgcgagctcggtccggccctttgctgcagctcactctttctttgtttgccgcgcgcagcgtgtcgagctcccgcatcgccggcttgttgtccataaaattcgcccagccacggcctcgacaaactgcgaaactccctcgccgtgggctctggcatcggctaccgccgattctgccattaagttcgcgaccacaccttgttctgttcgtctcgctgttggtgatttctctacgcttcaaatccgtgctgctcgccccgcatgcgctcactcctcatccatcgggttctggcgagttcgtgttttacgtcgactcgtcaaacccgtcatcctctgctcaaccccacttcgtcagttcgctccagacataa

SEQ ID NO: 28981 - DNA, 315 bp, Zea mays
  Peptide Sequence Number=SeqID_72356
atggcgacgaggaacaacgcccataggaacatggtgcgggtggacgcgaagcagcggtggagctatcggttcatggcgcctgcccgctcgatcttcaccttgcctggggtggaggggaagaggtcctcctccaacacccacatcttgaacgccgtcgtcttgctgttgtcgtgcgaaggacgcaacgcgcctgtcgggtaccgaaaacagcgccgctcaccccgctccgactgctgtgccagccactcgggcaaggctgacaacagcaagttcagcctcgggcgcaacaggaagctccgcctcgcccgaccttag

SEQ ID NO: 28982 - DNA, 783 bp, Zea mays
  Peptide Sequence Number=SeqID_72357
atggcgcaccggacagtctggtacgccaccggacactgttcggtgcgccagccacgtcaccaggccgttgggttccgaccattggagcttctgacaacggggccaccggacagtccggtggtgcaccagacaggtcctgttcactgtccgggatgggtgacatggaaccagatcttcttgtttgttgatgtcgcttgctgctgtgttgtgttcttcccagctgtgtggtcaatgcgttctccgcgaaagtcatccacgatagatggcaaggcgaccagaacccttgccaagctcacgctcttccgccagttctatgtggtcgtgattgggtatttgtatttcaccaggatcactatgtgtgctctcaggacaatcactagctacaagtacagatgggagagcattgtagtcaaggagatgttcaccatggcattctacatgttcacgttctacatgttctggctcagcattgacactggcactagactcggtctcgttggttcagagaaggacgctggtttagttagctctgatctacgtgttgtcaacagtggccaatgcactttttcagtctttgtttggaatcctggtgggcacacaaagaacagcttggggacaagctgtattttaagaagtggggaatgtcagcaacgtgagattgagccaacttgtctcaacagagaagcagctaggaaagtgaccgtgtcacctgaagcaaagcaacgagcgagcaagtgggccgattgggttgtgtatttggagcctggtgggctggccgtgtga

SEQ ID NO: 28983 - DNA, 957 bp, Zea mays
  Peptide Sequence Number=SeqID_72358
atggctcacgcacgcgcaacggacactccgcgagtcgcccgtcccatcgcattaactctctggcaggacacgcgtcacccctggcaggcgagcgggcgccgttctgcctccgtcatgatgaccacctcaaaaagggatcgggaaaggagatatttcaaaagagtccttctcagcaaaggaaatgggccccgagccctcctactgatcaggggttcgaaggttgcgccctgcggggtacggcaaccgccccagagcactcgggctccgagccctctactgatcaggggttcgaaggctggcccctcggaagggttcgacagctgccccagagcatgcagagtcagggatgaccctgggtacgtccgttacatggccgaggctcgggctacgctcctgaggtaccctaggacatttccgagaccagcgggaatgatttgtaatggaatcccaccggagggaggcactgagccctcggaccctatcaaatgggtccgggtccagcgaatcacctgcagactggtaagcacggttcaaagtcaaggcctcgtctaccaagggacgcggtcccgtctcacccgagcccagcctcgggcaagaaacagtagtcccgtacggattcacggctcgcccgaggatcccctcaggcagtgggcgcacccctggctcgcccgaggcaaagctcgggataacgccactattcatcccgttccgaccattgtgcccaccaccggggtaagactaacaacactctctacaaagtcaaagaaacgtcagcaggacacaaacttcaaggccacctcgacgaccaggccataccaccggccacggcgctacagagctcggcttcaactcggcggagccggccgcaccactacaggggtcaggacctggggccacgtcgccggccacgcttctacagggctcaagcacttctccgccgtccacattagcgcatag

SEQ ID NO: 28984 - DNA, 225 bp, Zea mays
  Peptide Sequence Number=SeqID_72359
atgtcgagatggctgaggtgcctctgcccccggctccttcggtcctggtcatccctgattcccccgttttcgaccatggggagggggcggccgttgttgccgaggttggagctcgcggacatgagcaccgctaagtcgttgttcctccgttgtgagagcagcgtttgggaatcgctgcggctccagggggccgcgcttaccgaggccaacgagtgcctcgcctaa

SEQ ID NO: 28985 - DNA, 699 bp, Zea mays
  Peptide Sequence Number=SeqID_72360
atggagcacccccattgggatcagcaacagatggagcacccacattgggatcagcagcggattgggtacacccattgggatcagcatcaaaatcaaggaggccgcggaaaagggagagatgggaagtccaagcccgcggagaaggaaaggggcgtaaacaatggactcatgggtatcctctgtcggaacagtaaaccccatggcaaatccgccaagaacagagttctcacggaaggaaaaaccccgatagatacgaggtggagaagtacagtttcagaaatgatggacatgtggttacctgcgaaaggcaactggctgttggggtcgattggaggaatcaccacagcagacgagctcgaggtcttcctcttgggtgccatctcgattctaccagcgatcagagtgggaggcgaatggcagagaggattcggaagcgggaaagcaagaactagggcacggaaagcaaaggcggctaaaagcgcagctcttatgggatattctcgagccggataccgtttcaaaaaagtgtccagtcagcacccagcgtaccacgtggtcatccggcagttatttccaaaaaaccgatgcgccacctcatcactcggccatcgtcctcaaagtggctcgcacggtctgctatcactcggcgttgcctccaaaacgccgatttcgtgttcggtcgctcggcattacctctaa

SEQ ID NO: 28986 - DNA, 698 bp, Zea mays
  Peptide Sequence Number=SeqID_72361
atgccgtcgccgagcccaagcgccgccgtctccgagctgggcacccgccacgccgccgtccccgagcccaacgcttcttcgtgggagatggaaaaagagccacttgacatggttgagagctcagttcgagtcatcgagacacatgtcgacatcattcacagtctagtgactgatggggttgtggatactagtgaaccggaatcagtgtacacacttaagaccactttgtttcaaattggagatgtatgcgacatgcttgagaagtgtgctctgtccatcaaaaagtatgctgactccaagagggctaaaattattcaagatgaagccctgcaatatgctgaagatgatgaagctgcagatggtttggaggaactcccaagcccagatctccttactcaagccgacatattggaaaaatattttggaattgaaatggcatcggctgaatgcctgaatcgggccgggaagcacggagcagatagaagtgcactttctaatgcagttagacagagaaggcatggctgtgatgttataatgttgaaggaccccaagaagagattatggcctgtcatttaccaccactgcccgttatttgtgggcttctccgagggctggaaacatttggtggcagcaaacgaccttcgggctggggacgtctacgagcttgttaaggggccagacgatgtggccgttataag

SEQ ID NO: 28987 - DNA, 426 bp, Zea mays
  Peptide Sequence Number=SeqID_72362
atggtttgtagactatgcaataaggaaggccacaagtcttaccaatgcaaggcgaagaccggggataagcaaaagctcaagcaaaagccaataagcaaaatctccaacacctacatcaacaaggtggacaaaatggctgctacaccatatttgatcaagaagaaaaagaacggaaaggtgataacaatcaaggccaacaaaggaaagggggccaaatgcatatgggtgtcaaaggagattatctcaactgaaaagcaccaagaaggtttggatcccaagagggaagtgagaagctcaaaggacttcagggaatttggagacttggcaaaattgggaagtatatcatgggacgtatcatattggatcaagtctattgccaagtgggttagtgaatactttggactcaaattccccacccatgactaa

SEQ ID NO: 28988 - DNA, 135 bp, Zea mays
  Peptide Sequence Number=SeqID_72363
atggcgacctctggcttgatggtgggggaaagcgagccgggctgcggcctctgcccctccctcagcctcaaggattttcatcaccagggctggggaggggagtgcgccgagttgaggatccgctttccgaagtag

SEQ ID NO: 28989 - DNA, 183 bp, Zea mays
  Peptide Sequence Number=SeqID_72364
atggtctcccattcctgttatggtgggtacaagtgcggtcactacaccacggtagtccgggtcagtgaggcattgtacgccaaggcggtcatggttgctggagtgacgtggccatccatcttgccaccgggttggacagtcgagtgggaccctgcctctgcagaggaggagcatgaggagtga

SEQ ID NO: 28990 - DNA, 72 bp, Zea mays
  Peptide Sequence Number=SeqID_72365
atggtgaccatgcaacccgagtgctcttctcaccgtggccagctttggagctctttgttgctctatccatag

SEQ ID NO: 28991 - DNA, 891 bp, Zea mays
  Peptide Sequence Number=SeqID_72366
atgaccgcgtcgaaaaaggccccgagcctcactactgatcagaggttcgaaggctggcccctcggaggggttcaacagccgcctcagagcgcgtgggctccgcacccactactggctggccctcaaagggttcacagccgcctcagacacggagcgagggatgaccctgggtacgttcgatacataaccaaggctcgggctacgctcccgaggtaccctaggacatttctgagaccagtgggaacgatctttgtaacggaatcccatcagagggaggtatcgagccctcagaccccgtcggaaggggaccgggtccggcagatcatccgcaggtacttttgggcgcacctccgggcctctagccgacccctaacaaatagggcaagggcgtccactcggattacccgccagcagctcaccggagacaccatgttcagcgccctccgagggcaacatggcgctttccccccctcctccatgcggaaaggcgacgcaggggccgccgcctgcgccgccccgactgctgtgccactcgacagagtgaggctgacagcaaccaagtccggcctcaggcgccataggaaactccgcttcgcccgaccccagggctcggactcgggctcagccccggaagacgacgaactccgcttcgcccgacccgagggctcggactcgggctcagctccggaagacgacgaactccgcttcgcccgaccccagggcttggactcgagctcagccccggaagacgacgaactccgcttcgcccgaccccagggctcggactcgggctcagccccggaagacgacgaactccacttcgcccgaccccagggctcggactcgggctcagccccggaagacgacgagctccgctttgcccgaccctag

SEQ ID NO: 28992 - DNA, 288 bp, Zea mays
  Peptide Sequence Number=SeqID_72367
atggctaagctgaacttcaacttcaaccggggtccagggcaagttcaaccggggtccagagaggttcaaccggggtctagggcaagttcaaccggggtccagagaggttcaaccggtgtccagggaaagttcagccggggtattttccccggacctcactggtcaaaaccggttgaaccggtcctaggggaggttcaaccggtgtcagggtcacctgaccggtctgaactcctgactgggaacccgactgtcagtgagaccccacctgggatttctgcccaattttga

SEQ ID NO: 28993 - DNA, 132 bp, Zea mays
  Peptide Sequence Number=SeqID_72368
atggcgggtttatttcacagatcactgagggctcttatgcgaatagtcatgggtgaagggatatcattggaatatggggccgtcggatcaaggattctacgcccacgattaaatggtacccccacgaaccgg

SEQ ID NO: 28994 - DNA, 402 bp, Zea mays
  Peptide Sequence Number=SeqID_72369
atgcaagaactgatggctcagcagaatgagattctgcgacagttggctcagcgtcagccaccacctcagcactatggtggtgaggatccacttgatgctgatgtatggcttagggtagtggaatccaaattcccactgtttaatggagttcgttcagatgtggctaaggccttcaatgacctgtgtcagtatgcaggctatcatgcagacactgatgagaagaagagggacaggttcaggaggggcctcagtactaagctccgcgaccgtctcaacacagtcagggccaacaactacaatgagttagtcaacatggccatttcccaggaggactgcatcacagcccgccaggcagaaaagaagaggaagacccctatggcaggaccttcagctcagccttag

SEQ ID NO: 28995 - DNA, 726 bp, Zea mays
  Peptide Sequence Number=SeqID_72370
atgacttcccacggatcctcggacgaagggaatgcactgtcccacactaacgggcttgcacgagagggctttccccgtattttgtgggaggtacttcagggggctggttacacgacgcctcctcagtacgcggtgcagcagttcgagaagcaccgagtgccccgctgtagggtgaggatgaccctggagcctcatccctacagtcagaaggaggacaacccaatgtggaaggaccgagtggagcatgccaaggacatctgggctatctacccaggccagacgactcacttgacaatgcggtgcatgaatgccctgtaccatctgcaagtgatgcgtggtgaggcaatgtcccatctgatggcattgttggaggcaactaagatcaccctggataacagagaggagcttgtggttgacttgtccacagagatggtggaaaaggacttacaggtggaacaactgtcaaatgagatccaagagcttgaggagttagtagggaccagggagaacaccatcgaggttctcgaggatcagcttatcaacactcagcaacagcttgcggaggctaacgagcacctggatatgcatcacctggagatccaggacatggaggccaacgaggatgtcgacattgagggaggagaggagcctgcctctagcttggacactgctggctcagggagaccaccttcccccgagtcgagtgttgcctcgttcgctcactag

SEQ ID NO: 28996 - DNA, 564 bp, Zea mays
  Peptide Sequence Number=SeqID_72371
atggcgagtgatcattgttgtcggtcctcctctgctcacctccggcgccgagatgacgccacaatccttgatatagtagtcatcgaacacgcgcgacatgcgcggtgcagtcgctctggaccgcatccaagcggcggctgcgccggagcttgccgtacacagtggcgcatgggccacataggactgcttccagaggtcaaactggcagtcaccaagtttcttctcgtcgttgatgagcaacgccaacgcgagcgcctcgtgctagtggtgtttgttcggggtttccaagaggtagagtctacaaggcgttgctcccctgtgcccccgctggtagcgccccctgcaccaccactaggcacctcggccgctggaatagctgctggaggagaccctaacaacagagacggcaacgacagcagctcgagccacatgaccgacctcttagaggagcaggagctggagggatgggtcgctcaacccatcactcatgacacggctcgtgggtgtcactttgtcacacccgattctgggggcaaaaccgaatgcatagcatatgtgagctag

SEQ ID NO: 28997 - DNA, 570 bp, Zea mays
  Peptide Sequence Number=SeqID_72372
atgacgaaacgcgctaatgcttctgcccacggagcagggcgggaccgctacggcgttggacacacggcgagaaattgcggcaccgctggcccccaatcgcgcccggaatgtccccgtgcaccatcagtgtgtctccccaaagcgccctggcccagattcaaggccacgtcggtgatgcaaccacgggtcgacggcagcgacttccatggcccgcgacggcaatccggccgcagcatcgaagcccggccacgcttccgctgcgagaacacggcgaggatcgctgcaccccgctgtgcccgctttcccgcgacgcgagccaagctcaacagtggtggcaacaagaattccgcggcggcacgaagtgggcggacgacgatagggcgcgaggaagcaacggtggctggccctggcggcgcggatggggacttggttgagggcataggtcgacaaggcgagatccacggttgcgcgttggatttatacactgccacgagaggattccgagctgagtcgtctgaagttccagccgagttctgcgctcgagctgttacgatgcaagggagaggatag

SEQ ID NO: 28998 - DNA, 204 bp, Zea mays
  Peptide Sequence Number=SeqID_72373
atgagggccaaatcccccaaaaaagatgtaatatgtaaatctaagcatgcaccatcgagtgcaaaaagaaaaacagggagaagctcaaaagacgtccccaaggggatgcagagcatgacgaagctacaaaaagtcgttcctaagggagcgcggcaacttataccgccgaaatataaggtggagaagttcaaaagtcattcctaa

SEQ ID NO: 28999 - DNA, 156 bp, Zea mays
  Peptide Sequence Number=SeqID_72374
atggggaagcctgtcccatcactcctcatgctcctccttagccgagtgaccgcacttgtacccaccataaccggaatgggagaccacgtctcaggtcgcatgaggggtaaagtctgtgggcaggttcacttagaatttagtaaccgttatgcatag

SEQ ID NO: 29000 - DNA, 276 bp, Zea mays
  Peptide Sequence Number=SeqID_72375
atgtcgtcgagcactcgctggatactcggacccgagtctgatccgtcagacagcctctgcgcctcggtcatcaaggaagggtcggcctcgcctcggcagagcccgaccctccctcgggggctaaaaagggggaacccctcagcgtcgagattgggcatacttctccgcgtcgaaaattttcaatcaaaaaaggggcctcttgcgttctcctggctatgccagaagcagggtctcgaggagcgaacacgggtacatgtaaatggcgaggccgactga

SEQ ID NO: 29001 - DNA, 252 bp, Zea mays
  Peptide Sequence Number=SeqID_72376
atgcctggcatactgttggggaccttcggcattcgaaggtcctcaaaaacaggatttaacagtatttctggaagtataatgtgtgagcaggtgaacagtacccccgtactgttcacgctaacttggcattcgctttttgcgtcacgcttgtattgtcatctccttccgattgaaggtacatccttcgtaaccttcgtccgtaagccattagatcccaagggaaataatgcttcggaggacgaaggattttaa

SEQ ID NO: 29002 - DNA, 622 bp, Zea mays
  Peptide Sequence Number=SeqID_72377
atggcgcttcctgttgatgtggcgggcctgtgccctaggtcgggcgacgtgggggctccttcgaagccgaggtcgagtctatcttccgtggccgaggccgagcccccgggtcgggcgaggcggagatcgttcggccgaggccagggcggagtccgagccctggggtcgggcgaggcggagtttcgccgtcttccgggtcttagcccgagtccgagccctggggtcgggcggagcggacccgagtccgagccctggggtcgggcggagcggagtttcgccgtcttccgggtcttagcccgagtccgagccctggggtcgggcggagcggagttcgccgtcttccgggtcttagcccgagtccgagccctggggtcgggcggagcggagttcgccgtcttccgggtcttagcccgagtccgagccctggggtcgggcggagcggagttcgccgtcttccgggtcttagcccgagtccgagccctggggtcgggcggagcggagttcgccgtcttccgggtctttaccccgagtccgagccctggggtcggggcggagcggattttcgccgtcttccggctttatgctgatgggggttaccagctaagaattaggcgtcttgagg

SEQ ID NO: 29003 - DNA, 266 bp, Zea mays
  Peptide Sequence Number=SeqID_72378
atggctaaccgacccccgaatgacctattactaaattcgacgatggatggctcagcggcggagcggatgtccgtcgagaaattccggcaccaccacgagttcattgagctggcggtcccacctgacaatgtagcgcccgcgcgagcgtgggatatgctgaccgactggccccggatgtcggcgccaccacagcagaagcgagatcagtgctgcgcaaaggaaatggctagatgggccaaatggagcggtggtcggcccatgcgcag

SEQ ID NO: 29004 - DNA, 198 bp, Zea mays
  Peptide Sequence Number=SeqID_72379
atggtctacccaggttggttaaggattaacgcgtatgtaggcgtgctgaccgaggaccctttaactggtcacatgcctcgtcatgggatccactttagtaagcatttctgcaaaacagagtctctgaatattgaaaagccttaccttgactcccacataaccagcatacccttgagagtcttttctttagtcgggtaa

SEQ ID NO: 29005 - DNA, 756 bp, Zea mays
  Peptide Sequence Number=SeqID_72380
atgactttggaacttcttcgccttatatttcggcgtcacgctgttgatgggagtgttgacgcccttctgggtgttggcttcgggaataaatgggctgcaggggtggtggcggtggaagctgaggccaagaagcctgtgaatggcttgccgaagcaacaaaggctaagtcattgtcagcttggatgtactcatccatcttctgaagcagcttctccagagtttggggaagtttcctggcgaagtattgagccgtcttggccgaagacccttgatcatggcctcaatgacaatttcattgggcactatgggcgcttgtgctctcagtcgcaagaaccttcggacatacgcctgaaggtattcctcatggtcttgcgtgcactggaacaaggcctgagctgtgactggcttcgtctgaaagccttggaaactgcatttgagaacaagtccccaacattggcgcccacctccggtgaactcattcgaccaccttcggcaagccctgaccttcgttatgccaccgaagaaagcttcagcgccagggcctgctgcactgcagccactggacacaaaccaagaaactctctctctccgagaggctcgaagccagaagagaaaggccacaagtccaacactctaggaggaggagttggaccaagagatcagggacatggaaatcatccatcaacaagtgcaaaggaagaaggagaagatggctcggctggccgatcttcaaaggaagatcgacgaagctactga

SEQ ID NO: 29006 - DNA, 150 bp, Zea mays
  Peptide Sequence Number=SeqID_72381
atgcccaagcccatcaagacacccatgggaaccaatggacatctcgacctcgacacgggagggggagaaagtagcaccttcaaaaattggtatcttaaaaccctcttgaatactaagaggaggaatttattgaggggaagttttgtttaa

SEQ ID NO: 29007 - DNA, 780 bp, Zea mays
  Peptide Sequence Number=SeqID_72382
atggctcgaggaagatcccaaaagaacaagaagacacctccaaaggaaaataatgaggtaactcttgagttattacttttcgattgttctaattatgtttcatggtctactcgtgtgataaatgcttttagaaccatagattcacaattagaacaaattttagacaagagtattataccttctagttatgataagaaaaatgcttccaaggaggatcaaagatgtatacgcttaaactacctagcttatgacatcttaagtaattctcttagcaaagaagattttcgtgccatcataatgagatatgatgaacctattcatgatgcgcatgatatttggactagaattaaaaataaatttgaagagtccaaacatattagttcatttgatgcttctacttcctttagtccttgtgaaactaaccctttgaaggaagaagaaaatgaatgttggagcccaaacgatgaatccacctctccaaaagcaagcaaatcttcatttgagctagaatttgtaggagtaaaagatgattcatgtcaagagctcaaggaagaaaatgagaggctaagaatgagcttgacacaacaaaaagggaagtgcactgctcaaccttctcaagataacagtgatcacatggtgaaaaagcttgagacgggaacaaccgatgcatgctcaaaatcccttgaagaaaatgtcaaggacttgaggattgtcaagaggaaggaacaaaagaagaaaataaatacctctgtcaaaagcctcaaccatgcctccacataa

SEQ ID NO: 29008 - DNA, 234 bp, Zea mays
  Peptide Sequence Number=SeqID_72383
atgacacaactcatcaattacggaaactatgatcttagctcggttgtgtcgcggtggtcgatcgttacatcttctctgatatggctttgtgttggtgagtctgtcgagctgaagcatcctgttctacagtctcgggctgatcagctggtgcagccttatctactgctggaggttgtggttgatcagctggtggctggtgcagcctcttctgctactggaggctgtggtgtttga

SEQ ID NO: 29009 - DNA, 605 bp, Zea mays
  Peptide Sequence Number=SeqID_72384
atgttgatcctagggcaatagatcttgccatgagaatcgccgaaaggatgttcctcaaaatgaaggaagatgaggcgaagaacattattgaagaagaagaaaatgatcgatggagaccaaacgatgaatccacctcttcacaaggttcgtctttcaaatccacttctcatatgtgctttattgctaatgggagtgacagtgaaagcgaaagtgaggatgaggaggagcaagaaagtgatagtgaagatgaggatgatcttcaacaattcttcgctcagctaagcaagaaacatcgtatgagcttgctcaaactcatgaaaagagcggaagaacaaaaggaaatgcttcataagcaagaagatatcctcatcgaaaaaatcaaagacttggagaagttgaccaaagagcatgagaagctaaagtgctctcatgatgatttggtccaaagtctgctgcgtcaggtcacttccccctgcggcgtgcgcatggctcttttttctttgcatgcagacgcgctgtgtccgaagcttttcccacttcacgcgcgcgcagagtatttccttttccctgtctggtccttcacgcgagtggagaatcgttttctg

SEQ ID NO: 29010 - DNA, 1335 bp, Zea mays
  Peptide Sequence Number=SeqID_72385
atggagctgcttcctctgctcacgtggctcctcccttgcgcacgccctggcctgcctggcctggacggcccgccgcgcggcgccgggcagtctcgcccagcgacgaccgcaagctgttccacggagacggccggcaacgtgatccagcgcaacgcgcggctggggctcaccgactaccgcttcctcctccgcgtcatcgtccgctccggcatcggcgaggagacctacgccccgcgcaacatcctggagggccgcgaggactcgcccaccctggaggacgcggtggacgagatggacgccttcttcgacgaggccatcgccgagctcttcgcccggaccggcctcgcgccccgcgacgtggacgtgctcgtcttcaacgtctccatgctctccccggcgccgtcgctgtcgtccaggatcgtgcgccgctacggcctgcgcgaggacgtggcggcgtacaacctcacgggcatggggtgcagcgcgggcctgatcgcgctggacctggcccggaacgcgctccggacgcgtccccgggcgctggcgctggtggtgtcgtccgagtccatcgcgcccaactggtactccggcaccgacaagactatgatgctggccaactgcctgttccgcagcggcggctccgcggtgctggtgaccaacgacccggcgcggcgcgggcaggccaagatggagctcagctgcctggtgcgcgccaacatcggcgccagcgacgacgcgcacgcgtgcgcgctgcagcgcgaggacggcgagggccgcgtcgggatcagcctgagcaaggcgctccccaaggccgccgtgcgcgccttcgccgtcaacctgcgccgcctcgcgccgcgcgtgctccccgtgggcgagctcgcgcgcagcacctatcgggcggcaagcagaaagggcgacgcggcggcggccccaaagatcaacttcaaggccggggtggaccacttctgcctccaccccggcggcacggccgtcatcgaggcggtgaagaagagcctggacctggaggacgaggacgtggagccggcgcggatgacgctgcaccggtgggggaacacgtcggcgagcagcctgtggtacgtgctgtcgtacatggaggccaaagggcggctcaaggtcggggacagggtgctcatggtcacgttcgggtcggggttcaagtgcaacagctgcgtgtgggaggtgaccggcgacatggccgacaagggggcgtgggccgactgcatcgacgcctacccgccggagaagctcgccaacccgtacttggacaagttcggttggatcaacgatgtcgacggcgataccctgatgctctaa

SEQ ID NO: 29011 - DNA, 1755 bp, Zea mays
  Peptide Sequence Number=SeqID_72386
atgtcatcttatcctgtgctaaacaaccgaccaattgatcagtggagggttactgatttgaaggatgagctccgtaaaaggaagcttcctgttaaaggtttgaaggaggaactcgtaaggcgactctttgactccattcagagtgaaatagaagctgatgaagctgacgaagctgatgaggatgtgggagtgaatgtggatgatcagttgcctgatgccaatgctagcgaggaaaatacagttaccgttacggaagttcatcaggaaactgtggttcatgtcactcagcaagttgaagttcctaccaccaaagctggtcaggaatccacaatttctcccactagaagggcccccagtgtcgatgttgaagaggcctcagcagacgaagaagtacccgaatcagttgctgaaggaaatatgtcatttgaagaagtgcaagtgcatactgaaattactaatgagcctgttcatgagaagaccacagacgttgacaccaatgatacagttgttgttaatgatgcaatcgatgtgaattcagacttggcgcctgctgaagtcaagtttggtgctacggaagcaagcaaaattgaagaacatgatttcccccctgcacctgtagatgccttaaattcagatgctgctggtcctatggatactgatgtcgtcacagctgcaacttcagacgttggttctatggatactgatgttgtcacacgtgcaccagttagcgatgatgaggagaaactggaactgaaggttgatttgggtaacaaggtgtcaatgtatgatgaagataacaatagttctgataccatgaatgaggactgcaagcccatcgtatcaaaaccaaacaatcaggtacctgaggttagtccagatttagggtctcaaattaagtgtgagtcgatttctactgataatctatcatctaacaaaaagaatactataaaagataatttaaatgctaataattttgatttagaattagaggttcagccgaagatggtccaaccatcatccggcattacttcattaggtggagatttgcagccattggatgatgacaaagagctggttaagaaccagacatctttggaagacatagattccacagctaatgtggactcatacaagaaggatagtcctgaaggtgggtctccagagaaattaaatctagacaggagttcaggtgatgagtcaatggaggaggatgttgtggaaattaaacaagatgaggccaatatgaaatctgatgatctcggacaaaagaatgagcttaactcagaagatgtgaaagaggtgatcctccctgattctgttgttgaggcttccaaggaggttacggctgaagaaaagtcagcagcttcaacagaaaagagaaaacttgaagatgaagatattgcaaacactgaaccaatcaagcgacaacgtcggtggactgcagacgttgccaaagttccagagagacaagcattgagtcaaactggtcctgaaactcctaaggatatttttcagcctgctttcaaacgatcttttgggaggtctgattcaacagcaagtgtagattctcctaaggaacggattgtaccacctgcagagaaacctgccacaacttctttgagaattgaccgatttgtacgcccatttaccctgaaagctgtgcaggagcttcttggtaaaactggatctgtacaagacttctggatggaccatatcaagactcattgctatgtgacagtatgttttctttcctaa

SEQ ID NO: 29012 - DNA, 489 bp, Zea mays
  Peptide Sequence Number=SeqID_72387
atggaactagggttccgcttgaaggcggatgtaatacttttgctttttgtaaggacagatgggaaccgtgcgggttggttagataaaaggtattatctgaaaaactgcaagaccaacaggccgggtttatggggacggacctcaccgggttggcgtacacgtatgtgttacctagttacaaaagggaaacaaattcgacctctcagacttgctcctatggatagaacttacagagatgctccagcaccggggggaggcactccttcagtcgtagctagacggttaccctcgggtcagcgcattcccgttaccttgaagggtccttcccagctaggggagagttgtggagcccttcttggtttggtacttaccgtaagactaggtcctgaccctgggtccccatctgtgtttgacgagggagcccttcgtcttcggctgtggccatttctgcatgaacctgttggacttctggacccgtggggaatctag

SEQ ID NO: 29013 - DNA, 741 bp, Zea mays
  Peptide Sequence Number=SeqID_72388
atgacgacatctgaattgagcagccaggcttgcagtttaggacctcctttacgaaagctgggaggtccgatagcctgggggccggttccaaagaacgggaactcgttccatggagtggtccagatcccggccgaggctgtctcccgggagttgttgacaatcctttcagatatgttggtatccagtcttgacacatcaagcctgcatcccaggcggggggccaggtaccagggaggagtcaacatcacacacatcaggaacaagaggtataaactacccgacgccagcagagttgcgctggaagttcgtggctactgtccttgcggaatcctccaggatggcgtgacagcggtgatggccgcctcaatgcgtgcgccattacaaagaggtcctcgcccccgtcctcttacggggggcgacaacgaggccattaaagccaaagagttggaggctcggcggcaggtgttgctgatggtctcaccagtggaggcaaccacctctatagcgggcagcctcaccagcggcagcgaccaccttagcactgacgacagcggccacctctgcaccagtggcttaccggcgatggcggccgcctcagcgcgtgcagagaggtcctcgcccccgccctcctacgggggtgaggacaagaccatccaagaacgcgacctccacctccgcagcgtgcgacgtcttatacgaccccctgggcggcgtcggagcagtgcggccggctgcgcatag

SEQ ID NO: 29014 - DNA, 669 bp, Zea mays
  Peptide Sequence Number=SeqID_72389
ggtggacaggcggcgcatcctctccgcaataaatgtggaggccgcgcggcccagagcccttatgtcatgctccgtccgctggcctacgtcacgggcaataagctatgtggcggtattgggccctcggccgagcggggagcagaggtgcaccggatagagcctggacacgcgtcaacaccggacccatgcctaggtcatggaacttcctctcccgggaccttattatgggtggtccggagctcacttggtggggtccgaactctacccaatggctccggactgttttacttcgggggtccgggttgtgcgcacaggggtcctgcgccttctaagcctgatggcgttgtctccgagaacgccaccttaactgctcacgagatacccctggggctgttcttcgcgcggctagggatagccacacaggcatcgtgccttcataccgcagtaggggacctggcccccgtgctgaggttggaccgttggtccggcgaagatgaagcggcgcacctaccacggggtgcttcaaggattttcatcatgcagcccggctgcagtctcccaccagtggtcatctacaaggatgaccaccagcctcgtggtggagagaagcgagccgggctgcggcctccccctgccctcagcttcaaggatgttcatcatccccgctag

SEQ ID NO: 29015 - DNA, 684 bp, Zea mays
  Peptide Sequence Number=SeqID_72390
atgcctctgcactcccctcatgcattgcgcccttccaccttccgagcccccggatgggtgcacccgtgttgccttcgtcttgctgccgttggaggagcacgaccccgcgggggttggtgctcttcggatatcgctcggcttcaaggattttcatcaggcagcccggctgtagtcccccgccgacggtcacccagggtgatgaccgtaggccttgtggtggggagaagcaagtcgggctgcggcctctgccccgccctcaacttcaaggatgttcatcatcctcgctgtggcggagggcgagttgagccggggttccacctcccgcatgggccggcaagccgcctcttccttcagcattcaggggagagggcgctcaccggccttgcggagggggcaaacttcgacaacgcgggaccggtcggccgcaagcgtcgtcagctgcagcgtgcctggctcgctggcttagctggctctagcgcggcctctgacgctgcctcctgccgcttggtccgggcgtggccgtccgtccaccgcacgggcgactgttgcgccgtgcgcaccgagggatcgtccaagacgccgtacgccgcgcgggcggcgttcgtgtccttggattgtcttgtcctcactctggcacgtcgcctccgcgtggaggctagcgccggcccgtctgcgaggacttga

SEQ ID NO: 29016 - DNA, 936 bp, Zea mays
  Peptide Sequence Number=SeqID_72391
atgaagagtacgcgtccgtgttccgttcctcggacgactcgcgcacgcgcaacggccgccccgcgaatcgcccgcgccgtcgcattaactcctcggcagggcaagcgacacctttggcaggcaaagcgggcgtcgtttcacctccgccatgatgaccgcgtcaaaaaagggaccgagaaaggggatatttcgaaaaggatccttctcagcgaaggaaacgggcccccgagccctcctactgatcaggggctggcccctcagaagggttcgacagccgccctagagcactcgggctccgagcccattactgatcaggggttcgaaggctggcccctcggaagggttcgacagccgccccagagcatgcaaaaggctcgggggctgctctcgcacctggctacggccaaactgttgacagcgtcaacaaaccagcctgaaaactcggaacctgaccatgcacccgggcttcggccaggccgcatgagggaacaacaagggctcgggcacttcttcgacgaccacgttatcgcgtacacagggctcaagcatctctccgacaaccacgttggcatatcgcaggcctgctggccgtgtcgtaatgataatgagcttgcttctgcttctgcttctgggtggaaatgccagaccgaagatcgcaacagccagtcagtgtcgcggttctcgcagaacatgcatgcagctgtggtcaccgtttccattttgttgggaagtaattctgtttttggtcaagactcgcagaatggtgacctgtttcttccgtcagatcctcttgagctattatacatggtgagcttgagctgcttccgtcgccatcagaacaggactaaaggcggccacttgaagataccagtctgcacagacggcaagacgaggacggccagactagttcggcaatacgacaaaccaaagacctga

SEQ ID NO: 29017 - DNA, 585 bp, Zea mays
  Peptide Sequence Number=SeqID_72392
atggcccctggtgaggccgtggagcttggagggtgtcacagcaactccctggctgctgacaacgctcccggagccgccctcgacggagtctgggatgtctgtgcagttgcggcgcatcctctccgcaataaatgcggaggccgcacggcccagagcccttacgtcatgctccgcctgctggcctacgtcacgggcaataagctatgtggcattattgggccctcggccgagcggggagcggaggcgcaccgtatagagcctggacatgcgtcaacaccggacccatgcctaggtcatggcacttcctctcccgggaccttgttatgggtggtccggagctcacttggtggggtccgaactctacccaatggctccgggctgttttacttcgggggtccgggttgtgcgtataggggtcctgcgccttctgggcctgatggcgttgtctccgagaacgccaccttaactgctcacgagatacccctcgggttgttctccgcgcggctagggatagccacacaggcatcgtgccttcataccgcagtagggggtacccctaatccagggtaccgacaaacctcttaa

SEQ ID NO: 29018 - DNA, 621 bp, Zea mays
  Peptide Sequence Number=SeqID_72393
atggaggcgctcctggctgatgaccaaagaccctttgaagacctcataatgcgcgatgagaaggaggtgatgcggcaatggaacgaacaacgcgacaaggaagaggcggaactgctgcataaactctccgaacggcgcaaggaggcgacagaaaagtacttgtcacacttcacgatggatcgccaccagaagatcatccgtcaaggggagatcgatatggaatctctcctatctccacttcagggtcccgctccacaaccactaggcacgcggcagctactggacgtgaccggaccgttcgagcatcatctcagacaatccggttataccgcggaccgtccgatgtatttcacgggaccgtccgaccagatgcaggcccgcacacaaaatactcaggtcgcaccatacatggtcggaccaccagggtacaaccccgaacaattcggccccatcacggaccgtccggtgcatcacgccggaccgtctggatatgttgcggatcatccgccatcttacgtcggaccgtccgaatatggcatgaaccggctgacgtattacgccggaccatccgactctatacgagtccacgcgcgcggactgcccaagtcgcgccatatatga

SEQ ID NO: 29019 - DNA, 1017 bp, Zea mays
  Peptide Sequence Number=SeqID_72394
atgacggatgcggagaaggaggtagcaacagaaagacggatggactcaccgcctcgatgcgattgtggagaccgtgctgtcatcgacgaagactatgacaagcagttctgttgtccgaacattgattatccatacgggtggcgtaagtgtcgtttcagagagtggttgtatggtcctttgtcgcattggccagagccagaggtaaaggaaaagagatacatggggtgggcggcagaagaggtcaaatttgatccagtactctgcaaatgtggtattgaagctaagtatggattagttccttcggagcttggtgttggatatttttgtggacatatggtcgattacgatgaggagacgaggaaatgtagttgggagagttacgacgacaaaggagaggtgatgcgcacaatagagtccaagagaataatgggacagaagatgcgttgtggatctcgactcgtcgattcgtacattaacgatcgcatacgcgacatgcgtagggaagcaaaatctgccttttatgatagcccgaagcgtgcagagtataggaggttgaaggcggcagatgagaagagagcacaggatgcaagggaatgggaagcggctcaagccgagaaacagatgttggataatcttgctgatcgcctcaagggaaagattggaagcggcgtaaactatttggccgatgaggcgcatgccaggataaaatggcaacggttgagtgagctcatcgcactagctgaggcaggattacgtgctcaagaggaagaggatgagtttatgtctcaggccgccgcagaggtagaggcagcttattacaagaagaagtctgatgaggctgaggctgaggatgagctattctcccaagctgcagatgaagcagaagccaattattacaagagaactggtgacaagtgtgatgcaggacaatgcagcaagtggaatgaagttgtcgttgaggattgcgcgacagatgactctgaagatgagttactcatagattgtgattcagactga

SEQ ID NO: 29020 - DNA, 651 bp, Zea mays
  Peptide Sequence Number=SeqID_72395
atggggatgcaggaggaggcgccaaatccctcgccggtggtctatcgggatcggacgaatcggtcgaggcgaccttccatattcccctaccccaccaatggcttcctccttgccctcctcttcgtcgcatcagggacctcactccctactctaggaggtttcgaccgaggaggagcggcccagcctaggtggaagcacctctctagctatgcttctccgcaatcaataaatcatttgcaaagcctcggagcaacggggaaaggaggctgttgcgtcgatggcaggatgaaaggggacatagtcctaaagcagaggctatgcttctctgcgatcaaagaaatcatttacaaaggtctatcacggcttgccactgtttgtccacagtttgctggtcgtgcttctagcctcagagcaaggggaaaggggctgttgcgtggatgtgcttacaacttcacatataacacatccactttccttgcagagatgactggggttcacctttcagagaaagcagttaataagcgtttgaactggttggctgatgaagataacagattggataatgcttggttgtataattcaaaggatgtggttgatagaactggcaggaaggcaaagcagttttgggcagtaatgggcagctgttactag

SEQ ID NO: 29021 - DNA, 1674 bp, Zea mays
  Peptide Sequence Number=SeqID_72396
atggccaaaggtgagagtagagcggccggccgtgcaacatctgctgatggtggcttcgccaaggcgctgctgctccacgtcgccgcgctgtcgacggccggcgccttcgcggccgccgctgccgccctggcgcggcgccggctgtggggaggagacaggcggaagaagcagctgccggcgccggccatggccgagatgccccggctccagctggcggagtccggccgcctggagtacctcgagaagttctcgcactacgtggctaggcagctgggtttccaggacgtgagcgagtgcccacagctctgcaggctggcgaacaactacctcagcagcagcaagacatgcatggaggacatctacgggttcttcgccggcgccaaggacgacgccgccgagtgcctgctttatgtcaagctcatagaggagctggacagatgcatcctcggatattttgcgttccactgggaccatgccacctacctcatcacctcggccttgaccgcggacaccggcagcaaaaggaagctcaggaacatggtcttggaagcaacaaggaagcagcgtttcgagcgcgtgacgcgtgacctgaaggtgacgcgggtgttctcgacgctggtggaggagatgaaggcgatcggcatcatagcggcgggcggcgaggcgtcgcagtgcacggacgtgatggcccccgtggcgcactcggagcgcagcccggtgctgctgctgatgggcggcgggatgggcgccggcaagagcacggtgctcaaggagctgaagcaggaggcgttctggaccaacgcggaggccaacgccgtggtggtggaggcggacgcgttcaaggaggcggacgtcatctaccgcgccatcagctccatgggccaccacaacgacatgctccagacggcagagctggtccaccagtcgtcgacggacgcggcgtcgtcgctgctggtgacggcgctgaacgaggggcgggaccagaccatcgccatggcgcgcgccgtgcaccgccagcgctaccgcatgggcgtcggctacaaggtggccgacgacggcaccgtcaccgagaactactgggagcccgcgagcgacgacgccaccgagcaacccccgcggaggccctaccgcatcgaggtggtcggggtcgtctgcgacgcctacctcgccgtggcgaggggcatccggagggccatcatcacccggcgggccgtcagggtcaggtcccagctgcagtcgcacaagcgcttcgccgccgcgttccagcggtacagccgcctcgtggacggcgccaggctctacagcaccaactccatgggctccgccaagctcatcgcgtggaaggacgggatcggaaacagcctgctggtggagccccgggagttcgactgcctggagaaggtgagcgggctcaacgagcacgccacctccgtccacgacctctaccccgacggcaccaccacctgcggatcgcgctccatctgggaggacatgatcgtctccacggcccgtgccgacacccagcgcgagctcagggaggccatccgctccgtcgagtccggcggcgggcagccggacacaccaccaacaacgccccagcgcgagctcctgggcttcatccgctccctggaggccgccaacgccgagccagctgcagttgacaatggtctctaa

SEQ ID NO: 29022 - DNA, 162 bp, Zea mays
  Peptide Sequence Number=SeqID_72397
atggggctcggtgtatgcggctcgctctgccaaggtggctatgagatcgatggtttcggttatgactatggtgctggttgtcagcattgcaaccactgctcaggcgaagatgaagctgtggaaggagacttccaggagttccaagactacgacgagttctag

SEQ ID NO: 29023 - DNA, 297 bp, Zea mays
  Peptide Sequence Number=SeqID_72398
atgcccttctcccccgaatgccggaggaagaagcggttcgccagcccacgcggaggcaggccccaactcgggaccgggaaaggggatatttcgaaaaggatccttctcagcgaaggaaacgggcccccgagccctcctactgatcaggggttcaaaggctggcccctcggaagggttcgacagccgccccagagcactcaggctccgagcccattaccgatcaggggttcaaaggttggcccctcgaaagggttcgacagctgccccagagcactcgggctccgcgccctctactga

SEQ ID NO: 29024 - DNA, 693 bp, Zea mays
  Peptide Sequence Number=SeqID_72399
atgaactggaagcggaacttgaagaactggaaggagacgagttggaatctcagcttctggagcctgttgctgctcttcctgtgcatccagtgcatgtcccaggcaacaagcaaccagctcgccctgctccacagaaagctacagctgaagatgatgagcttgctgcactgcaagctgaaatggcattgtgatccggttaatgtttccactgaagaggtgaaatctctactaatccttaagaggctaaggagggcgtccaccagcttcaccatggctccccctgccccgtcctcgcgtcttgcagtcgcgctcgccccgtccccgcatctctcgcagccgtcaccagcgaggtcatccatggtgccgcgggatccatgcctctgccctcaccctccccccatccccgcatttcgtagctcgtcccatcccagcatctcgcagccacgccccatccccgtatctcgtagcctcgccccatccatggcgccgcgggatccacgcctccgtcctcgccctccccccatccccgcatctcacagccgcacctaccacagttctgccagcgtactcgcctcccccctccacgaccaccgccacgacgacgaaaaccattggggcctgcctcgcctcgcagctcaagtgggcaatccacccgtcgggcgtcttcctgacctgcggcagatagtggcgtga

SEQ ID NO: 29025 - DNA, 1107 bp, Zea mays
  Peptide Sequence Number=SeqID_72400
atgaaaatgctatactttgacgagttgactaaaggacatgaggagctaaatgctctcatgttgatttggtccaaaggaacaaaagatgacacacatcaaaagctcaaagaagaaaatgagaggctaaatatgagcttgacacaactaaaagggaagtgcattgctcaaccttctcaagataaccgtgatcacatggtgaagaagcttgagacgggaacaaccgaggcatgcattaactcccttgaagaaaatgtcaaggacttgaggattgccaagaggaaggaacaaaagaagaaaatcaacacctcttctaaaagcctcaaccatgcctccatgaaagacgaggcagggtcccactcaacagtccaacccggtggcaaggtggacgaccaagttatcccagtaaccatctcctccagagaaccttacagtggatcaagtagtctcattagctgcgagaagcagacgattcgaatcgagttttttatccttgcaaggctcgggtgctggatctggggctacctcctgagcagctccttgctccggcacgaggatgtactctccgtcagcaagattacagtctatcgaaatgcaatgaacattaaccgcgggaaagaaaagggcggcgcggcttaccggcggcgagggaggtccgacgaagggtggggtcggctcggggagactctggcggtcacgtcgaggtatggctcgacgtcggagatggccggaatcgcccggtccactcgtgcaggcgggtgtcctcgtcggcggcgagtataccggccaaaccacggcgaactggttcaatccgagggcatggtgagcttcacggggtcacgcagcgactgtgtgcacaaggaatcgaaggatggtggagtggtttacccggtccacgtactccggcggggtcgagagctccggcgagcgtggactggcttctccggcgaagtaaactccgattccttgctcggggagcctcacgaaggtgtgcacagtcttctccgagggctggacggggttgggaatggctctactggccggtctatggtgacagagggattgggcggccgtggacttgctgcgcacgggcaaacggcgacgagctaa

SEQ ID NO: 29026 - DNA, 876 bp, Zea mays
  Peptide Sequence Number=SeqID_72401
atgtgccctcagacgcctagtttatccccagaatattcccataaagcagggttacaagctgtaattacaagtatgcctttacaagttaggcccgtaatacagtggcggccacgcggggcccgttacaatgggcctgatcacacgtgggccttgggactgaacgaggccgcgccgcgggaagacttcgccgcaggccttcgtcccagtgccgaatggagcgaagggtgtcccctgcccgctttgtctccgtcagatcatccactgcggcggaggcctcgagcgaagggtggcgtctttgccttcgccccaacagttatgaaaggattgtttgatttctcttgtgggattttggtggtgtcgatgctggagagtgaattcgaggaacgatgggccaatggagaaatacctggatggggaaataaaggcgtagaaaaaggctttatctgctcaaggtttgaagagtggtggtactgttcaacagcgtgcgtatcggcttttcttgctgaagtctttaagattatgtacttgaatgctatacagacaaatgcacaccatcttattaggtatctagctactgcagttgttgtcaacaaaaggaaaaggaatatgcttaaagagttgattaaggtcattcaacaggagcaccatagctacaaggatcccgtaactgaatttctggaatgcttatatgttaactatgattttgatggtgctcaacagaaactcatagagtgtgagcaggggtctttaaatgagcttggaagttggtgcataaggctgcaacaccgtctagtggagggtgttttggacaaagaaagcttgtaccttaaaacaggaggatacaagaagctggagtggttgtctgaaggcttttga

SEQ ID NO: 29027 - DNA, 972 bp, Zea mays
  Peptide Sequence Number=SeqID_72402
atgtacgagggaatttcttccggtttcctgagcatcgactgcgacctggacgccgactccagcgggtacacggacaaggtcaccggcatcgtgtacatctccgacggctcctacgtcgacgccgattccgtcactacatctgaatttaaagcttcaatctgcagtgtttacgtcactaagtccacaacctccagtctgctccagcaagacggcaactcaggtgaaccatcaagtgtaaactctgcttcagttactcaaaaaacatcaaatgctatcaagtcagatgaccctacatgggagcattgctttgtcccggatatgagtaagaagcatgcaatacagtgcaagtactgtgacaaggtgatccatggtggaattactagagttaagtatcatcttgcaaacattggaggtttcaatgttacaaagtgcaagaaagttccggcacctgttaatcaagagctggaggccttgcttacaaagaagactagtgaaaaagaacagagaaagaaggaaaagcaaagagaaagggatgaaattgatctagataaatcagatggatccaatgaagaagacaatgagcatgagaatgatattgttgtgctgaaatcaacaagggtaagtaataatagcagcagctctagaccctcaacaaatggtggcagtggcactattgacaacttctacaagccacaatatgttgaagagtctgcccacaagaacaaaattcaaacaaagttgtcaacccagaaaagagaagacagaagagatagagcatgtgagtatatatgccaatttttttatgaagctggcattgcacataatacagtaaccctcccaagctttggccatatgcttgaggcaattggagcttttggtagaggtctaagaggtcctagtgcctatgagatgagtggaccattcttgaagagaacaaagcaaaaggtgttggatagattcaagaatcactag

SEQ ID NO: 29028 - DNA, 597 bp, Zea mays
  Peptide Sequence Number=SeqID_72403
atggacggctacgcggtgcgtttagccgatattgcctccgggcaaccgctgcccgttgccgggattatccgcgacgatccccatgccctgcgcgccgcatttattgaagccgacagccaggcggatgtggtgatcagttccggcggtgtttcagtgggtgaggcggattacaccaaaacgattcttgaagagctgggggagatcgccttctggaagctggcgattaaaccaggtaaaccgttcgcgttcggtaaactcagcaatagctggttctgcggcctgccgggcaacccggtttcagcgacgctgaccttctatcaactggtacagcctttgctggcaaaactaagcggtaacaccgccagcggcctgcccgcgcgccagcgcgtacgcacagcgtcccgcctgaaaaaaacgccaggacgtcttgatttccagcgcggcgtgctgcaacgcaacgccgatggcgaactggaaagtgacgacccaccggacatcagggttcacatatatttagctcctttagcctcggcaactgctttatcgtgctggaacgcgatcgcggcaatgtggaagtgggcgaatgggtggaagtag

SEQ ID NO: 29029 - DNA, 135 bp, Zea mays
  Peptide Sequence Number=SeqID_72404
atggcgacctccggcttgatggtgggggaaagcgagccgggctgcggcctcttcccctccctcagcctcaaggattttcatcaccagggctggggaggggagtgcgccgagttgaggatccgctttccgaagtag

SEQ ID NO: 29030 - DNA, 534 bp, Zea mays
  Peptide Sequence Number=SeqID_72405
atggcgctccctgttgacgaggcgggcccgcgcccgaggtctggcgacgtgggggctcctccgaagctggggtcgaatctgtcttccgttgtcgaggccgagcccgagcccctgggtcgggcgaggcggaggtcgttcggcagaggccagggcggagtccgagccctggggtcgggcgaagcggagttcgtcgtcttccggcccgagtccgagcccctggggtcgggcggagcggagttcgccgtcttccgggtcttagcccgagtccgagccctggggtcgggcggagcggagttcgccgtcttccgggtcttagcccgagtccgagccctggggtcgggcggagcggagttcgccgtcttccgggtcttagcccgagtccgagccctggggtcgggcggagcggagttcgccgtggcgcctttggcgaggcctgactgcctgtcagacttactctgtcgagtggcgctgcagtcggagtggcgcaggcggcgctgtccttctgtcagactggccagtggagcggtggagtga

SEQ ID NO: 29031 - DNA, 417 bp, Zea mays
  Peptide Sequence Number=SeqID_72406
atggagacatatgcatcaatgatatcaatgtctcggaaaactaaagttgtagtcagtgttgcatcaatgagggttggagttctgacagcttttgcggcccagattgcaaagaaggatttagtcctggatattggagattctggggaaccgacaatcctggtgttggatgaagcaaaggaggtggctgcaaatgatgcggtagcccacttgaaggtgcatagtacccttgccagtacattgagggaaccaaaagtgttgaagcatttcctgctggaggcgccactgaagagccccatggagcatttcctgctggaggtgccactaaagagccccacggagtattccctggttggtagagaggaaggttactctggaagtttggcctctgaagcccatattgaactgcctgggagctga

SEQ ID NO: 29032 - DNA, 696 bp, Zea mays
  Peptide Sequence Number=SeqID_72407
atggctgcagaaatggtgaaggcggcgatgagtggcaagctcaaggagatggattgggaaaagaagatcaaaatctgcgagctcgtggagcaagatcctgggcctgcagctcagagcgagggcgtccacaaagcctcactgtgcccccgctcgtgcgcgtcttcctccctgcatcccgcccgcgcgcgtcttccttccttgcatctcgcccgcgagcacgcccccaccaaccccgctcccgcccgcgcgcgtcttccttccttgcatcccgcccgcgactcgacgacagatggcgggatccgcggacgcgcccccaccaaccccgccatcaacctcgccgccgggtaccccgccccacaccaaaccgcgccccctgccctcgccctcggccttgatggcagagatggcgggatccgcggacgcgctgccaccaaccccatcaccaagctcgccgccggcgacgacaatcacgatgccccttccttgcctcaatcgaccgctattaaaaggatggacagagtgcggtcctttggaaccgaagggcggaagaaagacggagtgcagattcctgctagcgacaaagtttacgagtatatcctcttctggggaactgatatcaagtgctacttccattgtcgacaattgagtgttgttcaacggctcaccgctttatgttggtgcctggtctctgcttaa

SEQ ID NO: 29033 - DNA, 393 bp, Zea mays
  Peptide Sequence Number=SeqID_72408
atgtgggcccaacgtccagagtgtgtgatggcttgcacgataggaatggctgaatgggaatgggggattttgtcatatgggaccggagtgccccaagtcaggagttgctcgacgtcccgcgtcacagaatgtgatgacttcgatatatgtcacgatttgcatggtctcattattggagagcacgtttcacacatactggaagaaattccctcgtacatcgttagtcatcagacacgtaccaccatactcttttgcttaaacaaaaagggtggaaggttagacattctactcaatagatctaagtgtttgaagaagagggaaatcgagcgccagatggccacgaccaagctattcgtggaggacagctcatcgaggatctcgccctcaagatag

SEQ ID NO: 29034 - DNA, 495 bp, Zea mays
  Peptide Sequence Number=SeqID_72409
atgggcgagcctgccctctgcgcgcgcagagcgcgcattaaatgcgcggcagagagccgttggcgcggagatagccgttgctccggagtcgcaccggacagtccggtgcacaccggacagtccgctctacgagagcaaaatccccccaaaaatgtaaatgtaaaaaatgagcatgcaccatcgagtgcaggaaaaaaggaaaaaacagggagaagctcaaaagtcgtccctaaggggatgcagagcacgatgaagctacaaaaagccgttcctaagggagcgcagcataagttttctgctcaaaagtcgttcccaagggaatgcagagcctacagcgaaaagtcaacgctgataccgccgaaatataaggcaaagcgcgaaaagtcaacgcgatatcgccgaaatagaaggcgaagaatttcaaaagacgttcctaaggggatgcagaacttacagcgaaaagtcagcgctgatacaccgaaaaataagcggtga

SEQ ID NO: 29035 - DNA, 444 bp, Zea mays
  Peptide Sequence Number=SeqID_72410
atgacgtcggtggtcctcaagccccctacggaagcaaggagacgtcagcaagatccatgcagcgccaacagttgtactgctacagggttcaaggcacttctccgacggccacgatactacctctacaggactcgagacgtcttcccgacggccatgttgttatctgtacagggctcatggcacttccctgccagccatgttagctcccagctacaccccattgtacagctggtgtcaacacaagtgcttaaatgtgaatctatgcccatggatgaacaaagtgcaaatcacaagcaaagccaaggggctgtttcggtctggggcaccggactgtccggtggtgcaccggacagtgtccggtggtgcaccggacagtgtctggtgcgccaggctgcctcggccgaagtggccgctctcaggaattcgccgacggcgtacggctaa

SEQ ID NO: 29036 - DNA, 252 bp, Zea mays
  Peptide Sequence Number=SeqID_72411
atggccctgaacaaccttcgttcagagggaaagactaacaacagtcgcggccactcccgagttcagcctcaggcgcaacaaggagctctgcctcgcccgaccccaggcctcgacctcagcctcggcctcaggaggaggtctccgcctcgcccgacctcagcctcggcctcggggggagtcgccgcctcgcccgacctcggcctcggatcaactacgctactggggatccatcattaccctacccctagctag

SEQ ID NO: 29037 - DNA, 108 bp, Zea mays
  Peptide Sequence Number=SeqID_72412
atggcgaaccgctgcacacgaggcatgcaaccgccccacggaggctcgggggctgctctcgcaccgggctacggccaaatcgtcgaccacgtcgacaaagtagcttaa

SEQ ID NO: 29038 - DNA, 3891 bp, Zea mays
  Peptide Sequence Number=SeqID_72413
ggatcgacaaaatctggcattcttggggagatttttctaaatctgtctaattttctgaatatagtcgatccaaccgcaatctctttgccactgaagagatgcaacgccggaacagttttacagcttaaggtccaatgtcttggcacaaagtctaagctgagtggtgtcagatcactgagggacatggctccccgtctcgatgaccgtagtccaacgccaaccaatgatgagatggacaataagtcagattgctctgatggtatgttcaacaggagtgttcgttcttcatccgaaaatcatctggttggaacttatcaagatgaatctggaaacagggaaacaagtttctctgcaccagggtcccatcggagttctaattctggagatagtactgcggatagaacaaacttctctcctagagacaactctagtggaggactttatgtgggaaggcaggattctgctagttcctatgctagttatgttagtgctggtcgtggcgatgatgggcttagatccaataattcatcttttagttctcgggcttcaggcccaaatttgctgcaagggaatactccaaaaatattttcaaatggcctttctcaattatctatgggggcatctgactcatctaaagatcttcttgaagctgctgaagaaacaattgaggagctccgtgatgaggcaaaaatgtgggaacgccactctcgtaagttgaaggctgatctagagatgctaaaaaaggagtgttctgaaaaatcaaagcaacatgctgagctagcaggcgagctatctgctgcacaagctgaacgggattcctataggcatgaaatagaagaattgaagtcatccttacaagatgtaaacacacggcaaacaattacaggaacacctaaacgttcagactggatagacctgcagaaggaacttgaaggtgaggtgaagtttcttagagaatcgaatgcggacttaaccatacaactaaacaggactcaagagtcaaatatagagcttctttctattcttcaggaactggaggaaaccattgaagaacagagagttgaaatatctaagatttcgaaggtcaagcagactgctgatcctgagaatgggcttttagtaaaagaagacaaagaatgggctaagaaactgtcaatgaaagacgatgaaatcacagttctgagggagaaattggatcgggctctcaacattggaaatgcaggtggtgctggttccaatgccatttatcttgaattggagaaagaaaatgaaattttaagggctaaaatacaagagcttgagaaggactgctctgaactaacagatgaaaatttggagcttatatataagctgaaagaaaatgggctcacaaaaggtcaggttccacgtatttcaaacaacaatgagctgcaatttgaaaagcttacatcccggattcgtcaactggaggaggaacttaggaataaggaaatgttaagagacgacagtttttctgagtcatcaacgtctaatgcagatgagttacagagaaaatgtgctgaccttgagctgaagctgctaaattttaggtctcaaacctgtgagctggaagaaaagttccaaaaaagccaagaggaactggaacaaagaaatctcgagttatccgaactgagaagaaagctaaacggtttacattctactgaactggaagtttttgaatctggtgcgacatggaagtaccaatctagaacagcagatctagaggatactgaacctgagacagatacgctaaaggctagatttgaactgcaactacaggaaaatgatgaccttcgaagttccaaggttgagatggaaaattttatttctgagattcaggcagagaagagtcagcttgaggaacgcctgtccgtgtcgcttaaagaaagcagcatcacatctaaatgcttggatgaagtgcggaaagatatccttgtgctttccagcagtatagattcccatgtttcagctaataaggttcttgagaggaacataattgagctagagagctgcaaagctgaactagagttgcatgtatcagagctggaacaggaaaacatagagttgtcagaacggatatctggactggaagcacaattgacttatctgacaaatgaaaaggagtcaagcgagctacagattcatgactccagatcgctcatcattaatctcaaagataaagtagagcggcagcaatccgagatggaaactcaaaggctcgagtttaagcagaaacaacaagaatctcaaagaagattgtcagaaacacaggatgattctgaagttctgagaagatctaattctaaactacaatctactgttgagagccttattgaagagtgcagttctcttcagaatctaactgctgatctgaaaaggcagaagttggaaatgcatggtcatcttacgcaaaaagagcaggaactggatgagtcgaaaaaaaggaactttgagtttagcaaaacagtggaattccttgaggcaaagctttcgtcactacataaggacgtttcttctaaagagcaatctttattgtcagaattggagagtatattccaggagcacatggaacaagaagaaagaattaatcgcgcgcatttcatgctcaataagatcgagaaggaaaagactcttgaagtagagaacctcaagagggaggtcgtcagcctcactgcacaggtctcctccacacatgaggagcgagaaagtgccactctggatgctattagagaggtatctgtcctacgagcagacaaggctaaacttgaggctaatcttcaagatgtcagtacacaattgagacattacgagtctcaattggaagacctccgaaaggagtctaaaaataagattaaagggttggttgattcccttaatgcctccaaacaaagcgaggaaatgttgacatcagatgctgaacatatgaaaaagttgatggaagctgctagatccaatgaagacacgttaaggaagacttctaatgaactagaattgaagcttaaatccagtgattatgagaaacaacaaatgctggaagaaatatctggcctgaaactgcaggtccagaaaataatgaatcttcaagatgaggttttcaaacttcagagttctcttgatgaggccaagttcggaaaagggaaactggaggagattctacgctcggtgaccgaggaatgtgaagaactaaaagcacagaaggctatgctaacagataaagtttctgatatgcaggagactttgagaaatggtgaagaagaaaaacgaaacagaatagctatgcaggcaaagctcgtgaggctggagagtgatctgtcagcatcagaagcatcacatgtacatgaagcagaattaaagaacgaactcagcaggatcaagagatcaaacagtgagtaccagaggaagatacaatctcttgagcaggaaaatgaggatctcactagaagagttcaaactatggaaaagggatttgagcaaatgtcccacgttaaagagaaccttggaaagcaggagcttggaggagataaccaggcagccattcagtcaaaaattgagttattggaaacgaagctcgcagaggcattggaggaaaacaagatgtacagagctcaacagaagagtccgatgcctgaggggcaaccttctgcgggagcgggagacggcaaggagggcaataccgataggattttgcaattggaaggagagctaagagatatgaaggaacggttactgaacatgagcttgcagtatgcagaggtggaggctcagagggagcgatgggcatgtcatgtgagagcaagcaaagcaaatgcaagtgatgcagagcctggacctgctaactggtgctggaagatgtgtatcccaagacgacactga

SEQ ID NO: 29039 - DNA, 396 bp, Zea mays
  Peptide Sequence Number=SeqID_72414
atgggcaagagcaagaagagcggaagttcgtcgcaccactctggcgacaagcggaagcgcgagccgacccctccctcggaggactttggcgattctgagtacttggaggaggagttctcctccgagtccgagggatcgccagcctacacctcacccccggcatcgtccgaagactcggacgattcccaagggatcgctgtcgaggtgtggtcatacatccaggccgtcgagcgctccgggctcgagggctcggatgagtcggaggtctcctcggacgaggaggattcctctgactcatccgaggaggggagcgcggtgacgacgacggcgagggcgagggtgacggcggcggcaaggccagtggcaaagcgccactggcctaaaatattagtatag

SEQ ID NO: 29040 - DNA, 993 bp, Zea mays
  Peptide Sequence Number=SeqID_72415
atgtaccgggaggcgttgtggcagaagagaggtcgtcctcgggagttatatccggacgtatctagtaaggatgctcctgttcctcctgaactccttgtgcctaactgtgactgtggcagactggcttgggggcacctgaggtgtttctttttccagtggatcgacggtcctgataaatttgaccctcgatatcttcttttcgctaattggttgtgtagaaggactagtcatgagcattttaagcgttgggtacctcctcttccgaatcctccaccaatgacggatgcggagaaggaggagacgaggaaatgcagttgggagagttacgacgacaaaggagaggtgatgcgcataatagagtccaagagactaatgggacagaagatgcgttgtggatctcagctcgtcgattcgtacattaacgatcgcatacgcgacatgcgtagggacgcgaaatctgccttttatgacagcccgaagcgtgcagagtataggaggttgaaggcggcagatgagaagagagcacaggatgcaagggaatgggaagcggctcgagctgagaaacagatgttggataatcttgatgatcgcctcaagggaaagattggatgtggcgtaaactatttggcggatgaggcgcatgcaagatatgttcaggataaaatggcgacggttgagctgatggaggaggaggaggacgacacatctagattgactgagacaggattacgtgctcaagaggaagaggacgagtttatgtctcaggccgccgaagaggtagaggcggcttattacaagcaaaagtctgatgaggctgaggctgaggatgagctattctcccaagctgcagataaagcagaagccaattattacaagagaactgttgacaagtgtgatgcaggacaatgcagcaagtggaatgaggttgtcgttgaggattgcgcgacggatgactccgaagatgagttacttatagattgtgattctaattga

SEQ ID NO: 29041 - DNA, 1026 bp, Zea mays
  Peptide Sequence Number=SeqID_72416
atggtccgcggcggcagtcgccgatctcacaccgtcaaaactgcccatggggcgtccacttccggtgccgagagcagcgccgtggagatgggcaccgagaagtccgaagtgtacagcactaacatgacgcaggctatgggagcagttgtttcacctaaacacgcttcctgcatgtttaacttaccacggcccagtctgcaaacacctgttcaacaacaaatatcccaatttcatgcttcaacattgtgcttgccatctaatttttgtgattgcgttatgcttttattggcttatatgttctggattcttgggtacagtctcaatgaaggacatcggctgctacagagtaaaagggcttgctttccgaagttggaagccattaagttggcaactgctgacattctgacaggattatccaaaaacacaatcactttgaagtgggaagctgatggttcttcctctgttgaaatttctgggctcgacattggctggggtcagggttgggcagccacagccgcacaagacgcaaaaaccatccgtgtatccttgctgctgcagtgccccttccgccgccgcacaagttcacagtcctgtccccgccctcaaggccacaagacccaagtggacgcctaccctaccgcagtgccgccccccgccctcatgatacagctccaaccttctaggcggacactcaagctccactgctggtgcctgcaagatccaacaaaatccgccgtcttccagagaattcctttgacatatgatgaggagaaaggagcttggtttcttgagaaagagttgcctggaattttgaaagcccagaaagattgtaagccagtatggctatatcttacacctttgggatatctgtttcctgaaggaaggacggtctccagagacggcacgagcgatgaagagaaggagcttagggagcggttgactggtccggaccctgatctcacggaccaggagaggctgatgatcagagagtacttggaacagtacgcggatgccgccgagcgctag

SEQ ID NO: 29042 - DNA, 327 bp, Zea mays
  Peptide Sequence Number=SeqID_72417
atggggaagtttacagggatccccgtcgaggatttatccccgtgggggactaggatggggaagaaatgtcgccccgcaagcgttcgtagggatcccccgcggggaaattttttcgtcacgggacaggtatggccccgacggcgaattccccattgccatccctactcgctgcgcaccggcttcggcgcagccaagccgagccccggcgcacgcatgacgccgggccgcgtcgccatagcaggccccaagcgctgccacagagagtacggggagagcagatccgtagtccgaggtggcagatccggacttgcggcggtcgtcgggtga

SEQ ID NO: 29043 - DNA, 162 bp, Zea mays
  Peptide Sequence Number=SeqID_72418
atgaggtcacgaggatctgaagaatcatcttggtacctagaatctcaagtgccagatcattatgttaattggaacatggagaaccacccaggaaaacaatgctaccacaagggtgaactcctattatatagtaaagatgtgacatttgatcctatgccatga

SEQ ID NO: 29044 - DNA, 165 bp, Zea mays
  Peptide Sequence Number=SeqID_72419
atgggggtgggcgaaggtccgccgtcgtgggcctgctcgtccaccggcattgggacaccggtgaccatttgtgggtgcttggccgggcgtgtgcacatgttagaaggagtggttgagcgccagaacaccagttccgtgatcgccggtgggggctccgccgggtag

SEQ ID NO: 29045 - DNA, 345 bp, Zea mays
  Peptide Sequence Number=SeqID_72420
atggatatgaggataccgggttgcaacccacctcagcctaaatgcgcggttgcaagtatgcatgtaacaagggtcaagcctacacataacacaacaccatatccagattatatacagatagtttccattaagaaatgggaagcgccagagattgaaataaaaagggtgagtgagcaaactaatgctcccttatcagcaattctcgcaatttttcaaatggatctgttccaggaatctctatttgacagttcccttgcatcagcaaaaacatttatgggcaaattaacagattcacatctgatacaggaacaacctaatgacaataacccattattggccatataa

SEQ ID NO: 29046 - DNA, 984 bp, Zea mays
  Peptide Sequence Number=SeqID_72421
gaacgcaactccatgggagttggtacctctcagccatcgttcggcttcaaggattttcatcatgcagcccggctgctcccctccaccggcgggctggggaggggagtgcgccgagttgaggtcggccccggctatcgcgccggcggaagaacctcttccagctgccgtggcggacgccggcgccgcgagcggctccgaagccactcacgtctgaagaccgggcacgctgcagcgctggccggactgaccttcaactctacggccttctgcccgtccttgcctcacgagttttgtcgtgggcgggggcctcctggcagcagcatccgccctgaggtcagtgctgccgctgttcgaccccccggagcagaagtcgtcgtcgtcgccgctgctggggcaggtgacggcgcaccattcgtcggccttccgttgctccgcaggccttccccctcggagtggggtcgttcgtacctgcggagggggaaccggagttctgttcgtaatggcacttcgaatgccaagccgacgccaaagtcgatcagccgaggcctcgggtcgggctggcgcccttggacgccggttggccgaggccccaggggtaaccggccgagccgcctgcccgggccggattcccggaggagtccctggaccgcgtcgccgtccgaggctgggtcggactttgctgaagacgtcgtcgatgccgagggtgctacggctcccttcagcgcgaagacccgagcctgcaggatcagatcgtcttgtagcgtgtgccttctgcggccgccgaggccagaaaaacacaccctcgccgtgcttgcgaagctgcgtcttttttcctcttgtttcgagcatctggactctgtcggtaacagggataaggtgatgagtgaggtatccgtgtcccggaggcgtaggagtccctcggctcggtcagccttggctgcttacgtgtactccgtcgtttccaggatccgctttccgaagtag

SEQ ID NO: 29047 - DNA, 654 bp, Zea mays
  Peptide Sequence Number=SeqID_72422
atggtgaccaccagttcctgggtggggaggagcaagccgggctgcgatcttggtcccaccctcagcttcaaggatgttcatcatcctcgctggggtggggaccgggctgacccggcgctctacctcccgtgcgggtccgtgggtcaccctctcccgcggcgttcgagggagagggcgctcactggccctgcgggcggcccggacttggacaacgtggggctgatcgatggcgggcgtcgtcacctccagcgtgtcagagtcgtcggcttggctcccgtcggcccctcctgccagagggcggctgccgcgccaggccggtgccccactcgtctgggaggatttgagtggggatctgccggggggctggtggcccccgccatcagcgccgaggcggaggcggctcgagaagtccccgtcaccgacggggtcaccgccaccatccgcgcttcgggcctccgagcgggcggcggcgagccgctcgtcggtcttctgttgctccgcaagccttcccccatggagtggggttactcgcctgttgattatctgaaccgcttcaccaagcatgagtcgccccgtgtcaaggtgacgagtgagccgaggcctcggaccgggctggcgcccttggaagatggttggccgaggccccaggggtaa

SEQ ID NO: 29048 - DNA, 126 bp, Zea mays
  Peptide Sequence Number=SeqID_72423
atgggggtgggcgaaggtccgccatcgtgggcctgctcgtccaccgacattgggacaccggatccaatggtagcgattgagtaccggttcagatggattagatctaatttgatccgttggatctag

SEQ ID NO: 29049 - DNA, 1137 bp, Zea mays
  Peptide Sequence Number=SeqID_72424
atgccgccggcgatcccaagcctggtccacccgtcccgtgtgcggattctccacccgggcggaagccatattcacgggccggtggtgtactggatgctgcgggaccaacgtctcgcggacaactgggccctcctccacgcggccgaactcgccgctgcgtccacccccgcggcgccgctcgccatcgctttcacgctattcccacggcctttcctcctaggcgcgcacctccgccagctaggtttcctcctccgcgggctccgccgccttgccgccgatgcgcacgcccgcggcctcccgttctttctactcgagggcggacctgcggagctgccgtcgttggtgcggcggctcggggcttcggcgctcgtcgccgacttctctccgctgcggccggtgcgggaggcattggatgctgtcgtccaggagcttctgcgtgacgccgccaacatggccgtgcaccaggtggacgcacacaatgtagtgcctgtctggacggcgtcagggaagctcgagtactcggccaaaacctttagaagtaaggtgaacaaggtgataaacgagtatctggtggagtaccctgaggttccgcagtgggcgccttggtgcatggagcagccgaagagtgttgactgggatgcactgatcaatagcatcttcagtgaggctgagaatgtgccggagattaactggtgcgagcctggggagtcctcagcgatggaggtccttcttgggagtaaggatgggttcttgacgaagaggattaagaactatgacactggccggaatgatcctacaaagccacatgcattgtcgtgcctttcaccgtacttacattttgggcacatttctgcacaaaggtgtgctcttgaagcaaaaaaacgccgtcatcttagtccaaagcctcaatatgatttcaactgggctggtgcatgggagtgggctagaaagacgttaacggatcacactggtgataaaagagagcatatctatacaatgtattgggccaaaaagattctagaatggaccagtcaacctgaagaagcactttccatagcaatatatttgaacgacaagtacaaatttgaaagcacattgggtcctgcttttgctgcttatccaagttcgatatattaa

SEQ ID NO: 29050 - DNA, 434 bp, Zea mays
  Peptide Sequence Number=SeqID_72425
atgaaggagttcagagtcctggaagcgtctgtcgcaacgatcgtgtcggatgagccatccagccacgctagcccgaggggaagaaaagaaagaaaagacttcagcggtcatcaggcttggaactggatgctgatcctacgacttcagtcctcagcggtggcccggcgagcaccaaactcgaggatgacattggaggttgtgatggtgtcagagttggtggtcactcctgagactgaaagttttgtcatccgtatagaggtctcggatgatgtccctttggctgctcctgtgggtatgaccgagggtgcttcagcttctgagggtgtcgctaaggataacctagcccccgagggtggtgctgaggatgacccatcccccaagggtgccgagcctggttcatctttgtcacacccatttccgaagggtagagccag

SEQ ID NO: 29051 - DNA, 420 bp, Zea mays
  Peptide Sequence Number=SeqID_72426
atgggcggtggtcgcgaatttggacgagacacgcggcggtcggaggtgaagaagaagcactggccgcgtgagttcgtggccaacggcgtggcagtaactccggtgagccacggagacttcagaggaggtcatggcgacatggtaaaagagttgagccacgcggcgcacggccgggaggcggcggtcgacggtgaacatatccacatccgccgcggtaacgatgattttctagttgatcttatagtgatagaatcaatgggaaaggatgtgattcttggaaagaattggttacacagaactaaggcagtaatccaacatactgagagaaccatgtgtttgcaaaccccatctggagaaagaatagtagttgaagacaatcgacctcgagctctgattggtgcatctgacaaagaagaataa

SEQ ID NO: 29052 - DNA, 237 bp, Zea mays
  Peptide Sequence Number=SeqID_72427
atggcggactcagctgtgggcacgacaccggcgcaggggcaccaaagggcgcagacctcgacggaccggcccaacggcggcgtaaactcgctccagcgagcaattatgcggatactagggcgaatgcattcactatggcggaaccgcccgaattattccagcttaagtgcccaagtcacgcccgcaagggcagcaacacacttaaaccagaataacccgtcagtccctcagatctag

SEQ ID NO: 29053 - DNA, 2031 bp, Zea mays
  Peptide Sequence Number=SeqID_72428
atgcacatggtggcgtttcacgaacggcaaatggtcgagcgagtcgtcaaccgtccaggtgttgataggtcgatgctcacaacatattttgaggcgaacaggctacacgaggaggctcgtggcatcctatatcatgacttccctgagtggtacacttggcagagtggtaagggcaaagtatggcaacggaggaaacgagatacaggtggacaagtcggtagaatagtctctgctcatccggccgagggggagcgctactatctttgtgttctcctaaaccacatgactggcgccacctcctatgtggatctaaggacagttgatggtgttatcctatcgacttttcgtgaggcagcagagagaaggggactgcttgagtcggacaacacactggatgagtgtctcactgaacgtgttattttccagatgccatcgtcactgcgacggctttttgccacaatactggtgtactgtgagccaagcgatgtggctgtactctggcagaaacacaaagattctatgtttgaggactatcaacacaagagtcagaacaaaactcatgttgagcagatggtattgattgacattaggaacatgctgcagtcaatgggaaaggacataaagacattccctctacctcctatcatcgacgcatatgacgatgctattggtactgctagggaggtttacgaggaggaaagtatcgaaccgacagctggagatgtggctcttaaagactctcttaatgaggaacagagggccgcctatgataagattatgtctgccgttgacaccgatcagggcggattgttctttgtggatggacctggtggcaccgggaagacttatctatacagagtcttcacgaagcagagtggaacagcagagttgctacggaaagcatctctcattatttgggacgaggcttctatgactaagagacaagccgtggaggcactggacaatagcatgcgcgatataatgggtcgcctcgcactgccatttggtggtaaaaccattgtcttcagtggagatttcagacacgtcttgcctgttgttcgtaaagggtcaagggctcaaatagtcgcgtcttcgctacggatgtcttacctatgggagtccatgtcccacttaaagcttgttagcaacatgagagcaaaaaacgacccttggtttgcggagtttttgttgcgcgtaggcgatggaactgaggacacaagtagtgacggcgacattcgtcttcctgacgatgtgtgtgtgccttacaatgggagtgacagcgatcttgacaacctaatagacttcgctttcccaaatctcaacgaaaatatgtcggattccacctacatcacttcaagggcgatactgtcaacacagaacgactgggtggatatgataaatgttaagatgattgatcgttttcaaggggagcatatggtgtaccatagtttcgatagcgccatggatgatccccataactactacccacctgagttcctaaacacattgacgcctaatgggctgccacctcatgttttgaagctcaagattggatgtcctgttatattgctccagaatatagaccctgcaaatggactttgtaatggcaccaggctagtcgttcgtggcttccaaagaaatagcattgacgcagagattgtactgggtcaacacgttggaaaacggattttcctaccgcgtataccgttgtgtccctccgatgaagagatgttccctttccagttcaaaagaaagcagtttcctgtacggcttagctttgcaatgacagttaacaaagcacagggtcagactattcccaatgttggtgtatacttgcctgaaccagtgttctctcatggccaactatatgttgctctatctagagcgacagcccgatcgaacataaagattcttgtcatcccagccgtcgatgggaggaaaaagtcaaggaagggagtaaagaaaaaccccaccgtagattgtgggacatataccaagaacatcgtctacaaggaggtcctaacaaactag

SEQ ID NO: 29054 - DNA, 963 bp, Zea mays
  Peptide Sequence Number=SeqID_72429
atggaatctctatttgtaggcttgtctcataacaagccaaaaaaatcggtggcaaccgcaatagttcgagaagttttatctcatgactggttgctcctagactatatttgcacgcaaggtgatcttgccctcatcgattttattaaggaaatcccttgtgaaccaagggtagaagtcgtgcttattgatgatgcctttgttgaaaggaagtggatggaatgtttatttcagccgaacgcatatttaggtgacgaggttatagactgttacataaatttgataaaagctcaaaagcatctaaagtgtcgatctggaggtcgcgttcacatagaaaatgctttccagttcaatttcctgaagcgagatggtgatgttgaaattaaaacagaggggctatatccaattgaagacatgacacaaatatgtagcgctaaacgaagggtgttactttacctagaccatgacatggtgttcattccgataaacatccgagagacgcactggtatcttgtcgttatccatgcaagaaatatggagatacaagtgctcgattcacttggttcttcacaagaccgcaaagacctcactgactctattaaaggactgcaaagacaaattgatatgatatctcaacgtaaggagttaaaagaccacaggtggccagacctccaagttgcttcttggccgctcaaggaaatagacatgggatatgcaaagcagacatatagctcttcatgtggcctctttcttttgaactatatcgaatactggacaggggatgaactgtctgacagttttacccaggaaaaaaaatgggctgctatatttactattctttcagatctgaataagagaaggggtggtctggttatatcaaaatggaaaaaagaagttggacctttggaaagctccatctggaaggttgagatatatagaaaatcccatcaggatttctcaatatag

SEQ ID NO: 29055 - DNA, 312 bp, Zea mays
  Peptide Sequence Number=SeqID_72430
atgggcggcgcacgcggggtgggcgctgagctggggtcgatggcgtggttcctggtgcggcgtccagagggaggcaagggggcggtcggtgacccggatgctgggaatctgccacctgctatcggagctgaggtctcctcaagtgatgctctcaacattgcccctgtcaatgctccatcaatagacagtgcatcgatgcctcctgctctaggatttcctttatttatttctaaccttcagttgaaatcttgtggtgctcctgtccccgatcaagtttcgtctttgatgcagtggaatcctctcttgctttag

SEQ ID NO: 29056 - DNA, 204 bp, Zea mays
  Peptide Sequence Number=SeqID_72431
atgagggtagcggacatcgctggtgcagctgcacggcagctgcacggcgcggggacggcggtcgaagtaggggcaagggctgggcggcgcgatggctggaggaagaaggcaggcttggggcgaagggcggcgcgatggcaaacagggctgggcgaagagcggcacagtgataatagggtagggcagcgaggcgaggtggaatag

SEQ ID NO: 29057 - DNA, 423 bp, Zea mays
  Peptide Sequence Number=SeqID_72432
atggagaacccccatctaatccccgccgggtgtaacccatttaacgcgtcagcgatcgtcttcctcctaccgcccaggtctagaacgaccgcgcgccacacaggcattcgtatcgcccccgatgaaccgcatggtcgtgcaagcgagggccgccgggacaacaccgagggggggctcggccacgggtgttctgaccttgcgacgaagctcgacgaagaggggaaggtatctgcccgattcggtggtggccaggcccaggcttgcccgtcgacctgtgcccgccctaggtacttcggtgaagtgcccaggttcccttgccgatgctccccgacatcagcagaggaactccacgatgacgcccaagtgcgcgcgcggcggcagcagggcctccccccacgagcacggattgtggtgttcccgtga

SEQ ID NO: 29058 - DNA, 285 bp, Zea mays
  Peptide Sequence Number=SeqID_72433
atgacgccgccaagggagcagggagcgcgcgcccaggaggaggacagggagggcgctcggctgctcgccatggacagcagagagagagaggaagggatggacgccatgggagcagctcggcagagagattctctacgccatgaacaggagagaatagggttgtgcgtgtgggagaggaggaagaagagagtggcggctagggggaggtatgaagttgagttggataaggatttatttgaggacgacgcattggagattccgcttgagagtatgggctcggattaa

SEQ ID NO: 29059 - DNA, 144 bp, Zea mays
  Peptide Sequence Number=SeqID_72434
atggcgagagtagcatgtaccctccgtggcaagaggctggacggtggtgtatctgtgctctcggttggcgtgaacccggtggtacccaaggaggagccccagcagttaagttggtcgcgggaggatgtttgcctcccaccttga

SEQ ID NO: 29060 - DNA, 402 bp, Zea mays
  Peptide Sequence Number=SeqID_72435
atgggcagaggcaagagggggggcaagggatggcctcaccgcgttgacaacaagagcaagcatcctcagagtccaccctcggaggactttggtgactcgaagtactcggaggaagtttcctctgagcatactggcgatccatcgagcgtgtcgggctcgatgggtcggatgactcggaggagacctccttggaggaggtggaagactcctccgactccatggagtggcggcgaggacgacggtggcagtggcgacgacggtggcaagggcggcagcgacggcaacgacgaaggtggcgacgatgagagcgacggcgagggcaacggcgacggcgacggcaagggtgacggtggcgacggggtgaggaggccgactcaagatgagtcggtctcaagtttgtaa

SEQ ID NO: 29061 - DNA, 336 bp, Zea mays
  Peptide Sequence Number=SeqID_72436
atggcgctccacaagctctgtgacgacgggcggcccccagctctcttacggaagcagggcgacgtcagcaaggactcgaccgctccaacagctgtccctccgccaggctccgtcgcacctccgacagccacgacatcacgccagcaaggtgccaagacctctccggctgccacatgggcatctgaactatctcccccttcggatccatatgatccagaggccgactcgtccctgaaggaagcgctcgagactattagaactgccaatgaagttattgacgaagctgtcaacaagctgttaaacgaagctgccgagaaggtcctgaatgaagactga

SEQ ID NO: 29062 - DNA, 680 bp, Zea mays
  Peptide Sequence Number=SeqID_72437
atgggccccaccgttctgtcgccatgtatcacaactgcgcagtggtcgctgggggtggggtcccacctggtgagcgcgcgccttcgcgagctggacgcttacgcgtggggccaggcagtcaggaccgtcgtccccgcaagattcgtgggcgagctcaacggaacccatggaattcacgcagctgggcctcctcatccgaatccggttactggtgtgtcagcaattgctcaccgaaggttgatcaccgccgtggggcaaccgagcaccgtgggcgccatcgcactctccaccgcagttgacaacgagcagtccgaggttcctgagtgtgttgttggagacctccttgagcagcaacctagtgaaggcaatcaactggagagactgcatcgtcgcctgcacaaggagcaggagcgccgacgccaggagcaggagcaggagcagcaggactcttccccctcacctcagcgggaggtggagtctgcgaggccgccttcccctgcacctcagccagagatgccccctgcaccaccacagggcatctcggctgctggaggagaccctgatggagacggatacgacgacgacgccggtggcagtttgagccccgacacggagcattcagaggagccagagccagagggatggatcgctagacccatcactcgtgacgctgctcgcgg

SEQ ID NO: 29063 - DNA, 372 bp, Zea mays
  Peptide Sequence Number=SeqID_72438
atggcgagcaaggagctgggtgggttcgacggccacggacgagtgcagatcggcgtgacagagacgaagaccgggcgcaggaacgcgccatatcccaggcacggcagtggcctaggccagagctgcccacggtcaggagacttgcgcggtcaccaaggaaaaagagactcggccgtggaagaaacagggcaggggctgggtgagctcgaagccgagctcgaggacgtggctgcgcgccaaggaacgagcaaggggtcgaggcgagcagagcgcagggcgctcgagcgcgcgcagcagggagagaagcagggagacgctacactgggagaacgcgaggtcgagcaggggccttggcagagcgcggcgagctga

SEQ ID NO: 29064 - DNA, 198 bp, Zea mays
  Peptide Sequence Number=SeqID_72439
atggcggtggccagactgagcaggcttcctcagaggcatagtaatgaacggtggcagattggatatcgagaatgcggattcgagcacaggtcggataacaaccgtcgatgtaacaccccagatgtttatattccgctcgacaacgagtatggatttaagcacgtaatatcagtggataaaacggatgctaagttttaa

SEQ ID NO: 29065 - DNA, 210 bp, Zea mays
  Peptide Sequence Number=SeqID_72440
atggccgatgaagatccgagcgccatgtctcagggcgcgccggcagaagagctcgcgcgcgcaggagaagcagggaggaaacgtcgggaaagagaggaatccagggcgcggcgcgagcagagggatgggttggagggagcgctgccatggaaggtggagctcggcatcagggagatgggagacgagcacgcgagggaggatgaagaatga

SEQ ID NO: 29066 - DNA, 215 bp, Zea mays
  Peptide Sequence Number=SeqID_72441
atgggcctcctcttctacgtgctcaagaagctggtcctgttgcgcatttcgaccgacgacgagatgtccagcatagacctgacccggcatgacggcttcgccaacgtctatcacgacgaggaccccaacaacaagggcagggttggtgggttcatgctcaagtctgtgcagaaccgtatcgagatgccagcgacagcgacggacccagcaaccag

SEQ ID NO: 29067 - DNA, 561 bp, Zea mays
  Peptide Sequence Number=SeqID_72442
atggaggtaggatgtgaggggtggggtggatgggagtggagtaacgaagtagtggtgggggtagtgtggaaggaggccccggagtcaaccacccaatcagtggtagttcggggaggtggaagtggcgaaggtacgggaggcgatcgcagcacgtgggaagacaagcggtccaggcacgtgacggcccgcctgagggtggacctcgacgcagtcccgaagaatagggttccagactgggtcgaaggacacgaacatgccccggatgagctggccgtcgtagaggaggacacgcacagtcacgagagcagcgggcgaggtaaagctcatggcgaccggtgcaggccgacgcagggaggcgcggactggacaaccgggcgcgcaacagcaggggcggcagattgctcggcgtcgggcgtccaaggcacgggacagcaggggcgcggcgagacaggaacagcaggaaggagaaggctgtcgagcagcggggacgccaacaggaggcggcggccgggcctaggggagatggtcgtcgacggctggctgcgcaggggcgcagggtag

SEQ ID NO: 29068 - DNA, 1293 bp, Zea mays
  Peptide Sequence Number=SeqID_72443
atgcgaggacagccggagaagcgaaccgttatgcgtttcttggatctgggacaggcggcgaatcccgcagagatttggctccgtaccggatgggctggggaaggaccgaaggagatgcgaaatgcatcccgcgctttgactgagattaccatcttcattggtcaaaggctcaaagcggaggcgggctgccacgcgtccgtaacgggcaacgggacgggctggccgcccaccgacgcggaggtgagtgagagtgggacaaagccaaaagaaaacgtcgctaacaaaagagggttatggttcggctcgtacgggttcaaccccggaaccttcaccaccattctcaagtcctacggccccatcaggaccgtctacggctacaacgggccactggaacatggtgtggacgtctgcaatggcctcctcggcgggttcgtggccatcgcgaaggggtgcagcatggagaaatcagagaaggggaaagtggaagaactcgctgttcttgacaagaacatcaagatcgatctgcacatcaacagcaaggcgttcaccgctggtcaagccgcagcgcttccaccggtgcatgcgatccctgaacgccgtgtgcaagtgcaaaatgtgcacttctgcgttctccatggatggacagcggtggttccgctgccggtggtggagtgtggactccccactgcatccccatcgccaccggcgccggtgtttgatgcgggatcatctgcatcggccccaatggatgtcgacttggcagcaccaccaccgcctccgcccactgcagcggcagttgctcgtcgttcgccatctccaccagtgcctgtggtcgtcgggggtggggaagaggctcgaccactgcgcgggcagtggagagcgctcagcgcggcgctgatactcgacgtggagcagtgggacggcggcagatcagcaaggcccgaggtcgggcctggcgcggcggccctggccaacgcgatggcatggcaccctcgacgcggccacccgtggcggctcggcgcctgcggctggcaacaggcgcatcctcgccaggaggcgcgaaccgtggccaagctggccacggactggagcagatgcgcgcgcagcggcgtgcgcagaggccccgaggcccggcgacggcgcgaactaggcgcgcggcccggctaccaccgagcgcaggcggaccagccggccaggcggaacgcctcggcaaggcgcgcgcggctccgtgtcccggacgcggcctcaaccgggcgacggcgagcaccaggcgctcggcccggctcccactga

SEQ ID NO: 29069 - DNA, 1407 bp, Zea mays
  Peptide Sequence Number=SeqID_72444
atggcaagactaaacaatgtacaactaccttctggtaggcttgtttctgacaaaaatattgagctagatgaagtttcaggatcttcagagtccacgacacttctggctggtgccgaagaaagtgacaacctaaatgaggatcagggttctgatttcggaggtattaagtccgtcggcaagctactcgcaccaaaactgatcagagcaaccctgcttctgtggatggccttctttggaaatgcgtttgcctattatggcattgttcttctgacatcagagctcagtaatggaaacaggatatgtgccaaagaggatgttgaatcagttcattcaaccaatgcaagcctatataagaatgttttcatatctagttttgcagagatcccagggtcatttctgtcggccatgatcgtggatagatttggtcggaagcgttccatggcgtcgatgctcttcactagctgcgttttcttactcccactagtgttctcccggacagatatactaaccagaatctccctgtttggtgcccggctctgtatatctgccagcttcaccatcgtatacatatatgctccagagatttacccgaccgcggtgaggacgacgggcatcggcatcgcgagctcagtgggcaggatcgggggcatcctctgcccactcgtcgctgtcgccctggtgcacagctgccagcagacgacggcgatcctcctcttcgagcttgtaatcttcctctccggcctggccgtctcgttcttccccttcgagacgaaggggtccgccgccgccttcctccaggggttcttccccttccctggcgccgtcggccctctccctccctccctcggccgtcggcctccacccttccccggcgctcctcccgccgccggagccgtcggtcgagcgctgcgcgcgctgctctacggacgccgcgcgccgttcgcgggagcgctcctgcttttctgcatcggcgccgtcagcgctgcggtcgccaccgccgctgcgtggctctccctccctggatccgcgagcaccctgcacgtgcgccctgcagtgctgcctcccacggatccgccgcgggcccgcgccatcggcccctcgcctgcggctcggtttcactacacggtggtcggcggcggcttcacctccggcttccaccgcccgtccaccacagtgccgcctcctgcgctccagtctgcagcctcgtcggcctccaccagcgctgtcttgcagcagcagcctccgtcgccgatccggacgcctgctcgccgccgtcgcctgtccggccgcctgcgcaccgaccaacaaccctccatcgctcccctgcgtcggtccggtcgcctgcgcgccgccggctgcctaccctgcgcccctgcgcagccagccgtcgacgaccatctcccctag

SEQ ID NO: 29070 - DNA, 216 bp, Zea mays
  Peptide Sequence Number=SeqID_72445
atggccacgaacccgccgaggaggccattgcagacgtccacaccatgttccagtggcccgtctggagccgcttcccgacaacgttgcgagtgcagcgacgctgtcagcgagagtggtggtgactacggtgcggaacacaaccgaccactgactgtagccgtagacggtcctgatggggccgtaggacttgagaatggtggtgaagaaagaaattaa

SEQ ID NO: 29071 - DNA, 855 bp, Zea mays
  Peptide Sequence Number=SeqID_72446
atgacgtcgactgtcctcagctctctacaaagtcaaagaaacgtcagcaggacacaaacttcaaggccacctcgacgaccaggccataccaccgaccacagcgctacagagctcggcttcaactcggcggagccagccgcaccgctacaggggtcaggacctggggccgcgccgtcggccacgcttctacagaactcggacatgtctccgccgtccacattcgagcatagctacaccccatgtacggctgggtcacctctttgtgcctataaaaggagcgcccgctacgccgtctccgcgcgccaccgccgcctgctcgcccgcgcgcgccaccgccgcctgccgtctccgcgcgccaccgccgcctgctcgcccgcctgctcgccggaacgcgccgccgccgcctgccgtctccgcgcgccaccgccgcctgctcgcccgcctactcgcccgcctgctcgccggaacgcgccgccgtgctcgcccgacctaccctccgcgcgttccggcgcctccaccaccgcctgctcgctccaccagcccgcctgctcgctaaaccgccgcccgctcgccgcgcgcccgccggcgagctccaccgccgcccgctcgcagtgcgcccgcctgctctccgcgtgcccgcctgctcggccggcgcccgctcgctccaccggcgcctgctcgtccgccggcgtgcccgtctgctcggccgcctccccgccgccgggtgctcagccgccccacatcccgtcgtctccgttccgccccgcccgctactcgcccggcccggctccgccagtcaccgtcgtcacttcaggtaactacttccgattatttatattatattttttatattaa

SEQ ID NO: 29072 - DNA, 234 bp, Zea mays
  Peptide Sequence Number=SeqID_72447
atggccggttctaaggatcacaccaagatctccaccaccaacatcatcaagccggccgtggaggcgctcccggctgatgaccaaaggccctttgaagacctcgtaatgcgcgatgaggaggtgatgcggcaatggaacgaacaacgcgacaaggaagaggcggaactgctgcataaactctccgaacggcgcaaatgcacgctttcgtgtcaccatcacagccgcaaccactag

SEQ ID NO: 29073 - DNA, 1266 bp, Zea mays
  Peptide Sequence Number=SeqID_72448
atgctctcctgcttcgcctttgaacgcgtcactgatagtggagacagagacagaggtgggctttgtggcggtcttgccggcggagatggaggagaggacgacggatgccacgacgcgagccgagtcgatgtggaggagaggatggcgggcgccgcgatgcgaggcatccataaatttttggtgcacggttctgtcgatccgccatcaacgcgcacgcgccctctgctccccgccatcaacgcgcactgcatgtctgcgtcgcggaccccccaccctcctccccctctgctcctcgccatcaacgcgcaggcggatgtcgcggatccccccaccctcctccccctctgctccctgccatcaacgcgcaactggatgtcgcggatcctcctatccgccataaacaccgatccggggatccatgcccgccctgcctcctacgacttgcaacctccaccctcggtgattctagctccaccagccccacatccctggatcaccgcgcacgcgccttcgatggaggatgtcgccggggaagaagctctttgcgtcccccagcccggtgcgcagattggctactgggggagaaccccctggcgccccacacgagaggacgagatcaccgtctgtatctcctcgtccccctcctggtcgtcaaactcgtgccgaggtcaccaccgcctcctccatgctatccccttatccggcttcaagaggatctccaacgaagtctctccgaaggccacgagctgtccgactatggggacctcgtccgaggatttgatcgaggcgaccaccggctcggaggttgatttggcgctaggcggtctctgcaacaacgtgttcatgtccatctctctcgccagcatgtacgacagtgttgcgattactaaggataaggtctttgatgcggtaccgtcgaaacctagcactgagtttcctaatgcagcctggtggtacaagaccgtctttgagtctgtatttgattttttcactgattgcaaatttattctctataatgttgttggcgtaaatatgcatgcgtcatcagctcctgcggcagctactcttgctgctgagcgtgttgacgcccctcgtgatgttgaaactgatgaagacctatccaatgaagaaaaagacatgctgcacatgcacgagatagatgtcggctctatggacgaacactcaaccaagtcagatgaggagtatgatggcctagccatgtgcgacgtgatggcgactggtccgacgatgagcagcaagttgtga

SEQ ID NO: 29074 - DNA, 1950 bp, Zea mays
  Peptide Sequence Number=SeqID_72449
atgtcctccctgcgcgtcgtcacccgcggtgcgaacccaccttccttgggcaccgtgagcctgaaaacgaaggcgccaaagatggcggggatgccgatcatgtccctcgcgaaccaggacgccagcacccctgccactgtcaccgccacccacgcctcggtgctatctttcactgcatccacgcgctaccagatgcagggccccaccgagcatgtctgcccctacgagcttgagcaccagggaagtctcatcaggcccagcgagggcaagctgtggtgcactgagatcatggaggatagtgggaacggcaacctggatggtgcgggtaaaagcagcaacgaagatctagttctcccaggactgcttggaggtatgacccttcccatgtttgatgaaatgtctcctaacagcggtgaggaagaaattgccctattctctgaaggctttgattatccggtgtttgttgatatgccacttgagaaggtggtttgggatgaggaacctggatatgatgatttgttgaatcaactagcacagggtgcagatcatttggttgatgccacgatgcaaccaactatacatccgatcgctgtggacaagcagttacaacttggggttattgatgaagatgaagtcgtactcattgaaggcaaatacattgtggattggaagatactacaggctagagaaaccagtgaagaagaggtggaagattaccttgctgaatctaaagaaggggctatggatgaggtgctacaggttgagctgatcgatgatgaagttcaatgggatgaggagtcacctaaccagagtgtgcataaaggcttactgccacacacagtgaggaaaatggtatatctgaaggggttcagtcagggaggaggaatatcaaccatgacacaagtccagaggtgccatcctttagctccattatctactgctaaaatttcagttgctatagcaattgtaagggctgctggatgtgagtttgcagtcaagtattatccttcatttaatgaagctatacagagaatagatgtgaatgacatagctctggttatggtggatcattcgtgctctggctattgcagcgaagctgatgctcactattgcagaactggcaactctccgttatgttgcagaactgacagtgatagtttaatggagaatggttatgctcgtcctgtggaaggaatcagcgtggctgctctctatgctggttttgctgacacggttcttcttaagactaaacacaggcaatgcacttctggccttcaggacgttgcagatgttgctgttgcgattaaagcaggaccttatgacattggtattgttgctggtttacagtccaagacagtgaacaaagttagtcttgttgagcaaatgaattccaaagtcgagctattttctcaagcacatggttgtttttttccaaatggtctcacatatgagaatattgcacactgctttggcactacacgactgcaaccagatcaagctgatgttgagtcacaccctggtaaatccaaagatggtttggttatctattctgttgcttatgttggtgatagttgtgaacatagattcataacacataggccgagttttgttgggatggttattctgtatggagacccaaatgaactacattaccgccaaaatgcatttgatgctggagaagaggggcttgaaatcaaagtgcattctcgtgagaagggatgtgaatgcttggacaacttgctcgtttccaagaccagacatgagtacctgaacttgataagaaatgatgcattgctacttatgccagcagaactccaagtgcttccatctgttcgcgtgcttcttctttggatgattagaccttggaatccagcccactacacggcccaaatcgagatgtacaaaagcagcagctacgtcaagacagagggcatcgaagaaagagaatag

SEQ ID NO: 29075 - DNA, 567 bp, Zea mays
  Peptide Sequence Number=SeqID_72450
atgcaggcggcatgcaaccacaccaagggggcgcaccctttcgactccgacgcatctagcatggaggcccaggcccacacgtcatggaccgagaaaggggatactccgaaagggatccttctctgcaaaggaggcaggccccgagccctcctactaatcagaggttcgaaggctggcccctcggaagggtttgacagccgcctcagagcactcgggctccgagccctcctactaatcagaggttcgaaggctggcccctcggaagggttcgacaaccgcctcagagcactcgggctccgcgcccaccactggctggcccccgaagggttcgatagccacctcagagcacgcagagcaagggatgactctaggtacgtccgatacatggccgaggctcgggctacgctcccgaggctcggggctgctctcgcaaacccggctccggccaaaccgttgacagcatcaacataccagcccgagaacttggaacctgactatgcacccgggctacgaccagttcgcatgagggaacaaccagaccggccgaagcatcacgaaacgcgctaa

SEQ ID NO: 29076 - DNA, 262 bp, Zea mays
  Peptide Sequence Number=SeqID_72451
atggggctggtgcagcagccatgtgagagtgatggggagggcggctggaaaaacaaactggagcagggagagcgtcatacagagggcagggcacagagggagggcgagctcgccataggagcagctggaggcggccatgggaaacatcaagagggtggtgccctagcttctggcgtgggggctgatgcccaggagccgagcgtggctaacagaggaggcagtttagtgctgcagcatctgcgtggggagggagcaaggaagg

SEQ ID NO: 29077 - DNA, 276 bp, Zea mays
  Peptide Sequence Number=SeqID_72452
atggctctcacggtggcttcagcgccttttcaacctcgactaccccatgccccgggggtaatcgccgccctcgtatcccgtggccacctcttcatgatagactacctggagtttgtggagatggctggtggcgatgaggacctcatctacgacgcgctttgcatgggctcggactcggatctagggtggctcggctcggctcttggtacgagcagctcaggtgaccggctgggcgagagcgcgcaggagggtgggggtgctcgttctcctgtctag

SEQ ID NO: 29078 - DNA, 1386 bp, Zea mays
  Peptide Sequence Number=SeqID_72453
atgccatcctcttcttcttccgccgacgccacgctgccggccgccgcctcgtctaaggagacgttgagtagcgtgatggtggaggagttgcgcgccggcgactctgttgattttggtgtgtcgcggatgacgtcagcccgtgttgaagatatgcagcggttgggctactttggcggcggagtcgctcgtgctccggggacggaggaagtccccgagcctgagggcgagttggttgttttcgaggcgttcttcgtcgccggactccgcttgcctgcgcaccgggtcttcgaattaaatcaattgtcgtacgacggctaccctggtcaagacgaggcggaccgccgtgggaagaagccggcggtggagactggaggcgaccctgcgctggcggccgccccctcctcaaaaaagagaaaattagtgatggacaaggatcgccaaggggcagcgcaaaaacgccaggcgactgtgagggttcacgaagctcggccgaaaaggcagcggggagcggcgaaggctgcggcctccggcggaggcaaaccgccgctgccggcgaaggcgggcgcctctgcacctagcaaggcgccggaggcaacggtgggcaccgaaggccccaaactgacgaaggtggtgccgtcggccagcggagtggcggaggctgcgaaggcggctcgggcgttgccactgccaggcaaacgcgttgccgacttcggcaccgagattaatgtggatgattatcttggggggtcggacgagggccagcttgctcttgctgcgcctggcgcggcgatcgtgacagctgcgctagcgccgaaggcaaggggtgagacccttggcgtcggaggcgaggtgtcggccctcgcgctggtcagggacgaggcgggcgtggcgacccgccggctgaaaggagtgacggaggcgctgagtcaggcgacggaggcgctgagtcaggtggctgacttcaccagccgcactgcgtcgggggcccttacggcagctttgtctgccgaagtcgagagacttcggacgcaacatgctgacgctgtccgtgagaagtcggcctccgacagcaagtgccgcaaactggcggacaaggtggccgccctggagaaggagaaggctgatctccggcgccagctggcgggggagaggagggaggccaacgaagccatcgccaaagagcaggctgcacaggcggaggccaggctggcgcgggcggaaggcaatatcgccaaggagctcgccggagagctgcaggggcggcttactgccctggagagccgcgcggagggggccgaggccgcgatgcgagcggaggccgatcggacgcgcacgcagctcatgactgcatatcgcgagctgggtgcgcggactggtgacttcgag

SEQ ID NO: 29079 - DNA, 2319 bp, Zea mays
  Peptide Sequence Number=SeqID_72454
atgtctttcgtgcttttcgactacttcgaaagcgggatcctgaaaacgacggagtacacgctcggacctcgacggagggggagcagcagcaccctcggcgtcaactacaccttcggcgaagaatccggcccgagcagacagctcggccggccaccccgaagcctcagccagctgtcccctgaggacatcagcccggctcgtggcctcggcaactcgactccggcgtcggtcccgccagtggacggcccggccaggctccggccgaccaaatgttcttttcgagccaactctgcctctgtccatgctgacaccgctgcctcgggcttcggctcatcgaagagcggccgaggatttcctttaactaagcaagagaagcctcgggcggcaaggtcgaccgatgcgaggaactcctacgcctccgggatacggatacctcactcgtcaccttcgcacgaggcaactcacacttggttaagcgccacaatgaacaagacaccggcactcaaggtgccattacaaatggagctccagttccacctccgcaggtacgaacaaccccccacgattggagggcctgcggagcaacagaaggccgacggatggctcgccgccgcccgcttcagcagcagcgacgacgacttctgctccgagcggccgaacagcagcagcgatgacctcagggcggatgctgctgccataaggccctcgcccacgtccccactcgaggggcgaggacaagcagaaggccgtagagttggaggtcggtccgtgggcggcaccggctatctcgtcggcggagaaacctcttccggctgccgcggcggaaggtggcaccggaagcagcgccgaagccgctcggactggagagccggacacgcggcagctgctagcgccacgaacggcgaacgcccttccccccgatcgctgagggaaggagcgggccactgcccgcgcggagaccgaccccaactcggcgcactcccctccccagcactgatgatgaacatccttgaagctgagggaggggcagaggccgtagcccaacttgcttctccccacctaggagctggtggtcaccgtcttggggcagaagaagccaaaccgccgtgcgcggtgcgcgtaactgcccagcggttacaagcattcctccactttcgcccagaccagcgggtgaaagggcagaccgccatgcaggcagcatgcgaccgcaccaagtgggcaccccctttcgactccaacgcgtctagcatgggggcacaggcccacacgtcatgcaaccggcgcgccggttgctacgtgcaagaaactacaccgccactcgcgccactaccgtgcctcctcgactgcggaaccggtaccgcgactcgaggcaaccctgcgtatgacccaacagtgccaaccaggcacgtcgatcacgggtcagtcagccgcgggagaaggtgcgacggtcgatacggccagaaatgggccggcagtaatggcggtggcaggcaggcggaagcagcggtcaagtcgtcagccaagctcacgacgggcggcacctttggcgggcgaagcaggcgacgcttcgcttccgccataatgaccgcgtcaaaaaaagggactgggaaaggggattccccgaaagggatccttctctgcgaaggaaacgggccccgagcccccctactgatcggaggttcgaaggctggcccctcggaggggttcaatagccgcctcagagcgctcgggctccgcgcccactactggtcagaggttcgaaggccggcccctcggaagggttcaacggccgcctcaggccactcgggctccgcgcccactactgatcaggggttcgtaggctggccctcgaaagggttctacagccgcctcagacgcagagcgagggatgaccctaggtacgttcgatacataaccaaggctcgggctacgctcccgagaggctcaggggctgctctcgcaaacccggctccggccaaaccgttgacagcgtcaacataccagcccgagaacttgggacctgaccccaagtccggcctcgggcgccataggaagctccgcctcgcccgaccccagggctcggactcggcctcggccccagaagacgacgaactccgactcgcccgaccccagggctcggactcggcctcggccctagaagacgatgaactccgcctcgcccgacccagggctcggactcggcctcgacctcggaagacagactcgacctcgacctcggaggagcctccgcctcaccctacccagggctcggaccgaccacgtcacaggaggggccatcattatcctacccctagctag

SEQ ID NO: 29080 - DNA, 630 bp, Zea mays
  Peptide Sequence Number=SeqID_72455
atgcattcaaagaaaactactctgacagagtcaggcatcgcccggagaaggagccgcgccctcagcttcgtccccaccttcggcaagatccgccccggcctcggacgacggtgcaagcgggaggatctctgcctcgaaggtggttgccagcaccgcgcttgggcccgcagcggccgcgtcgagcctctggacttcggccagggcgacttcatcttcgtcggggaggcaatacccctcgctgacccgctccagatccacgacatagtgggaagcaagcacggcgaaggcccgcctgacgccgtgatgcagcgcctcgcggagtctgccacgcgcatggtcacccaaggcctgcagacgaaaagtctcggctgtgagaaccaagggcaatccgacgcaaggagaaagaaggagcggacactcaccagggacacacacccgcggtcaggacgcatcaagggctgggaaagggtgctggcgtccggcttccccaacgtgacggctacccgcctgtggaggtcgtcgacgggaaggggatccgaggacatccgcaaaccctccaagtcggcccccggcgtcatctcccaaagcggcagtcgccgctccgtcaagggaagcaccctccggcgatga

SEQ ID NO: 29081 - DNA, 414 bp, Zea mays
  Peptide Sequence Number=SeqID_72456
atggccgctgctacaagtgcgggggcgcagaccggcggagtagctcgacgagcgcagtctaggcgctgcttgagctcggacaagagaaggttcctgtgtgccaggtgcttggaggaggggagctcggtagggagagcagcagggggcgtcgagtatctgccctgggggagtcgtcctccatggaaccgaacaggagcagaggaagacggtgcgtgctactgggggatggcgagctgcacaaaaaaggagagaccgacctggggaggatggcggccaggtgaggctgctcaaggaaatccacggcaaggcggggagaagcagccaacacgacgcgttcgacagagaggctcgacgaccaagggagtggcaccaatccccacggatggagaaggcagggcgcggtccaaggcctag

SEQ ID NO: 29082 - DNA, 414 bp, Zea mays
  Peptide Sequence Number=SeqID_72457
atgggaggagcagaggcgccatcggagtgggtgcctgcgtcgacccgccgccgtggaggagcaggggacgtcggcttcggccatgagggagagggcgccggcgatttactgctgtggggaggggtgccggagctagggcagaggaggccgagagggaagaagggagggaagcaaggatccgaccagggagcagagggggagataaaaggagttagcagcacacatcattggtcgaaaaaggtggcattatccattggccggctgcagctactggcgagcaggtgcggcatgcagctgttggccggcgtagtcggtggccgggcattggctgctaggcagagcaggccgtggcatgcgagagaaaataagacaactgctggtgaaatatttaaggataaaaggctgattgcttag

SEQ ID NO: 29083 - DNA, 234 bp, Zea mays
  Peptide Sequence Number=SeqID_72458
atggaggccaagtcaccccctcaaccaaatcaaggaggtacctgcaaaaattatgccacaagtatccgcacgttaatccttattcaaattttgtctcatagacaacgcatccccatggatcctcgtccacagaccatcatcattctgttatcaaaatggatacaaccaattcctgacctcgcgcgagtgctagaaaaatcactcgacttctaccgagatcctgatttagcatag

SEQ ID NO: 29084 - DNA, 372 bp, Zea mays
  Peptide Sequence Number=SeqID_72459
atggaggccaagtcacaccatcaaccaaatcaaggaggtacctgcaaaaattatgccacaagtaaggctgagtatactaatactcagctagacttacccggttacaatggatcaagcagtctcattagctacgagaagcagacgattcgaatcgagttttatccttgcaaggtagtgtttgctgggggaggtactcgcttggcgagcatccactggaggtctgtccaggttggacagattcagacttgcgacttcaaaaattcacaactacaggttcagacatccaaacaaattgatcctagactttctggaaagatcaccaaaaagagtgatccaagactttttgtaaatcttagcaaaagtactacatga

SEQ ID NO: 29085 - DNA, 390 bp, Zea mays
  Peptide Sequence Number=SeqID_72460
atggaactcgccgccatcaccttgacggtggcgcatccttgtactgcacgaggactcgtcacgggggcgctaagccagagaccgggcgccaccaccatactgccaggttcgcagcctcgccatggcaggccgctgggcaaagaaattggatctcgtcactgcataatctccggtaaattcacccttcgcgcgttcgctatctcctccacatcatcttgcaagcgtcaacgattgactgggtgttggggcgctagatcattcctcgccggcaagtgcgccgtcgaagcctgctcacatgcccctgctcggcctcggtcggaggtggcggctgttgccgcaacggacgttgtggccgttggattcactttggcggccacgatttggggtgag

SEQ ID NO: 29086 - DNA, 450 bp, Zea mays
  Peptide Sequence Number=SeqID_72461
atggccttgctagaccctcccgagcatcttccgcccgaggtggcactcaacttggtgcgcaacctgctcggacggggtgcgccggcgttcgtcggaaggatctgtgtcagcgcctctgctcacggcgacctcaccatcagggagtccatgctctttgtctccaacctccccagtgcacggcctcgtgggggcagcgctcttccaccggtgcttagcttcaaggatgttcatcagccttgcggtggtggagagcgagctgggctgcggctccgtcttccacgtgagccggtgacccgcctcttcctccagcattcggaggaaaggacgaacaccagccttgtgaaggttggaggcgaacttcggctacgcggcatcggccagaccgcaagcgccgtctgccgccgtgcttccaactccttggcttggatgttcttgtcgtcacccccgtag

SEQ ID NO: 29087 - DNA, 171 bp, Zea mays
  Peptide Sequence Number=SeqID_72462
atgtgccgcctaagcattaagggcccgtttggcacaactccagctcctgattctaagcgaggatctggaggagccgtgccaaacgggagaatcaggaggatcagctcctcacgaggatcaggatctggagctaaagaaacagaagctggagctttgccaaacgggtcctaa

SEQ ID NO: 29088 - DNA, 1671 bp, Zea mays
  Peptide Sequence Number=SeqID_72463
atggctgaagcggccgcatcttcgtcttcgtccggatcctgcgccccgcgccgcctccatggcgccggcatcgtcagggacgcgctcacgtacaatggcctcgccgcactcccgccgcctctgccgccggcgcaggtgcaggttacggcttacggcagcggcggcggaggaggaggaggaggaggaggaggaggagggaagattatccccgcggtgcttttcatcatcgtgattctcgcggtggttttcttcatctccggcctgctccacctcctggtgcgtgtcctcatgaagaagcagcgccgccgagggggcacggcgtcagcagcggcgcgggggtctggaggggagggcggcggggcggacgctgcgttgcagcggcagctgcagcagctgttccacctccacgactccgggctggaccaggccttcatcgacgcgctgccggtcttcgcctaccgcgagatcgtcgtgggcggcggcggcgacggggacaaggagccgttcgactgcgcggtgtgcctgtgcgagttcgacgccgaggaccggctccggttgctgccgctgtgcgggcacgccttccacctcaattgcatcgacacgtggctgctctccaactcgacctgcccgctctgccgcggggtgctcttcgtcccggggctcatgggcgaggacagcccgatgttcgatttcgaggagggcctggaggaagggcggttgtccgaggactgtgacgacggatttggattgcctgggctgaaggcttcagggttggcacagacaccggtggccgagaagaaggtattccctgtgaggttggggaagttcaagaatgtcggaacccatggtgcggtggaaggtggccatgccaatgccaatgccaatgccaatgctaatcccagggtgttgactagggatgaaggggagagtagcagcagcaggttggatggaaggagatgcttctccatgggcacctatcagtatgttcttggcacatctgagctccgggtagctctccagcctggctgtatcaggaatggcactggtggtgcaatgaggggaatgcctcctggtttaagttcaatcaatgctgatattatggaggggaagaagatctgtgcacgcaacaaaggggagagtttctccgtgtcaaaaatttggcaatggtctaatcttaagggcaagctacctgctggttctgatgaatgttcggatgctgggagccttccatggatgaagaaaggaggaagctccgcctcgcccgacctcagggctcagactcaacctcgaccccggaagacggtctctgcctcgcccgaccccagggctcggactccacctcgacctcggaagacggtctctgcctcgcccgaccccagggctcggactcaacctcgacctcggaagacggtctccgcctcgctcgaccccagggctcggactcagcctcgacctcggaggagtcaccgcctcgcccgacctcgggcttggaccgaccccgccgcaggggggtacatcattaccctacccctagctagctcaggctacgaggaacaagaccagcgtcccatctggctcgccccgggaccccccggggttgaaacgccgacagttggcgcgccaggtaggggcctgctgcgtgttgacgaagagcttcccgtcaagctctag

SEQ ID NO: 29089 - DNA, 213 bp, Zea mays
  Peptide Sequence Number=SeqID_72464
atgaagcaagccatcggcaacaagggcctccagatcgtccactgtgacggtggagaaaggccacgggccgcgcggcggaacgatggttgcccggtcggccatcaccaagtgaagggggtggcggcggagcggaaaagggaccgggaaaggggatactccgaaagggatccttctctgcgaaggaagcgggccccgagccctcctactgattag

SEQ ID NO: 29090 - DNA, 462 bp, Zea mays
  Peptide Sequence Number=SeqID_72465
atggttgtgctcgtctccgacggcgtttccgagtactcgcggaagctcctacaggcagacggttggatcgtgaatcgtataacgttactggctaatcctaatcaatttaggccaaagaggttttggggcgtctacaccaagctgaagatatttaacatgacaagctacaaaaaagatactatagttgtgaaaagtatcgaggatcttttcaagtgtggcaagttttgtggaaacttgaagcattctgaaagaatgaattctggggaccaaggttttctaaattcatattattctgattttgccaactcccgtgtctatgagccagactcgcctttaactcctgaaccagcgacacaacgcctttctaccttgtataatgctgatgttggtctttacatgctagcaaacaagaggctcatgcaggcttgcacagtgctcaaagcaggcttcgtgcagcattag

SEQ ID NO: 29091 - DNA, 351 bp, Zea mays
  Peptide Sequence Number=SeqID_72466
atgtgggatttagcaattctgactcatcggagaatcatatgggtccagcaggctggaaagaaagaggaggaggaatttagcacaggccctctgtcagtcctaatgatgagtgttaagaacaacacccaggtcctcatcaattgccgcaacaacaagaagctgcttggccgtgttcgtgcttttgatcgccactgtaacatggtgctcgagaacgtgcgtgagatgtggacagagatccccaagactggcaagggcaaaaagaaggctctgcctgtgaacaaggatagattcatcagtaagatgttcctcaggggcgactcggtcatcatagtgctgaggaacccgaagtga

SEQ ID NO: 29092 - DNA, 348 bp, Zea mays
  Peptide Sequence Number=SeqID_72467
atggccggcgcgcacgacgatcttgtgacctactccaccaagatggacctcatcctcgagaaactcgccgccatcaattcccgtttggattcccacgacgctcgtctggccaagctcgagcaggcgtgggtcagcccctctgcttctaccgcgggctgcctgggcgtaggcaacctgggcgcgagcgagggcggcctgggcgcgggcgaaggcggccaggtcgaggacgatggggtcgatgggctgcaacccgacacacctagggaggaggtggaggcggcgttctacgttgaggtggtcgtgccactgctgcagctcgcatccgtgctcgtggaggtccaggcgtag

SEQ ID NO: 29093 - DNA, 720 bp, Zea mays
  Peptide Sequence Number=SeqID_72468
atggcgacatgggcgagtacggatcagcgccagagaagccgagcacacggtgttaacaacaaaggaggggagttcagctgtgcgctgaagctgacaagcgacggcgaggtcgcggccgagctccagggagcagtgtgcgcggcgcgcggcgaccatggcgagcaggttgagtgcgtgcgcacggagcagacgcggctgccagcagggggaagccgccatgaacacaaggagagcgcgcggcgcaaggcgaggacgcacggtccgagctggggacagggagagactcagttggcgctccacacgacggcgagcagagccgcacggtggagaagaaaagaaattcgagcgcgcgcaggacgagcagagagagcttggggaggggatggggaagagctccagggcgcgcggaatccggggaagaagaagaacgtcgccgcggccatggaaagcgggcggtgcttggtccggttgaaggaggctgcacagtggttttggctgccgcgtctacagttgccctctgctccaccggaggaagcaccggatggtggcgagcaggtagctgaggggcgcggccatgggtgccagggaggagctgaggcgcggtccggtggaggaaagatcgagctggggaagaagacatcagagatgggcgcgcagcgagccagggatgaagctcacgccggcgaggaagaagacgcagggtgccgtgggagctcgtag

SEQ ID NO: 29094 - DNA, 342 bp, Zea mays
  Peptide Sequence Number=SeqID_72469
atgaggatgaggctcaagttgatgaaggagaagatcaaaaagatgagccacctcaagatgacagcaatgatcaaggaggagatgcaaccacacagggtagaggaagcacttcaatattcggattgggtagtggcgatgcaagaggagctcaacaacttcactaggaatgaagatgccaagcccatcaagacacccatgggaaccaatgggcatctcgacctcgacacggaagaggcgctccgctataattcaccggactgtccggtgcaccaccagacagtgtccggtgccccaggggagagcgactctgaactcgtcggcttcgggaatccgctccgctaa

SEQ ID NO: 29095 - DNA, 819 bp, Zea mays
  Peptide Sequence Number=SeqID_72470
atgcaggcggcatgcaaccgcaccaagggggcgcacccttttgacttcaacgcgtccagcatggtggcccaggcccacacgtcatggaccgggaaaggggataccccgaaagggatccttctgcgcgaaggaaacgggccccgagcccccctactgatcagaggttcgaaggctggcccctcggaggggttcaacagccacctcagagcgctcgggctctgcgcccgctactggtcagaggttcgaaggccggcccctcggaagggttcaacggccgcctcaggccactcgggctccccgcccactactgatcagggaatcccatcagagggaggcatcgagccctcggaccccgtcaaaaggggaccgggtccgacaaatcaccagcagctcactggagacaccatgttcggtgccctccgagggcaacatggcgcttttcccccctcgtccttgcggaaaggcgacgcaggggccgccgcccgcgtcgctctgactgctgtgccactcgacagagtgaggctgacagcggccaagtccggtctcgggggccataggaagctccgcctcgcccgacccagggctcggactcgggcttggcccccggaagacgacgaactccgcctcgcccgaccccagggctcggactcggcctcggcctcagccgacggtctccgtctcgcccgacccaagggctcggactcgacctcgacctcggaagacagactcaacctcgacctcggaggagcctccgcctcgcccaacctagggctcggaccgaccacgccacaggaggagccatcattaccctacccctag

SEQ ID NO: 29096 - DNA, 447 bp, Zea mays
  Peptide Sequence Number=SeqID_72471
atgtcatcaccacgcccgggccatcgccgccagggtcttctccgggaatccggcccgagcaggcggctcggccggtcacctctggggcctcggccaaccatcttccaagggcgccagcccgacccgaggcctcggctggtcaactccggcgtcggtcccgctaacggacaacccggccaaggtccagccaaccaggtacgaacaaccccactccatgggggaaggcctgcggagcaacagaagactgacgagcggctcgccgccacccgctctgactacgacgacaacgacccccactccggatggccaagctgcagcagcgcaggcctcagggtgggcgctgctgcaaatcttgccctcgcccacaccgacgctcgagggggcgaggacaagtacgaaaaaaccgggaggcccgaagcgcggatggtggcggtgaccccgtcgtga

SEQ ID NO: 29097 - DNA, 387 bp, Zea mays
  Peptide Sequence Number=SeqID_72472
atggcgttggccggccggaattggttcgccggggtgcggcgagagctgttcctcgtcgtggaccttgaaaacggagaagagggtgaagtgactgaagagaagacaccaccacctttggaatctcaggcagagacttggctctacttcgacatctgcgagtccgagcctgactcacctgtaaacgaaggcaagccccggcgtgctgaccgaggaccctttaactggtcacatgcctcgtcatggcatacccttgagagtcttttccttagtcgggtgaggaagcgacaaacttttgttgcttctgctccaaggtggtaccaaacgaggaaaaagaagactgaagtgcgggaggactcggtcctccaattaggatcttttgtttattaa

SEQ ID NO: 29098 - DNA, 411 bp, Zea mays
  Peptide Sequence Number=SeqID_72473
atgagggtggaatgggagtgttatgaaactgatatatcagccgtgctcgcgggttatgagcggccaagggagctccagagattagtgatacttgatcagagatactttggtacaggtgacaatgagattgatggttctgattacgattatggtattgctagtccactacagccaaacaggatacttgctgagtatgttgatgtgtactcacccttgctctacacaccaaaccccccccaggttgtcagcattgcaaccactgctcaggcgaagatgaagctgtggaaggagacttccaggagttccaagactacgacgagttctaggtgtgggttagcggccaacccccagtcggctgcctgtgaaggccgcgttatctacgtttcttttccgcactttgatttattgtaa

SEQ ID NO: 29099 - DNA, 1770 bp, Zea mays
  Peptide Sequence Number=SeqID_72474
atgaaaggaagggcaaaaagaaggctcccactccaagttcctcaagtgaagaagaggaagaggaacaaagtgatgatgaagaagataatcaaccatgcacatcatcctccgaggatgaagaaacaatctgacgcgtcgaaaaggaaaaagcaaagaaagggaggatgcttcgcatgcggggaaaagggccacttcagggacagctgtccaactatggctgcacccaaaaaggggaggaacaaaggcaaggcgctaacaagtgtcaaaacttgggatgattcttcaagcgaagatgaaccaccaaggacgcgcagccactggtcctcatcacgctcatcacggtcatcacacaaatgccttatagcaagaggtttgctagaaaaatttaaaacttttgcaaacttaaactgtgagatgtcaactaaacttgagcaattagagtctagtgctacatccacagctaccgatgatagccttattaaaaagaatgaaaaacttaaggctaagttagctagctctcaagaagctattgaaaatttgctagagaaaataaaaatttttagcatacacaacaatgagctaactactaagctagaaaacattggtagcaccccaggagcatctttagttaaaattcctgaaattattaaaaaggatgcttctacttcttgcgttgatttaattgatgattctaactcctgcaaccaagttcttgttgagaatattgttgtagaaacatgttcagatgaggttgcaaaggaaaatgagcaattaaggcaagaagtggctcgccttggcaaggctttgtatgacaagaaaggcaaaaccaaacaaatccgacctccacaggataacaccactgcgggagtgaacaagcctatggagggagaaactgtgatttgtaggctatgccacaaggaaggccacaagtctttccaatgcaaggcgatgaccggggataaacaaaggcaaaagctcaagcaaacgccatcaagtaaagtctccaacacctacatcaaaaaggtggacaaaaaggctgctacaccatatttgatcaagaagaaaaagaatggaaaggtgataacaatcaaggccaacaagcaagccaacaaaggaaagggggccaaacgcatctgggtgtcaaaggaaataatttcaaccatgaaaagcaccaagaagttcacaggatgcaagattaacttggactacgtaattgaggaaagcaacacacctcaaaagaagacattaaaaagattcaagaaaagtccaagtgtgctgcctgcggactgtctgtgcatggagcatcggactgtccggtggcacaccggactgtctggtgcccacacgccggactgtccggtgcaccagggaaccacagtccaacagctaattccaggtggcacccggagagaagaccaccggactgtccggtgtggaaagcctgcggcgccaacggtcacctgctctgacagggcaacggctaggcgcaccggatatgctacatttagcgaaagttttagaagtcctaattcaatcccctctcttaggcgtcacccgcttcctacatgggacatcatggtcaaggtcttcgtgatcatagagtcagccaactataagaccctcaccgcagatgagcttttcagcaagcttaagtccactaaaatcgaccaccagactcggtccaagattgagaaccctagtgcacccatcgtggcccttgtcttaaggttgcagaagccaaagccaaaagctaaacaaacacacccttaa

SEQ ID NO: 29100 - DNA, 3117 bp, Zea mays
  Peptide Sequence Number=SeqID_72475
atgaagtcattagataacaccacagaagttaaaagtccatgggggcgcaggatgttcaataacaagtcactaaagcgcagtgtagatactgagaaatcttctgaaaccagtgtggttgatgtgagacctggggaaaccagtacagtagcccctgtgccacagcaacaaactgaaaatgttgagaaaccttcagctaccagtgcagatgatgcgaagagtgcagatgatacgaagagtgcagatgatgtgaagccatcggttgccagtccagatgcgaagagcacagatgatgtaaagtcatcggagaataatgcggcagtagttagaaagccatggcaacgcaacataggcactgggaagcaacccctgaccactgtagttggtccaaagacgactgaaacaagtggaactgtcaaaaggttgtggcagcgcagtgctgcaactgcatcaaaaagtggtacggctgttgtgacaccattgcaaagcagtgtggttgtctccaagccgttccaaagcaacgtagctgtgaaaaagacatggcaaagaagtgtaactccagaaaaccagctagagagtaatatgtctagcaataagccattgccaagcaaggtggttgttgagagtctactgcaaagcaacaccgttgagaaagtgtttcagagtactgtacctactgaggaaccacagaaaggcatcatggccactgaaaatcaatcgcagaccatcaaagttacaaagaagagcaatgaaacatccatggagctatcagtaacaagtgagacaaccaaaccgccaccacttgctgcaaccgtgttgcaaagtgatgtttccacagaacaaccatcacaaactgatatgcctaccatggcacctagtcagatccctgagcccaccgagaagccatcagaaagtgattttaatgctgagaagttatcagaaagtgttgttaaagctgagaagtcatcaacgactgacactgctgctgagaaaccacttccaagtatgatcactgagaaggtagaaagtgtagcaggcacattgaagccatctcaaagtgatacagcccttcaggagatcttagagaggaatatggctactgaggaaatactgcaaactgccatggctgttgaggatgcacctccaaccaatttgatcaccgagaagtcattaatgaaagatgcttcagaggagccagttcaaactaacgaaccatctgagcagccactgaaaactgaagagattgagaagccacaacaaagtgaaaagattgctacggacacgagagggagtgaagtatctactgaggagatgctagagcttgaaagtaatgccactaaattaaacaaggatcaatcagaacttgaagggctttcatctggtaggaatcctccaaacttccaaagcaatccaaatgctgggcagcgatcagagtccaaaggcattgtggccgagaaggcagctgaccatataatggaagctgaagatgatgtggatgctgagcactcatcagaatctcaaagcgttgcacctgctgaggttcgaaaggagcaaccatcagaacatcaaaaggatgtggatatggagcagctattggaacctcaaaatcaggatcatccttggaatccactagatcctgttagtgatacagctgccaaggattcatcagagcctaaaagtgacatagctacagaaaaacctgcagaatctcaaaacaatgcagaacagtcagttgagcagcaatcagaaccgcaaagcgataaatcaactgagaggccagaagtgcatcaaagtaatacatctaatgatgagctttctaggcttcaaaacgatgcaggtactgataaactatcagtacagtcatcagatcctgagagcaatgcatctgtcagtaagccatcagagtctcaaactgatgtggctaccatggaggcactggaacctcaaattgatgctcctcctgataaggcaactgaccagccagtgaaacctcaagatgatgcatctgctaagaatccaatgggaactgaaagtgatgctgtttgtgataaaccttcagaaagcagctcagatactgaaacacttcttgtatgccatcagaacagcagcataaccactgatgaacctgtacaaggtggcatttcttatgatacaccacatcagagaagtgcacccatagaaacaacaccaggaagtgaaacagttgttgacgattgcatacatcacgaagataccagcagcaaaccatcagaggaaaacaaagctattgaggagccagaagaggtgagtgccaagctgccagatgaccatgtaacttctgagaagtcgtcagaggaagacaaagaaaacgcagaggcatcagtagacagtgctcccctggggaacccattggaggtcaatgaggagagctccaatccttcaggggatactgtaactcctgagaagccactggaggaggataagacgagcgcagagccatcagaaagcgatgcatcctttgggaaaatattggaggccgatgaagtgagtgccaacccatcagaggatattgcaactcctgagaagccactggaggaaggtgtgggaagtgtggaaccatcagaagacaattctgttcttgataaaccattggaggaagaagaggttgatgccaaaccggtgaaggacgttgtaactcccgagaagccattggaggaaggctcaacaactgcagagccattagaagacaatgctgcccatgaggaagcaaaagaagaagatgaggtgattgccaagcccctgtccagtgtggcacttgagaagtcactggagggaagtgaggcaagtgtagagccatcggaagacaatgctgctcttgagaaaccatcggaggacgacgaggcaaatgccaagtcatcagaggacagtgtatatgtggagaagccacaacaggaagaagatgacaacggtgtcaaggcattagaggagggcgtgtcccctgagaaatcagccgctggcaaaccattagaagaagacccagtccatgagaagccagcggacgcagtagctgagccgtcatctcaggacgacactgccactgaaaagccctcagctacaactgacactgcagaaactgcatga

SEQ ID NO: 29101 - DNA, 252 bp, Zea mays
  Peptide Sequence Number=SeqID_72476
atggggattggaggtacaccggaagaagtcaattcacccatgtcacataagattctgatcatgatgcacatgcacctcattcataatggaatccgtagctcaagtagctacagttctaactatccgcctggacacgacataaacttcaacccttatgcatggcagggaccaccgaccgaaaacaaccaccgatcatgtatgggtatggacaagctccctgttggggacttgttctcaaatgttatgagttaa

SEQ ID NO: 29102 - DNA, 495 bp, Zea mays
  Peptide Sequence Number=SeqID_72477
atggcgctccacaagctctgtgacgacggcggctctcagctctcttacggaagcaaggcgacgtcagcaaggactcgaccgctcctacagctgtccctccgccaggctccgttgctcctccgacagccacgacatcacgccagcaagggccttcttagagagggttggccgcgcggggacgaggacgagacaggcgctctcttggggacgctcgcttccctcacccgcgtggacgctcgtaacccccctactgcaagcgcacccgacctgggcgcgggacgaacacgaaggccgcggatctccacctctctcacgcccatctccggccacctcgcctctccccccttcgcgctcgcccacgcgctcgacccatctgggctggggcacgcagcacactcactcgtcggcttggggaccccccagtctcggaacgtcgacagaatagatggcccgaagaactggatgaacgaatggttctatgtgaaaatgatttaa

SEQ ID NO: 29103 - DNA, 1521 bp, Zea mays
  Peptide Sequence Number=SeqID_72478
atggaagttgtggagctggtcccctgtgcccggaataagtggggcaactggtgggactactggttttatgtttcggaggctgaagtcgaagatcacccagggctccctgccgccattatgtgttcgcattattatgtggcgtacccgtcatttgaagtggcggaggatgatgaaaatgagagggcccttcggattgctgcccgcacgagtagtgggcgcgatctagttgaggaattcatagggtatggggtgtggcctttggcgcatggatgggcgctgggcgaagtatgccctcgcgagatgccctccctgggtggacggaaggtgcgaagtccgcgttttgctttggatttgcgagggcgggatcctgccgcggttgtgcgtgaggcgaaggatggggcggtgagaattgttgggcgctatgtgccgaagacagaggcccagcagagttgggatatacgtggatccaacgaccgcctgaatagggtcttcgagttgaattgtttgccatatggcggttatcctggggaggacgtcgtcgaccgccgcgggaaaaaaccagcggctgtgactgaggatgaccccgcgctggaggccgccccatccactaaaaagaggaagctaggtactgcggtgggagaactaggggtcaccgatagctttgctatggagttgatggggacatgcgcggcccccgggggaaggatgtcttcgcccgagctccgggagtcttcggcgcggatgctggaggttaccgggggtcgatggcccaaggacgttcctatcccccgcgcggccggcgaagaattttttacgtctcgcatggctcgtgacttgagagtgtttccttacggacgaaatattgctgttgttgtgtcagcagtgataaacaaggatcgccaggaagctgcgcagaagcgtcgggcggtcatcaggctccccgaagctaggccgaagagggcgtgggggactgtgaaggctaccgtccccggcggtagccagccggccgcccctaggtccagcaaggtgccggagagcgtgaaggcggtcggcgctggcggaaccaagtctgcctcggacggagctgcgaaggatcggggcgatgggcaacttgttgttgttccgcctgcggtggcgaccacggcgtctgccgcggtgcttggggtgaagggtagcgctttcagcgctggcggcgagatttcggcggtcactgccgtcaaggacgaagcgggcactgtgtcccgccggctgagggaggtgtcgcagcagttgagtcaagcggccgacttcgccgaccgtgtggcgtcgggtgcccttactgcagatgtgtctgccgaagtcgagagacttcgggtgcagcacgctgacgccgtccgggagaagtcggctgcggataacaagtgccgcaagctggcggagagggtggccgccctggagggcgagaggacggacctccggcgccagctagtggaggagaggagggaggccaaccaggccatcgccaaggcgcaggcggcgtag

SEQ ID NO: 29104 - DNA, 636 bp, Zea mays
  Peptide Sequence Number=SeqID_72479
atggagagggtcgaggcctctacgcgctcggaagttgagcggacgcgcaaacagctcgtggactcataccgcgagctgggtgcgcggactgctgattttgaggtgcccgaccgagaggcgggccttcgcttcctcgagtggctgcaagaggaattgttggcgctcccgaccatcatggagggattcatgtcctttgcctccctcatcacctatgaaggggctatgaacgcgttgtcccgcaggggactccgcgggggccctcttcgaccggatgtggggccctacggtcgggaggtggttagggagcggtctgaccgggcgagggatcagatggcgcgtgccgaggacatggaggacttcggacccctgaacagcgcgcagcccgatgcagaggccaacccggtggtggccgaggctgaggtcgacccggcaccgcccccggaaaccggtgaaggctccctcgctgcccttgcgtctactgtgtccggtggaggctcgtcgccagccactgtgccgatggtggaggatccctcgaaggcggtgacggagctggcagcggaggatcccccgaaggcggcgacggagctggcggtggaggatcccatagcggtggctgggtcttcgcaggtggcttag

SEQ ID NO: 29105 - DNA, 270 bp, Zea mays
  Peptide Sequence Number=SeqID_72480
atggcgttggccggccggaattggttcgccggggtgcggcgagagctgttcctcgtcgtggaccttgaaaacggagaagagggtgaagtgactgaagagaagacaccaccacctttggaatctcaggcagagacttggctctacttcgacatctgcgagtccgagcctgactcacctgtgatgttctacccaggttggttaaagattaacgcgtatgtaggcgtgctgaccgaggaccctttaactggtcacatgcctcgtcatgggtaa

SEQ ID NO: 29106 - DNA, 537 bp, Zea mays
  Peptide Sequence Number=SeqID_72481
atgggcaactgccaggcggcggaggcggcgacggtggtgatggtgcagcacccgggcggccgcgtcgagcgcctctactgggccaccagcgccgccgaggtcatgcgcgccaacccgggccactacgtagcgctcgtcacgcaccgcgcggatgccgacgacgagaagcggtcccagcagcagcagcacaggcgcgccacgcgggtgaagctgctcaagccccgggacacgctggtgctcggccaggcgtaccgcctcatcaccgtcgccgaggtcaccaaggcgctgcaggccaagaaggaggaaaagacgcggagggcgcagcagcagctgcagcacgtggtggtagttcagcggaagcacgccggcgggaggacgggctccggagacgacgacgacgactgccttgaccagaaaactatggtgtttgacattctgcgatccaaccaacaagacagtcaggaaggcgagaagccactaattcattcgctaatgggcactaacagacagacagacagagaggaaaaaagtggataa

SEQ ID NO: 29107 - DNA, 360 bp, Zea mays
  Peptide Sequence Number=SeqID_72482
atggcgatcgggccaaggttgcttcttggcgaagactgggcctcgagcgagccgaagctttatgctaatgggggttaccagctgagattaggagtcttgggggtacccctaattatggtccccgacagacctcaacaaattcggcaggcggtggatgaaggaactaccctcggtggtctggagtctgaggacgacgccaagccgagccacagcagtctctgcgacgctaccacgcccgaggggttcggccccgagacctccaagtgggagacttggtgcttcggctgcggcaagacgcccgagggcgccacaagcttactcctccctgggaggggccattcatcatcgccaagattttga

SEQ ID NO: 29108 - DNA, 462 bp, Zea mays
  Peptide Sequence Number=SeqID_72483
atggccccctatccccacccgtacttcgccacctccccaaccgccaggaatctggtcaccgacggagaaccaccgtcaaactctggcggccggctgaacgcgctgctgctgctgctcctctacctgcgcgttccccgccccgacgcggtcgcagaacacgaccatggccacgaccgcgctggcgtccgtcgaggggttcaactgcaccgccaaccgcacatcggctcgggggacacctactggatcgtctccaccaccaagctgcagaacctaacgcagtacagcgtgaaccccacgctggtgcccaccgtcctcgacgtcggcaccatggtcacgttccccgtcttctgccagtgcccggccgccgccgacaacgccacgacgctcgtcacctacgtcatgcagcccggggacacgtacgtgtccattgccgccgccttttccatcgcctatccacagtga

SEQ ID NO: 29109 - DNA, 792 bp, Zea mays
  Peptide Sequence Number=SeqID_72484
atggccgacgggctggatcggtggcgcggcttcttccgtggcgccggcgctggcatctgcgacgtcatcgagaacgccatcctcgtggcggcggccgacgcgccgcgggacttcctgcaccgccgcgaccgcatcgctgagaggctcttcaccgcgctccgccgcgacgcggcgccgccgtccttcggcagcgccgcggcgtccaccaccccggccactcccgttgaggaggacaagggcagcgtgcgccgcgtcgccgagaaggagtgcaaggtcgacagcagcagcaacggtacccacggcggcggcggccatggccatggccacgccgatgaggacgatgattctgactctgacgacgagcgcctccgccgcgccgcagcgagcaactatggccacaactacgatgatgatgacgaagatggcgaccaacaggaggaagatgagcagcagcatgccgcggatgatactgaagaaggggaggaagaccacgacgctgaggagctcgaggcgctcaccaatgagatcgatgaggagtcacagatcgtcggcgaggtcctccgcatcaaggaactcctcctgcacaaggaagaccatgtactggcagactgcctcgtttcttcatttatttataagtcggatgccactttgttcgattcactgaggaggctgcagttgatgcaattgtccgtctctacgctaaaggctactgagattggaagagctgttaatcggctgcggaaacacaactcacgagagattcggcacctcgtgtgcactctcattgagtaa

SEQ ID NO: 29110 - DNA, 735 bp, Zea mays
  Peptide Sequence Number=SeqID_72485
atggtgaccaccagcccctggatggggagaagcaagccgggcagcgatcttggtcccgccctcagcttcaaggatgttcatcatccttgctggggcggagagcgaggcgagccggggctctacctcccgcgcgggttggctggccacctcttcttccagcttctggtggtggagaccatcctccagctctgcggagaagacgtcctccagccatgccggggaaggcgaactgttgctgcccagctaggatgcaacattccgccctcttcctcgttttcgtggcgagggcgggagcgaggacctgccgttaaagggacccctcggccgctcttcgatgagccgaagccaggggtagcggtgtcagcatggacagaggcagagttggctcgaaaagaacacttggtcggccggagcctggccgggtcgtccgttagcgggaccgacgccggagttgatctgccgaggcctcgggccgggctgatgtcttcgggggacagctggccgaggcctcggggtgaccagccgagccgcctgctcgagccggattcttggaggagaccctggcggcgatggccaaggcgtgatgatgaagtcgtccttcagagtggagatcctcggaccgcgtcgccgtccgaggctaggtcggacctcgccgaaggtgtagtcgacgccgagggtgctgctgctccgttcagccgtcaagatccgagcctgcaggatcggattatcttgtag

SEQ ID NO: 29111 - DNA, 519 bp, Zea mays
  Peptide Sequence Number=SeqID_72486
atggcgcctcctgttgacgtggtcggtccgcgccctaggttgggcgatgtggaggctcctccgaggtcgaggtcgagtctgtcttccgtggccgaggtcgagtccgagcccccggggctgagcccgagtccgagccctggggtcaggcggatcggagttcgccgtcttccggggctaagcccgagtccgagccctgggtcgggcggagcggagttcgccgctccgccgtcttccggggctgagcccgagtccgagccctgggtcgggcggagcggagttcgccgtcttccggggctgagcccaagtccgagccctgggtcgggcggagcggacagtcggagcggcgcaggcggcgctgtccttctgtcaggccggtcagtggagcggcgaagtgactgcggtcacttcggctctatcgactggaggacgtgcgtcaggataaagctttatgctgatgggggttaccagctgagaattaggagccttgagggtacccctaattatggtccccgacagtag

SEQ ID NO: 29112 - DNA, 759 bp, Zea mays
  Peptide Sequence Number=SeqID_72487
atgggagatgtagagccgagctgggcgataaagcgaaatccgggctggagcgttgacgagcaaagagcttcgcgcgtgcaagaacaacagaacgctatgcgcgcgacgcaaaggcgagcaggacgcaaccaacaggggaacttcaacggcgagcgactgagaacggctcgacgatgtcatggagcagcaggaaataacaacgccacgatggtcgaggagacaagtccggttatcgactgcggccatggcaagggagctcggcacgcagggagcagcgcgcgtgagaagccgctcggctgtgcgcgtaggagcttggaggaacgtgcggcaaggaaacaggcactgctgaagcagagggcgctatgggggagctcgactagggaactccgcgagagagatggagatgggctgggcacagggaagatggacgagcgcgcgtgcttgagggagacgaactggggcagggaggacgcggcagggcgcggccagaatggaagcagaggcttgagcgcgcggcgaacagcggagaggaatgagcggccgaacaccatgggaggaggggatccggacgcgcaggggctggagagcgagtcagaggaaaagctgcgcgtggctggggaagcatcatgggcgatctcgtcgcggtcggtcgagctggcagagggactgtcagcaccgacacccaagacaacgtgggagcaggaaacaaagcgggtggcgagccagaggaaggagctgctacacggacgccacgggtga

SEQ ID NO: 29113 - DNA, 360 bp, Zea mays
  Peptide Sequence Number=SeqID_72488
atgggaggaggggatccggacgcgcaggggctggagagcgagtcagaggaaaagctgcgcgtggctggggaagaatcatgggcgatctcgtcgcggtcggtcgagctggcagagggacgcgcaagggagttgggagggcgcgcaccatggggagcagcagcgggaattccggccaggcgcgagtggaggagagccatgggagggagtcggccgtgggagctgagcaagaagaaagcgcgcaaaatcgtagatacttttgagtctagatttttagcaatatacaccgggtcgatacattattcaactacgcatcctattcctcgaatctcaaaaacggaaattcgaggactaacgatttga

SEQ ID NO: 29114 - DNA, 945 bp, Zea mays
  Peptide Sequence Number=SeqID_72489
atggcggcatcagcgtctcggcccctcgcgctcctcgcgtgcacctcggcatctctcggcgctgggcggcgggcgtgggctcgcttggctgtctcttcctattcggcgaggtcggcgctccccaggctccgcgggcgccggtcgttcgccacctccgcacggggcgccgtgatggggaacccaggccccggcgccgttgacgccgacgtcgggatggacgccgtccaacggcggctcatgtttgaggacgagtgcattttagtggatgaacaagacaatgtcatcggccatgagtccaagtataactgccatctcatggagaagatagaagctggaaatgtcctgcacagagctttcagtgttttccttttcaactccaaatatgaattgctactacagcaaaggtctgcaacaaaagtgacatttccacttgtctggacaaacacctgctgtagccatcctctctaccgcgagtcagagttgattgaggaaaattgtgcaggggtgagaaatgcagcccaacgcaaactatttgatgaactgggaatagttgctgacgaattacctgttgaccagttcatcctccttgggaggatgctttacatggctccttcagatggaaaatggggcgaacacgagtgtacatacttgattacctttttgccatcacatcctggattcccagttttcatactatttgtgtttgctgtactctacatgtttcaaggtggattacctcctgttcatgaggtggccgacgtcaagtacgtgaaccgcgatcagctgaaggagctgctcaggaaagctgatgctggggaagatggcgttaagatgtccccttggttcaggctggtggtggacaacttcctcatgggctggtgggatcatgtcgagcaagggactctgcagggggcagcggacatgaaaaccatccataagttgtaa

SEQ ID NO: 29115 - DNA, 480 bp, Zea mays
  Peptide Sequence Number=SeqID_72490
acagcacagagaactgccctgttgtctgttaacggcgagcgtaactcccagaaatcactggcagaatggattgaagactgggccgactaccttgtgggctttgatgctaatggtgacgccattcaggcaacaaaagcggctgcggcaatccgtaaaatcacgattgaagcaaaccagaccgctgattttgaagataatgacttcagcggcaaacgctccctgatggaatctgtcgaagcgaagaccaaagaccttatgccagtggcattcgaatttaaatgcgttccgtttgaaggtctgaaagaacgtccgtttaaattacgcctcagcattatcactggcgatcgtcctgtactggttctgcgcattattcagctggaagcggtgcaggaagatatgtctaatgaatattgtgatctgcttgttgagaaattcaaagacagcaaagtagaaacctttattggtactttcaccgcctga

SEQ ID NO: 29116 - DNA, 135 bp, Zea mays
  Peptide Sequence Number=SeqID_72491
atggcgctccctgcctcgcccatagcccagcagcaagctcgcctctggtactgcgcgcgcgatggagatccctccatggccgcgtccaagatctgtagctctagtgctccaaatgaattcaacgttttacagtag

SEQ ID NO: 29117 - DNA, 1554 bp, Zea mays
  Peptide Sequence Number=SeqID_72492
atggacaaggatcgccagggagctgcacagaagcgccaggcggttgtcaggcttcatgaagccaggccgaagaggcagcgaggggctacgaaggctgctgcccccggcagaggcaaggccccgctggcggcgaagtcggccgtccccgcatccagcagggcgccggaggctgcggctgccgccggtggttccaagaccgcgaaggctgcgccggcgtccggcagggtgccggaggccgtgaagtcggcccgagggttgccgccgccgggcaagcgcgtcgccgacttcgccaccgacattagtgtggacgactatcttgttgggtcggacgaaggccaacttgtcgttgttccgcctgccgcggcgaccacggcggctgccgtgatgccaaaggcaaagggtggtgctcttagtgctagcggcgagatgccggcacttgctgctgtgaggggacgaggcgggcgctgtgtcccgccggctggaggagatgaaggaggcactaagcggctgacttcgccggccgtgcggcgtcgggggcccttacggccgttgtgtctgccgaagtcgagacttcggacgcaacatgccgacgccgtccgggaaaaatcggccgccgacagcaagtgccgcaagctggcggacaaggtggccgtgctggagggggagaaaactgacctccggcgccaattggtggaggagaggagggaggccaatgaggccctcgccaaggcgcaggctacgcaggcggaggccaatttggcgcgggtggagggcggtcttgctagggaacgcgtcgagcagttggaggagcggctccgcgccctgcagagccgtgtggagagggccgaagccacgacgcgcacggaggctgagcggactcgcaaacagcttatggaatcataccatgagctgggcgcgcgcaccgctgagttcgaagtgccggaccgagagcccggacttcgttgcctggagtgggtgcaggaggagttgcaggcgctccccaccatcgtggaggggtttatgtcttacgcttccctggtcacctgcgagggggcgatgagcgcgctctctcgcaaggggtgtcggcactatgaagtcttcgaccaagctgatgaagatttcgagcgcgatatctacaaggtcgaggactctgtagtgaaggaatccgccggagccctctacgaccggatgtggggtccccacggtcgagaggtggtcagggaacgggccgagacggcgaggggtcaggcggcgcgtggtgagagggtggatgactttggggctttgaacagcacgctgcctgacccggagtcgaacccggcggaggccgccctggagccgctctcggagaccgccgaaggcgcccctgaagcccccgcagccgctgcggccggtgaaggcctacccccagaggccgccgaaggcgttcctgatgcccccgcggccgctgcagccggcaaaggcccgctgcctactgctgcgccaaaggttgatcctgcgacggtggcggcggaggcgacggtggaggctcccgcggtggctaggtcttcgtag

SEQ ID NO: 29118 - DNA, 1739 bp, Zea mays
  Peptide Sequence Number=SeqID_72493
accagtcgaccgtcgacccctcactcacgccgcagttatttatacactctgaccctctccgcgagcccagctcttccttccgcccgcggcccgcatggccccccaccgcagacgacctcgcggggccgccagcgccgccgcaccctcctcgcccacctccgccgccgccgccatcgcgggctcctgccgagaccccgaccccgacgaaccacgcggcggcgatctcgtcgccgctgctgcagccccatcccgcgcccggcgcagccgcggacgcgccgctctcgcggtggctgcgccggctcgaggcgttcctgtcggcggcggggctggcggcgtcgacgccgctgggcgtggcggcggccgcctcggcgctggccgtcgtgggcctggcgctgccggccgccgccgtcgcgctctccccgtgccgcggcggcgccgccgcatgcggcgacttcgaggtcgaggtgttcgaggtctgcgtcctgctctcgcaggcggccgccgcggccgttgcgctcgcctgcgtctcgcgcaaggtggccgtgcacggcctccgcaggttcctcttcgtcgacccggacctcggcatgcggatccgcttccagaaggagtacgtcgccaggatccaggtcaaggcgcgtgttaggcgatttgggggggtctgggacaggaaaatatacgtacagcatttcattggctttgttgctacagctacgattctggtgcattttgatttcctgctgacaagtgtgtgtttacttgcaaccccttgccaaatgccggcaccaccgcaggacttcttccgcactctgacgtggtggatagtgccgtgcctagccgtgaaggtgacccgggaggtctcccgcttcgcgcacatcctgcagcaggggtcgtcgtcggcctggacctggagggcctgcgcggtgctgttcgcgtccgtggcgtcgtggacgtacctgacgacgatcatcctgtcgtcctgcatgctcttcaacctggtgtgcagcctgcaggtcatccacttcgacgactacggcaagctgctggagcaggacgcggacccgcttgtgtacctcaaggagcacctgcagctccgccacaacctgtccaagatcagccacaggttccgcgtgttcctcctcctgctcttcctctccgtcaccgccggccagttcgccatcctcttcaagaccacggcgtacagcgggccgatcaacttcaccaacggaggggacatcgctgtgtcttcggtggttcaggtggtcggcctcgtcctctgcctgcacgccgctgccaagatctcccaccgagctcagaacatcgctgcgctggctagccggtggcacgcgctggcgacgtgctctaccgactccacctacgtgaccaccccgaacagttccgggaacctcgcgcctttccccgcgcacctgttcctgagagactactcggggagtgacctggagtccctggacagcgcgtcggttcagggcagctcccacggcacggcccagctggcctcctacatgtcctcgtaccacaagagggagtcgcttgtgctgtacctgctggccaacccaggcggcatcacgatatttggctggatcgtcgaccgggcgttcctgaacaccatcctgatgctcgagctgacccttgtgctcttcgtgcttagcaagaccgttgtgatcccggccaagacactgccagttgaagagaatttctcccggtacatatactactaa

SEQ ID NO: 29119 - DNA, 798 bp, Zea mays
  Peptide Sequence Number=SeqID_72494
atgccgccggcagcctgctgccgggcgggcttcagctcggccgccttgttcttcttgaagcaaaatcgccccgccgccaccttccttgggtcgcgcggacatccggcggcgccctccggtgacggcgaggaaagaggtgagcttttgccacctgaggattctttagatatatctcgtaaagtgaaagaaatgtattgttatacttgttcagacattgtcaaggagttcaagaagcatgacaggaagcctgataagtacatcaaacattggtcagctgttaaaccaaagactggggtcccatatacaattgacattggatatgaacgctttcttgggccagaggtcagaattaggtgtgcatctctaatcatttaccaacaaatgcagatcttcttcaatcctgagatttactctgccgatttctccactcctttgcccgagttgattgacaactgtgttcagtctgcaccaattgacacaaggagagctctgtacaagaatatagtattatctggtggatctaccatgtttaaagacttccacaagagactccaaactgatataaagaagatagtggatgaccgtgttgctgcgactaatgcccgtcatcgtgtggaagtgagacctattgaagtcaacgtggttgcccatccaatacagagttacgcggtttggttcggggggtcactagctgcatctaaccctgacttctttgagttttgccacacaaaggaggactacgaggaacatggagccagcatctgcagaacaagccccgttttcaaaggaatgtactga

SEQ ID NO: 29120 - DNA, 342 bp, Zea mays
  Peptide Sequence Number=SeqID_72495
atgccgctgttgctgggctggggtggggcacgatgcttccccgtgcggcgcagaggacgtccgtggcttcaccgcgttcgcgggggtgagtgcgtgggctcgacgggtccgaacggcggggcactgtacgtcccggccctccgcacgcatggtttccgtgaggtggtggccgatggctaccgcggcctcactggtgccacgctcgctgtcctcgctacgcgggcatggggaaactcgggtcgatgccgactgttcaacgaaagatcaacatcgctgcggatccactacgcgtcgtggccatctcaccccatcgtccctaaccattggatatcggcgatctaa

SEQ ID NO: 29121 - DNA, 177 bp, Zea mays
  Peptide Sequence Number=SeqID_72496
atgccagcaatcccgcgcacgagcagaaagggtcacggcgcgctgctgagggagggcaccggcgccatggacgccaggacgctgctggcaccccattggtcaggattgggcggcgagcacgcagtggacaagccagaggtggccgagcactggccatgggcgacggtggcggactga

SEQ ID NO: 29122 - DNA, 444 bp, Zea mays
  Peptide Sequence Number=SeqID_72497
atggccccgccggtgacgtgcccatccgagcttcaagggccggatccaagcgttaccgagagcagacgagggcgaaatgtggggcgcggacatgaagggagcataccagtgcatagcgtggcgataccccatccgcggatcggtgcggtcccccgacgaagcatcttcaccggcgagcaattgaccccaggccccatcggcattgtggacgatgaacgacggaggcggcttcccccagtccctctctcctcgctttctatcactgctgtccgcgacaagcacacagagctttactggtgtggctcagggtcggatttggtgtggccaagggatgcgaggtgcgcgcgacttggggaagaaccaggggcctgtcctcttttgaagctgcgacgaggtggacctgtggttagcgcgattgccgggcgacgcaacaacctggcctaa

SEQ ID NO: 29123 - DNA, 1251 bp, Zea mays
  Peptide Sequence Number=SeqID_72498
atgtttgcctaccggctaccgcatagatgggtagcagcaactaggaagccattatttctctctgatacagaaacaaagggggatggaagcagggtggagatcgagacgaaccttgagtgtcttgtcaaaatgttcgggtgtacagacgaagaccaaaccgttggtggtagagtggccgccactggtcactgcgttggtgatcaagatcagaatgtcacaggccagcaaggcgctcatgctgtccgtcgctctccccgtgttgaaaacaagagaaagcaattagataaaaatgaattgaaggaaaggaagaagagattaaggttgaaagtccctcctatacaagacgccgaaagtgatgatgaaaaagacacagagtttgttcctggtggcgatgggtctggtgatgacaatgttggtattgttggtggagatgaaaataagggtataactaagacacgagctattcgatgctcacctgggaagtttataaagcttgtgaattctctatctgatgaattgaaaagtcaagtggttgctaaggggtttggcggcctgcttagattcaagccacatttattgtcgagaaagttgcttagctggctgatgcggaagcttaacccagaaacaatgaaattagagattggtggtgggaaagagattcaaatcaccgaacacagtgtttggtgtgttttgcagttaccaaacgttggcagtgatccgccccccatgtctgatgcagatgctcgttccttgcgggacgagctgggggagcaaatttgtggcaaatcttatagacggatatctggtatcaatatatctgttatcactgatagattgcagaagaggactctcaatggggagctgggcctgagagcctttttcatggcagcatttcagtgtcttctattctccaatactgacactcgcatcagaattgatgatgtgaagtacactcaggacatccagaacatgggcaacaagaactggtgcaaagctgtagtagacaggctgagcatagctgctcgtctttatagaaaggattttgcggagaaaggcattaacgcacccatcagtggatgcgggatctttgtagctatgctttatgtcgacaacctgcaacatggattagacacaagtcctttttcaatccctcgatgtgctttcttggactccaagatgattgatgctatagcaaatatggatctcaggggagatgttcctcctgggaccactgagtttggacacctcagg

SEQ ID NO: 29124 - DNA, 207 bp, Zea mays
  Peptide Sequence Number=SeqID_72499
atggctggaacacaccttggcactcaagactatgatcacatgtggaagaacttaaggagcaaaaactgtaatcttgctgacggagagtacatcctcgtgccggagcaaggagctgctcaggaggtagccccagatccagcaccagagccagcaccagaggacctgcctgccactgctttggaaggcaagccccggttttatgcataa

SEQ ID NO: 29125 - DNA, 150 bp, Zea mays
  Peptide Sequence Number=SeqID_72500
atgacctgtccaccgtcgcgcgcgggtggttcgctgaacgccataggcgggtccaaactcgacgccgtctccatctgcgcctccctcgccaacgtgttcgccggcttcaaccactggatccgccctcaaaaggatctggatgtcgcctag

SEQ ID NO: 29126 - DNA, 522 bp, Zea mays
  Peptide Sequence Number=SeqID_72501
atgccttcgcactctcctcatgcattgcgtccttccgccttccgagcccctggatggggagcgcccgcgttgccttcgtctcgttgtgggaggtgcgcaacctcgtggaggttggcacctttcagccatcgctcgacttcaaggattttcatcaggcagcccggctgcatcccctcacaatggtcacccaagacggtgaccaccagttcgatggtggggagaagcaagccgggctgcggcctctgccttgccctcagcttcaaggatcttcatcatccttgctggagcggagggcgagctgagccggagctctacctcccgtacgggccggcgggccacctcctccttcagcattcaggggagagggcgctcaccggcctagcggagggggcgaacttcgacaacgcggggccgatcggccgcaagcgtcgtcagctccaacatgcctggttcgctggctcagctggctctagcacagcttccggtgccacctcccaccgctgggcggagtgtggctattga

SEQ ID NO: 29127 - DNA, 201 bp, Zea mays
  Peptide Sequence Number=SeqID_72502
atgccgcgccttctcgactacggaaccggtgccgcgactcaagacaaccctgtgcatggcccaacagtaccaaccaagcacatcggtcacagcccagatgggtcggcgcgagacgggacacaaaggggggagaacagtaaaggggaacccacggccttcgtgttgtcctgcgcccagggcggatggatgcgcttgcagtag

SEQ ID NO: 29128 - DNA, 306 bp, Zea mays
  Peptide Sequence Number=SeqID_72503
atgctggacgcgttgaagtcgaaagggtgcgcccccctgatacggttgcatgccgcctgtatggcgcttgcattacgcgtgggacccagcccccgtgtcgtagggggaggaccctggagcgtgttggagaatactcagttcgtgacggctgaaagggaaatccaaggggccgcttcggtctggggcaccggactgtccggtggtgcaccggacagtgtccggtggtgcaccggacagtgtccggtgcgccaggccgcctcggccgaagaggccgctctcgggtttttctccggcgacttcggctaa

SEQ ID NO: 29129 - DNA, 924 bp, Zea mays
  Peptide Sequence Number=SeqID_72504
atggagcatcgtcccgggttggaaaggttgctggagactacccatctggagcttgatggtcgaggtcgagtccgagccctgggtcaggtgaggcggagaccgtcttctgaggccgaggctgtgtccgagccctggggtcgggcgaggcggagtccgtcgtccagcgtcgaggttgagcccgagccttggggtcgggcgaggcggagaccgtctttcgaggccgaggccatgttcgagccctggggtcgggcgaggcggagactgtctttcgaggccgaggctgtgtccgagccctggggtcggacgaggcggagtccgtcgtccagcgtcgaggttgagcccgagccctggggtcgggcgaggcggagcttcctatggcgctcgaggctggacttagctgctgtcagcctcactctatcgagtggcatagcagtcggagcgacgcaggcggcgctgttttcttgtcagggcaggcgacacctttggcaggcgaagcgggcgacgcttcacctccgccatgatgaccgcgtcaaaaaagtgaccgggaaaggggatactccgaaagggatccttctctgcgaaggaagcgggccccgagccctcctactgatcaggggttcgaaggctggcccctcggaagggttcgacagccaccctagagcactcgggctcctcacccactactggtcagaggttcgaaggctggcccctcagaagggttcgacagccgcctcaggccactcgggctccgcgcccactactgatcaggggttcgaaggctggccccccgaagggttcgacagccgcctcagaacacgcagagcgagggatgactctgggtacgtccaatacatggctgaggctcgggctatgctcccgaggtaccctaggacatttccgagaccagcaggagcgattctgtaa

SEQ ID NO: 29130 - DNA, 396 bp, Zea mays
  Peptide Sequence Number=SeqID_72505
atgggcaagaacaacaaacgcaagcgcgagccaactcctccatcagaggactttggcgactcagaatactcagaggaggagttctcctctgagtccgaggggtctccagctcccgtctctcccccagcgtcgtccgatgactcagacgactctcaggggattgtcgcggaggtctggacttacatccgggccgtcgagcgctccgggctcgaaggctcggatgagtcggagtgctcctcggacgaggaggactcgcccgaggaggacgacaaaggtgacgacgacgatgacagcgacgatggtgacggcggcggcagcaggggcggcgacggcggcagcagcaggggcagcggcggcggcggcagcagcaagggcagcaacaaggccagtggctga

SEQ ID NO: 29131 - DNA, 255 bp, Zea mays
  Peptide Sequence Number=SeqID_72506
atggatcctccctgtgttgcgccctcggcgtgcgacgtattgcagcagcaacagcgacaccctccgctgcgtcgcactcgccagatcgggtctaacgccgtcgatctgcgcagcgtctgcgcgtcgttgttgaagtccgcgccctccgtcgatgtcgcgcctcgtgctatgcctatgcgacgcaatgctagccggtggacagcacatgcgactcaccgatccggccaggttgctgttgtttcatttacgatttag

SEQ ID NO: 29132 - DNA, 177 bp, Zea mays
  Peptide Sequence Number=SeqID_72507
atgccagcaatcccgcgcacgagcagaaagggtcgcggcgcgctgttgagggagggcaccagcgccatggacgccaggacgctgctggcaccccattggtcaggattgggcggcgagcacgcagtggacaagccagaggtggccgagcactggccatgggcgacggtggcggactga

SEQ ID NO: 29133 - DNA, 771 bp, Zea mays
  Peptide Sequence Number=SeqID_72508
atggacgccaccgcacgcccggccatcgtcatcgacaacggcacagggtatagcaaacttggattttctgggaactcggagccgtctttcactctccccactgtagtagctgcgaatgaatcttttctagaccagacagagctgttgagtagtgcaaactggatagcacagtataatgcaggcatcatggctgatcttgacttttttattggagatgaggctttatcgcggcttaggtctagtgggctgtacactttaagaaggccaatccgtcatggtcaggttcatgactgggatacaatggagagattttggcagcaatgtattttcaattatctacgttgcaatcccgaagagcattatttccttcttacagatagtcctgtcagtacacctgaaagtcgtgaatgtacaggagaaataatgttcgaaaccttcaatgtccctggactatatatttccgttcaatctgttctcagcctttctgctggatatgcctatctgaaaagtatttctgatgacgattcagatactgtgtctgatatgacaggggtagtagttgatattggggatggagctccacaaattgtgccagttgtaaatggctatgtaatcgggagtagcataaagtcttttcctttctccggaagtgatgtaacccagtttgtttcacagcttttacagatgcaaaaatttctcatattgttcataaatagggctgtatctattgttggaatgtgtgcccataccctaatcaggggttgggagtga

SEQ ID NO: 29134 - DNA, 504 bp, Zea mays
  Peptide Sequence Number=SeqID_72509
atgaagctgctgaagtatttgctgaatattgaagagcctgaagagagatttggtgctctgcaactgctttctctcccggagatgggcgtgaagctaaggatgaagatgctctatacacgaggagacggattttatggatgcgagaaagatgagcgacccggtgatcatccaaaggctaaccttgctgaaggagatgatcgaggaagaatacatgaagcggttcgcaattttaaagatgacacgtttaattctggagtctctgatttggacaatcctaagaaaatggttctttcagagtataaagtgcctaccagtgaagacatagcttacatgcatcaatacattgattgggatgattgcattgctctaagtggtgaacccttcatccaagctttaactatgctagctcctaagggttgtgttgtagcacctctcaattttgttgttcaaattctccacttgtttttgagttcattattctccttcaaaaagctcttcaggtga

SEQ ID NO: 29135 - DNA, 1461 bp, Zea mays
  Peptide Sequence Number=SeqID_72510
atgacgacggcggttctcagccccctacggaagcaaggagacgtcagcaaggacccgacagccccgacaactgtgcttctacagggctcaagcgctcctccgacggtcacgacatcacatgaacagggcactaacacctctccgacagccatatcggcatggccctcgtacgagaaggtggccgcacgggaggacgagctgacggacagactctctctccctccctcgcgaacgcttgtaaccccctactgcaagcgcatccgccctgggcgcaggataacacgagccgtgcgtaacctcgcctcccagcgccagggtaaaccggccccagcgagggacgcgcctcaagcggagcccgacagaccggcagctgaaacccttgccaactggctcctggacatgaagcccgccgctgctgcagtcgccaaggtggtggctggtgactcgcctccctctgctgctagtcctgctcctgcgccagcagtggccaacagcaatgggacaccacagaagccgcctcctattcctgccgccgccttcgacatgcccaagccaaacctccggggccttaacaagcccaagtgcatcctgtgtggtaacatcgcccgctcccggtgcccattccagtgttgcaagagctgctgctacaaggctcagaatccttgccacatccatgcgtcaaggctggctgccttgcaaaagcttccccagcactttctgaagtttctccaaacaaagaaatcagttaccaaaaaggacgttgcgggtataaacaagtggaggtttatgaagctaaaggaacatatgcaaggagataccgacgctgaaaacgaagcgtacgagaggtatacgcagaacgtcgggttactggaggaagcattctgtcccatggaagaagatgctgatgttgatcctgaggctgaagcaacttcttcttcagaggaagaaaggatggacctgttggtttcggcggcaaaggcgaggttgaagtcggataacgaagctgccaatagcttcagggagagggttgccactatcttggaccagaagctgaaggacctgcgcgggagccaaagcgccagtgagggtgacgaaccgtctggcccaagtctggacgatcgtctaaccccgaccccgatgaagttcagcacagcgcagaagatggggagagccacggaactgaacgagctgctgggtaagctgacaggagcacggagcgaggacgatctgaagccttgccgtgatcttgccgagcagctgtttgggaaggaggacggctcctctgttggcaattcgaacagagtggatacggagactgagccgggcgatcaggagtcagctgcagcagtagcacggcgctattccgtcccaacgctgtgcagcaggatggaggtgggtgaggacttcgcctcagagatgaacgatgaattctgctctttgactcaggtggcccagctatga

SEQ ID NO: 29136 - DNA, 201 bp, Zea mays
  Peptide Sequence Number=SeqID_72511
atggttaaccttgcaagcatccctcgcggctcagttcagaaggaagcaaatcatacacgagagacgctaggtgctagccgagtaacggacaccattcctaacgctacaacggaaacgagacggtggtcaagctcaggtcacgcccatgaagccaagttgaacagatcgacgaaccaaagccggaggaagcagataaactag

SEQ ID NO: 29137 - DNA, 612 bp, Zea mays
  Peptide Sequence Number=SeqID_72512
atgtcaccaggccgttgggttccgaccgttggagctctgacaattggggccaccggacagtccggtggtgcactggacagctctaactacatgcagtcactctcgaccagcgccgaggatggagcggaatggctggtgaagaagttgaagggcaagatgcagaagccactggtggacctgcttagcacaacctccctgtgggcgaggtcacctcacgtggaggtggacaggatcaagaccaaggtgctcgtctcggctagcgtcaccattgtcaaggccgccgctgccaaggtctacttcactacgaggatcaagtggtcgtgcaacgggatgcctatgatgtcgtcaggggcggcatcaccgtcgacgagtttgctgcacaccaagatggacaaatggttgctttcagttgcaggaataaatctacagtcattagctacctgggagatctgtgtgcactgtacatcatgtgttttgtgcttcgttgtgagaatgtgtaacacacagaaggattcagaatgtgtgcccattgcatatgatatatgtctcgaatacagtacatccgaagcagagctcgagttagctcaaacaatctatcagattttaaactga

SEQ ID NO: 29138 - DNA, 279 bp, Zea mays
  Peptide Sequence Number=SeqID_72513
atggcctccaccatccccttcgtgggagccgcatccatggtcgggccagcctccctcatcatcggcccctactcagtatcatacctcctccccactcccgcctctgcctccttcagtcgtgtcatctccggcgagctctacaccccatcccacgccgcactcgccgggctcgatgccttcgaggcaagcgcctcgcctcctgatcatcaaactcgttgttccctgtccactggtttggttttcacatttcctatgacttgccactcatatttcctataa

SEQ ID NO: 29139 - DNA, 363 bp, Zea mays
  Peptide Sequence Number=SeqID_72514
atggcagtttgggccttagagtgcgaccctctactgaagaagttagtgttttggttgcctcgattggagaaattcccgatgatgaacggcaagtccactttgagaaaaagaaaaagagacgtcttcggcaagtatctagtttggatcagggtgctggtccttcggttcctgccgttgaggaggttcccgtgcctgaatttactggcgctgaccccaatgggtgtggcattggtggacgggctggctagtcagctgaggtcgcgaggcatggctcggcagatttctgttcttgaagaaaaacattctcaaggccaggctgaactggtccagcggtgttctgattttgaggaaaagtattcctaa

SEQ ID NO: 29140 - DNA, 777 bp, Zea mays
  Peptide Sequence Number=SeqID_72515
atgggccaagtggaaacaaggatcacaaaactagtccgtctatgctgcaaaagttgctccctaaacatggatacagtgcgcgtcagctttggacaaaagtacagcccggtcgccttcctaatgctttcagagaatcgaccgcccccaccgagctttgacgacctgcgaaagcagtggctactggctaggctagcagtcggagttcagcgccaaactaatccatgccgccaccgccccgtgtcctggcaccacgcgagtcacgagcgtccggcgcatggggccgagcgggctagcagcaagagatggatccagggccggatcgtcctccagcgtcttccgttccacggagcgcctgagctcagctcactggcgcttgcttctctgcagtatatagtgacgttgggtaccttttctgttttggatatcgaggtcacagtcaggctcggacgagtcggaagtccgcctgaggtcgcgatcgagctcgttttaggattcgaagacgtgcgcaccatagttgaaggagtggcctcctacgtgatttgcgaggagcagccctgcgtagggttggtatgtgcattaaatgcttctgtctcttgtggacttcggctgagtcttgccctgggtttgtctttcttacccgagacaggctttggtgagacggagattgccgttctggagagaagggacctcggccgggacgaccggacgagggttatcccgagaacacatcctattcgagggcaggctggggcgaggcagagttatggtgacccctga

SEQ ID NO: 29141 - DNA, 639 bp, Zea mays
  Peptide Sequence Number=SeqID_72516
atgcctggagtagaatccacggctcacggaagccagtttacatacttcctcactgctccaatgcaagccttctgccaactagcgggaataacttctgacatagacactgatacatacgcaaatgcagagaacatacttttctctgctttggaagaatatgaaggaatactctgcacttctgttggattaaacaatgtctgggggcaaattttaccagacccatttctcagacggctgattctcagtttaacccccaatccatctcatttctaccatttatgggtctcaggactagaaaaaaataagaaaaaagcaaaaagaaatgggcataaacatgttaaaaatcactgtcaactgcaaattgtttatgttctggggaagtatgatgccaaaaaaaaagaagcaatacaacaacaacaaacacttttccctagcaagttaaggtttattttctgccgggcagtgcttttctatttccactcagatgagcacgaatatctaccgacctgcttacctagtcttccagagtcagtctccccgcatgcagaggccataagaactcctatcctttcgcttgcagaaaaccttgtcgtcagcgaccggtttgacttccgagactccacacgcaacaagaaatga

SEQ ID NO: 29142 - DNA, 63 bp, Zea mays
  Peptide Sequence Number=SeqID_72517
atggggggcccattcgtccccgtctcggacagtgcagacgcgcaggcgcaggcgcaggtgtag

SEQ ID NO: 29143 - DNA, 342 bp, Zea mays
  Peptide Sequence Number=SeqID_72518
atgaatcgaggttcgcctgatcgatcgctggcctggcgcgacgacaacgactacgactacgccgtgaacctaaaagatctcgacaccgccgacggcgacaccgagctgagcagagctgatgccgtggcccggggaccatcgctgcggtgctgcctgccgcgcccgcgctcccgcgcggaatcacacgccacgccagggccccccgaccgatcctttgtccgtctccgtcagaagcagccgtgtgagaaggacccgagcccgaggcccgaggggccggacatcaacttgctgctggctgccgctgcggcgcggtacggcgccgagccgccgatgatgccgtga

SEQ ID NO: 29144 - DNA, 726 bp, Zea mays
  Peptide Sequence Number=SeqID_72519
atgaatttagaccgtccacgcgtgatccaaccgcgctccgcccctgaccccaacccgctcattcccctccccatcctctctttctccctcgcgcttgactcccctgccaccccttcccgtctccaccccgacgccgaccgcactccgctccccgtccaccatcccagcgtgatggctgggaggaccgcgcctgcccccctcccctccttctctctcacgccctactccctcgccgcccttcatcccagatctcgtcatgggcgctaccatgaccaacagttcggtggagcaggcgccgcacgctacgccatgggacggagcccgtccccacccgacaccgaccacctccaccccgagcccgtccgagaaactgcattggagaatggctacacaaagatcatgctgccaacatgtgcttctggaatagcatgccctatgctatctgcaactataaagcttccagtgcctcttgtaccgatcatcagcaagggagtgctagaggaggaggttatggtgagttttgtcgcgactaatggtgagcccacgactacggccacatcaaagctggtctggtggaacctcgtggagcagatgacgatgacgccgacatcctgcacctctgctgcgacgctgccgaccaggacgcgggcccctccgtcgcgcgcgctctacaagtctggatccatcatcgtgctcggcaagactgacttccttaggccagacatg

SEQ ID NO: 29145 - DNA, 348 bp, Zea mays
  Peptide Sequence Number=SeqID_72520
atggcccccaagagagcgactttgaagactgccacttccatcgacgatgcagcaaagacggctcttctggctgaaaagaatggcaaggctcccattatggacaacatccctcaggagtccttcgatgatgaggccgtcaacagcaaaaggcaacgccatgacaatctgcctacgccggagggcaccgcgcgcacctgcagctctaagggatgccacccaccgtacagtctggtgcacggtttggccgaactcaccgccctcaggttttcagcctacgtcgactataattcactggacggtctgcgcgaggcgccgaacagtccggtgtaccagctgcgcaacgactag

SEQ ID NO: 29146 - DNA, 696 bp, Zea mays
  Peptide Sequence Number=SeqID_72521
atgggtaacccatacccacatgggtatgggttttgcccacctgaatctttgtttaccattcttcctgtgcttatagttactttggaactttattcttacatggtttaccagctctgttacgcacttgcacaacctttttattggggtaatgatggcaaaaagaggggtggtggctttacaaaattatgcagtctttcaccggcacttcaagagtttgtcggcgcctctgagttagccaggacagaggttgtcaagaagctttgggcatatattcgagaaaataatcttcaagaccaaaacaataggaggaagattttgccggatgagagattgaagaagatcttcaatgtcaattccattgatatgtttcaaatgaataaagctttgaccaagcatatctggccattgaattctgaggttctagctccaaagtacttatttgactatgatttgccaggtcctgtctctcctgatagatcaacacccaaagagaagccacaaaagagagacaggagtgaaggaaagaagcaaaagggtggctcttcaggagctggatctggttttctcgtgccccttcaactttcggatgatttagtaaaatttatcggcactggtgagagcatgttatcacgatctgatgtcgtgaagaaaatgtgggattacataaaagggaacaacctgcagcctcatgtctag

SEQ ID NO: 29147 - DNA, 183 bp, Zea mays
  Peptide Sequence Number=SeqID_72522
atggccaatatgaattatttggagtttatagtcattgagactgatcctgtggaaatagtagatccttctgaccggaggaaaataatctgcgatgagaagctgaaggacctatttggagtggaaacattcaccggctttactgtttcgaagctgcttgcccctcattttaccaagacgaagtag

SEQ ID NO: 29148 - DNA, 810 bp, Zea mays
  Peptide Sequence Number=SeqID_72523
atgcccaaacccggcacgcacagggaaaaatcgtgccgggccggcccgttggcccgcaagcagggcactggcgcactgcggcagtcggtcgggtcggtggctcggtgccttactggcttactgcctcggcggacggcgagccgggacaagcagcgccgcagcggcactgcgacaggccggcaacggagtgcaggactgcagtctgcaggagcaaccgagcaggccggctgggcgggcgagcagcggagcgccggtcgccagagcgggaatgccgtctgccgagcagccgagcagagcaccgcgccgccgccagagatgaggagcaggcgagcagcccgctgccgagcgatggtcaataccaggcggggtggtggaattgatttacctcccaatcgacacactcggaggatatttagacaaccccagccacaaccagtagagatggatcctccaccaccgcctccaccggcaggagttgacccactggttgcagctcagatgaggatgatgcaacagatggcggacactatgacagatatgcgtgctcagatgcagcaggaacgccaggagatgcgccaagagcgggaggatatacgtcgagagctgcgccaagaacgagaagagatacgtcaggaaaggagggcgcaacaacagcagctgcaacagcaaatgcaacagcaacagcaacaagtaccactgcctccaccaccaccaccagttccaccccgtgataagcatagggagttcatgagtcataagccactacattcgctagctcacctgatccactggacgcggatgatgggctga

SEQ ID NO: 29149 - DNA, 1052 bp, Zea mays
  Peptide Sequence Number=SeqID_72524
atggacatgccaatcatgcacgacagcgaccggtacgagctcgtgcgcgacatcggctccggcaactttcggcgttgcccgcctcatgcgcgaccgccgcaccagcgaactcgtcgccgtcaagttattttaacaccgacccatcttgctattgtcatggaatatgcctctggcggtgagctttttgagaggatatgtaagaacgtgcgattcagtgaagatgaggctcgctacttcttccagcagcttatttcaggagtaagctactgccattcaatgaacaacccgagagtcgtcgacattggcgacgaccatgaggtccccatgtttgacgatggacagcgcggtgcagccgctctggaccacgtccaagcggcggctgcgccggagcttgccagttcgaaactggcagtcgccaagtttcttctcgtcgtcggtgagcgacgccaacgcgagcgcctcgtgctagtggtgtttgttcggggtttccaaccgaagtccactgttggaacacctgcttatattgcacctgaagttttgttgaaaaaagaatatgatggcaagattgctgacgtttggtcatgtggtgtaaccctctatgtaatggttgttggcgcatatccttttgaagatccagaagagcctaagaacttccgcaagacaattcagcgtatcttgaatgttcagtacgcaattccagacaacgtgaacatatctccagagtgcaggcatctaatttcgaggatttttgttggcgatcctgctacgcgaataacaatccctgaaatccggaatcatagttggttcctgaagaaccttcctgctgatctgatggatgatgatagcatgagcaaccaatatgaggagcctgaccagccaatgcagaccatggatcagatcatgcagattttaacagaggccaccataccacctgcctgttctcgcagtataaatgtcctagctgatggactggacatggatgacgacatggatgatcttgattccgactcagatcttgatgttgacagcagcggtgagattgtgtacgcaat

SEQ ID NO: 29150 - DNA, 348 bp, Zea mays
  Peptide Sequence Number=SeqID_72525
atggagctttctcttttttactcccacagcttcagcttcggcttggtcatcctgtatcaatatgctaacgtgtccggcagagaggagccagagccttatgtacatgccaacgtggctgtcggagaggtgctagagccctgtgtacgcggtgttgtggccgttggaggatcgtttgagccctgtagaagcacagctgtcggggctgtcgggaccttgctgacgtctccttgcttccgtaaggggctgagagccaccgtcgtcatggacgtacgcggggagccatcattacttgttaccggggtgagcctggatgggacaccggtcttgttcccccgtagcctgagctag

SEQ ID NO: 29151 - DNA, 928 bp, Zea mays
  Peptide Sequence Number=SeqID_72526
atgcccgtgcgtcagcttctgtcgcacatcgccagcacgatcggtcaagtactactcctcggtttatctcataaccccctcaccttccatcctcgcgcaccttcatccttgcggatcccgcactccctcgggcgctccctccgcgcccgcccgcagatctcccatcgacgtcgatgctccgcgattaaggggattcgaggccaacaggtaataggccttgaactggagctgcgggaagaccgcgcggacgaggtccccgaggcccgggtcggagacgaggaagtggaagaagacgctctcggggcacctggcgtgctgcaccaccgggtggactgcggtgacagagcccctcaggtactcctcgtcgagcgtaatcgcgatgtggacgagccatgggtcgcagacattggcggcggtgccattgtccgcggcggcgccgcagtcggcggcatttcggaacggcggggcacggcggaaggcgacccccctggcgcccctgcgatatgtcccgggaagcggacgctgccgtcgaactacgacgaccggatggcctcggcgggtgggaaggactggagcgacggcgacagcaccaccaccaccatggcgacggataagaagccggacaggtgcaccacccacagcatcgcgctccgccggctcggccaccgcttcctcgcgccgggtctcccgagctgcggcagccgctgctgcttcgaccacctcaccaagacgttgtgcaggtgcgcgatggcgtccagcggtggcgcgaccaggcttgggttggaaacaagggagaacacacggacagcgcgcaggcacccccacctcctggacctcaattggatcgcgtcgcgctctcctagaggttggaggatcgacgcgtggagttggggagaagcaagcatgaatccatgcgaggtcaggcgag

SEQ ID NO: 29152 - DNA, 1443 bp, Zea mays
  Peptide Sequence Number=SeqID_72527
atgctctacaagtactgtgaagaacgaggtgttgcccacaaacggatcagcaaactcatcgttgccactggtgctgcagaggttccaaagctaaacatgcttctcagaaatgccaaagaaaacggggtggatgatcttcagttgatggagggttctaaagctatggagatggaacctgagcttcgatgtcttaaagctttactatcacctagtactgggataattgactctcattcactcatgctctcccttttggctgatgctgaaaacttgggaacaactatatcatataacacatcagttaccagtgggcatgttggatccaatggccttgaactccatgtttgtgaaagcaaagagctgcagaattatcatgtagggtctcatgtgaacgcacaacttgtttttgcttccgaagcttgtgataaactcagcagatttggtccagatgttgaatggatatctgatggtggaaaggaccatgtgtcatgttttctgaacaaaatctgtagcaacttagaagtattttccaaatctcaaggatgggtctttggaacctggttattctgggatccgaccaaagctttctggtcctggacaacctccttcagatttacctcgcctgacctcgcatggattcatgcttgcttctccccaactccacgcgtcgatcctccaacctctaggagagcgcgacgcgatccaattgaggtccaggaggtgggggtgcctgcgcgctgtccgtgtgttctcccttgtttccaacccaagcctggtcgcgccaccgctggacgccatcgcgcacctgcacaacgtcttggtgaggtggtcgaagcagcagcggctgccgcagctcgggagacccggcgcgaggaagcggtggccgagccggcggagcgcgatgctgtgggtggtgcacctgtccggcttcttatccgtcgccatggtggtggtggtgctgtcgccgtcgctccagtccttcccacccgccgaggccatccggtcgtcgtagttcgacggcagcgtccgcttcccgggacatatcgcaggggcgccaggggggtcgccttccgccgtgccccgccgttccgaaatgccgccgactgcggcgccgccgcggacaatggcaccgccgccaatgtctgcgacccatggctcgtccacatcgcgattacgctcgacgaggagtacctgaggggctctgtcaccgcagtccacccggtggtgcagcacgccaggtgccccgagagcgtcttcttccacttcctcgtctccgacccgggcctcggggacctcgtccgcgcggtcttcccgcagctccagttcaaggcctattacctgttggcctcgaatccccttaatcgcggagcatcgacgtcgatgggagatctgcgggcgggcgcggagggagcgcccgagggagtgcgggatccgcaaggatga

SEQ ID NO: 29153 - DNA, 267 bp, Zea mays
  Peptide Sequence Number=SeqID_72528
atgaccgccccgcgagccacccgtcccatcgcattaactccgcggcagggcaggcgacacctttggcaggcgaagcgggcgacgtttcacatttgccatgatgaccgcgtcaaaaaagggaccaggaaaggggatatttcgaaagggatccttctccacgaaggaagcgggccccgagccctcctactgatcaggggttcgaaggctggcccctcggaagggttcgacagccgccccagagcactcgggcttcaagctcattactga

SEQ ID NO: 29154 - DNA, 252 bp, Zea mays
  Peptide Sequence Number=SeqID_72529
atgggacgacctcgtcacaggccttcgtccggcgacgcgtgggacgaaggcgaggttggcgaaggcatcgagcgaagggtggcgtcttcgccttcgccccaacacttctccctatttgtctctaaaagtgaagtgattttattgtcaaagagcttaaagcttacccttgtaatgacgataagctacctttgtttcaaaggtggatggtccttaagtctctttgaaatccttaagggtaaatgcttaaaatga

SEQ ID NO: 29155 - DNA, 129 bp, Zea mays
  Peptide Sequence Number=SeqID_72530
atggcgggcggaaatgcgctcgccggagctaaggagagagggctggccggtgaagagatatggagccaggaaatccggtctgtctccatacccaaacccgaggcaaatccaaggttttgtcgtgtctag

SEQ ID NO: 29156 - DNA, 129 bp, Zea mays
  Peptide Sequence Number=SeqID_72531
atggcgggcggaaatgcgctcgccggagctaaggagagggggctggccggtgaagatatatggagccaggaaatccggtttgtctccctccccaaacccaaggcaaatccaaggttttgtcgtgtctag

SEQ ID NO: 29157 - DNA, 837 bp, Zea mays
  Peptide Sequence Number=SeqID_72532
atgcgggggaaggcgaactgctgctgcctggccagggtgcagcattccgtcctctattcgggcgaccatggccgaccgcaccagagggtcgcccaacacgtcgtacgccacgagggcggtactcgtgttctgagacggtcccgttctcgttcttgcggcgaggacaggagcgaggacctgccggtgcgctttggggcggccgccgcttgctggtgcggtgttggtggacaggtggccgctggagaaggtttctccaccgacggcactgtcagtgccacctgcgctccgggcctccggctctttggctttaatgtctggttctcgtccctcacgaggggacatgaacaagggccttccagcggcagtgttcgccctggggccattgctactgttgtctcgccgtccgagacggaggtcgttgccgcgctgagtccctcggctcggtcggccttgccgcttaaggcttcccttgctcagttaaagaaccctcggctgctctgcgatgagccggaggcagcggtgtcagcgtggatagaggcagagtcggctcgagaagaagcttcgtcggcccaggagcgcgtggcttccctggccgaggaggtgcagcggtggcagttggagcttggccaggtcgtccgctggcgagaccaatcccggagtcaggctaccgaggccatgagccgagctgatgtcctcaggggacagctagctgaggctacggagcagccggtcgaggtggagatccttccgcccgcgtcgccgtccgaggccgggccagatccctccgaaggtggagacgacgccgagggtgctgctgctccctctgttgacgtctga

SEQ ID NO: 29158 - DNA, 408 bp, Zea mays
  Peptide Sequence Number=SeqID_72533
atggcggagaatcccccgaaaggcggcgacggagctggcagaggaggatcccccgaaggcggcgacggagccggcagcggaggatcccatggcggcggctgggtcttcgcaggtggcttagttcaagattttgggcctacgcacgcaaccgctactgctaattttgtggcggcttcgaccgtggtcgctggaaatgaatcggatgagtccgtgtttaagttttctgattttgatgactctgggagttcgattgagtggacggaagagtcttcagatgaggacttggattactttgcggccttggatgtggctgcggcggaggcttctccgcatgttacggatgcagaagtttgcctggtccgagtgctgggcgtaggtggcgaagggcggtggcgaagcgtagagtga

SEQ ID NO: 29159 - DNA, 1524 bp, Zea mays
  Peptide Sequence Number=SeqID_72534
atgcgcggcccccaggggaaggatgtcttcgcccgagctccgggagtcttcggcgcggatgctggaggttaccgggggtcgatggcccaaggacgttcctatcctccgcacggccggcaaagacttttttcgtctcgcatggctcgtgacttgagagtgtttccttacggacgaaatattgctgctgttgtgtcggcagtgatgaacaaggatcaccaggaagctgcgcagaagcgctgggcggtcatcaggctccccgaagctaggccgaagagggcgcgggggactgcgaaggctaccgcccccggcggtagccagtcgacgctggcggcgaagccggccgcccctgggtccagcaaggtgccggagagcgtgaaggcgatcggcaccggcggaaccaagtctgccccggacggagctgcgaaggctcaggaattgccttcgccggggaaacacgttgccgacttcggcacaaatattagtgtggacgattatctcgttggatcgggcgaggggcaacttgttgttgttccgcctgcggtggcgaccacggtgtctgccgtggtgcctggggtgaagggtagcgctctcagcgctggcggcgagattttggcggtcgctgccgtcaaggacgaagcgggcactgtgtctcgtcagctgagggaggcgtcgcagcagctgagtcaagcggccgacttcgtcgactgtgtggcgtcgggggcccttactgcagatgtgtctgccgaagtcgagagacttcgggcgcagcatgctgacgccgtccgggaaaagtcggctgcggatagcaagtgccataagctggcggagaaggtgtccgccctggagggcgagaggacggacctccggcgccagctggtggaggagaggagggaggccaaccaggccatcgccaaggcgcaggcggcgcaggcagaggccaaattggcgcgggtggaggggagtcttgccagccagtgcgccgaggaatgggaggtgcggttcaatgctttgcaggcccgcatggagggggccgaggcctctacacactcgaaagttgagcggacgcgcaaacagctcgtggactcataccgcgagctgggcgcgcggactgctgacttcgaagtgcccgaccgagaggcgggccttcgcttcctcgagtggctgcaagaggaattgttggcgctcccgaccatcgtggaggggtttatgtcctttgcctccctcgtcacctgcgaaggggcgatgaacgcgctgtcccgcgaggggtgcagtcactatgaggtcttcgaccgatctgatgaagattttgggcgcgagatttataaagtcgaagaccctgtggtgaaggactccgcgggggccctcttcgaccggatgtggggcccctacggtcgggaggtggttagggagcggtctgaccgagcaagggatcagatggcacgtgccgaggacgtggaggacttcggacccctgaatagcgcgcagcccgaagcggaggccaaccctttttgtggccgaggctga

SEQ ID NO: 29160 - DNA, 508 bp, Zea mays
  Peptide Sequence Number=SeqID_72535
ggttgcaaggagggtaatcaaaaggaagcaagcaagtgagaaagatttaaaaacatcaagggaggtggcaaatgcaccggggcttgccttcgttaacagagttttaccagaacagactggccacggtgaaggtcgattcacggtgttcttcgactggattggggcgaatgcgaaattagagctcgctagtgagggatttgggatgcagcgtggcaagctcaccggcgttgagttaacggcggtaaagaagcacggtgacacgacagaagcgcttggatacgtggcgcaagaccggaaggcggtggctcaccggcgaggtaatccgcccggccgcaaagtggataagaaggccacgggtaaaaaccctatactttgtaagttacaaagccccaaagttgagccaatgtcactaaaatccagacttaaccccaaaaagaaggttaagtggggcacttttgcacttaagtccaaatctcaagttttggattgcaaattctcatataagtga

SEQ ID NO: 29161 - DNA, 369 bp, Zea mays
  Peptide Sequence Number=SeqID_72536
atggagaaagcctcttcgaaaatgtccaaagaaagccatcgagtccaaccgttcgcgaggcatgcatgcagtgcagccgtgacactgctactgctggaaaacgtccgagagaaagcggacacaagggtgaggctatggaggtcacgccagaggaaggttttcatcatacagaggaaggggaagaacgtgggagaatacaactcgaggtcaaggatttttaggaggtgcaggacgtggttacatggaaagagaaagctttcgggggagtttgagaatgctaagactgaacaaaaaggcaacaagctcagttacccaagagcaattgaagaagaatacgcaagagggcatacagatcaagatgtccaatga

SEQ ID NO: 29162 - DNA, 714 bp, Zea mays
  Peptide Sequence Number=SeqID_72537
atgaaccgatcctgcaggctcagacgtcgacggagggggagcagcagcaccctcgacgtcgactccaccttcggcaaagtccgaccgagagtctccactccgaaggatgacgtcagcgccacgcccgggctaccaccgccagggtctccttcaggaatccggcccgagcagacggctcggccggccgccccgaagcctcagccagctgttccccgaggacaccagcccggctcatggctttggcaactcgactccggcgctggtcccgccagtggacggcccggccaggctccggccgacgaacgccagggcggcccaactctcccctcgctgtgcgcctacctctccttggtgacactgccgtgtggggtccattcgccgggtcggtcttcatgctcaggcgcgattctgttgtggccgttcaactacctcctggttgccgccgaagatcccgccgccagaccaggtcctcctcgaccaaacgccatggcggactccgcccttgtctctgtaaataccagagccgtccgcgcgttgggttgtggtttggaacactggagcgtggggtggaggcatgccggcaatggcgccgtcgccctagttactggcgccgtcgcggcctcagcttacagctcgggatgctgttgtggttcatggcgagttgtagaagatggggccgtggccgctggatctcaaaggaacggctcagattag

SEQ ID NO: 29163 - DNA, 1071 bp, Zea mays
  Peptide Sequence Number=SeqID_72538
atggcgcaatgctcagctctaaccatcctctttggtaagccttacacttcacgtgagctcccacctttggacaggcggcacctttggcaggagaagcaggcgacgcttcgcttccgccataatgaccgcgtcaaaaaagggaccgggaaaggggataccccgaaagggatccttctccgcgaaggaaacgggccccgagcccccctactgatcagaggtttgaaggctggcccctcggaagggttcaacagccacctcagagcactcgggctccgtgcccactactggtcagaggttcgaaggctggcccctcggaagggttcaacgaccgcctcaggccactcgggctctgcgcccactactgatcaggggttcgtaggctggcccccgaagggttcgacagccgcctcagacgcagagcgagggatgaccctgggaagctccacctcgcccgaccccagggctcggcccccagcctcggctctggaagacaacgaactccgcctcgcccgaccccagggctcggactcagcctcggctccgaaagacgacgaactccgcctcgcccgacccagggctcggactcagcctcggctccggaagacgacgaactccgcctcgctcgacccagggctcggactcagcctcggctctggaagacaacgaactccgcctcgcccgaccccagggctcggactcagccttggcctcagacgacggtctccgcctcgcccgacccagggctcggactcgacctcgagctcggaagacagactcgacctcgacctcggaggagcctccgcctcgcccgacccagggctcggaccgaccacgtcacaggggggccatcattatcctacccctagcaagctcaggctacggggaacaagaccggcgtcccatctggctcgccccggtaaacaaataatgatggcgccccgcgtgctccatgacgacggcggctctcagccccttacggaagcaaggagacgtcagcaaggactcgacagccccgacagctgtccttccgcaaggctccagcgctcctccgacggccacgacaccacatga

SEQ ID NO: 29164 - DNA, 1335 bp, Zea mays
  Peptide Sequence Number=SeqID_72539
atgggcgcggtggagtcgtcggcgtggatgtctgccgcggcgcgcaggtggctggagaacgccggcgccacggcggaggacgccccgggccgaggcttcaacgcgctgccgctctccggcgtgcgtgtgtccctcgcggagcgcggccgcgcgctctgctcgcttcgcgtgccgccccacctcacggacgcggaggggaactggcatgcgggcgccatcgcggcggcggtggacaacgtgtgcgccgcggccatcatgtccgtggagggcatcatcaaggtctccatccactacgacatctcctacttcacaacggccaagctccatgatgaagtggagatggatggtcgggtggtggagcagaaagtgcggatgacagcggtggcagtggaggtccggaagaaggaatccggcgagctggtggccatcgggaggcagtggatgacggcctccaggcccaaaataaagagaatgacacaatgttcaaaggatacaatcacacttgccttttttgttcataggatgggcaagtattttgtttctcatctctcttcaattgttgtcgccaagctaatattgagctttggtttgctacaacaattagcatccagttatatatacttctttgaagtcgaacacgtcacaagggaagagaagttcatgcaagcatatgacttgattgaagtatactttaaacttatagtagcatgtgcacgtctgtccattattgactcacagaatttttttcgtgcatcgcagttatttaggcccgagacggtatctaccaagacaaggctgctatcacttgaactgctccagggattgctaaagggagtcagcaatgtgttcataaaaaaatttcacttcattgattcagtcaaagcatatctttcgtatgctcttctgcgagcatttgtctcttcatctccagttgtttttcagttctgttgctccggtttggagagtctgaaggtgggtgttggcctgatgatttttcagcaactgggaggaattaatgtcttaggtttctatacaagctatatttttcctctgcagatgaacataacatataccgcttcagatggtgggaatattactttaagtgatgggaaaaagtttgcaaagaggagaggcaatgatggaatcccttaccaacagcttgagatgggaggtcaggcaccgaactcttcaggtttagacaacactgcaaccaccacagacgactgggaagacaactgggatgatgacttggatgatgaagcagcagcaaatggccttccgttgagatcacagacgaatagcaaagatggctggaacatggattgggatgactaa

SEQ ID NO: 29165 - DNA, 312 bp, Zea mays
  Peptide Sequence Number=SeqID_72540
atggacggaggccggaccatccgtgactctgccagagaagtctgctggcgccctgtctctgtctcccttcgcggaccgttcgagccaggaggccggaccgtccgcataaaccaagttgagttcggacagggacaatgtgtttttgagtccttgcactacagaccatccagggtttttagccagacggtactaggtggtacaccatgcaagcgtaatcaacttgttactcttggaggtttccgcctcctagacggctcaggtgttgtctccatcgagctctccatgaagattgcggaggagccgcggtgttga

SEQ ID NO: 29166 - DNA, 711 bp, Zea mays
  Peptide Sequence Number=SeqID_72541
atgaggaccaagacaaatgttagagaacttgtgaggcttgcaactactcggtttacaacatcctttctaacattggctaagcagacagatctgcacagggacccagggacagcaggaacgcagagcgcgcggcacctcgcgcgcaggagcacaggggagcacgctgcgcacagggacagcaggatccgtggccggatcggcgagcgcgccacgcacagggaagagtgccgcggccgcgcggaacagggcggctggatccgcgcgcacagggacggccgccgcaaaggccggatccgcggccgcgcgggacaggacggccggatccgcggcgcctcgcgcgcagaggctgaggggcggccggatccgccggatccgcgatggcggctggatccgcgacggagcagaggcaggggcagccggatccgcgacagagcagaggcaggggcactcggatccgcgacggagcagaggcagggggcagtcggatccgcgacggagcagaggcaggggcggatccgcgactgcggcgatccgcgcgacggagcagaggcaggggcagccggatccgtgacggagcagaggcagggaaagccggatccacgactgcggcggctagatgaggaagatgaagagccacgacggcggctgggtggggaaggaccgcgacggcggctgggcgggaaacagccgcgaaggcgactaaaaaattag

SEQ ID NO: 29167 - DNA, 606 bp, Zea mays
  Peptide Sequence Number=SeqID_72542
atggacgcggggaatggctgcagtgcccgggcgcaggtggcgtgcgtcatcggcagcatcgtgctgggcgcctcggtgctcgcgctccacctcgcgggcgggcctgccgccatcccgcacctgcccctgcctccgcttttcggcacgctccgccgccgccgccgccgccccgtgcgggtctacatggacggctgcttcgacatgatgcactacggacactgcaacgcgctgcgccaggcgcgcgcgctcggggacgagctcgtcgtcggcgtcatcagcgacgacgagatcaaggccaacaaggggccccccgttacgccgctccacgagagaatgataatggtccgtgctgtgaaatgggtagatgacatcattccagatgcaccttatgccataactgaagaattcatgaacaagctgttcaatgagtataacatagattacatcatccatggagacgatccttgtttgctaccagacggtactgatgcatatgctcttgccaaaaaggctggtcgatacaagcagattaagagaaccgagggagtgtcaacaacagacattgttggtactaattttgctttactttttcatttcaccttttga

SEQ ID NO: 29168 - DNA, 168 bp, Zea mays
  Peptide Sequence Number=SeqID_72543
atggcgccgccgcgccaggtgactgtgtcaccggtgggattggccgggggtggacagaagggattcctccgtccgatctcgcctggtcggtctagattagatggggagcgtggagtgactcggggtgaaaattcatatgactccaaattgggtccattccagttctaa

SEQ ID NO: 29169 - DNA, 465 bp, Zea mays
  Peptide Sequence Number=SeqID_72544
atgtcatatgtcgatggccgctttgagcacatgcaatctcactttgatggccaattctctgatctgtatgatcgattttctgtagttgactctcagctggatggggttcattcacaatttactgatctttgctctcatattcaaactagtgtgcatgatccaattatgagtcgaatgaacaacatgcaacaaagttttcaagacaatatgggtgctctgtccagtcaattcgagtctctgtctaccagtgatagcattcactcactggatgaaagacatcatcagctacaaaatgacttcagtcagttcacctctatctttgacagcttcagctcccactattacagtggtacaccgggcaagcgtcatcgacttgttactcttggaggtttccgcctcctagatggctcgggtgttgtcttcatcgagctctctgtgaagattgtggaggagccacgatgttga

SEQ ID NO: 29170 - DNA, 345 bp, Zea mays
  Peptide Sequence Number=SeqID_72545
atgtcgggtcccttgaatgggatccagatccctccacgacaaggtcctgggacaggggataccctggctggatttggtggtatgcagaagaagctagcaggacggtttttgcccaaacgccgtcgtgtagatgattctgattataaccctgccacagactccgaggcccaatcatcagccaggggcagtgtctctttggatgctaaagatgctccacactcgcatctggagcatcctattaacaacacagggtggacgtatcctaggatgagattctctatggctgaatattcttctaagaggactattgatcaattttctcttccaaatgacacaaacatttaa

SEQ ID NO: 29171 - DNA, 765 bp, Zea mays
  Peptide Sequence Number=SeqID_72546
atggccttgctagacccttgcgagtgcttccagctcgaggtggcactcaacttggcgtgcaacccaatcggatggggtgtgctggcatttgccgggaggacttgtgctgctgccggaggggcttggcctccagcctctacccgtggtgtcctgctttatccttcaggcggccatcatcgcctacctctgcgggatgtccgtggaggcgacgctccttcccgcttcttcctccagcatttggagggaagggtgatcaccagcctcgtgaaggtctgccgcatccgtggcgtcccctgcgccaccggtcacactgctccgacgccgccaggggggtcgtacaagacgtcgtacgccgtggaggtggcggccgcgttcttagatgaggtggccgccttcgctggcgggctgctcggagtaggggtggtcgtcgtcgctggcccacggtacggaaccaggctgagcggctacacgggctctggaccaccccaggagacaagctatcgggccctcctgctttcgcagagaggtcctaaactgcaagcctggctgttcaattcagatgtcattatgtctgatgaaaagggaactgtctgggtggaccaacaggccaggcttatgagggcggacctcaccgggttggcgtacacagatgctccagtggccaggaagagagcccttcttggtttggtacttgccgtaggactaggtcccgaccctgggttcccatctgcgtttgatgagggagtcctcgtcctcgtgctgtag

SEQ ID NO: 29172 - DNA, 291 bp, Zea mays
  Peptide Sequence Number=SeqID_72547
atggcgcacagtggtggctacgggatggctcggggacgcaaggcgccaatttgtgcaggtgagcgagttaatggcgaggagatggggcgggcggtggccggctgcgggtcctattctgcaaatgataggataggggccgacgaatcgcggagccagcttccctttaacttggaatcttttgaccccgtgcatcggggagaccttgaggcaacttttgcttctgcctccttaatgaaagcaggcccctccagtgtcctttcccctgcattggaccacatcagaggggtctag

SEQ ID NO: 29173 - DNA, 384 bp, Zea mays
  Peptide Sequence Number=SeqID_72548
atggaaggtgttgtgggcatccttcaagcatatggtgccgggggtaagtcgcaattcctcgtcggtgtaccacacctccccaaaatccacacttcgccacggccaaggcttatgactgggcgattcatggtttgccacccaaccgctagttcgcaatgttgctcgctccctgttgccctaatcggtttcgagtttggagactttatgctcgagattgacatcgttggtcatggcgctgcgcgccgtcgtgttgatagccagggaaagaaggacgagtgccctagtggccagggtgtcacgctccacaagatcgtgacagccataggaggtggtgtatcggttgctaaggcgcagcgtctttggaaggctgtagtcgggccgtga

SEQ ID NO: 29174 - DNA, 309 bp, Zea mays
  Peptide Sequence Number=SeqID_72549
atgggtgtcgtggtgcatacaaagaacgagtttttgccaccggaaccatttctttgtttttcgcaacgaacatgcccaatccactactttaggtccaaaactcatgtttggggtggtttcgtgcaatttctttgccgcacatcacctgatgtagctgaggtgcccgatctttcggcgagtagagataattccgatttggcggaagatgacccttgcgatccgactacgacgagcaagcccgaggcgccaatgcaatcgctgaaccaactccctgtggttaccgaccttgctgatgcgagatcggcctga

SEQ ID NO: 29175 - DNA, 810 bp, Zea mays
  Peptide Sequence Number=SeqID_72550
atggagacccgtgcactcttgttttgcttaggaatcagggagaagaccaaaagggaaaaggatttgaacatgctggattcggactgcagaagaacaccaacttgtgacgcgtcttgggaaggctgtagtcgggccgtgaacgtcgtcttctcccccaatcgagttattccacaccctctcatcgaaagatcgggcaatcacccaacgggtgcacatcactctgagccatacatcagcatcaagtggatcctctgcccgagtgaacaatggtggctgagtgctgaggaactcctgataggtggccgctgctgggggacgctgatggtgatcaccaccaccatagtgctgaggtggtggctgacactgagccaactgtcgcagaatctcattctgctgagccatcagctcttgcatgggttcgcacatggtaaaaggctccggctcctctcctccctcgatgtcaacatcctcgtcggccccttcggcctccatgtcttggatttcctgatggtgcatatccaggtgctggttggcttcctcaagttgctgctgagtgttcaggagctgatcctcgagaacctcgatggtgttctccctggctcctacttgctcctcaagctcttggatctgggtggccatctactccacctggaggtccttttccaccagctcagtggacaggtctaccacaaggtcctcccggttatccagggtggtctttgtagactccaccaagcctatcagttgggacattgcctcagctcgcacggcttgcagacgatacagggcattcatgcatcacactgttag

SEQ ID NO: 29176 - DNA, 411 bp, Zea mays
  Peptide Sequence Number=SeqID_72551
atgcaagagctgatggctcagcagaatgagattctgcgacagttggctcagtgtcagccaccacctcagcactatggtggtggtgatcaccatcagcgtcccccagcagcggccacctatcaggagttcctcagcactcagccaccattgttcactcgggcagaggatccacttgatgctgatgtatggctcagagtgatgtgcacccgttgggtgattgcccgatctttcgatgagagggtgtggaataactcgattgggggagaagacgacgttcacggcccgactacagccttcccaagacgctgtgcattagcaaccgatacaccacctcctatggctgtcacgatcttgtggggcgtgacaccctggccactagggcactcgtcctgcaagcaatcgaagaactag

SEQ ID NO: 29177 - DNA, 228 bp, Zea mays
  Peptide Sequence Number=SeqID_72552
atgcagccagttaaccacgtggtggaatggggagagttcaaggcagcattcagagggcatcacataccggcaggctatcatgttgacacagatgagaagaagagggacaggttcaggaggggcctcagtactaagctccgcgaccgtctcaacacagtcagggccaacagctacaatgagttagtcaacatggccatttctcaggaagactacatcacagcccgctag

SEQ ID NO: 29178 - DNA, 342 bp, Zea mays
  Peptide Sequence Number=SeqID_72553
atggcgcagtggcttacccggtctacgctcgccggcggtcggagggagtccggcgaccgtggactagcctctccggcgaagcagacttcgattcctcgctcggggagcttcaccgaggtgtgctcagtcctctccgagggtcggacggggctgggaagggcttggttggccggtctacggtggcaggggctcgggtggccgtggacacgccgtgcacgggctaacgccgctcgcccaagtcgcaagcgtgcgaatcttggcaaaaatcctgcgcgagtcttttcctggcacctagggctgtctctcatccgtgagtcgccatggcagatatgccctaggtag

SEQ ID NO: 29179 - DNA, 171 bp, Zea mays
  Peptide Sequence Number=SeqID_72554
atggctgccatcaagccgcgccgactggccgctggggctggccatgcccaagtgcgccagcagttttatagaggagagggagggagggagaggaaaggtcaccggggaagggagagaggcggtcgggtcttcatggcggtcatcaatggcgtccatgaagagagggattaa

SEQ ID NO: 29180 - DNA, 300 bp, Zea mays
  Peptide Sequence Number=SeqID_72555
atggctgcgagcggcgccgctcctctccgcggcggtgaagtcaccggcattgaggcaggtgcgggctacggtggctccggggtcgccggagttgggcagaggggaagagggtgccacgacgaactcgatggcggggacagggccatgaatcacgggcagagaggggagaacgacggtgaggaggtctcaggcgggccggagaaactccggggttttcaaatccaaattcaaactaggtttctaattcaaatcaatttaaacttgtgcaacacttcaaagaatattttaagctcaacatga

SEQ ID NO: 29181 - DNA, 295 bp, Zea mays
  Peptide Sequence Number=SeqID_72556
ctcggagacaactgatcaagccaaggacggaggcaagaagagcttcgaggtaccaagtgcacgggagaaagtcaaggaggctgaggaacccaaagccaagggtgaagaagaaggcttgcaaagtcaagggctgaactctggcgaactggccgctctcgggaattcaccagcgacgtacggctataattcaccggactgtccggtgtgcaccggactgtccggtgagccaacggtcggccgggccaacggtcggccgcgcgatctgcgcgggacacgtggccgagccaacggctag

SEQ ID NO: 29182 - DNA, 183 bp, Zea mays
  Peptide Sequence Number=SeqID_72557
atgggtttttgcattggttctatccgagggtcatcctggtgttgcggacgctcggagacaactgatcaagccaaggacggaggcaagaagagcttcgaggtaccaagtgcacgggagaaagtcaaggaggctgaggaacccaaagccaagggtgaagaagaaggcttgcaaagtcaagggtga

SEQ ID NO: 29183 - DNA, 345 bp, Zea mays
  Peptide Sequence Number=SeqID_72558
atgtccgcaggatcaaagatccacggtgagcgtgacggctccacccacacgcacggcggagccatcgccggagcacgccagaccgaggccacgatgctccccgcacgcatcaaggccctgattcgcaatgaggagggtgattcgaatacgatggagctactcaccgcagctggagggcaatggagggagctggccacggaggagagcagacccgcggcggcgcttgagctacggcgagcgattccgacgtcgccggcccccaatcgcacccggaaaggtcacggaaggtttccagacgcgcaggctacaccaatcgagcacttccccggaaccaaaacgcggtga

SEQ ID NO: 29184 - DNA, 345 bp, Zea mays
  Peptide Sequence Number=SeqID_72559
atgtccgcaggatcaaagatccacggtgagtgtgatggcgccgcccacacgcacggcggagccatcgccggagcacgccagaccgaggccacgatgctccccgcacgcatcaaggccccgattctcaatgaggagggtgattcgaatacgatggagctactcaccgtagctggagggcaatggagggagctggccacgaaggagagcagacccgcggcggcgcttgagctacggcgagcgattctgacgtcgccggcccccaatcgcacccggaaaggtcacggaaggtttccagacgcgcaggctacaccaatcgagcacttccccggaaccaaaacgcggtga

SEQ ID NO: 29185 - DNA, 1320 bp, Zea mays
  Peptide Sequence Number=SeqID_72560
atgatggtcctcgcctcagttgccaccacctcattcaccatcctgcttcttttctctctcccctcaagcctccacctttgcaccacctcattctcgatagagggcgcaggagcaggcacctcctccccatattcgtccaacaccagccccgacaccgactcgcgcagtggctattgcatgtccacgaggacgtttcacatcatgcgtgcaccatcgttttcgccatcgtcggacgtcccgttcgtcttcccgaccttcgtcctgttcttcctccccatcctgctgcccccgcccatagtcgcagctgcgagccgaccaacactcgtcgacacggggttgggaagacactcgcattctctcgtccttctcggactgacgcctggtgcagatgtccaggtcttcgtcgtgtccttcgtcggcaacgaacatgtccacgagggtcggctccgccgcccgcgcaaggcgctcatcgacctcgtcgcgcttctcgttgatgacaccgttgcggtcgctgccgtctggccaccatcctccccgtcaaggctaggacacattgaggatgctctgaagcacctgtcacttgcaatcccacagcctgacctcctagagttgcacaaattgcaaacagtggagaagcactttgggagatgtctggatgcgcgaaaggctagggactggaagagtgtgctaagggaaagtaatgctgctattgcggctggagctgactcttgtgctctgctcttggctgctagagcagaagcccttttccgtctcaatttacttgatgaggctgatgttgcaatctctagtgcctccaaattgaattatacatcatcatgctccccagacaccaaattttgcgggtttattgccaacgcctacctcttttatgtacatgcccaagttgacatggcattagaaaggaaggagataaagggagaatcagttagaagaaagaagagtctgaaagctgatggagacacggagattggaggacagaagggcgcagcacaggactacagcgagggggaaggccagatcaagcaggagacaacaagaggtggctgctgttcaattggtattgcatatgctcatgctcaaatatacccttcacccactgacgttttcaaacctctgataaaggagggcaatgtctacaatgtctcctacattcagatcaagaaagctaataggatgtacaagcctgttgacaacgatatcatgatcggtttcacaaaatggatcctatgctgctgcgtgctgatcaaggtcactctggcactgcttatatgcttcgctctcgatgccaactgtttctag

SEQ ID NO: 29186 - DNA, 903 bp, Zea mays
  Peptide Sequence Number=SeqID_72561
atgacgtgcagaccggctccgagcagaagaagccaaatcgccgcgcgtggtgcacgcaaccgcccagcggttacaagtgaccctccacttttgcccagaccaacgggcgaaagaggcgggcagccatgcaggcggcgtgcaaccgcgccaagtggatgcgcttctccgactcccgacacgccagcatggaggcccaggcccacgcgtcgcgcaaccggcgcgccggatgctgcatgcaagcaactgcaccgccacttgcaccaccaccgcgcctcctcgattgcggaaccaataccgcgactcgaggcgacccagcacgcgacccagcagcgccagcctgacgaggcggtcaacgcggccaaaagtgggccggcagtaatgacggtggcaggcgcgcgggagcagcggtcacgtcgtcagccaagctcatgtcccatccgggggcagcaagagaaccccctctcacggcgtgaagacaacgcgcccgtgatccgttcctcgaacggctcgcgcacgcgcaacggccgccctgccaacaactcaccccgtcgcattaactccacggcgggacaggcggcgcttctggcaggagaagcgggcgacgcttcgccttcgccggaccgggaaagggggataccccgaaaaggatccttccccatgaaggaaccgggctccgagccccccctactgatcagaggttcgaaggctggccctccgaggggttcaacagtcgcctcagatcgcgtgggccctacacccactactggtcagaggctggcccccgaagggttcacagtcgcctcagacgccgagcgagggatgaccagggggctcggactctggctaagccccggaagacggcgaactccgctccgcccgacccagggctcggactcgggctaa

SEQ ID NO: 29187 - DNA, 506 bp, Zea mays
  Peptide Sequence Number=SeqID_72562
atggaagacagactcgacctcggcttcggaggagcctccacgtcgcccgacctagggcacaggcccgccacgtcaacaggaagcgccatcatcaccctaccccgagccgactcgagccgcagagaacaagaccggctccgttgctcctccgacagccacgacatcacaccagcagggtgccaagatctctccggctgccacattggcatagccttcttagagaaggttggccgcgcggggacgaggacgggacaggcgctctcttggggccgctcgcttccctcacccgcgtggacgcttgtaaccccctactgcaagcgcacccgacctgggcgcggggcgaacacgaaggccgcgggatttccacctctctcacgcccgtctccggccacctcgcttccccccttcgcgctcgcccacgcgctcgacccatctgggctggggcacgcggcacactcactcgtcggcttagggacccccggtctcgagacgccgacactagtaga

SEQ ID NO: 29188 - DNA, 260 bp, Zea mays
  Peptide Sequence Number=SeqID_72563
catcggctgtgcacgatacttcacaccggcgtcgccccctcctatagaactccccaccctcaccccgtcacgccctcctccactgagtgcagcaagtgctgatcagagtcacttcttcacggtgggtgggcgagagatggtgctgaggcgggcgacaaccgaatgccccaagaaggttgcggggctgaaggatttggtgaacctactgacccagctgcgagagtttgccggaggccggttgtcacacccggttttagaag

SEQ ID NO: 29189 - DNA, 846 bp, Zea mays
  Peptide Sequence Number=SeqID_72564
atggacttcgaacgcggttgcagaccggttccacgaacaggaccactgtcgtcatccaccatctccactgaggcaccgctcgatgaacagatcgacgacgctatccgattcggacggggcacagagaggccgccgacgcctccatctgcgtctaaatcagttgcgaggagtggggcacaactccatctcctctgtcggcggcggggcctggtcatgcgtgtccgcatccgcgccgtccgaggtggacctcgctcagctctccgccaccatcgcgaccggggaggaccttggccctttcgtgcgccgagccttcgcgtgcggcctccccgagccgctgctcgcctcgctccgcgacgcggcgcgggaccacgaggcggagatcgaggagctatgccacaccacttccacgattttatccgcgccgtcgacgacctccagtctctccttgtcgacgccgacgcgctcaagggctccctctcggcgtcccactccgcgcttctctcctcggcggccccgttgctcgcctcgcttgaatccttcctcgcagcgcgctcgctcacggggaatctctcctccgcactagcctcctcccgacgctgcgtacagctgctcgctgcgtgcgtcgtggagagtggcaggcgggatcgcggggccaacggccgtgacgacgccatgcttggcagacaggatccccggggctgcggatgcgacagggacgcgtgcgggagggacacgggatgcggcaggggcgttggatgcgggttggacgcgctggatgtggcagaacatgcaccggctggagaagtggacgcctacgttaggattataatagtagtagagatataa

SEQ ID NO: 29190 - DNA, 633 bp, Zea mays
  Peptide Sequence Number=SeqID_72565
atggtggatgacgacagtggtcctgttcgtggaaccggtctgcaaccgcgttcgaagtccatggaagagaaggggaggctcgggcggcggagggaggctatgctcagatttgtcccggagcgcggcatgctgatgggaaattttgcagatgctgatcgtcatcgccatccagatgggacatttgaagaaaaggaaattttgcggtttgtggagctcaacaagtttcctttaattactgtattcactaagctcaattccggtaaagtatattcaagccctattaagctacaggtcttcacctttgcagaggcttatgattttgaagatctggaatctatggttgaagaaatagctagagcattcaagacaaagataatgtttatatatgttgacactgctgaagaaaaccttgcaaaaccattcctcactctttatggccttgaatcagaaaaagcctactggagtactgcttattacataacatgtataactctttcacttgtggagcaatgggccaccgagaagaagtccatggagagctgcaagctcatcttcacccaagcaaaacagtatgctaaggaatacgatgcccaggctgaatgcttttatgaaaagatcatttggatgggctaa

SEQ ID NO: 29191 - DNA, 174 bp, Zea mays
  Peptide Sequence Number=SeqID_72566
atgggtccttcaggtttcaccgaggctaagtcggacaccttgttgttcatttattggagacgcaatgacattgtctacctcctctatagcgatgatattgttcttgtcgcctcttgtacagtggcggagccagagcccggcgagcctgggcacgtgcccaggctctgccgttga

SEQ ID NO: 29192 - DNA, 1236 bp, Zea mays
  Peptide Sequence Number=SeqID_72567
atgaagaagtcatcgggctcgggctcggtgtcgttggcgcggagcatcccggagctgtacgaggagaggggagccagcaacctccgggagttcgggttccaggagctccgggccgccaccagcgacttcagccgcctgctcaaggtcggcgaggtggcttcgggagcgtttacaagggcgtcgtccgccttcctggcgggcccgccggcggcacgaagttcaaggttatctcattctggcatatctcatttgcctgctgatgaagtgaagcctttggttaaatatgataatgatgaagatgcacactcacctggtggccgtggaaggggtcgtggtggtcgaggccgtgggcggggcaggggcagaggtggacgtggaaatgggttcaatgagtatgctgatgctggttgggaagacgatcacgcccctgcatatatgggcaatggatatgcccgcggaagaggtcgcagtttcaggggccgtggtaggagaggcgacgacgataaccagcctgaataccaacatgtcggaggtttcaaaggcatgagagtgatgagggtcaaaaatctgaacctctacgcttttggtttatatatgcaaccaacttctatccgtgagaagttgggtcctaagtatgcttcatttccaactgacaagctgatggagaaccctgatttctatagaaatgggttcaatgagtatgatgatgctggttgggaagacgatcactcccctgcatatatgggcaatggatatgcccgtggaagaggtcgcagtttcaggggccgtggtaggagaggcggcgacaataaccagcctgaataccaacaggtcggaggttattacgagtgttcatgctccagctttagattttcaccatttgtaatggaactgaaaccagcctctcatcgaagtggaaacctttttttagtcgtaaacatttacatggtttatccagtggtcctgtgtacgtcaaattttgtccacattgaaccagtacgaatgacatcttccttgaaagttatagaaatgcttcaaagttcaaatggcattcagcatattccatgtgctgctatttcagcactcatttctcgtgctggcaatgcaaactggaataggaagggtttgctcctcatccaatcgaattgggcaccgatggtcagtcagacagtcacctactctacgtactctttctttagggatgatagccttcagttttttcaaagcaacagataa

SEQ ID NO: 29193 - DNA, 1527 bp, Zea mays
  Peptide Sequence Number=SeqID_72568
atgctgcagctccagccccctgggttcctgcccatcccgcgccggcgcgtcaccgcccgcgggcgtcgcgcccgccctgtcatcgccttcaactcccagtggaagatccccgacgtcgacacagatgcggtgcgggagcgagtgcggtcttggatgtctctggcgcggggcgcgatcgccgacgcggggcgcgcggcgcgggagggagggaggcacaaagaggagcccgagggtgggaagaagaagcagcggaaggaggtgaccgtggaggagcaggcgttcgttgcggtgccagaggtcaccgtggagccgcgggtgccccagggttggctctcgctggacgccgtcgtctccatcgagcagttcgccaggttgaatgggttgacggggagacaggtgcagaggatatttgaatcacttgctccagagcatctgcacaatgacgctcgaagcctggttgagtatagctgcttccgctacttggcaaaagataattctgacttccatccaaacttgaagggaaggcttgttggagaagatgcctttgcccgaattgctcctgctgttgcaggtgttgctgatgtttcaacagctcattatctctttagggctcttgttggtgcagaaaagggactttcatttgatctgtggacaacatatctagcggaacttttgaataaaaaaagacctgttctaaaatgggaggaaaataccgcatggccaggaaaccttaccttgacggacaaggcgctgtattttgaggccattggactgtcaggtaccaagaaaccaatgaggcttgaccttacaaatcagaattcaagggctgaaaagacgaaagttggaccatttggatccaaactatttgactctgctgtctcagtttcttctggttcaatgtcagatgaatggacattggagtttgttgatttcagtggggagatgagacaagatgtgtggctcgccttcatcagtgaaattatttcagtttatagattcattcgtgaatatggtccaggtggtgatgatccagcaatacataatgtgtatggtgcgtacaaagggaagaaaagagctaccctagcagtgaacttttggggtgggcctctgactacaaaagccagatctgcaaatcatagatcaactcagtggcatagatcttcagaggacccatctagcggtcgcacacatgtttacgacatagatggcagcgtgtacttgcgcaagtggatgacgtcccccagctggacatctagccactcagccaatttttggagaaattcttctgtcaagtatggtataatattgagtaaatctttagttgtagctgataaaaaccttgtagaaaaggcaatggttgactgtaaagagaagagcaaagtagttgaaaggacacaagcgacaatagttgctgctacaatcgaaggtattccaagtaacattgacctcttcaaggtaagctacttttctatgagttatttcttccttagtcaccctgagaagtcgaatattgatccactctattaa

SEQ ID NO: 29194 - DNA, 630 bp, Zea mays
  Peptide Sequence Number=SeqID_72569
atgaacccgacaaatgggtcccacctgcagaggagtgagcgcgcgcggagaccgacgccgaggacccaccagcagagaagtgcgcgcgcggattctagcatggcgcaagcgactagaggggtgaggctggcacaagggcccatgtgggccgagcgggtgagaagtgattgggccacgaggaagggaattcggcccaggggacctcgcgcagaactcctcagcctcgggattttcctaaagccggcgcgctataattcaccggactgtccggtgtacaccggacagtgtccggtgctccaagaggacgcggcttcggaacttggcagcctcgggaatttgcggcggttgctccgctataattcaccggacatgtccggcgcattcaatgcgcgccagaagcgcgcagaagtcaggcacgcccatactggcgcaccggacattgaacagtgcatgtccggtgtgcaccggacatcaaggcgggcccagaagtcagaactccaacggtcgaatcgcaacggctttggtgacgtggctggggcaccgaacatgtccggtgtgcaccggactgtccggtgcaccatacgacagacagcctccaccaacggtcatgtttggtggttagggctataa

SEQ ID NO: 29195 - DNA, 1143 bp, Zea mays
  Peptide Sequence Number=SeqID_72570
atggggggtacctgccgtcttttcgcctcatcgttggaggaacacaactccgtgggagttggtacccttcagccatcgttcggcttcaaggattttcatcagccagcccggctgtaccccccgccggtggtcacccaagacggtgaccgccagttcctgggtggggagaagcaagccgagctacgatcttggtcccaccctcagcttcaaggatcgtgtcgggctcgtcggcttggctcccggcggcccctcctgccggagggcggctgccgcgccgtgtgcacgggaggaccacccaagatgccacacgctgctagggcggcgttcgtgttctggggtggtcctgcctttgcaccgggatggcgccctcacgcggaggtcggtgccccactcgcccgggaggatttgagtggggatctgccggggggccgatggcccctgccgtcggtgccgaggcggaggtggctcgagaagtccccgtcaccgacgggatcaccgccaccatccgcgctttgggcctccggttcttcgtacttgtcctcgcccctcgaacgtcggtgtgggcgagggcaagattgcagcagcgcccaccctgaggcctgcgctgctgcagctcgaccatccggagcgggggtcgttgtcgtcgtagtcagagcgggcggcggcgagccgctcgtcagtcttctgttgctccgcaggccttcccccatggagtggggttgttcgtacctgcggagggggaaccggagttccgtttgtaatggcactttgaacgccaactcgcctgttgattatctgaaccgcttcaccaagcatgagtcgccccgtgtcaaggtgacgagtgagcacgaacagaggcggagttggctcgaaaatgaaaacctggttggccggagcctagccgggttgtccgtcagcgggaccgacgtcggagttgatcagccgaggcctcggatcgggctggcgcccttggaagatggttggctgaggccccagggggatgtttgtgcgagcgagagttgcttctcgcggaaggtgatgagtgagaaggtgatgagtgaggatccacttttcaaagtagtcaaaaagcacgaaagatattctggtaaaagagatcttttttcgaggaaaatttcgacgtag

SEQ ID NO: 29196 - DNA, 327 bp, Zea mays
  Peptide Sequence Number=SeqID_72571
atggctgtaaagcaattcctagccactgctgagattgatatcgatgaggaatccatcacatggatgactggtttcaagaggtattctgcaacatttgctgctgcaaacagtctggattatggtacaatttcagctgggattgacttgtacactaaagataactttgaagaatttgtacaattctatgagccagcaaggttgggaattcctaggaggaatggagagacagcaggactgcgacatcatcctgttgtgattaacaaaattggcagagtcacaattctccccaagagtggagacaagagcaaaattagagacaagttctag

SEQ ID NO: 29197 - DNA, 282 bp, Zea mays
  Peptide Sequence Number=SeqID_72572
atggagaatcccttcagcgtgaaggtgctgcaggtattcacaggtttcggcgtaggatgcggcgtcggcatcggcgtcggacgacccatctacctaggtatgatacctgggcttcagcaagttatgagtgctacaaggggagcaacagatgctttttctggtgtcacaaggcatgtcaattccgcgctaaggacggctggattaaagaacatcgaagcagggattggctgtggagttggtataggccatggttttggaatagttagttcatctatcctttga

SEQ ID NO: 29198 - DNA, 1797 bp, Zea mays
  Peptide Sequence Number=SeqID_72573
atggagctggcctggcaccttctcaccgtgctcatccgcctcggccgtcccgccgccgcctcggaactcaccgccgccgctaccgtcgcagcgccctccatctcgacgcgcgtcgtcaagcagatgtgttgcttacctaggtcaccactatggatctctgacgacggcgtcgtgacgccctccgagacggctatcctggcgtttctgaggttcatggggtgggatatcccggggcctaaggtgagcctgtggccttcggaggtgaggcggtggtcgggaaaggtgtccattaggtatgagcgtaagcggcaagggtcggatgcaaggtgcttcagcgcgaagaggcgccgactactggcatcggccgcagatttggtggaacaaacggagcaccagtcgtggcagctggttgcgcagacctgtactacggctgctactggagaggtacatttggaggttatgcaaaagttgcaggataggcttcccagtctcggcacatttctcggtgatcttcagcacaaacttgaccagcctcttagaggtgacgatgacttggctattgggaacatgtctttagcactggtgccaacaggtttttcagattgcccttgttctgtcaatcttcctccactggatgctgagaaattgagaaacatcaatatggaagttgatggtagaagcaacaagattagtgaatctgaaacagtttccttacttaacaatagagtagaggatagtgatgatctacaaaaagagtgtgcccttcccatggccagtcatgatgttttagttggagaatgcaaaaatggggctgatgaatatctaaatcctgtttgcaaaagtcctggcagtccgatagatcataatatgaaaacggctactagtattgaagcatttgatatgattctcaaccaagcagatgctctacaatacaattgcctaaatgatgggcatcatcagaatgccccaagttgtgttcagaaaaaaaatccacttcgtgctagtgcatatgcagaagtttgcactgataagacagcacaaattttgttccagccttctgtggttaacaaagttggatctatagcacctcaaatgatgataaatgttcaatctgaaacattaccacaagaaactacaaggcaagatggcatgaacatgaagcacctgaatattgttcctgaaaatagagatatcagatatctaaatcatggagagcagtccttgaacaaggcggaggtcaatgtatctaagaatgggcgggataagttgactgtgaagcagaaagagaagtgcaagaaaaatgaacagccaaaagaagataaggacaacacagcaaagactcaaaagggtcatgtagcaccaaaaccacttcctgctttcaagggttttgtcatagaagaggaggaagggtctggaggttatgggactgtttatagggctcagaggacaaaagatggaaaaacattcgctataaaatgtcctcacccaaatgctcattcacatcatgttaataatgaactaaagatactggagcgttttggtggtgatctagactgttttgttctagaacatgttgagcatgacagaccagagattttgaaaaaagacataaccttgcttgagctgcagtggtatggacactgtcttttcagagctcttgcaagcttacataaacagggggtagtgcatagagatgtcaaacctggaaacttccttttctgtcgcaaactgaagaaggggtatcttattgactttaacctggcaaatgttagtgcccgcacttttcttcctacttaa

SEQ ID NO: 29199 - DNA, 354 bp, Zea mays
  Peptide Sequence Number=SeqID_72574
attgccaagtgggcagccgaactatccggctaccacatcagcttcgagcccaggacagccatcaagtcacaagtcctggcagacttcatcgtcgactggactgggccaataacacaaccagacccattcacagaaaagcatgtggatagggccaagaacgaggaggccgacgcattggccaaggccgccgccaggggcgagtccttgccctccgacgtgttctttcacatcatcggcacgccagccgtccagagccccgaagggctccaaataactaatgacagcgagggccaccgcatagtcaacctaatcatgaccgaggactggcgggcaccaataaccctgttcctgtag

SEQ ID NO: 29200 - DNA, 492 bp, Zea mays
  Peptide Sequence Number=SeqID_72575
atggcagaagggacgccgggcgatctggcgcgctactgcccaccacctgcaagccgaaggcgcaccatcacctccgttccaagtcctccctctccgtgtcgtcgtcctccgtcctccgatccccaccgccgctacgcatcctgtccttcccttactctccctcacgccctctacgtcaccatgactcccttcgcggcgctcttcatctttgccttccttctcctttgcttcccctcatctcactccacaggcgttgtcttcccctacatttccagacacacgcctcaactgcaggcctacctctcgcctccgggactcgaccacggtggccacctcggcggcctggataggatcgacgtcgacaatggtgcgtggaagcaagggtgggaggtcgtcaagtacatggcacacaatgatattgcgtgcattgctaggaacttcatcatcaagatgaacctcttcgtgaggcaaatcaccaccagggtgaattaa

SEQ ID NO: 29201 - DNA, 534 bp, Zea mays
  Peptide Sequence Number=SeqID_72576
atgtaccatgttagagtggatgcactaaccagttcaacccaaaagtttaagtttttcaaaaaaggggaagcttctcgtataagggatgatgagcacagtgcgccgtgcggcacgggcgcactgtttgacaacggactggacaggctccgcccgctggcttatgtcacgggccacaagccacgcggcatcggcgggtctccgcctgagcggggggcgcaagggttcggtgttcctccgtggaggtccggtcccaatgatacatcccggggtgtatcatcttttctcaccacgtgggtaccgacaatggcccccgggcccgcctcaggggaagatacaagcctgcagatggggccaaaatctgattggcgattggcttgctgctcctgcgcgtctgttgatgcaattattgtcggcccgcctatggtcacggcgactgccatgcctgttcccgcggctgactggcccgtgacttccgcgcttaatgtcgttgctgggccatgcgcggggtgcctcgagtcgctgcactggttttga

SEQ ID NO: 29202 - DNA, 1554 bp, Zea mays
  Peptide Sequence Number=SeqID_72577
atgacggcgccgccctgccacaggcagccgtcccctctcaaccccaactcgagggccacgcagtcgccgatcagcaacggcaagcccaacgcggtctccacgacaaggaggcacctcgccaacctcgaccgcctcctcgtcaagccgccaccgctcccgctcccgctcccgccgcagcccaggaaactgccagccgatgaggtaccaggcgacggggaggccacccccgacgaccgcagcggccacggcgggctcctcaacgcgctgaacctgtccacgtttctgcccttcacgcggaaggcagccgtggacgagatgtccccgagcagcctggcgtacatgcagcgcctcctcacgctctccccgcggctgtcgcccaagggctccatcgcgggcgagtggcggaggtaccacggcgaaggcaggtgggagggcctcctcgacccgctcgaccagaacctgcgccgcgagctcctccgctacggcgacttcgtgcaggccgcgtacacggcgttccactccatgccgtcggcggcggaggcagcctccagcggtcagcagcgcaccctcgtgctcccggaccgctcgtaccacccgacccgcagcctgttcgcctcgtcgtcgctgtccatcccgccgtgggcgcagcggcggtcggcgcccagctggctcacgcagcgcaccagcttcgtcggctacgtcgccgtctgtgaaaacgagcgggaggtccgtcgcatgggccgccgcgacatagccatcgtgctacgtggcaccgccacgtgccccgagtgggccgagaacctccgcgccggcctcgtgccgctcacggcggacgacgacgcgtccgcgcccaaggtggcgaaggggttcctgagcctatacaggacgccaggagaccatgcgcccagcctctcgaccgccatagtggaggaggtgaagcgtctcgtgcaggtgtacaggggggaggagctcagcatcacagtcgtgggccacagccttggcgcgtcgctggccctcctcgccgccgacgagctcagcccctgcctggctgctcaaacagacggcaccgcggaccaccagccgccgccgatcgcggtggtctccttcggaggccccaagaccggaaaccgcgcgttcgcagagcgtctgcagcgcgagcgcggtgtgaacgtcttgcgggtggtgaacgcgggcgacgtggtgacgcgcgtgccggcgccgatcgcgcgggaagggtatgtgcacgcgggtggcgctgagctgagactgcacaacagcgactcgccgtgcctgcgtcccgacgcgggtccagcgtgctgccacgacctggaggcgtacctacaccttctggatgggttcgccggctccgggcggccgttccgccccgacgcgagccgcagcgtggcgcggctgctgacataccagcggcccaacgtgaagcgtgcgtacgtggagcacgcgcggatgctcgggttcgagccggcctcaccgaacgccagcgccaatggcgccaccgccgacggccagtacggctacctggccagccctacatga

SEQ ID NO: 29203 - DNA, 543 bp, Zea mays
  Peptide Sequence Number=SeqID_72578
atgggaagggagacgggtcttccacaacttctcgcgcctctactgctgacgggagggaagggagcggatctggtgatccgtggtaacgtagttctcaacagtgtccaggttgcaaggcccatcgtagagcaggccccgctcggacctgcgatgctatcctggcccggcccgcgaggggcaaagcatgcacaagcacaaccgatgatggttcatgtcaacatgtggattgccagagacgcgagtgatggtcaaaagcagcgtgtcagtctggctagcgccgcttccattgactaccatttatcttactgccatgtacttgacgacctcccacccttgcttccacgcaccattgtcgacgtcgctgaactcgatctggtcatagaggcccctcgtcgtgaattcgtgatatccaccagcacctcacatcctatccaggccgccgaggtggccaccgtggtcgagtcccggaggcgagaggtaggcctgcagttgaggcgtgtgtctggaaatgtaggggaagacaacgcctgtggagtgagatga

SEQ ID NO: 29204 - DNA, 1965 bp, Zea mays
  Peptide Sequence Number=SeqID_72579
atgcagccgtcgcgctcacagcacgccaaacatcaaacgagaacgcacacgcacttccgcacccaggtgctggaggcgcccctggatccgggatccgatactgagtaccaggacttccagtttcggttcatcccggaggcgttcgagctccagatgggcggcgttcccgtcggcggcggcggggcaaggaacggagacggtaaggtgacggagaaggttcttgagttcgagttcgacaaggtcaggattagcattgcgtccagggacgacgaggcggacggatacgcgccgccgaggagctccttctccggggcgagccacccgccggagccagtggacgagacggacaccgtctttgtcgctgtcgacggccgggagaagccggtcccgaagccagtcatctcgtgggacgcgtccaggccgccgagcggcgcggcgagcccagacagcagcatcgacagctccggcgccacggccacggtcaccagcatcgcgccgagctgcaccgtcaccagccgcagcgccaagaccagcgtcagcagcagcgcggccagcgacggcagcggctggagcaacggcaccagcagcggctgcggcggcagcgcggggaagccgcacaagggcggcgaccccaggtggaaggccatcctcgcggcgcgcgcgcgcgagggacccctcgcgatgggcagcttccggctgctgcggaggctcgggtgcggcgacatcgggacggtgtacctgtcggagctcagcgggggaggccccggaaatggcgacgtggcaaggccctgctggttcgcgatgaaggtgatggacaaggcgtcgctggagagccggcggaagctgagtcgcgcgcagacggagcgggagatcctccagctgctggaccacccgttcttgcccactctgtacgcgcactttgagaccgaccggttcgcctgccttgtcatggagttctgccccggcggcgacctccacgtgctccggcagcgacagcccggcaagcacttcccagagcacgcggcaaggttttacgccgcagaagtgctccttgcgctggagtacctgcacatgcttggggtggtctacagagacctgaagccggagaacgtcctcgtgagagaagatggccacatcatgctctccgacttcgacctctcccttcgctgcgcggtctcgccgacgctggtgagaccttccctgggctccgaccccaggaacgggcaggcctgcgcccagcccaccgcctgcatccagcccacatgcttcatgcccaagctcttcggccagaggagccagaagagcagcagcagcagcgccgccaagaaacccaagggcggcgccgagcccagccccaggctgcagcaggcgggcaccggcctgcccgaggtcgtggtggagccgaccggggcgcggtccatgtcgttcgtggggacgcacgagtacctcgccccggagatcatcaagggcgagggccacggcagcgcagtggactggtggacgttcggcatcttcctgcacgagctcatgtacggcaggacgccgttcaaggggcagacgaaccgcggcacgctgttcaacgtcgtcggccagcaactcaagttcccggactgccccggcacgagcagcgccagcagggacctgatcagaggcctgctggccaaggagccccagagccggctgggcgtgaagaggggcgcggccgagatgaagcagcaccccttcttcgagggcgtcaactgggcgctcatccggtgcagcactccccccggcgtgcccagggccgtcgagcccgccacggtggcagtggcactgcctgcgcaggcaaagccgaagccggcgccggcgccggcgccagcggagagagtggagatcaacagcggcggcggtggcagcaagaggatttctggggcttcttccggtgctgagtgcggagggaagttcctagacttcgagttcttttag

SEQ ID NO: 29205 - DNA, 150 bp, Zea mays
  Peptide Sequence Number=SeqID_72580
atgggcgggggcctcctggcagcagcatccgccctgaggtcagtgctgccgctgttcggccccctggagcagaagtcgtcgtcgtcgccgctgctggagcagggatgtttgtgcgagcgagagttccttctcacggaaggtgatgagtga

SEQ ID NO: 29206 - DNA, 213 bp, Zea mays
  Peptide Sequence Number=SeqID_72581
atgccgaagcactaccgtcctgcggtaatcgtctcatcgcccctctcaaaggccttctctgatgtgccttgttcttaccgtgttttagggttcgtcactaactcactatatcccgattaccgctgtttattgccggcgagccgtcatgtagacggcgtactgttctggataagctcgtgggttgctgatgctaaccatatgtgctgtaactag

SEQ ID NO: 29207 - DNA, 740 bp, Zea mays
  Peptide Sequence Number=SeqID_72582
atgacgctgtcacaccgtccagctcatcatccacctgaagctcaacctcccacggtgcacttcgtttggcagcccagccaagagtcatcggtactcgcgatgtcgtgcgcgtccgacgactactatatcaaggactatgacgtcatcttgacaccagaggggctagccaacgagacggcagcaatggcggaccgtgaccgcagcggcatctacggcggcgcccacgccacctacgggcagcagcagcagcagggaggaggcgggcgcccgatgggtgagcaggtgaagggcatgctccacgacaaggggccgacggcgtcgcaggcgctgacggtggcgacgctgttcccgctgggcgggctgctgctggtgctgtcggggctggcgctgacggcctccgtggtggggctggccgtggccacgccggtgttcctgatcttcagccccgtgctggtccccgccgcgctgctcatcgggacggccgtcatggggttcctcacgtcgggcgcgctggggctcgggggcctgtcctcgctcacgtgcctcgccaacacggcgcggcaggcgttccagcgcaccccggactacgtggaggaggcgcaccgcaggatggcggaggccgcggcgcacgcgggccacaagaccgcgcaggcaggccaggccatccagggcagggcgcaggaggccggcgccgggggaggtgcaggtgccggcgctggcggcggcggcagggcttcctc

SEQ ID NO: 29208 - DNA, 882 bp, Zea mays
  Peptide Sequence Number=SeqID_72583
atgactcttggctgggctgccaaacgaagtgcaccctgggctcatcagcgaggtagtacacctagccgttgcaccaccggatgtgctactcctctacataaatcttgttcgaggacactcacacaacatcagcaacggccgtcgtcccagcgcacaagaattcatggtcgcgtcattgtcggatgcggtgcccagaacaacccgagagccgccgacattggcgacgaccatgaggtccccctatttgaagatggacagcgcggtgcagccgctctggaccgcgtccaagcggcggctgcggcggagcttgccgaacacagcgacgcatgcggccacgtagtactgctttcagaggtcgaactggcagtcgccaagcttcttctcgtcatcgatgagcgacgccaacgtgagcgcctcctgccagtggtgtttgttcggggtttccaagtaaggtgccaaaggttcaacaaaccaataaacagatacgaaatagggttcaaaagaaaggagcaaaataaaccgaagagaaccctggtctggcgcaccggactgtccggtgtgccaccggacagtgtccggtgcaccagggaggatcgtcctcaaactcttcaccttcgggtttctccaggcgcacttcgctataattcatcggactgtccgggtgccaccggactgtccgggtgccaccggactgtccggtgcaccaatcggagcaacggctattcgcgcaacggtcgactgcacaatgccctaacagagctacagttcgcggcagaagtcagagcaggcgctagacgcgcaccggacagtgaacagtacctgtccggtgtggcaccggactgtccggtgcaccaagatgttagagctccaacagttggatga

SEQ ID NO: 29209 - DNA, 210 bp, Zea mays
  Peptide Sequence Number=SeqID_72584
atgagactatgggaggacctcacggttgcctcacgctccttcccatcactcgtggccctcgctgtcgcctacttcgagctcgcttggcgcgccaacgcaccaggatgtgaagcccttattgcgcagacgctgtcctacctcatggctctgttgctcacctttgtctctagcactaggtcggtcctctgccacctcttcgtgctctactga

SEQ ID NO: 29210 - DNA, 609 bp, Zea mays
  Peptide Sequence Number=SeqID_72585
atgactagggcccgtttgctccgctccttgctggagctgcctggcccagtcagctacccagcgtccgattttggacgctcggatgcctgcctacaacagagtgacgagactccaatggtctgggagatccttctttatatgtatgtcctttattcgccggactggcattacaggagcacaatgccaaccttccttttcctatatggtgctgcctttgctgtagttcatttctttgcccggttccaattcgtattcaagctgcattacattggcctctgcttcctctgcatcccccggatgtacaagtactacatacagaccaaagacgtggctgcgaagcggctcgcaaagctgtgggttctcacgttaacccttgggactctctgctggctagttgatcgcatcttctgcaagaagctttcgcattggtatgtcaacccgcaggggcacgcatggtggcatgtgcttatgggcctcaactcatactatgcaaacacattcctaatgttctgtcgggctcagcagcgcgggtgggaggcgcgaatcacctaccttcttggatttttgccttatgtcaaggtccagaaaccagagaagaagagggaatga

SEQ ID NO: 29211 - DNA, 483 bp, Zea mays
  Peptide Sequence Number=SeqID_72586
atgcaagggatacttcaaatcgaagttctcccggcgaggttggtggccctggcccctggggccctccccgggcgcgaggaacatcgtatggaagcctcggagcgccggcgttccatcttccgctcctcccttattcgcgctcggcacgcaggcggcggcggcggcactcaggctcgggatctcagcgacggcgctcaggctcgggatctcagcgacggcgcccaggctcgggatctcagcgacggcgtcagcggcttcccttcagcctcgcgccctcgccttcgatcctccgcacaccggccggtgaccctgcgtgcgtgcccctctctctctccgcccgcttccggtggatcgtcaacggcgcccgatccctgcgccgcgcgcagtgtgagggccgcgggagcgcgttatttctctgagggcactcatgatttagcacaagtcatactgatctctaactctggtgacataagctgttgttag

SEQ ID NO: 29212 - DNA, 1665 bp, Zea mays
  Peptide Sequence Number=SeqID_72587
atggcgacgcggcggcgcctctctccgactttcttcggcgggctccgggcccgtgagctcggcggcgccagtgtctcctcccgcgccacggcggggctcccgtatctcgctgacctctcctccgaccccggcggccgcggcggcggggtcatagccgtcgagcactccggcgatcccgccatccccttcgccatctccttcggcaagactgcacagacctgtaacctcttggcggtcgccgacgaagacgggtacgttggcctctacgacacccgccggcgcctcccttccgcctcctcgtcactagagaagtcagctgaaacgagggtgtgcgactgggttgctcacaacaatgcagtctttgacgtgtgctggatcaaggagggatcccaaatactgactgcatccggcgatcaaactgtcaaaatatggagtgtaggaaacaggaaatgcattggtgtcttgtcagggcatactgggagcgtgaagtcgctgtcttgtcattcttccaatcctgagctcattgtttccggttcaagggatggttcatttgctctttgggatttaagatgtgaccctaaatctccaaacagccatggtgaaacgtgtctcactgacaacacaaagtcactgaacaaagttgtgctacatgttaggtcttctgctgttgtcagagaagcccacagtcccatactaaggagccgaacacggtctcgagcaaaggcggcttcaacaagtatcacatcagttctttatctgaaagatggtgtctccattgctacttctggagctgcagacaatgttgtgaaaatatgggatacacgaaacctgaaagtgccgttctccaacaaaaactctcaagcaggggcccaacctttgctcaaatctggacaatctctgaacaaacatactggtcttttgtctctgaaggagggggtgaaacatggcatctcttgcctgtctcaagattcgtatggtgcatacattgctgcgtcatgtatggataacagaatctacttgtacagtgtgcttcatgtgaacaaaggtcccataaaggtttacactggcagtaaaatagagtctttctttgttaagtctgctatcagtcctgatggaactcacatccttggtggatcaagtgatggaagtgtatacttgtggcaggtggatcaacctgaaagtgctcctatagttctgaaaggccatgaaggcgaagcaacttcggttgactggtgtgcatcagaggttggaaagatagcaacatcttctgatgattccacggtacgtgtgtggagtaccatgaaaatggactgtacaaatgtaagctcgccaacagtgatccgtaagcggataacagcaccaagcaccgagtaccgaaggtccattacccatgagcctgctactacatcaagagacggagttgtctgcactagcggtgatggcgaattgcaaagcggttgccactctccccttcaacctagagcactgcacttcggcactcctgaatcttcaaagaagagggccttggcattgtttgaggaggaggcacttgattcaaggaagagcccggaagcacagacgaacagcccctcttctgttctgagcccgccgccgtcgttgaaacggagaacgattcgagactattttgccagtgccgcatcttga

SEQ ID NO: 29213 - DNA, 360 bp, Zea mays
  Peptide Sequence Number=SeqID_72588
atgggaacaaatgggcatctcgacctcgacacgggaggtaagtccgtggatcaaaaggtgccaataaaaagaccaagtattgggttcaacaaaagagcaaagggacaaccgaaggcacctctggtctggcgcactggactgtccggtgtgccaccggacatgtccggtgcaccagaggactcaaacttcaaactcgtcaccttcgggaaattccagaggcgactccgctataattcaccggactgtccggtgtacaccggacatgtctggtgctccaaggaagagcggcctcaggaactcgccagcctcgggaattcatttcaactgctccgctattattcaccggactgtccggtgtaa

SEQ ID NO: 29214 - DNA, 315 bp, Zea mays
  Peptide Sequence Number=SeqID_72589
atggcgcgcaccgcggcgcagtccatgaatgtttggtttaattcagctcttttcgttcaagctcgtgcaacaggatgtttgatccttatacaatttgctggcgagaggagtggtcgcctactcgcctgttcagccgctgaaaagacaacagaggaggacgagaacgcgctggagggggagggggcctctgcagactacaaccgacgcacgatggagggagcgcaactgctgctcgagcagagggccgccaaagcacaacagggcggcaggagaggagagcggcgacaatgggtaagggacggcgatgctagataa

SEQ ID NO: 29215 - DNA, 655 bp, Zea mays
  Peptide Sequence Number=SeqID_72590
atggggaggggcggcggaagcagctggggagagggcgacgtggaggggccgaggctggatcgccatgtggggccgacagatggcgggctgatgagcagagtcaggaccttgcgagtagcacaagaaaagccggcgtcaggatccaacgcgcccacgtggcagaggtggctggccggcatatctgccactgcagatctccgtgaagacagatcttaccttgctgaccattctgctgcttccatcatctctactgaacagctcgcttcctcttcgtattccttctcccccttctcctcgcctccggttaaccgccacagcctggattcgccttctcccgcggcggcgcggccggccgctgctgctgcgtcggcgtgtgagatggatgattgcgacggcggcggcaagaggccgttccagctggcgcggtcgctgatgtaccaccaccacccggggcaccggccggcggccgcgtccaggtggcgacggcagcaccagcagcatcagctcgcggacgagccgcgtgcgccccggccgcaggcggtggtgctgtacacgacgtcgctgtgcggggtgcgacgcacattcatggactgcgccgcggtgcgcgccatcctgcgcggctgccgccacccagcaacagcgcagccacataaag

SEQ ID NO: 29216 - DNA, 603 bp, Zea mays
  Peptide Sequence Number=SeqID_72591
atgcgtgctttgctcctccttatgctgcgcctttcgctgcctccgcctccactctgcgtaagtaggagggcagaaaagggaaatcttggtgtgccactactgccaggccaaggttgttcgttttatagcttcaagacaaacacatacaaactgaactttacggagagcccttctggtataaagcttatactaattacacatccaaggactggtgatcagcgagactcgctaaagcatatctacaacctatatgtggaatacgttgtaaaaaatcctctgtatgctcctggaacaccaatcaaccccttctctctttcagtccacctctctttgtctgttccacggtcgttgagagtgtgcctttggagcacaggcatagccacaaggcctgcggatagcgtaggcgggcacacagttatatttgagcattttgacttaagtaatgagcagacattagacagatataagtgcataacttatttgggaggcatgtcgatcctacaagatatcatgatagatgtagctagccagcatcaggtgttagatcttttcacatctagtagtcctcggtctcccaaacttactaaaacttgtgaaatctaa

SEQ ID NO: 29217 - DNA, 1677 bp, Zea mays
  Peptide Sequence Number=SeqID_72592
gcactatcaaatggtcgtcatgccgtgggtcggctcgtcagacacgacctatttggccatctatacctctgcacgataatgctggtccttgtctcagttgtcaccacctcgttcgtcattctacttcctttctccctccccccatgcctctacctccgcgccaccccattctcgacaaacggcgtaggagcatgcgcctccttcccgtattcgtccgacaccagcctcgacaccgactcgcgcagtggctattgcacgtccacgaagacgtttcacatcatgcgcacaccatcggtttcgccgtcgtcggacgtcccgttcgtcttcccggccttcgccctgttctttctccccaaccagctgcccccacccacagtcgcaaccgcgagccgtccgacgctcgtcgacgcgggtacggagcgagtcggtcatgcttctggactttctccgtgtgtgccgttgaggaggacatggtggcgcctgccacgcttaggttatcttgctgataaggagtccaggtctgagatattggacaaccaaggcctgtaccgtggcagcagtcggcatatgctatggagctggtggtcgtgcggtatactacctatatcgcctccagatgcccaggtcttagtcgtgtccttctccggcaacgaacagcttgggcctacttcctattggctgttgggctgcttgatcggccggcccatcatcaagcatcaggtgtttaggcctttagggttaggcaggcatccaatccagccgccgagcgccacacgcacacccagccctcaaggccaggagtcacccagccgaccgccggtccgccatgacgccattccctgttcccggccgccggcgcccgccacgaacgtcgtcccgtctcctgtgctcccggccgccgcctcccgtcacgagcccacgaactcccgcccgccgctctggtggacgaactcccgcccgccacggtcaccggctcaccgctgcgctagcacttggcgcgtggacgacaggacgaggacgagagcagtcgagctcgagcagcttctggaagggaaggccgtcgacaccaccgcccccacggccccacctcactgtctcgccgtcggccccccacctcactgcctcgcagcggccggccacaccatcacagcagagcagccggccagtgctatggatgtggatgttagagttgatattgagaatgggtctaatgagaatgaagtgcaagccccaattatagatgatggcaatgctcgctgcgatgaccaagttgctggtgaaccttctgatggtgctaatgttgctgctacccctcttgttggaaagaagaagaaattcatgggtgtagagaatcgtgcggtcaaacagcgaaccactactcctgtgagcaagcttaaggcatccaagtcagtaggatcaaacaaggatagagctattgttttagtgccatcatttgcaaaagctgtgcaaagcgcaaatgcaagtgcaagtcaaagcgcaaatgcaagtgcaagtcaaagcgcaaatgcaagtgcaagcactccaagtggtagccaatgcgcaaatgcaagtgcaactgctcaaggaagtattggagacaacgaagaagaaaatgatgtcaagattggaaaaaactcacttcatgggtttggggtcacttcacaaggtatgagttag

SEQ ID NO: 29218 - DNA, 1023 bp, Zea mays
  Peptide Sequence Number=SeqID_72593
atgacccccgctccgggtggccgaactgcagcagcgcaggcctcagggtgggtgctgctgcaatcttgccctcgcccacgccgatgctcgaggggcgaggacaagtacaaagagccggaggcccgaagcgtggatggtggcggtgatcccatcggcgacagggacttctcgagccgcctccacctcggcaccgacgacaggggccgtcagccctccggcagatccccactcagatcctcccggacgagtggggcaccgacctccgcgcggaggcgccataccggaggggccaccgggagccaagccgacgagctcgacacgctggggctgacgacgcccgccgtcgaccagccctgcattgtcgaagtccgaccctctcacagggccagcgagcgccctctccctcgaacaccgcaggagagggtgacccacgaacccgcgcgggaggtagagctccggctcagcccggcctccaccccagcgaggatgatgaacatccttgaagctgagggtgggaccaagatcggaccgggaaagggggataccccgaaaaggatccttccccgtgaaggaaccaggctccgagcctccctactgatcagaggttcgaaggctggccccccggaagggttcgacagccgcctcagatcgcgtgggccctacacccactactggctggcccccgaagggttcacagccgcctcagacgccgagcgagggatgaccatggctcaccggagacaccatgttcggcacccatcgagggcaacatggcgctttccccccctcctccttgcggaaaggcgacgcaggggcgtatgtaaaaaagccgagtctgtccctgatcgccctctcgccctgagcagaggctcgggggctgctctcgcaaacccggctctggccgaaccgttgacagcgtcaacataccagcccgagaacttgggacccgaccgtacacccgggctacggccagttcgcatgagggaacaaccagaccagccgaagcattacgcgaggcattaa

SEQ ID NO: 29219 - DNA, 2565 bp, Zea mays
  Peptide Sequence Number=SeqID_72594
atgggtgagggttctgctgctggtaaggacgcgaaggggaaggggaaggggaagaccaaggccgccgccgcggattcggccctggtcgttcgcgacgactcctacctagaggcggtcactcagaagaggattcgcttcttcgaggagatccaggcaaggcaagccgtcgagcggctgaatatcggcggcgaagttatcaaggtaactttgcctgatggcgctatcaaggagggtaagaaatggataacaaccccaatggatattgctaaggagatatcaagtggatttgcagctagttgtttgatagctcaagtggacgaaacactctgggacatggggaggccactcgaaggtgattgtaaattgcaaatgttcaagtttgataccaatgaaggtcgtgacaccttctggcactcaagtgctcatattcttggagaatctattgagagagcatatggatgcaagctgtgtattgggccttgcaccacaagaggggagggtttctactatgatgcttactacaatgatcagacattgaatgaggagcactttggtatcattgaaaaccaagctaaaaaggctgttgcggaaaagcaaccgtttgaacgcattgaggtcagcagggcagaagctcttgaaatgtttgctgagaatgaattcaaggcaaccttccttgctactgtcttgtttgtttcattcctctatcattttgctgcttatgttaaatatatatacgacttccatccattcttacaaaaaagtgaattatatgttcaggttgaaatcattaatgagttgcctgaggacaagaccattactgtatacaggtgtggtcctttagttgacctatgccgtgggccacacatcccaaatacttcctttgtcaaagctttcgcttgtctgaaggcttcatcatcatattggagaggaaaagttgaccgcgaaagcctgcagagagtatatggaatttctttccctgattctcgacgtctcacggaatataaacattttctagaggaagctaagaaacgtgatcataggatattagggaaagcacaggaactcttctttttccatgaacttagccctggaagctgcttcttccttccacatggtgctaggatatataacaaactgatggacttcatgcgacaacagtacagagatagaggataccaagaggtgttgagcccaaatatttacaatatgcaactatgggaaacttctggacacgccgcaaactataaggagaacatgtttgtttttgagatcgagaaacaggaatttggacttaagccaatgaattgtccaggacactgtctaatgtttgctaatagggttcggtcgtacagagtgagcgagcgaaagggcctcaagctgagttggttaggtggtttgagtagcacttcctgggttcgactccccgtgggagcgaatttcaggctgtgttatccccaattggccgatttggccatgctgctgcccagtttatccatgccaattattgcgcttgggggttttcacacagtggagcagggaggggggcagccgcctgcatgtgaccgctgcttgtgccaagagttgcctcttcgcatggctgattttggagtgcttcatagaaatgagcttagtggtgctcttacaggtttgacacgtgttagaagattccagcaggatgatgctcatatcttctgcagagaagaccaaatcaaggatgaagttaaggctgttttggaattcatcaattatgtttatgagatatttggcttcaaatatgagttggagttgtctacgagaccagagaagtatctaggtgaagttgaaacttggaacaaagctgagcaacaattgacagaagctttaaatgagtttgggaagccatggaaggattttgagggcctgtttggttctgtcctcactggagctgcctggccaaggttgcgctcccagcattgttttcccatgacattgtcttgtatcgagaggacttacatagatgccttcacacagattaatgaaggggatggtgctttctacggcccaaaaattgatattggtgtgtttgatgcccttaagaggaaatttcagtgtgcaaccctacagctggattttcagctgcccattcggttcaagctggcttattctgctgaggatgaagccaaaattgaaaggcctgtgatgatacacagggcaatcctaggttcggttgaaaggatgcttgccattcttttggagcattacaatggtaaatggcccttatggctaagccctcgccaggccattgtttgctcggtatcttctggttcagtggaatatgcgaaacaggttcttgccactctacatgaagctggttttcatgttgatattgacgcgagtgacaggacaatacaaaagaaggtacgggaagctcaactggcccaattcaactacattcttgtcgtaggtgcacaagaggccgagactggaaatatatgcgttagggtaagagacaatgctgacctggtcacaacgagtgtagatggcttcatcacacgtttgagggaggaaatcgcagccttcaaatga

SEQ ID NO: 29220 - DNA, 228 bp, Zea mays
  Peptide Sequence Number=SeqID_72595
atggataagccccggtcagtaaaatattccggctgccgtaccgtgttcaccgcggtggaaaccgataagcccgccgaacgtgaggaagaaatcgaagttaccgaagaagagacaccaccacctttggagtctcaggccgggaatcatttctactttgacatctatggatctgagcctgattcacctgtgaacgaaggcaagccccggtgcatttgccaccttccttga

SEQ ID NO: 29221 - DNA, 300 bp, Zea mays
  Peptide Sequence Number=SeqID_72596
atgccctctgccacgtcgccggggtccgccaccgtcgactcgggttgcctccgcgccttcgccgccaccgaggggtccccggagttcgctttgagtccattagcaccgccgccgagccacttcaccgtggaccgcccccctccggtgcccctgtcccgacctagcccccaccagaaggttccccgtgccctccccaacctccccggccatccaggttgccccaaggacccgcagagcacccgcgcccctcgtctccggcgagttctccgccgcgggaacgggcgccgccgcctctgttag

SEQ ID NO: 29222 - DNA, 1443 bp, Zea mays
  Peptide Sequence Number=SeqID_72597
atggcggggaaaagcgagtcgggctgcgatcttggtcccgccctcagcttcaaggatgttcatcatcctggctggggcgggggccgggctgagccggagctctacctcccgcgcgggttcgtgggtcagcctctccctcagcattcaagggagagggcgctcagcggcccagcgggagggtcggacttcgacaacgcggggctggtcgacggcgggcgtcgtcagcttcagcgcgttgggctcgctggctcggcacgcggtgccccctctcgccgcaagggcggttgtcgcgccgcgcacaccggaggaccgcccaagacgtcgcgcgctgcaagggcggcgttcgtgttctggggctgtcctgcctttgccccggtacagcacctatgcatggagatcggtgctccgctcatccgggaggatccgagtggggatctgccggtgggtagatggctcctgtcgtcggtgcggaggtggcggctggagaagtcctcgtcgccggcgagatcaccgccaccatccgcgctcggggcctccggctctttgtacttgtcctcgcctctcgagcgtcggcgtgggcgagggcaaggttgcagcggcgtctgccctgaggccatcgttgctgcggttcggccacccggagcgggggtcgttgtcgctgctgctggagcgggcgacggcgagccatccgtcggccttctgttgctccgcaggccccccccaatcgtgtggggttgttcgtacctgcggaggtggaaccggagttccgtttgtaatggcaacttgaatgccgactcgcctgtcggctatctgaaccgcttcaccaagcgtgagtcgccttgtgcaaaggtgacgagtgagagcctggttgggtcgtccactggcgggaccgacgccgcagtcgagttgtcggggccacgagcctggccgatgtcctcgggggacagctggctgaggcctcggggtggccggccgagccgtctgctcgagccggattcctggagaagaccctggcggcgatggcccgggcgtggtgctgatgtcgtccttcggagtggggattctccaaccgcgtcgccgtccgaggctaggtcagaccccaccgatggtgtagatgacgccgagggtgctgctgctccctttaactatcagtgttcgagcctgcaggatcggggttctgtcaccgacgcagtcaaaaaggcccgaaaaatcgtttcgacagaggagttttcgagcgtgaagacttgttcggtccgtggaatcacttatccgagcgtgagttacatatcgcagaaggtgatgagtgagtcgaagcaccacgtcgcccacctggaggtctcgggaccgaacccctcgggcgtggtagcgtcgcagggactgctggccctcgtcctcggggaaccgtattctaagtctgtgggcaagacggcctcggccccatag

SEQ ID NO: 29223 - DNA, 537 bp, Zea mays
  Peptide Sequence Number=SeqID_72598
atgggcctccacctccaccgcaacgccttctctagcgcgctccccaccgccctcgtggggctgaccgcgctccaggtgctcgacctctccttcaacgccttcaacggtgtcgtccccggcgcgctcgccaacctcacctgcctcgtcgcgctcgacctctccaacaactcgttgtccggctgcgtgcgtgtgagcatgatgtgttgtgctgtgacgacgacgctcaacaacctaccgcctcttgtctccattctcaacgactacctttccaaacttctgcttattggtgattctggtgttgggaactcatgcttacttctcagatttgcagatgattcttatttggacagctatatcagcacaattggggttgatttcaaaattcgcacagtggagcaagatgggaagaccataaaacttcaaattgtgaactataaagtaaaaggtaaaatttatcctttttcatttgaaggacctctcagagatattgagggaactctgatcgctactgaaggagctctcatggccattgaatga

SEQ ID NO: 29224 - DNA, 99 bp, Zea mays
  Peptide Sequence Number=SeqID_72599
atgggcgagaacgacgaagctgacaggtgggcccgagctgctagggagagggagcggcgcgagagggagggagtgtatgcacatgatgaggtgttctaa

SEQ ID NO: 29225 - DNA, 300 bp, Zea mays
  Peptide Sequence Number=SeqID_72600
atgttcggattgcaggtggcaatgagactaatggttcttggtattgactctggtaatgctccagctctagttgatccactggcactagatctcagggaggatgaggacatcagacagtttgaggatcagggtgtagctactgatacttcctctgatgacaatgaggatctggggattccaccaccacctcctatgccaccttgttcccatgatcatgaggttggtggctccagtgctgctcctccgggtgctcctccagcgataaaccctgctctggctgccatcattcagtcactgtaa

SEQ ID NO: 29226 - DNA, 822 bp, Zea mays
  Peptide Sequence Number=SeqID_72601
atggagcctggcggagggacagctgtcggagctgttgagtccttgctgacgtcctcttgcttccgtaagggggctgagagccgccgtcatcacagatccgagccctggggtcgggcggagcggagttcgtcgtcttctggggctgagcccaagtctgagccctgggtcgggcggagcggagttcgtcgtcttctggggctgagcccaagtccgagccctgggtcgggcggagcggagttcgccgtcttccggggcttagcccaacccgagtccgagtccgagccctgggtcgggcagagcggagttcgccgtcttccggggcttagcccgagtccgagccctgggtcgggcggagcggagttcgccgtcttccggggcctagcccgagtccgagccctgggtcgggcggagcggagtttcctatggtgcctgtggtcgggcctgactgcctgtcagcctcactctgtcaagtggcaccgcaggcggagcggcgcaggcgacgctgtctctctgtcgggccggtcagtggagcggcgaagtgatgacggtcacttcggctctgtcggctggggggcacgcgtcaggataaaggtgtcaggccacctttgcattaaacgctcctgcgacttggtcggtcggtgcggcgatttggtcagggttgcttcttggcgaagacagggcctcgggcgagccgggaacacgttcgccgctagaggggggcctcgggcgagacggagatcctccgggctttatgctgatgggagttaccagctgagaattaggagccttgagggtacccctaattatggtccccgacaatag

SEQ ID NO: 29227 - DNA, 375 bp, Zea mays
  Peptide Sequence Number=SeqID_72602
atgcaagatgccgcatggcatgcgctttcgcactactgctcactgctcggtggggtggtcaatggtcttaacctgaggtattacccccgtcgtccatctggcagcacaggaggcgtggttgtctcacctgttggtgaggacaatcctaggttgagcagcacattcaacctagccgccgtgctaaacacggagctggaccatgccttagatgagctgagtagggctcgtgctgagatcgcccagctgtgggctaagcgcgcggagcatcgtcacctagaggatgagaacgatctggttgaagagtccgaggaactcgcaggagaagcccctgagcagcagctggttggtggagccgtggaggcaagtgtcccttga

SEQ ID NO: 29228 - DNA, 375 bp, Zea mays
  Peptide Sequence Number=SeqID_72603
atggagatgtggtcagggcgagcagtggctagggcgccccgcagcgagctcgcgcagggaacaaatgcggcttgccggaggcaggaagccgactggttttccatgggaggtgagcgcagggctgctgcagaccgtggagcaggcaaggccacacgccatggggggttaaatccttgctgctggaggtacaagaagaagggggcgccgaggcagaggggaagctacagggggtggcggtcgctgtatagaggaggccagccatgggcgacgacgagctccctgctcgagctaggggccggtccggccaggggagagcaggggcgagagaagctcgcctgcaccctggacagcagagggagcggcctgcgggcttga

SEQ ID NO: 29229 - DNA, 381 bp, Zea mays
  Peptide Sequence Number=SeqID_72604
atggcgccatggctggagcttcggtgcgccggggaggaaaggcgccttgctgtagccgtggggaagaagggctcgcgcccagggaggccctgctcatgcgcgcgtgctgctgcaggggcgtcgagcacaagggggcaaagggaggcgctggagggaagggacgccatgggcaaggagagggagggagctccatgcgtgctgggagaatggcgcctgctctccctgctgggttccgaggggagcaatgaaccggccatggtgcagagggggaggaggggatgtcgacccccatggctggtggcgagaggaatggaagctagggtggctggcttgaggaaaggggaggagacgccatgggaggccctccactggtgtgcgtga

SEQ ID NO: 29230 - DNA, 347 bp, Zea mays
  Peptide Sequence Number=SeqID_72605
cacccggcttcgtgcccttcccccgctactgcggtggcgaggtggaggaggagaagcggcagtggtcgtcggtggctgtcagcgacgacgacgaccgcgaacgctgccgctacaggcaccagcaccgccgcctgcgcagcgacgacgacgaccgccagccgatccagcctgctcccaagttctatgaagtacttattgcttcactttgttttgctatctttgcacatggcttcaggcatacaatttcatcttgtcgattgaaagaactgaaccaaagaaaaattaaagacaggagcacttctccagattcaatgccaattaatgatttgaagaggttgtcaacgtga

SEQ ID NO: 29231 - DNA, 369 bp, Zea mays
  Peptide Sequence Number=SeqID_72606
atgggctcaattgttctgtacattcaggttcaaaagcatctgttactcgggcattgcaaagagctgagaggctctcctcttgttcgatttattgaagcatttggaactgcattttctagaacaacattttgtgttccgatcagtgagcaaatcagaacattcatccagatgaggactaacctgaaggtggtcgataactccggggccaagcagaatcaacaaatacccataaagggaaacctcgccaaaattagaagagaaaccaaatgtatccctgatcttatttttcagattgaggattatgagaagtatttaatacagctaagcaaactaactaagtgtagcaagagacttccagatgcaagctag

SEQ ID NO: 29232 - DNA, 432 bp, Zea mays
  Peptide Sequence Number=SeqID_72607
atggacaacgcggtcgacaccgtaatcctcgtcaccggtggggccaacactgcgggggatggtggcgccagcatgcccaatcggctaggaaggaagatgattttagactgcccccgcctcaacagccacgccgcgaatcccgcgcacgtcagcccctccaccgcgatttcaccgcccgccccgcacgcggatccagccccccccgcgcgattcacctcccgcccgcgactcctcttcctcgacgtcgccgtagcagcacccggcttcgtgcccttcccccgctactgcggcggcgaggaggaggagaagcggcaatggtcgtcgatggctgtcagcgtcgaccgcgaacgccgccgctacatgcaccggcaccgccgcctgcgcagcgacgaccgccagccgatccagcccgctcccccctcaaacacctag

SEQ ID NO: 29233 - DNA, 132 bp, Zea mays
  Peptide Sequence Number=SeqID_72608
atggagcgccagccaggcgcctacactggcgaagagaaggcaccggccgaccggcgccccttttccctttggatgcaaggaagaacatcattagcgacgagaataggtctgtccgatatattgtatagttga

SEQ ID NO: 29234 - DNA, 480 bp, Zea mays
  Peptide Sequence Number=SeqID_72609
atgtcgttgattccgccgccggcgggcgggttgtcggccgccattgtcgttgtcgcgcggcggtggaaggagtatcatgtcatagctgccgtcgaaggacataaactcaagactcccgaaacggagcaccgtcccgggccggagaggttgctggagactgcccatctggagcttgatgggaagctgttcgtcaacacgcagcaggcccctacctggcgcgccaactatcggcgtttcgagaccggggggtccctaagccgacgagtcgggcgacgtggaggctcctccgaagccgaggtcgagtctgtcttccatggccgagcccgagccctaagtcgggcgaggcggatgtcgtcgcagaggcagggcggagtccgagccctggggtcgggcgaagcggagttcgtcgtcttcccggggctgagcccgagtccgagccctgggtcgggcggagcggagttcgtcgtcttctggggctga

SEQ ID NO: 29235 - DNA, 90 bp, Zea mays
  Peptide Sequence Number=SeqID_72610
atgaagacagagaacaagacatcagctttgcagctctctgcaggtgatggtgaagtgttccttgctttagaagagtcctatatattttag

SEQ ID NO: 29236 - DNA, 1467 bp, Zea mays
  Peptide Sequence Number=SeqID_72611
atgcctccaccttcgcgccacccattctcggcagagagcgtaggaggaggtgcctcctctccgtattcatccgacaccagccatgacaccgactcgcgtagtggctattgcacgtccacgaggacgtttcacatcatgtgtgccccatcgttttcgccatcgtcggacgtcccgttcgtcttcccggccttcgccctgttcttcctccccaacctgctgcccctgcccacggtcgcagccgcgagccgaccgacgctcgtcgacgtggcggcgcggccgcctccattcagtcttctatcgctctccacgccttcaggctctacgaattcggcaagggcacaaggcagcaacctccgaggcggccgggcgggctctgactctggcatccgccaccgccagtccggcctccacctccaccagttcacctctagcgtccctgtagcaatgacgcgcgcggcctgcactggcgccgcgccactgcccaaatctacttctgccattacatctgagcgacaagcgttatgtgctgagtgcttctcctctattgtgacggactgcctcctggtgcccgtcgccgtagccacggcggtcaccacgatcaccgccgccactccagcgaaccgacaagacgtcgccgcgccgacggtgctgcggacgccgcagctgttcgcggcgcggatggcgcagtcggtgctggtcggcgcgttcctcggcagcatcgtcctgggcaccaccgacctgcagtcccgcctcggcttcttcgccttcaacctcacctacctgctcacctccaccaccgaggccctgcccgtgttcctccacgagcgccgcatcctggagcgggagacctcccgcggcgcctaccgcgtgtcctcgtacgtcacctccaacgccgccgtcttcctgccgttcctcctcgccgcggcggtgctgtacgcggcgcccgtgtactggctcgtgggcctggcgcgcgagcccgccgccttcgcctactgcgcgctcgtcgtctggcgcgttcgaggccctgtggtgaacgagtacagcggcgcgcgcggcgccagggagtgcctcgcctcggccggcggcgcggggggactctgcgtgctcgacggcgcggggctgctacggcagcaggggatgagggagcgcatgcggtggagcagcttgggcgtcatgctcggcttcgtggtcgggtacagggctcgccagtgcgacgacggcggcgagcagcaggcacaaacgcctgggctgaagctactggtggaggacgcgaagcgcgagcacggcgtcaggtacgtgtacgtgtggcacgccatggcggggtaccggggcggcgtgaagctggcggcggaggggatggagcactacgagagcgcgctggggctggggctggctacagcagcgccggcagggacaaaattgacttttaccgtagctcataaaaagttacagagggtgaaagattaa

SEQ ID NO: 29237 - DNA, 495 bp, Zea mays
  Peptide Sequence Number=SeqID_72612
atgaacaaaaacactggcattcgaagtgccactacaaacggaactccggttccccctccgcaggtacgaacaaccccactccgagagggaaggcctgtggagcaacggaaggccgacgaacggcgcgccgtcacctgctccagcagcggcgacgacgacgacttctgcccacccacgccaaaacttgtgaggcaagggcgggtagaagtccgcggagttgaaggcgactctccctacgtgcgcccccaaacgccatgggccgagtcttctccaacacgctccaaggccctcccctgcggcgcgggggctgggtcccgcatgtcatgcaaaccggctcaaaagcagaagaagccaaaccgccgcgtgcggtgcacacaaccgcccagcggttacaagcgattccccactttcgcccagaccaacgggcggaaggggcgggcagccatgcaggcggcatgcaactgcgccaggtggacgcgctactccgacttctga

SEQ ID NO: 29238 - DNA, 669 bp, Zea mays
  Peptide Sequence Number=SeqID_72613
atggcgctagagctagagctggagctggctggaggagctggtggagtggcaaaggaagcggtggaagtaggtgtggtggaggctatgggtgtagcgagagtggtgctgctgctgctactcgagtggctctgtctagtctacacttcttcttgcctccctgctactcaaggcgggcccaacctgtcggcgccgactcatgcctctcttcctttctccctctcgctgttcggtggggtcaccttgtcagcgcttcggcctgtcgtgcgctcgcgcgtctgtgtcgtgggccccgctcgccagtccgtgtcccctccttcaaccgctcgcacgcacgctgagatcgtcgcgcccacatcgccacctagctccaaaccggcacccccgaccccctctacaagtccccgtacacccccacttcccccctgcctcgctcatttcgcctctgcccactcactcgagctgcgcgtgcccgttcttcaagctcgccggagcttccccatcgccaggccccctgcgcccgaattcgtcgccggtagagctcgaccgccgtccgcgaccgtgctcctccaccatcaggcccagcctcgccatcgttcctgccccacccgaggaggtgatgctagcaacatggaggacttcgaggagttccaggactacgtcgagttctag

SEQ ID NO: 29239 - DNA, 318 bp, Zea mays
  Peptide Sequence Number=SeqID_72614
atggctgctcggcttctgcttgcgtacagggcaggtggcggcgcttggtgtcgcggcgtcgcggttgctcctgggcgcgacggggctggctctaggtcgcgtcggtctgcaggggcgcggcgcggtcgggctgggcgcctgagtgcgaggcgcgcagtcctcggcgggtctgctttggtcggtcctggtcgcggggcaggggctacacgagatcctgcgcgggactcggccgtgggcgcggcggctgcgtttctacgagcagcgtgcgtgatatttggcgtggggagaagaagcggcgccctgacttgcgggatttag

SEQ ID NO: 29240 - DNA, 2061 bp, Zea mays
  Peptide Sequence Number=SeqID_72615
atgtccctgacgaccacgacgagccgcctgcccatctgccgggcacgggacgtgtccaagcaggcgcctccagctgccaaggccgcgcctcctccgtcgccgtcagacaccaacggttttagcaggaggaggctgctgcggtccgcggcgctgggtttcgggctcggtctcgccaggagagacccagcgcgggcgcgcgccgagacgacgccgccatcacccgcgctggcgccggaggaggtgacatcgaaccggatgtcctactcgcggttcctggattacctcaacgccaacgcggtgcggaaggtggacttcttcgagaacggcacggtggccgtcgtcgagctggacgacccggcgctggcgtcgagagtgcaccgggtgcgggtgcagctcccggccgggggcctcccagcggagctggtgcgtaagctgcgggacaggggcgtcgacttcgcggcgcaccccgtggaacccaacctcgggctcatgttcctcgacctcctcctcaacttcggcttcccgctcctcttcctcgcctcgctgatctggaggtcggtcaccatgaacaaccctggcgctggcggcggggggcccaacctcccgttcgggctcggcaggtccaaggccaagttccagatggagcccaacaccgggatcacgttcgacgacgtcgccggcgtggacgaggccaagcaggacttccaggagatcgtgcagttcttgaagtcgccggagaagttcacggcggtgggtgcgaggatccccaagggcgtgctgctggtgggcccgccgggcacggggaagacgctgctggccaaggccatcgcgggggaggcaggcgtgcctttcttctctctgtccgggtccgagttcatcgagatgttcgtcggcgtgggcgcgtcgcgggtgcgggacctcttcaacaaggccaaggccaacgcgccgtgcctcgtcttcatcgacgagatcgacgccgtgggccgccagcgcggcacgggcatcggcgggggcaacgacgagcgggagcagacgctgaaccagctgctgacggagatggacgggttcagcggggacagcggagtcgtcgtcatcgcggccacgaaccggcctgacatcctcgacgccgcgctgctccgcccgggccgcttcgaccgccaggtcagcgtcgggctccctgacgtccgcgggcgggaggagatcctcagggtacacagctccaacaagaggctggaccccgacgtgtcgctcagcgtcgtggccatgcgcacccccggcttcagcggcgccgaccttgccaaccttatgaatgaggctgccatccttgccggccgccgcggcaaggaccgcatcggtgtcaaggagatcgatgactccatcgaccgcatcgttgccggcctcgagggcacaagcatgaccgacggcaagagcaagctgcttgttgcctaccacgagatcggccacgccgtgtgcgcgacgctgacgccggggcacgacgcggtgcagaaggtgacactgatcccacgggggcagtcgcgagggctgacgtggttcctgccgggcgaggacccgaccctggtgtccaagcagcagatcttcgcgcgcatcgtgggcgggctcggcgggcgcgccgctgaggaggtgatcttcggggagcccgaggtgacgacgggcgcggcgggcgacctgcagcaggtgacgcaggtggcgcggcagatggtgaccacgttcgggatgtcggagatcgggccgtgggcgctcatggagccggctgcgcagagcggcgacgtcgtgctgcggatgctggcccggaactccatctccgagaagctcgcagcggacatcgacagggccgcgaagcacatcatcgaccaggcgtacgaggtcgccaaggagcatgtcaggaggaaccgcgcggccatcgaccagctggtggacgtgcttatggagaaggagacgctcaccggcgacgagttcagggcgctcttgtcggagcacgtggacattggcagggagcagagggaaacagcggcccggaaaaagctggtcgtcaccgcttga

SEQ ID NO: 29241 - DNA, 1059 bp, Zea mays
  Peptide Sequence Number=SeqID_72616
atgaaggcgttcgagaagttccagtatgtagatgttcttgttcctattgtttcttttcctctgaagtaccgctgcacgagcctgttgtcgatgccttcgtgggccacacctatagccacaacagcaaggctaggagcagcaagccacagcaacaaggccaggacgaactgcacggtcctgacactaactatgcttgccaccggtacaggtattgctccgttctgcttgttcctgtggaacatgttctttgagaaacatgaccactacaagattttgcaaccaataagggtgctggaggttggtgctgtttcgttcatgtggaggggtgaagagaagaaaatagcggcgaccaagggcatgctccttgggatgggctacataggagctaggtttgatgagatatacacaaacatgcttaagcttggaaaagtcggtcaggatagttcttggaagctcctcgacgcggtgcgtgagacagggctcatcttcttccgcgcacccatggaggacaagctccagttggagctttctgaagttatggtgagaagtggcatgaatcctactgtcagtgatcaagcaatcctcctggatctcattgctaaatcgagatgcgtcgctgctgccaagaagtactttttggacctcccagaaacttccaagacttattttaggtatcacgctcttctcaattcttactccaaagttttgatgattgagaaggccgagtctctcgtggagaaaatggaggagctcaaatttccattcatattttatatgaagagaaaggtagtagtagcagagacaagacgttctttgaagccaccccctggttggaatcagactgcgaagatgatttctacagcgtcaacggagattactgggttaacaaacaactcatactttgatggagcacatgaggattgctttctcttaatcccatattgtgtgaggactcgcaaattccccgccaagcaaactgctagaaaacttttcagaggtggacatgatgaagatgatagtgctgatgtcgacacaaatgatgctgatgtacctcggtaa

SEQ ID NO: 29242 - DNA, 237 bp, Zea mays
  Peptide Sequence Number=SeqID_72617
atggagaacgcagaagtgcacattttgcacttgcacacggcgttcagggatctcgtgcaccggtgggagtgcagtggcttgcccaacggtgaacgcttccaatattgcatcatcaacaatatgaagaacttcgcgcatacggcgatagagagagatcaccaggccggcgatggcactgcaccggccggggtaaacaaacagttcgtcgcatctgggcaggcaatgaatatggaatag

SEQ ID NO: 29243 - DNA, 1586 bp, Zea mays
  Peptide Sequence Number=SeqID_72618
gcgttggaatattatctattccatatgcattgtctcaaggaggatggctgagcttacttatcttcttaaccatagcaatcatctgtttctacactggtattctcctacagagatgtatagactcgagttcgcttgttaagacctatcctgatatcggtgagctagcttttgggcggaaaggaaaaatcatagtagcaatattcttgtacctagagctgtatcttgtggctattgatttcttgatattagaaggtgacaacttggagaaattatttccaaatgctaacttccatgctgccgggctgaaggttggaagcaagcaagggtttgtgttgatgttcagtctacttgttttaccaacaacatggcttcagagcttgaacatgcttgcatatgtcgcccttggtggagtcatggcttctgtcattttaatcgcctctgttctgtgggttgggacatttgatggggttggttttcataagaaaggtgtgcctgtggactggtctggtatgccaactgccatgagcttatatgcgttctgcttcagtggccatgctgtttttccgatgatatacactggcatgaggaacagaaaaacgttccccacagtgttactcatctgcttcattatctgcactcttagctatggcctgacaggtgtcattggatacttgatgtttgggaaatcattaagctcccaggtgactctgaaccttccagctaaccattttgcctccaacattgcgatctacacgacgttgatcaatccgtttaccaagttcgcgctgctgatcactccaatagcagaggctatcgaagataaacttcatgtggacaagaataagaccgtcagtatcttaatccggactgcgctggttgtcagcacaaccattgtggcccttgccgtgcccttctttgcctatgttgtcgctcttactggttcgtttctcagcagcacggtcacaattttgctaccatgtgtttgctacctgaagatcagctcacggacctccaggaatctgaggttggagctggcagaagggggatggacgggcggcaacgtcattggtgcggcgacagagctggtgagcgcagaaggggagtggggccaagctatcggcgccagtttcttcgcccacgcgcccctcttctctctctgctttgcgggccagttttgccagtcgtcgagccgttacccccgcgcgcccgtcctctatctctacgctgtgggcctcccctgtcagctccgccctccccgcgcccgccgtggaccagcgcgcgcgcactcgcgcacgtcgccggaatcctcggccacgacgcccgcccacgcgccccagcttctttttgagccccgcctgcgcccgcactcactcccccgcctcatttcacgcagccccgccccaactccggcgacttcaccaccgcgggaaggagcggcgccgcccgcagccgttcacccctcccagtttggtctcccccgtccgatctcgatcgcacggccgagatcgcgggatactgcttcgcacacacgcgccctgcgtctgggcctgtctgtcagcgcccgtgtcccctggcgctgggcatga

SEQ ID NO: 29244 - DNA, 396 bp, Zea mays
  Peptide Sequence Number=SeqID_72619
atgccccctacaccaccacagggcatcccggctgctggaggagaccctaacggagacggagacgacgatgatgccagtggcagttcgagccatggcacggagctcttggaggagccggagccggagcgatggattgctagacccatcactcgtgacgccgctcacggggtagctgatggccttgacctgaagtactaccctcatcgttcaaccggcagtgctggaggtgtgattgtctcgccagttggtgagggcaatcccaggctgaacagcatggtcaacctggctgccgtgttcaacacagagttggaccacgcccttgacgagttgggcaagatgtttgagaacaggcgtagaggtgcgaggcgtgctcaaccagaacaacaggcaccctaa

SEQ ID NO: 29245 - DNA, 157 bp, Zea mays
  Peptide Sequence Number=SeqID_72620
atgaatggtggggtggctgcccccaccggatggcgacgccccgagttaccgcaaatggtgaatgagactttctccacgccctacaagcctctggagaactggctcctacctatactgtctcccactacaatgaccttcctcctggttccgcttgaag

SEQ ID NO: 29246 - DNA, 639 bp, Zea mays
  Peptide Sequence Number=SeqID_72621
atgttcctcgagggcaagggagtgcaaattacgctttgcccgaggcccctctcgagggtcatcatagctccgcttcgcccgagcctgccctcggacaaggtatgttctcgggagaatcctcatcccagccgagcccgtcttgggtcgtctaccaactcccgatgggacgtgtacacgacaagagcgcaggtgggcccttgggtgcaaactctgcctcgcccgaagtcgcccgagcctggcctcggctacctgctccccgcgaatctcgtgggaggccactccttcaactgtgacacacacgactacgaatactggagcgagcccgaccacgaactcgggcggacatccgcctcgcccgagcccaacttcagcctcgatatcagcaacagaaaggcactcgacgtcatcgtatattgcagagctgatgtattactcaagggatttttgccataccgtgtcaaccactacaacataggcaacctccttgtttgggggctcgggcacgtgaccgagctgcagaaatcaggagtttccaccgggcataagtcaacaacaagtgcaagacccatactaggccataccgtctacaaagctcggcttcgcctcctcaccgtacgtggccaactccggtacttctag

SEQ ID NO: 29247 - DNA, 1746 bp, Zea mays
  Peptide Sequence Number=SeqID_72622
atggagcttttccaaggcgccccgagcccgcatctgctcgcgggcccgagccttcttcgcgtcctttttctccttcctcttctccgcggcaaccctccgcgcagctcggcccaccgcggcctccaaaaccggtggcagggaaggcttgtgatgctctacctcctggagacagacgagaagtctcagctgcgagaaccaagggcaatccgacgcaaggagaaagaaggagcggacactcaccagggacacacacccgcggtcaggacgcatcaagggctgggaaagggcgtcggcatccggcttccccaacgtgacggctacccgcctgtggaggtcatcgatgggaaggggatccgaggacatccgcaaaccctccaagtcggcctccggcgtcatctcccaaagcggcagccgccgctccatcaagggaatcaccctccggcgatgaatggcggcaaccactcccgcagcggtgagccctcctttccgcaactaccccagggccttcagaaggggctggagattcttctgtctatcgtgtggggtcccgtagcgccagttatcgacggcggcggtcaccactcactgagaaaacgacgggagcctcccatcgtcgtttcggagatagaaccaccggcgctgccaccctttgttcgaggacgcaaggatggcggggatatactgcggcgcccgcgactgcctcagctggaggatacagccactagcccgcactgccgtgcggaccctcgtctcccccatcggcaaggcaaaaagctccgcggagaagagatgagtccacaggtcccagtgagggtcaatccccaaatatccttcacaaaccgccgcgaagatggcggcttgcgagatggagttaggactaaggttgtgcagctccaccccgtagacgtgcagaatcgcccgcataaaacggcttgccggcactccgaacccccgctcgtgaaaggagacgaagctcacgacataccccggcggcggggacggggcggctccgctcggggggggcatccactccggctgcgggtcaccggagagagggcgaaggaccgggaaaggggataccccgaaagggatccttctccacgaaggaagcgggccccgagccccctactgatcagaggttcgaaggctggcccctcggaggggttcaacagccgcctcagagcgctcgggctccgctcccactactggtcagaggttcgaaggccggcccctcggaagggttcaacagccgcctcaggccactcgggcttcgagcccattaccgatcaggggttcgtaggctggccctcgaaagggttcgacagccgcctcagacgcagagcaagggatgaccctgggtacgttcgatacataaccaaggctcgggctacgctcccgagtcacttcgccgctccactgaccggcctgacaagaggacagcgccgcctgcaccgctccgactgttgtgccactcgacagacttcggaagacgacgaactccgcctcgcccgaccccagggctcggactcgggctcagcctcggaagacgacgaactccgcctcgcccgaccccagggctcggactcgggctcagccccggaagacgacgaactccgcctcgcccgatcccagggctcggactcgggctcggccctagaagatgacgaactccgcctcgcccgaccccagggctcgaactcgggctcggccccggaagacgacgaacgccgcctcgcccgaccctag

SEQ ID NO: 29248 - DNA, 777 bp, Zea mays
  Peptide Sequence Number=SeqID_72623
atggcagatcgcgaccgcagcggcatctacggcggcggcgcctacgggcagcagcaggggggcggccgcccgatgggtgagcaggtgaagggcatgatccacgacaaggggccgacggcgtcccaggcgctgacggtggcgacgctgttccctctgggcgggctgctcctggtgctgtcgggcctggcgctggcggcctccacggtggggctggccctggccacgcccgtgttcctgctcttcagccccgtgctcgtccccgccgcgctgctcatcggcacggccgtcgcggggttcctcacgtcgggcgcgctggggctcggcggcctgtcctcgctcacgtgcctcgccaacacggcgcggcaggcgttccagcgcaccccggactacgtcgaggaggcgcgccgcaggatggcggaggccgcggcgcacgcgggccacaagaccgcgcaggccgggcacggcatccagagcaaggcgcaggaggccggtgctggcactggcgccggcggcggcaggacttcctcggtcgtcgtggaatgctcttctctgtacgtgggtaaccgtcttttggtcgtcttccccgagtgcgtgataaatatcctggtgttcgtcgtgtgtggtgctgccctaggctggggcctggggtcggctgtgtaccgctttgctattgctattgtggcttgtgcatcagcggtttgctcgttgactgttatggaaataagcattggtgaagacacgactgctgagctttttttaaaatttccaatgctctaa

SEQ ID NO: 29249 - DNA, 633 bp, Zea mays
  Peptide Sequence Number=SeqID_72624
atggattctgccgccgagcattgtgcccagaagttgtccttggcggctgttgcagcccgtgacacactgaaagcttctgctgccgcgagtattgttgctggtgattattgcgccacattttcgttaggtaacgatgtggtttctactctggatgttcttgaatccgctgtagctgcggaaaatagtgctttgcgatcttacaaacaggcgactgcagccgtcgattgtgctaaggagacagtggccaaatattctgaggtgaaccaaaaacttgcgcaagcactcagatatgccatgtctcaaatgagtgatacggctaagaaacttcaagaaactgcctctttgtgctacacagatgaagatgttgtagacggtttcaagctgactcaagtagctcgttcaatggacgagatagctgaaatgcttgaagtaactgcaattgactgccaggtctcgatgatggatccaacaagtatgttagaagctggctatgctagtgaagatactgcggtgtgggaggacgtattccgtgaccgagaaataatgaatcaaccattagaagtcgagacacttgctgagcactgtgctaagtgggggcttaattacaatgagatctgggatagatcagtgtaa

SEQ ID NO: 29250 - DNA, 582 bp, Zea mays
  Peptide Sequence Number=SeqID_72625
atggaccacgggcgcaggaatccggcgacgcagggaagggcgagctccggagaaggacagggcccagtgcgcggagacaaagacagcagctcgaggaacacgacggctagggcgagcagagttggggcgaggaagacgacggccagggcacagagagaatggaatacgggaccttcacggggagatctcttcacgggcgagagagggagatttcagtgccacccgttcaattgccacgacggcggtgccaaaagtttgaagcccgccgtagacagtgtcatgtttgcaaaattctccattagaaagggcccgtccacgtcttctggtcgagccgagcgtcgtcaccatcccgtcgtgaagagccgcaccgtcgccatcccgtcatggagagccgcgccgttgtcatcccctcaccgagagatacgccgtcgccatcccttcgccgagggccgcatcgtggccgttcccatgctgagcgtcacgccgtccctcgccgagcgtcgtcaccgtcctggactctgccggcctgcagcgtttcacctcgccgacgttctgcaacctttgaccctatgcagagcttaa

SEQ ID NO: 29251 - DNA, 813 bp, Zea mays
  Peptide Sequence Number=SeqID_72626
atggcggcgatgtcgtcggatacaccgttggcaacggtgggagacgcggtgggcgtgcccagctccatcccaccgcccactccggaggaaccggaggttattcttggacggcggctcggcgccgagccagaagtggcgccaacacccctccctcgggtgctgtcccatgctcatcaggctctctgggagaccgaggcggcgatcctgcgggagtgggaggcgctcgcaaccgagcaccagcgcctcggtgattggcgcgcccagctggaggagcgcaccaaggccgcgtcccaccaattcgcctcggagcggtccgagcttgaggaggagcgcgaggacctcaaggaggacctccagaaggtgtttaaccaggagcgggaggtgacccagaaggagaaaaggttggccaagaaggtggatcacctagaccagagggaggaggtcatcacggcgctccaggaaaagcagaaggcctataatgtgatgctggagaaacagcaggacaagcagaccgcggctgcggcgagtctgcaaaagctacagcgagagcttgatgacagggccagcaacatcgctctcgccgaggagaacctcaaggcgaaggatgcctccctggaggagcgggcgacggatctcgcctggcaggagaaggacctcgccttcagggaggagatgtgggataggcgggacaagttgctggccaaacatgagcttgaggcaaaggagaaggagaagagactggaggagaaggagcggacactggaggagtgggcctgccggtttcaggcgacgcaggcagcgcaggtagcctag

SEQ ID NO: 29252 - DNA, 516 bp, Zea mays
  Peptide Sequence Number=SeqID_72627
atgataacccaagatctggagagactaagccaagatccaactgaagaaaaccaagatccaaggatcttcaccaagaatgaagtctcaactcaactccaactcaaacttggtgacatcgtggagtcgaacacgaaatacaacatcaactttgacgtaagttcagatcatgattctgaatttaatgatatttcagcaaaatctttagaattcgccaaaaacctaagtggtggtgagctaaaagacgatgagataattcagcatctaaaaacagagtacaacgtcggacgagttaccaatagtaagcaatatgcaacttgccctaacatggagttgattataccaagaagcagttatgtctctaaatcaaggtggaggcaccatctaatcaatcacatcaagagcaggcttgtcccaaacaagatctgtggtaagaggccagccaaccttaaggcgtgtcgaaggaattgcactgccacatcagacgtcgagcaattttgcctgcgtatcgctgtataa

SEQ ID NO: 29253 - DNA, 123 bp, Zea mays
  Peptide Sequence Number=SeqID_72628
atggaggtccaggaccctgcccggaggtccggtcctgatatgcaggggtctggcactttccaacggtggtggtacgtgcggtccttttgctttgggctaatactctctccccctttggcatga

SEQ ID NO: 29254 - DNA, 960 bp, Zea mays
  Peptide Sequence Number=SeqID_72629
atgtccggtgcacaccggacagtccggtgcccccttctagccgttggctcggccacgtgtcccgcgcagatcgcgcggccgaccgttggctcaccggacagtccggaaggcgagccaagttggggtcctgccttccgcatgggctggcgacccacttcttccttcaccattcgagggagaagggcattcaccagccttgcggaggaggtgaacttcggctacgcggggccggccggctgcagggaccgtcagctgccgcttgtctggctccttggccttgatggctttggcgccgcctccggcgctgcctcctgccgcttgggcggggtccaccacatccatggcgtctcccgcgccaccggccacactgctccgacgtcgctcgggggttgtacaagatgtcgtacgccgtgggggtggcggtcgcgttcttggatggtcttgtcctcactcccgtgggaggacgggagcaaggacctcttcgcacgggctgaggcagtcgccgttgctggtaagccaccggtgcggaggtggccgctgtcgtcggtgctgaggtggtcgctgctgctggtgaggctgcatactgcaggggtggttgcctctgctggcgagaccgttagtgccacctgccaccgagcctcccactctttggatttaatggcctcgttgtcgccccccgtaggaggacaggggcaaggacttcttcgcaatggcgcacgcattgaggtggtcgccactgttggcgagtcgtcggtgcagaggtggccactgccgtcggtgctgaagtggtcaccttcgctggcgagtcgctcgaagctagctaccacgcggccctactggtgtggaggcccacggtacggaaccaggctgagcggctacacgggctccggaccaccccaggagacaaatgtccattctctagtttcggaccccaggttgtcggacccacaggacttatag

SEQ ID NO: 29255 - DNA, 336 bp, Zea mays
  Peptide Sequence Number=SeqID_72630
atgttggcgcgggatgaccgtgacctcgatctggttgaggtagaatgtgccatgttgagcagtcagtcggcgtcatcccgccactgcttcatggcccctggtgaggccgtggagcttggagggtgtcgcagtagtccctggctgctgacaacgcccccggagccgccctcgacggtgttcgggatcagcagtgcccagcactgggcgattgagaacctgcggcgtggaagagacagcttcttcctccaccaggaaatccgtggaagtctcagcgtggtgctcaataatttgcaccatcacactgagcgagaaaaccagcaaaaacctaatgcctag

SEQ ID NO: 29256 - DNA, 204 bp, Zea mays
  Peptide Sequence Number=SeqID_72631
atggcccacgcccgcgcctataaagcccgctcgggcgttgactgcactcttccgcgcaccctcaagcctcaccggagctcagttcaccgccgtttgcccgtgcgcggcgtgtccgcggccacccgagccactgccgccgtagaccggccagcccagccttccccagccccatccaaccctcagagacgagtgagcacacattag

SEQ ID NO: 29257 - DNA, 196 bp, Zea mays
  Peptide Sequence Number=SeqID_72632
tgatgccctgctgggtcaccttggtagtgatcaatggaaagtcatgatctccgggcagaaagggaatcacggcttgtggagacattatggtataggtggctatgagatcgatggttctggttatgactatggtgctggagaagatgaagccgtggaaggaaacttccaggagttccaagactacgacgagttctag

SEQ ID NO: 29258 - DNA, 2232 bp, Zea mays
  Peptide Sequence Number=SeqID_72633
atgccgatctctgcgtcctctgcggcaagcgtcgacagtggcgcggtggcggccggcacgcccatgaagaatgcaacggcggcggacgctctcgccgagatggcgagacatcttaccgtcgacacggaagacaccttcgcgggcctgctggagctcgccgctgacgacgacgcagaggggctgcgcctcgcgctggagcgcgcgccacctgccgccgcggacgaggctggcctctggtacggccgccggaaggtcctggagcaccgcaccccgctgatggtcgctgccacctatgggagccttgccgcgctccgcctgctagtgtccatctcgtatgtggacgtcaaccgccgctcgggcacggacggcaccactgccctccactgcgccgcctctggtggctcacggacggctgttgagtcggtcaagctgcttctgggagccggggcagacgctaacaccatggatgacgccgggcgtcgtccggctgatgtgatctctgtgccaccgaagatgtttgatgccaagttcgcccttcaagatcttcttggattccccaagtctgagcatggcatgctccgggtggtgacaaggtccaccaactcgatctcatcgcctgtttcatcccccactgcagaggatgcacggtcaccgtctgcttctgtgatgatgatgacaaagttcgctgacttgcctagggttgcgacatcggagaagaaggaatatccagtggatccatcccttccagacatcaagaacagcatatatgcttccgatgagttccgcatgtactcgttcaagatccgcccttgctcacgggcatactcgcatgactggactgagtgcccatttgtccacccaggagagaatgctcggcgccgagacccccgcaagtaccactacagttgtgtgccatgcccagatttcaggaagggcgtatgccggcgcggagacatgtgtgaatatgctcatggagtgtttgagtgctggctccatccagcacagtaccggacgcgcctatgcaaggacggcacaagttgcaatcgtcgcgtctgtttctttgcccacacaactgatgaactccgtccattgtatgtctcgactggatcagcggtgccatctccaagagcttcagcaacagctgctatggagatggctgcagcaatgggcttgatgcccggttccccatcatcggtttccgcggtaatgtccccgtttaccccaccaatgtccccttcgggcaatgggatgcccccttcattgggctggcagcagccaaatgttccaactttacatcttcctggcagcagccttcagtcaagcaggctccgaacatcacttagtgcaagggatatgcctgctgatgactactccatgatgcgggatcttgattcccaacttatgaatgatctttgctattcccgtctcagttcatccacagggaaccactctgctagaaccaagtccctgaatccatcaaacctggatgacctcttctctgctgaaatgttatcatccccaaggtatagtaatgctgaccagggtgcaatgttttcaccttctcacaaggctgctatcctgaatcagttccagcagcagcagcaagcactgctgtctccaatcaacacaggagtttactctccaaagggcgtggacaaccagcagttaccttcacactcatcgctgctgcaagcatcactcgggatgccctcccctggccggatgtctccacgatgtgtcgaatcgggctccccaatgagctcccacctagccgctgctcttgtccagcgggagaagcagcagcagacaatgagaagtctcagctctcgtgaccttggtcctagcgcggcacgagcttcggctcttggctcccctctaagctcatcatggtctaagtggggatctccttcggggacaccagattggggcataaatggtgaagaattgggtaagctccggcgctcatcgtccttcgagctgaggtctggtggtgacgaccctgatctctcttgggtgcatacactggtcaaggaatctccaccggagaagcaagttactacggctgaatcaattagttccgttggaccctcaccactaatgcctcccggcatgaacaatggcgacggttctggcctgagcacccagctggatggacacgaccaagccgcggttataggagcgttgcttgaacagatgcagcttgaccagcagattggtagtctagcaacatag

SEQ ID NO: 29259 - DNA, 564 bp, Zea mays
  Peptide Sequence Number=SeqID_72634
atggcggcatggctcgcctgcccgtggctcggtgcggccttgcgcccaccctgcccaccgtggtggcgtggctcgcccgaccgcgacctcggcgcggctcggccatggcggtcggagctcggccgtgacgcccagcgcgtccccggcgtcctgcgcaggcccgccctggctgctggcgcgcggccatggccccgccgcggcttcgatgcgatggctcgtcttagacacaccgcacggaagtctgtcatccccttcttaccctctcatctcgcggagcgtccgcttcaccgtcccgtggccggtcagtccagtcaattggagaggctgcaccaccgcctgcgtgaggagcaggaacgtcgacgacaggagcagcagggctcctctttctcgctccaacaggagatagagtcggtgaggagctgctcccccgggctccccctagaggcgccccctgcaccaccactgagcgccccagtccctggagtagctgctggaggagacccagacgacggaggtggcgacggcagctcgagccacgacaccgacttttctgctgaccagtag

SEQ ID NO: 29260 - DNA, 759 bp, Zea mays
  Peptide Sequence Number=SeqID_72635
tctcccagtaacagtaccacggaaggaaccgtggcgcgcttactgcgcgagatagtcgcgaagggcagggtgctcggggagactctgcggtcacagcggaggtgcggctcgacgcggggatgccgaatcgcccgtccacgagcgcaggcggggtgtctcatcggcgccgagtgtaccggccaaacacggcgatctggttcaatccaagggcacggtgagctttacgggagggttggatggggctggggcaagctggactggccggtctacggcggcagtggctcgggtggccgcggacacgctgcgcacgggcaaacggcgatgaactggactccggtgaggcttgagcgtgcgcggaagagtgtgctcatagcctttagtatcaaggtgggttctagccatggtaacacctggggtgttacatttggcccacttcgcctcacatccctcccgcgcagcccacgaaaccctagcatgttgacccacttatgtgagcacccaaccggccagcgtgccgacaagtatggcccgcaggtcagccattcgtggggtcctcgcatcagcccgctcaggcaaacactcccttacactcgcttggtcaccaccacatgggcccatgccgcctgcacctctgctcaaacaaatgcatgctcgccagccactgatgggtgggaccagagcgttagctctttcccctccatgggttgttgggatttgactccgcctggtggctatatagcccgggcctctccccgttga

SEQ ID NO: 29261 - DNA, 441 bp, Zea mays
  Peptide Sequence Number=SeqID_72636
atgaaggcaacatcggaactaaggaaaccgaaggccgacgaggttattgaggaaaatcatctaaaggaggatgctttggttgccgaagaggatgctgctgaggaatccaccatcaagcctagtgacctgaaggttttgaagaaacatgggtacattgaagatgatgatgtgatccgctttgctggtgacgagaccactcccgagccaaaggaggatgagattgtagtttttaaaagtttcttttgggctagactacggttgcccatgttcaagatgaatgatgagccaagattatccgaagctggccgaagatgccaatgtagggataacgaggttcataagatcgatcgatatgcttctaagtccgaaacggctcatatccagcctattagggtaaaacatggaaaaggggaactagtaatagttcaacacttcggataa

SEQ ID NO: 29262 - DNA, 660 bp, Zea mays
  Peptide Sequence Number=SeqID_72637
atgcctccgcctcggcttcccctccgtgcaaccgcccgacccgccaggaccccgcctctccttcccctccgcgctcaagcaaccaatccgaggaaatgcacccacaaatttggaagccgcggcaatggcgcccgatttggctatggtgtgcacgatttggaaaccgcacaatctacgttgccaatttggaaagcacgatctcggtactgcaatcacaacaactatcccccaaatgtcgcgcccatcgacgaccaggacccccagatttggcaatgcaccattccccccaacaatcgtgctcgatctggcaattgtgtgcatcatcttcgtcgccgatttggaaagcgcacgatctacgacgctgatttggaaagtgccttgccaaacgattccagcacaaatcccccaaatcgtgcacccaccatcgttaaaaaggtcacaattgtcatcctgctccaaccttcctacaatgacggaaatcccgcgctcacactcctccagcagttcatgtgtttctggtacctgtctcttggatatattgagttcacttttgagaatttctttgcaaaatgctctaaaaaatcattgttttcaatgattccatttaaatttccttgcaaggatatagaagtttcaatcattatgggtctgaaaacatga

SEQ ID NO: 29263 - DNA, 1352 bp, Zea mays
  Peptide Sequence Number=SeqID_72638
atgcaggcggcatgcaaccgcgccaagtgggctcacccctccgacttccaacgcacccagcatggaggcccaggcccacacgtcatgcaaccgacgcgccggttgctacgtgcgagcaactgcaccgccactcgcaccactaccgtgcctcctcgactgcggaaccagtaccgcgactcgaggcaaccctgcgccggcggaagcaacggtcacgtcgtcagccaagcttacgtcccatccagggacagcaagggaaccctctcccacggcgtgaagacgggaccgggaaaggggataccccgaaaagggatccttctccgcgaaggaaacaggccccgagcctccctactgatcagaggtttaaaggctagcccctcggaggggttcaacagccgcctcagagcgcttgggctccgcgcccactactggtcagaggttcgaaggccggcccctcggaagggttcaacggtcgcctcaggccactcgggctccgcgcccactactgatcaggggttcgtaggctggccctcgaaggggctcggactcgggctcagccccggaagacgacgaactccgcttcgcccgaccccagggctcggactcgggctcagccccggaagacgacgaactccgcttcgcctgaccccagggctcggactcgggctcagccccggaagacgacgaactccgctcgcccgaccccagggctcggactcgggctcagccccggaagacgacgaactccgcttcgcccgaccccggggctcggactcgggctcagccccggaagacgacgaactccgcttcgcccgaccccagggctcggactcgggctcagccccggaagacgacaaactccgcttcgcccgaccccagggctcggactcagccctggcctcagtcgacgatctccgcctcgctcaacccaagggctcggactcgacctcggcctcggaagacagactcgacctcgaccttggaggagcctccactttgcccaacctagggctcggaccgaccacgtcacaggaggcaccatcattaccctaccccaagctgactcaggctacggggaacaagaccggcgtcccatctggctcgccccgccaaacaagtaatgatggcgcacacgcacgctttatgacgacggtggctctcagcccccttacggaagcaagaggaagtcagcaaggactcgacagccccgacagctgtccttccgccaggctccagcgcacctctaacgaccacgacaccacacgaaccgggtgccaaaccctctccggctgccacgatggcatggccctcttacagagggttggccgcgcggagaaggacgggacggcgctcgc

SEQ ID NO: 29264 - DNA, 2268 bp, Zea mays
  Peptide Sequence Number=SeqID_72639
atgagggtggaatggggtggcaatgagattgatggttttggttatgactatggtgctgatgcgagcaaggcagatgatgatgtagatgagatcaagcaatacagagatgcaaggtgggtgactcctccagaagcgttatggaggatatacggctttgagcttagtcaaaactctccacctgtgatgcaactgcaactccatcttccaaacatgcacatggtggcgtttcacgaacgtcaaatggtcgagcgagtcatcaatcgtccaggtgctgataggtcaatgctcacgacatattttgaagcgaataggctacatgagggggctcgtggcatcctgtatcgtgacttccctgagtggtacacttggcagagtggtaagggcaaagtatggcaacggaggaagcgtgatacgggtgggcaagtcggtagaatagtctctgctcatcccgctgagggggagcgctactatcttcgtgttctcctaaaccatgtgacttgcgccacctcctatgtagatctaaggacagtagatggtgtcacgctaccaactttttgtgaggcagcagagagaaggggactgcttgagtcggacaacacactggatgagtgtctcactgaacgtgctcttttccagatgccatcggcgctgcgacgactttttgccacaatactggtgtattgtgagccaagcgacgtggcggtactctggcaaagacacctagatgctatgtctgaggactatcaacacaggagtcagagtaaaactcatgttgagcagatggtattgattgacattaggaacatgctgcagtcaatgggaaaggacataaagacattccctcttcctcctatcatcgacacgtatgacgatgctattggtactgctagggagggcggattgttctttgtggatggacctggtggcaccgggaagacttatctatacagagtgctgctcgcgacgctacgcggccagggcaagattgtagtggcaacagctacatctggcgttgcggcttccataatgcctggaggaagaaccgcccattcacgcttcaaaatacctctcactattgacgatggcgctatatgtagcttcacgaagcagagtggaaccgcagagttgctacggaaagcatctctcattatctgggacgaggcttctatgaccaagagacaagctgtggaggcactggacaatagcatgcgcgatataatgggtcggcccaaactaccattcggtggtaaaaccattgtattcggtggggattttagacaagtcttgcctgttgttcgtaaagggtcaagggctcaagtggtcgcttcttcgctacggatgtcttacctatgggagtccatgtcccacttaaagcttgttagcaatatgagggcaaaaaatgacccttggtttgcggagtatttgctgcgcgtaggcgatggaactgaggacacaaatagtgacggtgatatatgtcttcctgacgaggtatgtgtgccttatagtgggagtgacagcgatcttgacaacctaatagacttcgttttcccaaatctcaacgaaaatatgtctgattcgacctacatcacttcaagggcgatactgtcaacgcggaacgactgggtggatatgataaatgctaagatgatcgatcgttttcaaggggagcatatggtgtaccatagtttcgatagcgccatggatgatccacataactactacccacctgagttcctaaacacactgacgcctaatgggctgccaccacatgttttgaagctcaagattggatgccctgttatattgcttcggaatatagaccctgccaatggactttgcaatggcaccaggctggtcattcgtggtttccaaagaaatagcattgacgcagaaattgtgctgggccaacacgctggaaaacggattttcttgccgcgtatacctctatgtccctccgatgaagagatgttccctttccagttcaaaagaaagcagtttcctgtacgccttagctttgcaatgacggttaacaaagcacagggtcagactattcccaatgttggagtgtacttgcccgaaccagttttctctcatggccaactatatgttgctctatctagagcgacagctcgatcgaacataaagatccttgccatcccagccgtcgatgtgaagaagaggtcgaggaagggcgtaaaaaagaaccccacaatagattgtgggacatgcaccaagaacatcgtctacaaggaggtcctaacaaactag

SEQ ID NO: 29265 - DNA, 369 bp, Zea mays
  Peptide Sequence Number=SeqID_72640
atgagaacacccgcctgcgctcgtggaccgggcgattccggccatccccgccgtcgagccgcacctcgctgtgaccgccagagtctccccgagccaaccctgcccttcgccggacctatctcgccgccggttaagaaaaatagaaaatgtgatttaaataatgaaccagagggcacccctatttttgttaggcctttatttggggagcctcaaattcttaaaacagactgtaaccttgctgacggaaagtacgtcctcgtgccggagcaaggagctgctcaggaggtagccccggacccagcaccagagcctgcaccagaggacctgcctaccactgctttggaaggcaagccccggttttatgcataa

SEQ ID NO: 29266 - DNA, 288 bp, Zea mays
  Peptide Sequence Number=SeqID_72641
atgtcctataccaaaaatgtggcataccacccaaggcacccactggaaaaagctgagcccgagacatggacatttgacatgccttggcatggtttttgtcgcgaggtgggcagtgtgacacacccgatttggctaccagagatctccctgcctaggccatatctgccatggcgtctcacagatcgccgtggtttggccggtacactcggcgccgatgagaacacccgcctgcgctcgtggaccgggcgattccggccatccccgccgtcgagccgcacctcgctgtga

SEQ ID NO: 29267 - DNA, 267 bp, Zea mays
  Peptide Sequence Number=SeqID_72642
atggcactcggcaaagaaggaaacctgggaatcagcaaagacatctggagggttctttgccgagtacctgtccaacagacactcggcaaagagtcctcctttgccgagtgcctactagggctctcggcacagggactggcagtggggcccactgggtcagtctttgtcgagggcctctcgagcgaacactcggcaaagttgaactctttgtcgagtgccgcaggtggcactcggcaaagtatccgttaccgttacttggcgccgtga

SEQ ID NO: 29268 - DNA, 216 bp, Zea mays
  Peptide Sequence Number=SeqID_72643
atggggggaaaggcgaggtggccggagacgggcgtgagagaggtggagatcccgcggccttcgtgttcgtcccgcgcccaggtcgggcgtaaggagaggatccaggtgtacaatgggggtgtagcagagtgctacatgtctagcggagggagagctagcgccctaagtacatgccaatgtggcagccggagagatcttggcaccctgctggtgtga

SEQ ID NO: 29269 - DNA, 342 bp, Zea mays
  Peptide Sequence Number=SeqID_72644
atggagcagggagggcgctgcttgggggctcggttgggggagagaacttcggctctgcagcaaggaacagagggaggcggcgatcgggaagggacgctcggccctggcagagctccgagcgatggggcccagagtggagggcgccatgggaggggaggagccgagctcccgtctgccaacgccgtggagaaggggaggaagaggggtgccggctgcctgggcgccgagcgccatggcgaggagaagtcgagctccctgcctgccgccgtgcagaaccagagaagggatggcgtgggctgctgccgtgtgggagaagacagaggaaaagatagtggcggctag

SEQ ID NO: 29270 - DNA, 345 bp, Zea mays
  Peptide Sequence Number=SeqID_72645
atggcttcggcctcctccccgtcgcgggtcaccctagcagttgaacgtactctagccatcagggaaggtgttttccggaccttcggcattccgaagcctaggacaattttcacggatcaagctcattacgaaaaacgatctagcaccgcgaaggggctactgttgggggacagcttcgtcgccgaaggccctcttcatgaatcgttagaatcattctatgttgttgaaagagatggttcaatcaacccctttttggttactcatggtggttgtcattcttcggattacatcgaaaagatgacattatcccttgatctccagaaaatattcttgcttactacatga

SEQ ID NO: 29271 - DNA, 606 bp, Zea mays
  Peptide Sequence Number=SeqID_72646
atgggcaagaacaacaagcgcaagcgtgagccgactcctccatcggaggagtttggtgactcggaatactcagaggaggagttctcctctgagttcgagggatctccggctcccatccccctgcgagagtcgtctgatgactcagacgactcccaggggcttgcggcggaggtctggacgtacatccgggccgtcgagcgctccgggctcgagggctcggatgagtctgagttctcctcggatgaggaggactcggacggcggcgaggacgaagatgatgacgacgacgacggcgacgacgacgatggtggcgatggagacggtgatggcggcggaggcagcggcggcaagggcagcaccagaggcggcagcagcacgggcagcaccagaggcggcagcagcaagggcagcaccaagggcggcggcgaaacaacgccgagcgatgtgaaggttgacatcagcgttttagaagtaacaccgagcaatcgaacacgaaaccgatgttttagaggcaacgccgagttagtgaagatcaacatcgacattttagaagtaatgtcgagcgatagaatacaagttcagcgttttggaggcaacgccaagtga

SEQ ID NO: 29272 - DNA, 624 bp, Zea mays
  Peptide Sequence Number=SeqID_72647
atggaagtcgtggagctggtcccctgtgcccgtaataagtggggcaactggtgggattactggttctatgtttcagaggccaaagtcaaagaccacccagggctccccgcggccattatgtgctctcattattatgtggcgtacccgcaatttgaagtagcggaggatgatgagaatgaaagggcccttcggatcgttgcccgtacgagtagtgggcgcgatctagttgaggaattcatagggtatggggtgtggcccttggcgcatggatggacgttgggcgaagtatgccctcgcgagatgccctccctaggtgggcggaaagtgcgaagtccactttttgctttggatgtgcgaggccgggatcctgccgcggtcgtgcgcgaagcggaggatggggcggtgcgaattgtggggcgttacgtgccaaagacggaggccctgcggagctgggatatacgcggatccaacgaccgcctggatagggtcttcgaattgaatcgcttaccgtatggcggttatcccagggaagacgttgtcgaccgccgcgggaaaaagccagcggctgtgactgaagaagaccctgcgcgggaggccgcccaaccactaagaaaaggaagctag

SEQ ID NO: 29273 - DNA, 1833 bp, Zea mays
  Peptide Sequence Number=SeqID_72648
atggcgtctcctcccgagcgtgaggtcgccgcactcgagagctgcttccgtgccctctccgcggctgacgccgtcccagcggttgtcgactgcgtcctcgcttcctccgcctcgtcctccccttcccaactcttccacgcgctcctccgttcctttcctccctcccaggtaatcgagatgatgtgcaatgcagtctctgacactggatgctgggacctgcttggagctacaatagtatcattctgcattcggtcatctgttgttgccatgggtttgtccgccgcagacgccaactctatactttaccaaagtataatggaagcggattttcctgcggagactctctcatgcctactaccgctctccaattcaagcagtgtgttagcatcattgctggtggacatgctggagaggcgaaggactatacctacctcccaggaaggtgctgctgatctagctgcattggttcagaatttgacatgggaccttgccaagttggtactcaagatgtttacacatgctcaagagtatcggtcttgtgccactcgggtccttcttcagcctgtactcatatcgcttacagatgtttcttctgtcactgtatcgtttggtgcagtccagcataagctatcgaggttgcttagagtccatttctttggcaactatgcagttgttaactcaaattgctccaactcaagttatctcttgcctgcaggacatcaagccgctgtcttgggagttggcattgtccaggaatttgaccttaagaatgtcagtgaattctgggatgaactgcgcaggggactggttgacaaggattctttagtaaggaaacaggccttctatgtcttgacaatatcacttagcatctttacctcttcatctggaaatgatagctgccagcatttttccagtaggagcccagctgctttgcctgctcaaatcaaagcaaatgctggggaaacaaaaagggaaaggtgggctaacaaagaagccaagtcccttggtgttggagagatggaccaatcaggtgaaaattgctcaaatggtcaagatcggtggaaggtagtgcggctgtttgagtgtacgctacaaaatgactatctaaatcacacctcctgtggagcctttcatgctcagatggaatcttgggaaagaattttgtactggatggcagttttgtgggagcgtgggttcagtcatgagaatcctcaagtgagatgcctggttatgcaatcctttttggatattgcatgggaacgctacaagatcactgctacatgtacgactacaatggtagactcaagtacgactaaggttatccaagttgcaacatcactgataaatgccactgaaattccacttaaccagcttctgcatttcattgccacaattcctcgagagttcactgattatattggaccattgagagtagtagttcaaaaatggttttttcagaaggaagaatgttctcctggtgacactttgttgagtaagctgatcgatttctctgccaccttcgtaagtcaaaaacggaatgaaggttcgaatgtttttgatgacgaggatgtggatgcatgggaagctgaagcaaggaggtgggctagaacccttcttcttgtaaccgaggaggaggaacatttgaaacgaatcttcaggtttttggaggcatatggctacaagctctctgagcaatgtcccagtggagatttcatacccataaaattttttatcattgttttaagcttcattgaggaacttgagctgagacagagaaagcttgtttgccggagtaatacaatcttaagaggaaaatatggtggcattcagtaa

SEQ ID NO: 29274 - DNA, 435 bp, Zea mays
  Peptide Sequence Number=SeqID_72649
atgcctcgccagaggaccctcacctccgaggcggccggcgggcggctgctgctcgtggtggtcgcggtcctgctatgcctgtccgtgcctctggggcgtgcggcacccccgggcgcggaggtcgcggagttccctgggttcacgggcaaactcccctccaagcactacgccggacatttcgagtgcgcaggaccttttcgaatggagggctcccaagttcatatcaacgacggtccacgagtagccgtgaacccttactcatggacaaagatggctagcctcctcttggtcgactcgccagcaggtgtgggctactcgtacgctgatcatgaagatgactacaccacagatgacacaagcagggtagcggacctgtatgactttctgtcaaaggaaatgaagaatccggtggggtcaagatcaacttcaaggtaa

SEQ ID NO: 29275 - DNA, 318 bp, Zea mays
  Peptide Sequence Number=SeqID_72650
atggcctcccccaaactccagacgccgagggctatcggcggctgctcacttgggcagctaatcatcttctgcctctcgctcatcctccgagcaatctacgacacgccatcaatagtcgacgggacgtgcagagatccatcaatgcttcgcgctaacgacgacacgagaatgagatccagcaccgggaggagtatgatcgggatcacggcatccctacacgaagtcaggccacgagggttgagtcggcaacggcttcaactggcggcacgacccggggacggtcgaggcagcacatctgtaactctgatagtcgcctag

SEQ ID NO: 29276 - DNA, 378 bp, Zea mays
  Peptide Sequence Number=SeqID_72651
atgttttgccggcgctcgcgcgccctctctaaagagactcgggcgtcctctcccgcacgcctgcggttgagctctgcccggaggtcgttggtctatgcgcccctcactgagggtgagcgcacagacgccgacgcctcatattggcgtcgtgatgaccgtggcctcgacctggtcgaggtagaatgtgccaagccgagcagccggtcgacatcgtcccgccactgcttcatggcccccggggaagcttctcgtataagcgatgaaggacacagtgcaccccgcagcacgggcgcactatttgataatggactggacaagcacgccgtctgcaggatggccctggcgtcgcctgccagcggagtggacaagtcgcattaa

SEQ ID NO: 29277 - DNA, 504 bp, Zea mays
  Peptide Sequence Number=SeqID_72652
atggcttggatggtcttgtcctcaccccgtatgagggcgggggcgagggcctcttcgccatgggcacgcgatgaggtggccgccatcactggcaagccgccgatgcagaggtggttaccgccgctggtgaggctacccggcgcagaggtggtcgcctccattggcgagccgctcggtgtcgaggtggtcgcctccgctggcgagccgctctgtgcagaggtggtcgccgccgctgaccaacaggtcgggcttatgagggaggacctcatcgggctggcgtacacgtatgcgttacctagttacaaaaagggagaaaaattcgacccctcagatttgctcctatggatagaacttacagagatgctccagtggtcaggaagagccatttctgcatggacttgtcagaagcctggacccgtggggagtctagaaaggtttctgggggaaggtaggctttggccccgtagaccggggagtacggggtccctctgggggtccatctag

SEQ ID NO: 29278 - DNA, 453 bp, Zea mays
  Peptide Sequence Number=SeqID_72653
atgggcaagaacaagaagggcggaagttcctcgcaccactccggcgacaagcggaagcgcgagccaagtcccccctcggaggacttcggtgactctgagtactcggaggaggagttttcctccgagtccgaggggtcgccggtctacgcctctcccttgtcgttcgatgactcggacaattcccaggggatcgctaccgaggtgtggacgtacatccgggccgtcgagcactccgggctcgagggctcggatgagtcggagatttcctcggacgaggagaactcctctgactcatccgaggaggagagcggcggtgacggcgatgacgaggacgacagcggcgatggaggcgacgacggcggtgatggcgacgacgacgacaagggcgacagcgacagcggcaagggtgacagcggcagcagcaaggccagtggcaaagcgccactggcttaa

SEQ ID NO: 29279 - DNA, 360 bp, Zea mays
  Peptide Sequence Number=SeqID_72654
atgatcacggtcgatgatgatcaggtgaggagctgtggcggcgacagcggcggtattccagttcctactagcgacgacgccgccgccgggcggcagatgctgacgacaatgggcgagcaccaccagcagcagctgacggtgtccaggatccggacggccgtgtccatgctcacccgccgcacgggccacgcgcgtttccgccgcggcccgtcgcggatcgtccaccacgcatcgtcgtcggaccatcatcagctgcgcccgccggcggccggtggcaattggctcctggatctgtacttactcatcggtttcacgtgcgactactccttcgacgggtttgctcgtttgcctatggactag

SEQ ID NO: 29280 - DNA, 306 bp, Zea mays
  Peptide Sequence Number=SeqID_72655
atggcgcgcgccggaatcagcagggtcgacgatgtcgaagtagcgaaatcagcagggtcgacgaggtcagaagatcacgagcagtcgcgtgaggacgcttcccaaaaaccttattcgccctctcctggtgcaggatctagaaggcgaagggttccgaagacctgctctcctaatcgcagatgcacctctgcggtcgggtgctggctgccgggctccttttatagggccgagtccgcggcctccgatcttagccgcccacgaaaatctcgcgttcagttgagattttatagcgatcggttaggataa

SEQ ID NO: 29281 - DNA, 52 bp, Zea mays
  Peptide Sequence Number=SeqID_72656
atggcggcggagagtcgcgtcagtagctcaaggcgcttgccgacggagagag

SEQ ID NO: 29282 - DNA, 96 bp, Zea mays
  Peptide Sequence Number=SeqID_72657
atggcagacgatgccaaccgagcggccttcatggagctgcagtcccggatgatagataccaccgcgaagatcaagcagtgcggctgctgctcgtag

SEQ ID NO: 29283 - DNA, 813 bp, Zea mays
  Peptide Sequence Number=SeqID_72658
atggctcgacttagacacactgcacgaaagtcagtcatccccttcttaccctcccgccttgctgagcgtccgcttcgccgtcccgtggccggacagtccagccacttggagagactacaccaccgcctgcgtgaggagcaggaacgtcgacgacaggagcagcagagctcttccctctcgctccaccaggagatagagtctgtgaggagctgctcccctgtgcttcctctggagccgccccctgcaccaccactgggcgccccagcttctggagtagctgctggaggagacccagacgacggagatggcgacgacagctcgagccacaacaccgacttccctgctaaccctgagccggaaggatgggttgctcgacccatcactcgcgacgctgctcgcgggtgtcacttccacgatgcgctcgacaccctgctacgtcgggcatttgaccggcatacttggtccgtcgagtatcgctgtgtggtctaccagcatagtcgcggggtctacccggaccgctgggaggcgacttgcttggtgcgctgcccggaggacagtctccagggtgcagaggcctgttcagagcactattctatctctgagcgggactcagctgaggcagccatgcaagatgctgcacggcgtgcgtcagctgggcgatctcacctgggttacctcgcagcaaataagctgcagagaaaaattactatctggcgagctacgaactctcacgcggttgaacagcgattatccaacttgaagcttagtattcgccatcagccgcgtactaatgcgtcctcgctatacagtgct

SEQ ID NO: 29284 - DNA, 213 bp, Zea mays
  Peptide Sequence Number=SeqID_72659
atggcggctgggctgggcggcgggcggccggaccgggcgggcagggaggcggccgaaccggccatggggaaaggggagaggggatgggggagggaggagagggggaggggggagctcaccggggaggggcgcgacggcgaggggcggtcggcggcaggtgcggccgagggcggcggttgggcagggggcggcggcggcttagggcaggggtag

SEQ ID NO: 29285 - DNA, 327 bp, Zea mays
  Peptide Sequence Number=SeqID_72660
atggggaactgcggcaagcacaacaagcaaggctgcacgacgagcgtcggcacggcgtggaagctgcaggacgacgtcagccctcaccaacgaggtcggcggatggcaaagcgtggagttggaagacggtaccaggccggcgagctggaacgtgtgcgatggagcagcgacagatggtcggtcgagcgcgtgaggaagcagctcaaggcatggaagagcagcaacagcgcccaagccagcgtgagaagggagctcgcgtccaggctcagtatctgggacttgagcacagggtacaaggcgaaggcgagtgctatgcgctatgcgtga

SEQ ID NO: 29286 - DNA, 705 bp, Zea mays
  Peptide Sequence Number=SeqID_72661
atgtccacccttgcgtgggcgacaaccgttggggccgcgacaggaggccgagcgggggccccggtcgatgaagtgtgggggcctatccccggaagatgcctgagcaccagtggtagcgctgtagagggccagggcctcaatcgtcatggtgagctcctcgagaagaagctcattccacacagcatggaaggtgggaaagggcatggttctcttgatcagagccttcagatcgcggagggagtccgtgaggcccttcatctggcagcagtactcccccacggagaggtccctctgagagaactggtggaactgggcatcaaggtgaagggcccaagcgtcacagttcccgaggaactgttcctcgagagcgagccacgcctggcgacctttgtccgcctagtctcggatgatgtcctggagctcgacgatgatggtgttgtggatccaccagagaaccatggtgtccatcaggtaccaggacagaggcgacggggcgacgatatcctcgagggcgtggtcagcgagagcatagtgccgaagagtgaggaggacctgcccccgccaaagagggtagtgggaggatgcccggtccaacacgatggacacgagggaccgaatgttgtggagtccggcagcctaggcgtggagagcggtgatgtggtcgacgtcgagtcaagaggcgtggggggcctcgggggtgggtga

SEQ ID NO: 29287 - DNA, 396 bp, Zea mays
  Peptide Sequence Number=SeqID_72662
atgggcaaggacaaaaagggtcggggttcgccacgtcgctatgacgacaagcggaagcacgagccgagtcctccctcggaggactttggtgactccgagtactcggaggaggaggtttcctccgagtccgaggggtccccgaagtacgctcccccccgacgctcgaatgagtcggaggtctcctcggacgaggagaactcctccgactcgtccgaggaagggagcggcggtgacagcaacgacaaaggcgacggtagtggcgacgacagcggtggaggtggtggcggcgacggcggcaagggcggcagtggaggaggcggcgacggcaggagcggcgacggcagcaagggcagaagcggcgatggcaaggccagtggcaaggcgccactggcttaa

SEQ ID NO: 29288 - DNA, 147 bp, Zea mays
  Peptide Sequence Number=SeqID_72663
atggagaaggagttagaaaagaagcaacagatgatcgaaggattgggggcttgtgggggacagatatcccccgggtccactagaaggcaagaaggcctcgcgaaaggctttgtgaagcgtccccaatcctctgggactcaaatgtga

SEQ ID NO: 29289 - DNA, 1071 bp, Zea mays
  Peptide Sequence Number=SeqID_72664
atggccattttatgggttttcctcccagacgtacttcctctcataggtcaggatccacaaatagcgattgaggccgggaggtatgccttgtggcttatccctggtttattcgccttcagtgtggctcaatgcctttcaaagttcctccaatctcagagcttgatttttcccctggttctgagctccttgactacactcgctgtcttcattcctttgtgctggttcatggtttacaaagttgggatgggtaatgctggagctgcttttgcagtcagcatctgtgactgggttgaagtcacggttcttggtctttatattaagttctcaccttcttgtgagaaaactcgtgctccattcacgtgggaagcttttcaagggattggcagtttcatgcggttggctgtaccttcggctcttatggtttgtcttgaatggtggtcatatgagctgcttgttctgctttctgggatgttaccaaatgcagcacttgaaacttctgtgctctctatatgtatctctacagtaatactggtgtacaatctcccatatggcatcggaacagctgcaagcgtgcgtgtgtcaaatgaactaggcgcggggaacccagatagtgcccgcttagtagtagttgtcgccttatccattataatcttcacggcagttctggtgagcgtaactcttctatcgttgcgccatttcatcggaattgctttcagcaatgaggaggaggttgtaaattatgtcaccagaatggtaccgttgctttcgatttcagttattactgacaacctccaaggagtcctttcaggtatttctagaggctgtggttggcagcatttaggcgcctatgttaacttgggcgcgttctatcttgttggcattcctgtggcgctcgttgccggttttgctttgcatctaggaggagctgggttctggattggtatgatagctggtggagccacacaggtcactctcctaacaatcattactgcaatgacaaactggcggaagatggctgacaaagctagagatagagtatatgagggaagtctgcctatacaagcaaattga

SEQ ID NO: 29290 - DNA, 288 bp, Zea mays
  Peptide Sequence Number=SeqID_72665
atgagtgcctgcgtcaagctgcagctcgtcggccagctccgccgcacgcccaccgcccaggcgcagccgcgcgggcgccctgcgctgcgcccaccggccagcggccaccgcaccgcgcaggcgcgcacgcagccaggcaccgcggtccgcggcaccggccactgcgccaccgcccagacatcatggggtgattgttcgaagcagacactgtgggcatcaatgttgggacctgacagggggacctcaaataaggactacgacaagagtgtagcagcacgacaaatgtag

SEQ ID NO: 29291 - DNA, 327 bp, Zea mays
  Peptide Sequence Number=SeqID_72666
atggcgagagtagcatgtaccctcctggcacagcgcacgcctggtagggttttatcccctgttgtttttgcagaagttttattcccttatcttttgagtcttccgctctatctccgaagtgcatgtgtatcgggtgtgattactgtaatatgcatgaatgtgggagatcttcgggatgatgagttcgagttggtgaactcgatagccttgttaagttacccgggacacgtgcacagccatctaaggccgttaatggcaagggttggtgcatgtgggcctgctaacttgggagggctgtcacatgtgtgcccttccctaaccagctag

SEQ ID NO: 29292 - DNA, 426 bp, Zea mays
  Peptide Sequence Number=SeqID_72667
atggagtgggtatttctcaagaggaaaatatctggagatatatcggtggaatatttgggcagtatttctggaaagaacttgaagggggattactcgggaaatatctgggcggtatttctggaagaatttgagggggatcactggagaaatatctgggcgagggagtttgagaaaatttcaagatttgaatttttgggatgctacaaatctaccccacttaaaaggaatctcgtcctcgagattcggcttagaagggttatgggtatagctttacttcagctacatatcttcactttgcaacccttcgaggagatggaacttcaacaaaatctggtctttgaggagcatccggttgcaaacactgattttggctactcaaagatcatcttcagccttctaggtttcgcttggcagccagcttattga

SEQ ID NO: 29293 - DNA, 1017 bp, Zea mays
  Peptide Sequence Number=SeqID_72668
atgtgcgggggagcgatccttgccgaactcatcccagcacgggtgcaccggccgctgaccgccgccacgctctgggcggcggccctgagtgggaccactaccgtcggcaagtggaaggccgatgcagccgccgctaccgacgacgacgacgacgaagagttcgaggccgagttccagcttttcgacgacgatgacgagtgcgaggccgagttccagcttctcgacgaccaccaaccatctcccgcagcttcgcctgaggccagcggctgcaagcggaagcctgcccttgctcctcctgctggtacgatcagtcagagaccaccacaccactccgacttgggagcgtttaattttccggccgcctctatagtttccaaccaagcatcgcacgcacgcgcgcggttttcaggtgcccccgcttccacggatccggcgaccccgtgctccaggaagtacaggggcgtccggtaccgccggtcaggcaggtgggccgcggagatcagggacccgcggcaggggcgccgcgcctggctcggcacgtaccgcaccgccgaggaggccgccctggcgtacgaccgcgaggcccgccggatccgcgggaagagcgcgcggctcaacttcccgctgctcatcccgcacgagggtcccggccgtcacgcgcgcacgccggtggccatcgacctcaacttgccgcccgtctccgacggtctcggcgtcccggctccggctggcgtcggcgacgacggcacggcgaatgccgacggagatgcagatatggccagtactaagactcagagcacgctagcgcgggtcaaggaactgatcgcgcagggacctcacgacgagcggctggcggcgaggatcgtgcctgagctgatgatgcacgggagcagggacgaggctgcggcgttgatcgccgagttcagccgtcagatggaggagatcgctgcgttgcggagggaccttgagacacgcgagaggcagcttgttcagctggtttctctagtacttcgttga

SEQ ID NO: 29294 - DNA, 105 bp, Zea mays
  Peptide Sequence Number=SeqID_72669
atggcgagtaacggtataccagtggcgatcgtgatggcaacgactgtcgcgatcgtggtggccgagataacgcaactgattatagacaccgatgacatctactga

SEQ ID NO: 29295 - DNA, 513 bp, Zea mays
  Peptide Sequence Number=SeqID_72670
atgactccaaatgatgttacatttcagaatgctgctcgcttggacagtgagataatttatgatagggatttcgactacgactattttggcttcaaaactctagagaggtcttgcctgttgaagcttgatggtaagttaagcagctgttttcttatatgcatgaaagatgacaacattgagagaatctatgaaaccctcaaagagtgtgctgtaataagcaaatctgctggaggaattggtgtctcagttcataatatccgtgctactgagagttatattcgaggaacaaatggaacatcaaatggaattgttcttatgttatgtgtctttaatgatactgctcgctatgttgatcagggtggtggcaaaagaaaggtgcattttgctgtatacttggagccttggcatgctgatatttttgagttccttgatctgagaaagaaccccgggaaggttcttaaggaatcaagtgacgaggaaagggagcaagttgaagagatgatgaagtactag

SEQ ID NO: 29296 - DNA, 294 bp, Zea mays
  Peptide Sequence Number=SeqID_72671
atgccgccagcgccgattggtgatggaggggtcgggtcggcccgcgatctatcgtcgggtaacggaggtgactgtcttcttcatggagaaggcgaggtccagcggggaggacacacaacacgcggagaggatgagtcggctcatgtgagcatcgatgtcggccgtctcccacgagtttggcatggcagatgtggtgtcctcggctgcaggctccatggctttatgtgcgcttgcgatcttgagctagagggcggagagactggaggtagggacgagggcagccatggagcctag

SEQ ID NO: 29297 - DNA, 816 bp, Zea mays
  Peptide Sequence Number=SeqID_72672
atgtgcggcggtgcgatcctcgccgagctcatacccagcgcgccggcgcggcgcggcgtcacgccaggccacggtagcggcggcaagggtcggactgcggccaacgacgacgacgacttcgaggccgcgttccgtgacttcgacgaggactccgaggaagagccggtgggcgcgattacgaagaaggcgttcgggttcgccgggacccggcgcaggcggcccagcagcccgtactacggcgtgcggcgccggccgtggggcaagtgggcggccgaggtgcgcgaccccgtccggggcgtccgcgtctggctcggcaccttcgccaccgccgaggccgcggcgcgcgcctacgaccacgccgcgcgcgacctccgcggcgccaccgccaggctcaacttcccgtccaactccaagcgccgctccgccgttgccaaggcggcgccgcgcgtggacgaggacgaggacgaggacgagaacggaggaggcggcgccctgcccgacaggtcgtgccagggcatgtccgcggtcggcttgtgcgtcgaactcggcggcgcctcgaagcgcgcccggacagagccccaggaagaagcccagggaagggagaagaaggtggcgcctgcgctggcgccgtccgacgattccgccgatacgctgctgatggacgctttcatgttcggcgacccgttcagcttcttcgacggcggcttgtgctacgagcctgccgtgacgatggactgccagttgttgggcggcgacgccgtgttttgcgacgacagcgtgggactctggagcttcgacgacagtgtttgcttctag

SEQ ID NO: 29298 - DNA, 402 bp, Zea mays
  Peptide Sequence Number=SeqID_72673
atgtcgtacgccgcgagggcggtactcgtgttctgggacggtcccgttctcgttttcgtggcgaggacgggagtgaggacctgccagtgcgctttggggcggccggcgctcgctggtgcggtgttggtgggcaagtggacgtccttttgctccggtcatcgtccgaggccggacctggttccgtcgagggtggaatcaacatcgagggtgctgttgctccccctgccgatgccagagcctgcaggaacagacttgcttgtcggtaacagaatcgtttatccgagcgagagttacttatcgcggaaggtgatgagtgagaaggcgatgagtgagagggggttcccccttctagcccccgagggagggtcgggctttgccgaggcaaggctgacccttccttga

SEQ ID NO: 29299 - DNA, 117 bp, Zea mays
  Peptide Sequence Number=SeqID_72674
atgacagcacaacacggtggcgatgatgaggtgcggcggctgtgtggtgttgtgtgcgacgcgggggcaaggagaaggagatgcgagcatggatcggagaccacacctagagtgtaa

SEQ ID NO: 29300 - DNA, 540 bp, Zea mays
  Peptide Sequence Number=SeqID_72675
atgaccagttcgcatgccggccgaggcatcacgaaaagcatcaagacctcgaaggagtcaaaccactcctctgaggcctcaggggctacacccggcggggtgaggctgacaacagccaagtccagcctcgggtgccataggaagctccgcctcacccgaccccagggctcggactccacctcaacctcggacgacggtctccgcctcgcccgaccccagggctcagactcaacctcgaccccagacgacggtctccgcctcgcccgaccccagggctcggactcaacctcaacctcggacgacggtctccgcctcgcccgaccccagggctcagactcaaccttgacctcggacgacggtctccgtctcgcccgaccccagggctcagacttagcctcgacctcggacgacggtctccgcctcgcccgaccccagggcttggactcagcatcgaccttggaggagcctccgcctcgcccgaccttgggctcgggccgaccacgtcgcagggggatacatcattaccctacccctagctag

SEQ ID NO: 29301 - DNA, 1215 bp, Zea mays
  Peptide Sequence Number=SeqID_72676
atgcaggcagcatgcaaccgcgccatggagatgcaccctttcgacttcgatgcgtccagcatggagtcccaggcccacacgtcatgtgggcagaagcggcggtcaaatcgtctgcaggctcacgtccccttctggagcaccaggagagctctctcccacgggaccgggaaaggggatactccaaaagggatccttctccgcgaaggaagtgggccccgatccctcctactgatcagaggttcgaaggctgacccctcggaagggttcgacagccgcctcagagcattcgggctccacgcccactactggtcagaggttcgaaggctggccccttggaagggttcaacagccgcctcaggccactcgggctccgcgcccactactgatcaggggttcgtaggctggccccccgaagggttcgacagtcgccctacaacatgcagagtgagggatgactctaggtacgttcgatacataacaaaggctcgggctacgctcctgaggtcaaagctcggtccgttcaaggaacatgatctcgcctcgcccgagcccagcctcgggcaggaacagtataccaaggcagattcacgcctcgcccgagggcatcctcaagaagctctgcctcgcccgaccccagggcttggactcaacctcgaccccggaagacggtctccgcctcgcccgaccccagggctcggactcaacctcgacctcggacaacggtctccgccttgcccgaccccagggctcggactcaacctcgaccacggacaacggtctccgcctcgcccgaccccagggctcggactcaacctcgaccttggacgacggtctccgcctcgcccgaccccagggctcggactcaacctcgaccttggacgacggtctccgcctcgcccaaccccagggctcggactcagcctcgacctcggaggagcctccgcctcgcccgaccttgggctcgggccgaccacgtcgcagggggggtacatcattaccctacccctagctagctcagtctacggggaacacgaccggcatcccatctggctcgccccggtaaaacaagtaatgatgacaccctgcgtgctccatgacgacggtggtcctcagccccctacggaagcaaggatacgtcagcaaggtcccaacagccccgacagctatgcttctacagggtttaagcgctcctccgacggccacgacatcacatga

SEQ ID NO: 29302 - DNA, 480 bp, Zea mays
  Peptide Sequence Number=SeqID_72677
atggagatgcacccattcgacttcgacgcgtccagcatggagtcccaggcccacacgtcatgtaaccggcgcgccgattactacgtgcgagaaactgcagcgccacttgcgccagcgccgcgccttctcgactgtggaaccggtgtcgcaattcgaggcaaccctgcgcgtggaccagcagtgccagccgaacacgccggtcacggggcaggcgatacctttggaaggcgaagcgggcgacgcttcacctccgccataatgaccgcgtcaaaaaaagggaccgggaaaggggatactccgaaagggatccttctccgcgaaggaagcgggccccaagccctcctactgatcagaggttcgaaggctgacccatcggaagggttcgacagccgcctcagagcattcgggctccgcgcccactactggtcaaaggttcgaaggctggcccctcagaagggttcaacagccgcctcaggctag

SEQ ID NO: 29303 - DNA, 747 bp, Zea mays
  Peptide Sequence Number=SeqID_72678
atggccgccattgtcgttgtcacgcggcggaggaaggagtaccatatcgtagctgccgtcgagggacatgaactcgagactcccgaaatggagcagcgtcccaggctggagaggttgctggagactacccatctggagcttgacgggaagctgttcgtcaacacgcagcaggcccctacctggcgcgccaactgtcggcgtttcgaccccggggggtccctggaccgacgacccaaggtcgggcgaggcggaggctcctccgaggtcgaggctgagtccgagccctggggttgggcgaggcggagaccgtcgtccaaggtcgaggttgagtccgagccctggggtcgggcgaggcggagaccgtcgtccaaggtcgaggttgagtccgagccctggggtcgggcgaggcggagaccgttgtccgtggtcgaggttgagtccgagccctggggtcgggcaaggcggagaccgttgtccgaggtcgaggttgagtccgagccctggggtcgggcgaggcggagaccgtcttccggggtcgaggttgagtccaagccctggggtcgggcgaggcagagcttcctatggcgcccgaggctggacatggctgctgtcagcctcaccctggcgggtggcacaacagtcggagtagtgcaggcggcgctgttttcctatcaggtcagtcagtggaggggcgatgtgactgcggtcacttcggccttgtcgactgaggaacgcgcgtcaggataa

SEQ ID NO: 29304 - DNA, 1497 bp, Zea mays
  Peptide Sequence Number=SeqID_72679
atgaagggaaaaagcaataacctggaggctggagtcctggacgactgcaagcggcaagctagctactgcaggtcaggtcgacggagaggcaagccagtaaatgcagtctgcaggtcaggacgtcaggtcgcggtcgcggcaagcggtgtgccgtgcgcggaggcgcccgaggccgaaggagaggcggggcgctcaggtcgcgccgtcgcgctcaggagtcaggtcgggccgtcgggcggtgcgctcagccgctcaggtcggcgtggagcggtcggcatggagcactgcagcctgggcgcctggcggctaggccagctgtcccccgagaacaccagcctggctcatggcctcggcagcccgacttcggggttggtcccgccagtggatgacccggccaggctccggccaccgctgctacgcctcctcggcccaggccatcgaagctcccttttcgagccaactccgcctttgtccatgctgacaccgctgcctccggctccggctcatcgcaaagcggccgagggtttctttaactgggcaagagaagccttgagtgctagccgacatgcgagacctggtgctcgaaatagggaagaaacacggctctacgcccaaatacacagatattcaggccccaacagccgcaatgaacatacgccggcactcaagatgccattacaaacggaactccggttccactcccgcgggtatgaacaacctccataccaggaggcccacgggacgacgaactccaagcggctcaccaacaaccgctccagcagcagcgacaacgacctccgtcccgggcggcaagacagctgcagcagcggcttcagggcgaacgctgcggcagaaaagccctcgcccacaaaggacgaggaccagccattcaagccagggagacagaggtccaagggtgcgggcggagttggcgatctcgtcggcggagaaaccttctccggctgctgccaccacaacactgacggcggcgtccacctgtccgccaacactgcaccagcaagcgtcggccgcccccaaagcgcatcggcaggtcctcactcccgccctcgccgaggccgccccagaacacgaacattgccctcgcggcgtacgacgtgctggggaaccctccggcacggttgtcggcgcgaggaagacctagacgtggtcggcccgtacgcggcgcgaccgccgcccgggcgaaggacggaacgctgcgccctgtccagggagcagcggttcgccttcccccgcatggctgaaggaagcctccgcaggactggaggatgcctttctcccccaaacgctgggggaagaaaagggttaccggcccacgcagaggcaaccccccactcggtgcgctcctccgcctcagcccggatgacgaaaatccttgaagcagagggcggggaggatgccgcagcccagctcgcttctccccaccaaactgcccattggtgggggaatgcagccgggctgcacgacgaaaatccttaa

SEQ ID NO: 29305 - DNA, 369 bp, Zea mays
  Peptide Sequence Number=SeqID_72680
atggcgacgcggcgccacatccacctcctcgccattgccttcgtgtcccttctcgcgctcgaggctgtggagggcctcgaagaggagcccggcgggcgccggctgctggtcctgctggacgacctggccgtgcggtcgtcgcactcggccttcttcgactcgctccaggcgcgcgggttcgatctcgaattccgcctcgccgacgaccccaagctctcgctgcaccgctacggccagtacctctacgatggtctcgtgctgttcgccccctccacaccaccggcgtctaggggcgcgtgggcgcgcggcggacagcgggtcgtgcggggcgtgcgggattcgctggcgcgggcgtgcgggagcgggtag

SEQ ID NO: 29306 - DNA, 483 bp, Zea mays
  Peptide Sequence Number=SeqID_72681
atgggggcggatgtctgcgccttgttcggggccgggaggggtattgagattgggggcgaatcgcgcacgtgcgtacgggtgtttgtggcgtttgcggttggggtggggttagcgagggcactgtgcgcggggggtttatccgcgggcatttcgcgggcgtttgcggctggttgttccacgggcgtagggaggctgccgttccgcgccttggctggcggtgtgggtgcgaaatccgcggcggtcgtggggattcacaacaaaatcgtggcgcgggcgtgcgggagcggtgatttcgcggaggtgtctgaggcgcgtggtcgtgcagcggatgtggccattgcgggcgtgcggaggacggggttttcgctggcgcgggcggcctttgcgggattgggggaagcggcggcgtctgggggcgcgtgggcgcgtggcggacggcgggtcgtacgggatgcgctggcgcgggcgtgcgggagcgggtag

SEQ ID NO: 29307 - DNA, 111 bp, Zea mays
  Peptide Sequence Number=SeqID_72682
atggcgtcagtaattgcttccaagagcactgtatcatcttgcccaaagttccagttccagcttcagcaccaggggatcaagactggggagttctctcgtgatgcttcctag

SEQ ID NO: 29308 - DNA, 63 bp, Zea mays
  Peptide Sequence Number=SeqID_72683
atgaacgtcgtcgacattagttgcatgtcttcatttgctgaatcccaggtctgtgaggattga

SEQ ID NO: 29309 - DNA, 1158 bp, Zea mays
  Peptide Sequence Number=SeqID_72684
atgctggacgtgtcgaagtcgaaagggtgcaccccccttggtgcggttgcatgccgcctgcatggcggtccgccctctcacccgctggtctgggcgaaagtggaggagtgctttccgcggcggctgaggatgcaagtggggagagtcgcctttaaaaggagggtgacccccttggacggcaaccatgtcttcgcactccatgtatcgcgtccttccaccttccgagccccggatagggagcgctcgcgtcgctttcgtcttgctgtcgttggaggaatgcaacttcgtggaagttggtacctttcagccatcgctcggcttcaaggattttcatcaggcagctcggctgcatcccctcgccggtggtcacccaagacggtgaccaccagttcgatggtggggagaagtgagccgggctgcagcctctgccccaccctcggcttcaaggatcttcatcatccttgctggggcggagggcgggctgagctggagctctacctcccgcacgggttcgtgggtcaccctctccttcagcattcaggggagagggtgctcactggcctagcggaaggggcgaactccgacaacgcggggctggtcggccgcgagcgtcgtcagcttcagcgcgttgggctcgctggctcagctggctctagctcggctcccggtgccccctcccaccgtacgagcggtcgccgcgccgcgcgcaccggagggccgcccaatacgtcgcgcgctgctagggcggcgctcgtgttcttgggttgtcctgcctttgctccggtacgatgcctcttgcgcggaggtcggcgctcgcctgtccaggaggatccgagtggggatctgccggtgggcagatggctgccgtcgtcgacgttgaggtggtggcggctgaagaagtcctcgttgccgacgagatcgccgccaccatccgcgctccgggcctccggctctttggctttgatagcttgtcctcgcccctcgagtggggacatgggcgaggagctcgtcgcagcagcgtccgccctgaggtcatcgctgctgctgtttggccactcggagcggaggtcgttgtcgctgctatcggagcgggcgtcgcggaggcgtaggaatccctcggctcagtcggccttgccgcccgaggcttcacttgcttag

SEQ ID NO: 29310 - DNA, 531 bp, Zea mays
  Peptide Sequence Number=SeqID_72685
atgaccgcgtcaaaaaaagggactgggaaaggggatactccgaaagggatccttctccgcgaaggaagcgggccccgagcccccctactgatcagaggttcgaaggctggcccctcggaagggttcaacaaccgcctcagagcactcgggctccgcgcccactactggctggcccccaaagggttcgacagccgcctcagagcacgcagagtgagggatgaccctgggtacgttcgatacataaccaaggctcgggctatgctcccgaggccaaggctccgctcaaaggacacgatcccgcctcgcccgagcccgacctcgggcaaagacagccgaccccggaagattcacgcctcgcccgaggatcccctcaagcaacggatgcaccgtcgactcacccgaggcacagctcggggccgaagtgaccgcagtcacttcgccgctccactgaccgacctgacaggaatacagcgccgcctgccctgctccgactgccgtgccactcgccagagtgaggtcgacagcggctaa

SEQ ID NO: 29311 - DNA, 1839 bp, Zea mays
  Peptide Sequence Number=SeqID_72686
atggctgctaaacccttcctctcaatccctgccgcggcggtggctcgccttccctttcgcctcctctgctcggcagctccacctccccgcctcctccctttcttcccccagccattcctgctccaaagacgcagcctttccgcctccaccgtacccgccggcaggcgtagcagtcctccggccccggtcatcagcgagggcagggatgacgaggacgccgccgtcggccggcctgtatgtcctggatgcggggtctttatgcaggatgaggatcccaacctccctggcttcttcaagaacccctcccgcagctcccaggacgagacgggaggaagtggagaagtgctcctggccgccgatacggatgcgtttcttgaagaagaagatgataatgatgatcggagggtggcggatgacgcgtcggatgctgaactggagggtctggacagcgatatcgatgagttccttgaagaattcgataagggggacgaagatgacgggttaccggtgaaaagcgccactgataccgatgctttcgccagcgattgggactctgattgggaggagatggaagaagacgaggatgagaaatggaggaaagaactggatggtttcaccctgccgggtgtcgggtacgggaacatcactgaggaaacgatcgagaggatgaagaaagagaagctgtccaagtcccagaggaagcgccaggcgagggaggccaaaagggctgaggccgaggaggattcagccctcgtctgtagccggtgccactcgctgaggaactatgggcttgtgaagaatgacaaggctgagaacctgatcccggactttgatttcgatcggttcatctcgtctcggctcatgaagcggtcagctggtaccccggtcatcgtcatggtggtggactgcgcagacttcgatgggtcgtttcctaagcgagctgccaagtcattgttcgaggcacttgaaggaaggagaaattcaaaggcgagtgaaacgccgagacttgttcttgttggtacaaaggtggatttgcttccatggcagcaaatgggagtgcggttggataagtgggtccgtggccgtgctaaggctttgggagcacccaagctagatggtgtgttcttgatcagcgtccacagagatttggctgttagaaacctaattacatacatcaaggagtcagcaggacctcgtagcaatgtttgggtgattggtgcacagaatgctgggaaatctacgctgatcaatgcttttgcaaagaaacagggtgttaagatcacaagattgactgaagctgctgtcccgggaacaacattaggcatattgagggtaacaggtgttttacctgcaaaggcaaagatgtatgacactcctggcctgttgcatccttacataatggcaatgagattaaataatgaggaacggaagatggttgaaataaggaaagaaatgcggccacgatccttcagggtgaaaccaccaattggcccagagcgagtcgatgaattgggtcactggacaggaagatctattgaggtgtctggggcaagctgggatgtcaacagtatggacattgctgtttctggccttggatggtactccttgggccttaaaggcactgccactgtttccttatggacatttgagggcattggtgtgacagaacgtgatgcaatgattctgcaccgagcccagtttctcgaaaggcctggattttggttacctattgccattgctaatgctataggtgaggagacaagaaagaagaacgaaaagagaaaggctgagcaaagaagaagagaggaagaagagctccttttggaagaaatggtttag

SEQ ID NO: 29312 - DNA, 1316 bp, Zea mays
  Peptide Sequence Number=SeqID_72687
atggataagttcaaaccaatcaagacccccatgcctacaaatggacatctcgacttagatgagggagacatcagttcaggatgccgcgtacgaagaatgtgtcggcgccagtgggaggcgatgatgaggatcctcgtcgccccttcaggcaggtcaagggcaagacagtttacttggagcagcaggaaaggccgcaagaagcggcgtacggacagagcagcctgtgcagcagcagcagccgctgcgcaggccgagcttggagatcagccgcagactccgtcagatcagatcgcataccgtgttcgtcgtctcgcctcccggcctcgctcctccactcacacctctacttccactccgccacccactctgcctgctcctgtcactcctgttgtgccatctaccaccacagccatacccgctacctccactgctcctcctcctcccgctcctgcttcagctcctcctatccctccacctcgattccgggagcgcgatgagactgaggtacaaccatttgctgcggatcctagactgtttgaccttcagcgtgctacagcggcacgtgtacgtaggttcagatacgtacccgtggagtcttggttaccagctcagagggaccctgcagcagttgacctattcagcacacgtattcaggagtcgtttttcagagcccagatgtctgctcagatagctctgcgagtgcaccgactttggatcttccagcctttctgcttgcagtcggtgctgactctgaggcgcacctcacatatctgcctggccttcagaacttttgactaccagcggcagattcgccagctttttggatttcccgagtcgacgactcgtcttcacagcctctgctacggcacttctgaccctcctcgtcgccctcacggcggtgtggctccgggtacagctcacgtcgtggctctgttccgcccgcccttcacagatgggtcgcgacgttcaccggcagattttactacagcagccaagtatttatatgagcttatcagacgaactcttctgccgaggatgggatacagggaggctaccacacatattcagctttggctccttggtgccctggtctctcactctgagttcgacgtcgtggacttccttatttgtgagatcgaggacaccgttttggatgggattcgtgctcgtcggcagttgccctatgctcactacttgtgccacatctttgcgcagctgattcagcctcctcggtttcagggcacacttgtttcctcttgcctcgtttttggatcctaccgtcctgcgcctaacgaatacaagctgaatcatcaaac

SEQ ID NO: 29313 - DNA, 441 bp, Zea mays
  Peptide Sequence Number=SeqID_72688
atggcatgcaccgcgccccattccttccgtgcccctgcccccgtcctctccgccgtagcccccgcccccaccgtgcgcgaatgccgggctaaaggcgggggaggtgatggtggagcacctggtccacgtggtctgccggtgctgggcagcggagaccggctcgaggccgggcgtacttacctcatcgtacccgtcgaccgcctcccctgcggcgagatgggcggggtcatcaccgcgacgtctcgtgcagtagggacgacagcggggagatgtcaagaggggttacctcaagacggacgaggagttccccaagagggacgagagcaggggcacgtgctgcgtcgtagcccttctccgaaagggtggactgatcgtctccaacgctggagactgtcatgcggtgctcagccgagcagggaaggcagaggtgctcacctctga

SEQ ID NO: 29314 - DNA, 2783 bp, Zea mays
  Peptide Sequence Number=SeqID_72689
agtttgcaaaagaaaggaggagggatacgacatcctgggcataccaaattctcaattctatgcttctcatcctcctgggaggtccgatggtcagaggtgagcacctctgccttccctgctcggctgagcaccgcatgacagtctccagcgttggagacgatcagtccaccctttcggagaagggctacgacgcagcacgggaggcggtcgacgggtacgatgaggtaagtacgcccggcctcgagccggtctccgctgcccagcaccggcagaccacgtggaccaggtgctccaccatcacctcccccgcctttagcccggcattcgcgcacggtgggggcgggggctacggctgcgggatggggaacacgctggggcgccaaggatgcgatgagaacagaggcagggtcacgggctcgtttgtggacgcagatggaaggtgggcatggatgccgagggctgtgggacaggggtggtcgcaccggagaggacgggggcaggggcacggaaggaatggggcgcggtgcatgccatggccgctaagtatggaatgggacgcgtataccatggtcgctgatctcgccttccatggaagggggcgaccaaccatggaaggtcgccgtgtgtcgcgcctgctccgagtttggaaggtgatccacatagcccccgcctgcacgcacgtcaggggtcgagcgacggcacgagtaggggtcaggcgagggcgcgggtcgcgtccaggcgggggcggcgccgaccagtcgcctgaccgtacatcggtcggttcagcttcagcgccgaaaaagcatagcgcttcctcacgaggccggcgccgtaacttctcgtcgtcaacgtgcaaggattttctccgcaagtttgtggacagcgagcttctgacgtcaagcctagaggactggttctccggtcacagcgaagattgtggtttcaggaagccaggtttcgacgttcctttcgagcttacagagttacacaatttcgattacgctctggagggcgttacttttcatcagctagcgttaaaggactgtggcaaaactttctggggtcctgatgaagcgatgccgttctcggttgcctgtgtacacagcacgagctccagattttatcctgctgagaaggctataagcagtggaaggctcgatggtgtttgcgcgactgctgtgctgctgaagaatttgaagccttcacaaggaaggtgggatcatatcgtcgtgctggctttgttgagacctgatgtcggaatggtttccgcacagggtgacgaggagccgtctcctgctgtcttaggggaggcactgttctttgctctgcgtgtcctgctatctcgaagcctcagcaagtcctccaccgttcttcgcaattcggactctgtttacgtgcttctttttgattcacagtttggcggagtggtaaaagtgcaaggtgatttgaacaggctggattttgatctcaacaacgtttatgactgtgctgctgaatggataaagaaacattccagaatttcagtctgttccgtagaccgagtatggaacaaacttgggaatgctaactggggagacattgggacccttcaggttctcatcgcaatatttcactcgatgatccaattttacggagagcctaagtattctctcgatgaactggcaacggaacatagttcaaggctacagagccgaagatcagaaagacatctggttgacagacaagctaatggcaatggtttatttcgattccaacagcgaagtcattctcctgaaattgttgagttacaggaggaagcagcagttgatgtgaaaccacatgaaaccttaaggcttgaaatagggtctgttgtattgatggatgatgcttacacacagaaaggttttcaaatcagtgacatcctaacaggcagtgatcctcctatttatacttctgctcctgtggaagaacctaccaaaacttgtttgctgtatgtaggctccagcccttctcatctggatccggcatgggaggatatggactcctggtaccaagtacagaggcagacaaaagtactgaccgtgatgaagcaaagatgcatttccagcagatatataccacacatggaatcgtccggacgggtcatccatccaggcccatgtaacaaccctaactcaaatgcaagttgtggtcatccatggtgcagtactccaatgcttgtcacctcaccagttggtgagaccatttcgaatctgatacggaatggattgtttggtgccgaggaggctctgagatgttgccatgactgtttatctgctcttgctgcagcagcatctgcaggagtccgtcacggtgatatccagccggagaatgtgatctgtgtcaacaatggttcaacacatccgtattttgtgcttattggatggggccatgctatccttgaagatagggatcgaccagtaatgaatctattcttctcgtctacatttgcgctccaggaaggaaaactatgtggagcgtccgacgcagaaagtttaatctaccttctatatttctcttgtggcggagtttgccccgaccttgactctgtcgaaagtgcacttcagtggagggagacgtcatggtctaggagagtcatacagcagaagttgggcgacatctcagcagtgttaaaagcttttgcggattatgtcgacagcctctgtggaacttcgtacccgatggactatgagatctggttgaaacgactgcgaagaacaataaacgaagatcatgggaaggaggttgacacatcctcgagttaa

SEQ ID NO: 29315 - DNA, 756 bp, Zea mays
  Peptide Sequence Number=SeqID_72690
atgtggagacttggagacgtgcgctatccgggcgagtcgtcgggctcgcgcgggggtgaaaaatccgagcgcgctgtactcccgtcgctggcgacttcgatccatcgcggcgagggggcctcgcggcgctgctcgtcggcggagccgggcaagctgggctcgaagaggccgtgctcgagcgggtccggcggcggaccgctctcggtggttggaggcaaggaggtggccccgcgaggagacaaagctcgaagggtccggtgcaaccgtcggtgttcgtcgccgtcgaaccgccatcgcgaagaagcggagaagatccgcggcgccgacgaaggaagatctagggtttatggttacgccaacacgcattccatgcttgtaggcttcattcagcagttgaccatggattcggagaacgcaaagctccgaagagcactcgctcatttaatcagagtagtggaggagcgttgtgccgacatcatcgatgtcgtccacggtgccttccaaccagttagcggaccagtcttgaatgaaatgaattgtgcattagttcagatcgaggacctcgccaacgaccttgatcagcttgcactggaaacagactgggagatggagcacatggccccttcaccatttgctgaatcatcacaaacagaggatgagcttctgattgattatgattcagagttaaacaatgacgatttcgtcggctacgacgacggccgtgactactccaccgacgacacctatccgtactag

SEQ ID NO: 29316 - DNA, 408 bp, Zea mays
  Peptide Sequence Number=SeqID_72691
atggacaacgatccggcgcaagcgctcgtatggtgcccgcgagcattcaagacgtccaaccaccaggccgtcgctgccatcacattcggccagagacaacttgctgaggacatcgtgcttcctcctgcagggaccctctgcgttgtttcggatgcggaggcccaggccataaaagcttggctctgtcccaaggccaagacctcccagaatacggctgccccgcaatcgccccccagactccacagcgacgacttccctccgctcgttcaagccaccttgcctcgaccaggcgatccagggacgtgccccagtgaaaccttcgacgtcgctgcatccactggcgacatggaggcagagctagagaggctctcgacccacaccgtcgttgcctggctagggcgggactga

SEQ ID NO: 29317 - DNA, 348 bp, Zea mays
  Peptide Sequence Number=SeqID_72692
atgtctcaagacaagaaggttgttgctgagacgaagctgactgaagaggagaagctctttgaagagaagaaggctgcaaatccttacatagttgggtttatcgagtcaatggcaaaatcaaatacagagaagattactaaggagatcctggaaggcctgtctgaagataccagtgtcggtgttttgggtccgaccgcacacccggggttgcccctcaaggttcgggccgctttgatatgcgtaacaccctacgtcttggcgagtatgctttgtgtaatgggttacaagtggacccgggggatatctgtcccccacaagcccccgatcttcaggctgattttaagataa

SEQ ID NO: 29318 - DNA, 549 bp, Zea mays
  Peptide Sequence Number=SeqID_72693
atggaggcccgggcccacacgtcatgcaaccggcgcgccggttgctacgtgcgagcaactgcaccgccactcgcgccactaccgcgcctcctcgactgcggaaccagtaccgcgactcgaggcaactctgcgtacgacccaacagtgccagccaggcacatcgatcatgggccagtcagccgcgggagaaggcgcgacggtcgatgcggccaaaaatgggccgacagcaatggctgtggcaggcgggccgaagcagcgggaccgggaaagggggataccccgaaagggatccttctccgcgaaggaaacgggccccgagcccccctactgatcagaggttcaaaggctggcccctcggaggggttcaacagccgcctcagagcgctcgggctccgcgcccactactggtcagaggttcgagggccggcccctcggaagggttcaacggccgcctcaggccactcgggctccgcgcccactactgatcaggggttcgtaggctggcccacgaagggttcacagccgcctcagacacagagtgagggatga

SEQ ID NO: 29319 - DNA, 360 bp, Zea mays
  Peptide Sequence Number=SeqID_72694
atgtggcaggacgccaagagaagcttcgcacagatgaacataaatggaaacttgcagaatggaactgggattcagatgggtcaaattaagatgatagaaatcaaggaggccccggaaaaagggagaaacgggaagaccgagaccgcggagaagaaaaggaacataaattacggattcatgggtatcctttgtcgggacagtgaccccatggcaaatccgccaagaacaaagctccctcggtggaaggaccccgatggatacgaggtggagaaggtcaggatcggagacaacagacatatggttacctgcgaaaggaaactggctgttgggatcgatggggggaatcaccacagcggatga

SEQ ID NO: 29320 - DNA, 447 bp, Zea mays
  Peptide Sequence Number=SeqID_72695
atgggcaagaacaacaaacgcaagcgcgagctgactcctctatcagaggactttggcgactcggaatactcagaggaggagttctcctctgagtccgagggatctccggctcccgtctctcccccaacgtcgtccgatgactcggacgactctcaggggattgccgcggaggtctggacatacatccgggccatcgagcgctccgggctcgagggctcggatgagttggagtactcctcggacgaggaggacttgcccgaggaggacggagaaggtgacaacgacgacgacgacggaggcgacggcagcgacgacggtgacggcggcagcaggggcggcaacggcggcagcgggagcggcaacggcagcggcaggggcggcgacggcagcagaaggggcagcggcggcggcggcagcagcaaaggcagcaacaaggccagtggctaa

SEQ ID NO: 29321 - DNA, 129 bp, Zea mays
  Peptide Sequence Number=SeqID_72696
atgccgaagctcccttgcgcacagcttcggctctgttccatccttcgtttcctttgtgcttcttcatactgtgattttgactcaagtctgaagggtccaagtccgaaggtgataggacttgtgtgttaa

SEQ ID NO: 29322 - DNA, 318 bp, Zea mays
  Peptide Sequence Number=SeqID_72697
atgcagtttcgagttacttcccttcatgtagagaaccatgacgcgaacaatatgacccataatgctttgttctcattcctcttgctctctatgtttggtagtgtgggacatcttagtacgactcatgagatttgtactaccgtggaggaattcagtgtgggtcatgatcttgtgaaaacaagtatctttgagacctacccgcggaaattaaagggtctgggaggggaaggctcgactatcatagaatcacccaactatgagaccctcattgtggatgagcttttcaacaagttgaagtccaccgagagcgaccactag

SEQ ID NO: 29323 - DNA, 330 bp, Zea mays
  Peptide Sequence Number=SeqID_72698
atgactttggagataagtgatgacattgtaggtgttagaagaaggaaagatgttagtgatgacaaatttatcacattttattggctaaaagtaataatgggagccattcaatatagaaaatcaccaaaaaccaccatctcggactcgtcgccaacaaaggagtggtcgcccacggcaacaatgacgtgcagcgacaacgatggtgccagaagcgggacacgatcatcaggcatcgtggggaagttggtgatcgccgatgacccgcggaggcgacgctgcctcgctatcatacctcctggccgcctcctcggcagtgtcgaatgtgcctag

SEQ ID NO: 29324 - DNA, 360 bp, Zea mays
  Peptide Sequence Number=SeqID_72699
atggcgggcggaattgagctcgccggagctaaggagagggggctggccggtgaaggattcgagttaaggatcaaggtgaacatccctgatctttggctcaaggctacccttgaagcacatggccatgatctgagttccacaactacaatgaggacagagtcgcacgtgtccttgccgagctggggcaggagcgcgtcggcggcggagaacggggagagggtttcagcggcagagtcgcacgtgctgtctcgccgagtattgcccaaaggatggagaccaacaaccccaccaccaaatgagactcgttaccagcgaaggagtggtcgcccacaatgtgaggatcaagaaggggattgctga

SEQ ID NO: 29325 - DNA, 408 bp, Zea mays
  Peptide Sequence Number=SeqID_72700
atgaagccgacgctatgctcaccacggcaagacgcaccttcaccatcatcatccagatccaggtcatcgctggacctctacctcctcagcggctgctcgtttgagctgacgtaccatatgtcgacgctcgtgatggaaatagagcgccccttgatagttgacatggcggcgtgtgccatggacgagctcatccggctcgcccaagccgacaagcaaatttgggtgaagggaatgcccggtgacgcgagggatttctcagctgagacgcctaccgatctgtttgtttcctacaaacgcttcccaaaagttccaaatgattcttccacctctgccaagttccccagaatccctagtttgatgctgcccctgcccattgattggttcttgtttgatttctctgttctgtag

SEQ ID NO: 29326 - DNA, 697 bp, Zea mays
  Peptide Sequence Number=SeqID_72701
atgaacgcgctctctcgcgaagcgtgccggcactatgaggtcttcgaccaagctgatgaggatttcgagcgcgatatctacaaggttgaagaccctatggtgaaggaatccgcgggagccctctacgaccggatctggggcccccacggtcgggaggtggtcagggagcgggccgagaacggcgaggggtcaagtaatgcggcgcgtggcgagagggtggatgacttcggggctttgaacagcgtgctgcctgacccggagccgaacccggcggtggctgtgtccgaggccgccctgttcaagatttttgggcctgcgcacgcaaccgctactactaattttttggcggcttcgatcgtggatgatggtaataaatcgaatgggtctgcatctaagttctctaattttggtgactctgggagctcggttgagtggactgaggagtcgtcggatgaggacttggactactttgcggccttggatgtggcagcggcggaggcttcgccgcatgctgcggatgctgaagttgtgcctagtccgagtactgggcgtaggcagcgaagggcggttgcgaagcgtagagtgagtggggcggacggcggtcggcttcgtgtgagtagggctggcaggcaggaactattgtccttgccggccgctgtgagtgcgggtgagggggagttgcgaagtctttttgcgg

SEQ ID NO: 29327 - DNA, 1635 bp, Zea mays
  Peptide Sequence Number=SeqID_72702
atgtcgacctcttcttcttctgctgccgctacgccgtcggccgacgcgtcgtctgaggagacgctgagcactgtggcggcggaggagttgcgcgccggtgatacggtggatttcgcatacccgccgtttgaagtggcggaggaggatgcggacgaaggggcccttcggtgcgccgccggcctgagcagcgggcgcgatttggtcgaggagtttgtggcatacggggtatggcctttggcgcatggctgggcgttgggcgaagtatgcccttgccagatgcattcccatggtgggaagctggtgcgaagtcccgccttcgcgctggatctgcatagccgcgatccggccgcctttgtgcgtgaggcggaggatggggctgtgcggatcgtcgatcggtacgtgccgaagacagagggccagcgtagctgggatattcgcgggactaatgatcgcttggatagggttttcgagttgaaccgtctgccgtatggcggttatcccggccaagacgatgtggatcgtcgcgggaagaaaccggtggtagagactggagacgaccccgcgccggcggccgccccgtcctctaagaagaggaaactaggtattgctatgggaggactgggggtttctgatgcttttgctagggaattgatgaggacatgcgcggccccggggggaaggatgtcttcgcccgagctccgggagtcttcggcgcggatgctgagggttaccgggggttggtggcctaggaatgttcctatcccccgcgcggccggcgaagacttttttacatctcgcatggttcgtgattggaaagtgtttccttacgggcggaatattgctgctgttgtgtcagcagtgatggacaaggatcgtcagggagctgcgcagaagcgccaggcggtcgtcaggcttcatgaggccaggtcgaagaggccgcggggggctgcgaaggctgctgcccctggcggaagccagccgccgctggcggcgaagtcggccgcccctgcatccagcagggcgccggaggctgcgaaggctgccgccgccggtggttccaagtctgcgaaggccgcccctgtgtccagcagggtgccggaggctgcgaaggcggcccgagagttgccgccgccgggcaagcgcgtcgccgacttcgccaccgacattagtgtggacgattatcttgttgggcgaagggcagtgttcttagtgccagcggcgagataccggcactcactgccgtcagggtcgaggcgggtgctgcggctcacttcgcagaccgcgcggcgtccgggggccctcacggcagttgtgtctgccgaagccgagagacttcggacgcaacatgctgacgccgtccgggaaaagtcggccgccgacagtaaatgccgcaagctggcggataaggtggccgcgctggagggtgagaagactgacctccggtgccaactggcggaggagaggaaggaggctaatgaggccctcgccaaggcgcagtctgcgcaggcggaggccaatttggcacgggcggagggcagtcttgctaggcagcggcgccgagcagttggaggagcggctcagcgctctgcaggcccgtgtggagagggccgaggcctcgacgcgctcggaggctga

SEQ ID NO: 29328 - DNA, 279 bp, Zea mays
  Peptide Sequence Number=SeqID_72703
atggttcagtaccctgaatcagatcagaccgccagcgcagccgcttcatcgccgacaaccgctcctcgccgtgattcgcgccaccaccgtgggattcgcgtcgccgatgacccgataaggccgccagaaaacgaagaagagatcgaagtgaccgaagagaagacaccaccaccttcggaatctcaggccggaagttgtttctactttgatatttgcgggtccgagcctgactcacctactaacgaaggcaagccccggtgcatttgccaccttccttga

SEQ ID NO: 29329 - DNA, 411 bp, Zea mays
  Peptide Sequence Number=SeqID_72704
atggccacttgttccgccaacgccgcaacacacaaccaccaccgacggggcctcgacgggtgtatctggggaatcgtttcggtgcactggtggtctgcgtggggtctccgggctctggtggcgatccgggaaccggtaattgctcgtcggcacaacaatttcaccgctgggccgcactacctcgtggatgggcctcttcaccgctcgaccatcgcaacgtcagacaacgtgacctccgccgtactcccgctcttccgtggtcgggcatcacctcacctcggctggtcacaagtggtacggtttaattggcaatacgttctcgggatggccggatttgaactccggcggtccgccgccgtgagtggtgctggcaccgcgggtgtcccttgtgtctgggcgaggaagaactga

SEQ ID NO: 29330 - DNA, 795 bp, Zea mays
  Peptide Sequence Number=SeqID_72705
atgtcgttggcaatacagccaaacagatcacattcaagggcatggcctccgcgatcatcagcgcacgaccgtcccactgcccatgatctccagcgcggacactttgctggcctgaacggagccgttgctgtggcacaagatgtcgacgaactcagcgatggggatgtccggctacttgtcgaaaataggctctccatcgaagcttgggttgggcatttggtcgaacgccttgagccgcggagtgaacggaggagacgttggtgtaggggaaacccatcgtcgaacacttggtgcacgagttactggtggtgcacaagcaacgccagtgcccttcctctgagcaccgggaaccttgtcctcgtatctgacccagcagcagtagcatcgccgctgtggcagagcttcgactacccaacggacgtcggccttcccggtgccaaggtaggatgggacaaggcgacagggttcagccggcagttcgtctcgaagaagagcctggtcgatccaggtcggggcgtgtactccatcgcgatcgacgccgacggggtgttggtggtcagaagccgcaggcaccccttcgtggtgtactggacatggtcgtttgggaaactagaggagctcgtgtcggcgctgaccgcgctgctagagatggacccacggacgcgggggaagcccacgttcgtggacaacgaccaggaggtgtccttcacgtacaccttgctggacgagtctgctagtgaaaactttatcgacgatacgacatataataaacccgatttttcttgttatcagtga

SEQ ID NO: 29331 - DNA, 657 bp, Zea mays
  Peptide Sequence Number=SeqID_72706
atgtcgtctgatccagaggaccacatcaccgcagtgcacaatagatgcacgaggacgccagtgaggggcagtcgtcgacatgggcagcgcccgccgctcggaggatgcagaggacgcggttggaagaacgtagggacgcagcgctgggccagaggagcacatcgccgcagtgcccgacagatgcacgggacaccggcgcggggctgtcgtcgacctaggcagcgcccgccgctcggaggatgtaggaggacgcgagcgggggctggaagaacgcagggacaaagagccgggttggaggagcacatcgccacagtgcccgacggatacacggggacgccggcatgggtggtcgtcgacctgggcagcgcccgccgctcggaggatgcaggaggacgcgggtgggggccagaagaacgcaaggacgcagagcccgacggatgccgcaaggacacacggcgcggggtggctggcgactgtatgcacgcgcggagcgccgcgtctggcggcaacagggaggagggctcgagcagttctatcgaaattgctggggttcgacgaaggatgcaagaatggggaacaattggaaatattggtggtcccacgtgtaaggaagtgaacattgacggaaacggcgtggaaggacagctaccatgttag

SEQ ID NO: 29332 - DNA, 399 bp, Zea mays
  Peptide Sequence Number=SeqID_72707
atgaggacctgtagcactgggcagagccgcgtgcgcagtagcaagaagggcgcctacctcagcctctacgacactgccagcgccgtgcccatcgacgggggtgggggtgggtgtagggcctggttggagagggcatgcggtgccacgtgttacgcgagcacatgcttcttccatgacgaactggtgggggtgactcgagtgaaggcggaccggcggcggcgggacgcaaaccaggaccaggtgggcgacagccggagtgcgagcagggtcggcggcggcggtgctaggccagaccgcggtccaccagctgttgtgggcgggagcatgagctggaatgggaagatggagcacggcggcgatagaaggctacgagctgatggcagagagattgggaaataa

SEQ ID NO: 29333 - DNA, 531 bp, Zea mays
  Peptide Sequence Number=SeqID_72708
atggcacagcagcctgactgcgctcccgtgctgcagctccgggagcgcagctctcgtgtttgtgttgactggcctgctcgagagcttggctatgcgcgtgcaaatttagtctctcagcctggctccacagaaacgagatcagaatccgtttcctgggagcctggctgctcgtggcgcaagtattccgtgtttaggctcaagacgcagagcagttgcgaggaagcctgcctcagaggttgcgcctgcagcgcctacacctacagcaacggtgtatgtatgctcggtgtggcatggagggttgctgaaggttcatttcaaaaaatggaccccaacctcggggccatcatcattggcgccgagggaacacacatcgacgccagtacccttggcgccaactttttctacgtgggaacccgatttggggaaagtcccagggggggccggtgctcggagatcatggcgcccaaccaaaatcaaaagaggccccgatcgggttttactcgattgctaacagatcggaaccatacttaa

SEQ ID NO: 29334 - DNA, 438 bp, Zea mays
  Peptide Sequence Number=SeqID_72709
atgcctaaatctctaacagtcacagcctactcatttggcctagatagcttagaattcggacgacgagcacgtttggctctctgcgccttcccgccactctcggctgtgtcttcaacgttgatggttgttgtgctgacaaccacatgcttggcagcaactgctaagagcgatactcttgcgcccggtgagttcctcggcatgtgcgagaagctgatctcaagcaatgccaagttcgcgctcggcttctttcggttccagcatcaggcaatcgtcccagccgcaggcaacaccagcgccagcaccaccacctcgcctagcgagtacctcggcatatgtgttaacatcatagatgcttctagagagatagcaggaagagagagtagagaagaagcttggggaaagaagacgagaacaggagagcacagaggaaggcgataa

SEQ ID NO: 29335 - DNA, 180 bp, Zea mays
  Peptide Sequence Number=SeqID_72710
atggcgcagggcggaccggcggcagagattcatcaatggcgagaaattcacagtgccccatggcttggaacagggatccactttagtaagcatttctgcaaaacagagtctttgattattgaaaagccttaccttgactcccttaaccagcatacccttgagagtcttttctttagtcgg

SEQ ID NO: 29336 - DNA, 603 bp, Zea mays
  Peptide Sequence Number=SeqID_72711
atgcccggattcgcgccctgctcgcccagattcgaccgcgactttgatttcccaaccgacgcaggagcggctaagcccacaaagagtgcgaatgggcaggtctgccagatttgttatgactctataggtgtttcagccactggcgatgtctttgttgcctgcaatgagtgtgccttccctgtctgccgtccatgctatgagtatgagcgcgaggggaaccaatgctgcccccagtgcaagactagatacaagagacaaaaatgttggtttcctagcaacttctttgagttaattaacgaattcttcttacttcctctgcacctacaactacgacggggactacaaggacaaggatggtgtcaagggcctatgcgtcgtgggcgccatcaacaactgtacctcctagctccccacctatgggagatcttctcccccataatccacttcactctaacaaaggagggaacaccgtcgacttccactggtacgaaaggaagactgttttacactatatatgcatctgagaacatcattgcatcatgccactgggcatacaatggtgttgaggaagactcaaccctagaagatcactacttcttataa

SEQ ID NO: 29337 - DNA, 324 bp, Zea mays
  Peptide Sequence Number=SeqID_72712
atgaccatagggaagcgcgagcgaggcctcaccgatgaagaaggcgggaacagggccagccatggcgtagggcggaccggcggcagagattcatcaacggcgagaaattcacagtgccccatggcttgtaacagggtgagcggatggaataggggtgggtgggaaccgttcttatgcaccgaggtcaagaagtccgcgcgggccggcgaggtacgcggcgtctgttgcggcggcaaagagtccgagtgcggctattccgaggtggacggccgagctgaccaatgggccccaccagtcagcgccgtgagcatcaccggagagtga

SEQ ID NO: 29338 - DNA, 255 bp, Zea mays
  Peptide Sequence Number=SeqID_72713
atgaacgtatctaggagctccggctgcgggcaatttcgcgccggcgttggtcctacgcggcagatccgccttgtgccgcgagtggtgctcctctgcgcgtcatccgtgatttgtggatgggcgcttgggatctggtgtagacgtggccggatctcggacgatgataccggatccaagggactgggttgcgtacagcccctgagccttcctagaattaggactcgtccagagccgtgtgataatgggaaaaagtaa

SEQ ID NO: 29339 - DNA, 579 bp, Zea mays
  Peptide Sequence Number=SeqID_72714
atggcgctccacgagctctatgacgacggcggcccacagctctcttacggcagcaggacaacgctccgccgcaccaccgatagccacgacatcacgccagcaggatgcccagatctctccggctaccacatcggcatggccttctcagagaaggttggccgcgcgggaccgaggacgggacaggcgctctcttggggccgctcgcttccctcacccgcgtggacgcttgtaacccccctactgcaagcgcacctgacctgggcgcgggacgaacacgaaggccgcgggacttccacctctctcacgctcggctccgaccgcctcgcctctcccccctccgcgctcgcccacgcgctcgacccatctgggctggggcacgcagcacactcactcgtcggcttagggacccccctgtctcgaaacgccgacaaccctgctaaactcctcacaagacttttggttagtagaaccaaatattatgtcgtcgacataaatttggcacacaaagagatcaccatcacaagtcttggtaaaaagagtgggatcagctttcccaaccttgaaagcattagcaattaa

SEQ ID NO: 29340 - DNA, 411 bp, Zea mays
  Peptide Sequence Number=SeqID_72715
atgggcggctcgctgccgcccgctccaacacgctccaaggccctcccctgcgactcgggggctgggtcccgcatgtcatgcaagccggctcagggcagaagaagccaaaccgccgcgcatgggaccggggaagggggataccccgagagggatccttctccgcgaaggaaccgggctccgcgccccccattactgatcaggggttcgaaggctggccccccgagggttcaacagccgcctcagatcgcgtgggcccgacacccactactggtcaggggttcgaaggccagccccccgaagggctccatggccgcctcaggctactcgggctccgcgcccattactgatcaggggttcgaaggctggcccccgaagggttcacagtcgcctcagacaccgagcgagggatga

SEQ ID NO: 29341 - DNA, 513 bp, Zea mays
  Peptide Sequence Number=SeqID_72716
atggggaccctccctgacgggttctttaccgagtgtcttaggtggcactcggcaaagatggatcctttgccgagtgttgtcgggcaaacactcggcaaagattactactttgccgagtgtccccagggacactcggcaaagtcgccgtctccgtcactcggcgccgtaacggttgcttttctttgccgagtgcccgagaaaaaacactcggcaaagaaggctttgccgatgcactgtgtgccgagccttctttgccgagtgcgacactcggcaaaggatttgccgagtgtttttgtggctttgctgagtgcttcgggcactcggcaaagcctgcgaatccggggagcatggatgccgaagggagccaaggaaggggagctaaatggcgtcgaaaaagaggaggcaaagggtgtcgaagagtgcttaaggaaggagtgttcgaggcatcgaggaaccatcgatggaggaatgcatccatggggagggtatcacaagggtcacctaggactctag

SEQ ID NO: 29342 - DNA, 540 bp, Zea mays
  Peptide Sequence Number=SeqID_72717
atggagtacaaagttgttgggtacctaggaacaaggtacccaaagaaggccccaagacctcccgaaggcgacccactaaccggatggcccacccgccaaacagctcggtgggaaggtccaaaaagccacctagggacggtccgccaagccgaccggcccaccggacaaatgtctgtcgagcaacccagcgcggcggggctgccaagcaacctgcccgccgagcaacccagcaaggcgggactgccgtgcaacctgtccgccgagcaacccagtgaggtgggactatcgacccattgggggagaggctgcccaccaacccagcgagatgtggctaccgaccaacctgcccgtcgagcaactcagcaagacgatagccggctctcaggaagagctgacctagtactatcaaggcacgtcgacatgatgggacatcaccgagccacacccggactatggaagcggtacctaggggactttatcaagcacgacgccagatacgtatccctgctgaccgatggagccgaacgacccttactgtag

SEQ ID NO: 29343 - DNA, 513 bp, Zea mays
  Peptide Sequence Number=SeqID_72718
atgccgacaacactgctccaagggagccccaatgccaggaatggaaggaagagtggcaaagtatttgaagaaagctcctgcctccttggaggaaaacaatgcttccgtgatgaggatcctggcagagggcatgccttgactgggaagaaaaggaaggaccggaggggttccatggatgacaacaggaatgtgtcaagaagggtgttgaggtccgacgccatgaagctgcgagctgaggctgaggcagcatgtggagcgggtgtggacgttagcaaaactgatagtttggagaggaaacactgtgaggctaatgtggaggctgaggattgcaaaagtagtgtgctgatggaagtagcctgcaatggtggggaagccaacagattagttaacttggacgcgagcgatgtctcggaagagtcaactaggtgttctgataataatatgggaatgcctggtgttcctgcaatagatttttctcaacacaatggcttagctcaaggtagcattgcataa

SEQ ID NO: 29344 - DNA, 923 bp, Zea mays
  Peptide Sequence Number=SeqID_72719
atgggcaggtcaaaggcggaccacagccccacgcgcgaccgccggtacgggaacccgggccccaacggcaggcctgcggcgaggacggcgcggaggtcgggcgggaactcgtacctcatcttggcctcggcgcgcgccagctctagctccagaggcccgaaggtggcccagcaccgcggccgcaagcggggcgaaggagtgcagcccgtgccacgagggatctcgcgggcgagatttctgtgggcggggggcgagatcggggtggtggatgtcgcgggcgttggcgcggcggcggagattgcgggcgaggcggggtcggggaatcggacgcggaggcagaacatgagccactccgctaaaattcaccggaccatccggtgtggcaccagactgtccgatgaaccaacggagcaacagtcaacttcaccaacggtcgactacgctgatgaaggaacggtggacagagcagaagtcagaagtcagaatgcacctcatgctgcccgcgtcggctatcctcgttattttgggtcgcagactagctctgaccgtcttcgtctaattttatctaacccgcctaaatccaaactgcgcaggagcagccaccccgacggttacccggcgcagcgcgtagggagcagtgctctcctagtcggccccattcccgcgggctctgcgcggccagccagcggctgggcccgcctgagcgccccatctctcccctcgatgcggcacggctgtagtagagctgctgctgctgctgctgccatgccgtcgcgccacctcgcccggcaggccctgctccggcgaccgccgctccaccagcgcagcctcttcccggcgagccccgccgaagcccccacgcgcaccctagccgcttgcgagctccgccctgaccggcgatgctatttctcctcctccatgcg

SEQ ID NO: 29345 - DNA, 361 bp, Zea mays
  Peptide Sequence Number=SeqID_72720
ctcggagacaactgatcaagccaaggatggaggcaagaagagcttcgaggtaccaagtgcatgggagaaggtcaaggaggctgaggaacccaaagccaagggtgaagaagaaggcttgcaaagtcaaggccaaggcagctcagtctggcacaccggactgtccggtggtgcaccggacagtgtccggtgcgccaggctgaactctggcgaactggccgctctcgggaattcaccggcgacgtacgactataattcaccggactgtccggtgtgcaccggactgtccggtgagccaacggtcggccgggccaacggtcggccgcgcgatctgcgcgggacacgtggccgaaccaacggctag

SEQ ID NO: 29346 - DNA, 282 bp, Zea mays
  Peptide Sequence Number=SeqID_72721
atggctcaaaaagaagaggatgaagatcaagacaatgagccacctcatgaggaagacattgaccaaagggagatgaagatgatcaagataaggaaggtgatcaagaaatttaggatcaaagaccaccacacccaagagtccaccaagcaattcaaagagatcaccccgtcaactccattcttggtgacatccacaagggggatagaggatgcacttagagacctagactgggtcgtggcaatgcaagaggagctcaacaacttcacgaggaatgagctatag

SEQ ID NO: 29347 - DNA, 378 bp, Zea mays
  Peptide Sequence Number=SeqID_72722
atgtgttctccaggcctctgtcctacattaatagaagacacatggactcaagcgtggactgcaaaccatcacagagtgcacactgagcagataaccttgggagcaaactcaaataaatatgagcaagggaactttagagaaaggaagggaggagaaacaaatcaagtggagatcaacacaaatgaacatggcaatttgtttaccgagagacaaccgatcaagccaaggatggaggcaagaagagcttcgaggtaccgagtgcacgggagaaggtcaaggagaccaggaacccaaaatccaggggtgaagaagaagacttgcaaagtcaaggataatcgagttaagaagagttatggtgcatcaaggatcactacataa

SEQ ID NO: 29348 - DNA, 444 bp, Zea mays
  Peptide Sequence Number=SeqID_72723
atgaccattagtgagggactgcagtcgggctgcatgataaaaatccttgaagccgagcgatggctgaatgacgccaacccccgcgaggtcgcgctcctccaacaacagcaagaggagggcaacgcgggtgctccccatctggaggctcggaagaagggttcgacagccgccccagagcactcgggctccgcacccattactgatcaggggttcgacagccgccctagagcacgcagagtgagggatgaccctgggtacgtccgttatatggccgaggctcgggctacgctcccgaggtaccctaggacattttcgagaccagcgggaacaatttgtaatggaatcccaccgaagggaggcactgagccctcggaccctgtcgaaggggtccgggtccagcgaatcacccgtaggtacttttggagcgcgcctctgggccactag

SEQ ID NO: 29349 - DNA, 594 bp, Zea mays
  Peptide Sequence Number=SeqID_72724
atgaagttcatgtactcggcagaatgcatcagcgagcggctctaccccttgacttcggagagcccagataggaaatctcaaccctactttgaagaagctcttaaaaactacaacttcatcattttccagttttgggatagtctcttccccgccaaaatggctgggcttcgatggcataataatgtcataatcaatctctccttctctagcatcaccctcttcaatatttgtctgctcgacttcagcagtgggtgcttcttcgtcacaagtgggaaggtgaatcgccagtcgcccgcacccgctgaaaagtcgctcgcacccgctgaacggtggaccactcggcgcctgggaagtgaattactagatcgttcgtacgcgctgcgtgatgacaactcaattaaaggactaacaagtatgctaagtgttgaacaggtgcttaatgcaaagctaacagagttcaacacaaagacaactgatcaagacaaggatggaggcaagaagagcttcgaggtaccgagtgcacgggagaaggtcaaggagaccaggaacccaaaagccaggggtgaagaagaagacttgcaaagtcaaggttaa
